United States Patent Application Publication US 2005/0228172 A9 - sequence listing, part 136

SEQ ID NO: 641123 - DNA, 568 bp, Homo sapiens
gtgattatcttactttggtggttaagacgagcaaagtgaagatgtttcactttgtgcattcgatgtatggagatcttttctgtagacattttttcccccttgggaaaagacagaagtgaaggcctttccattgttcaaggttcaaataatggctccacatgtaccgtgagctcaaaacagtgttctgtggctcatgtgacccaacagatgaatgttttggtctactgaatatcccaagaagtaaaataatagttggagtttgaggaaggggcatagaaaaggcccagacccaggtcatgtgcttgggtggctagactcatctggtgttaggcttgtctaaacttgtcagaatgaacacgtgggatcaagtgcttctctggtccccrtcggcctcttacatcaggtcagtgtgagtcttttatttactcaggggcccagaatagacagtatagcctgggagactggtgccttttccatcttactttttggtccatctgtgcaataaatggacttctttttaaattgcttcacgtcttcatgtttcagagtgttcagctcagataaacca

SEQ ID NO: 641124 - DNA, 600 bp, Homo sapiens
aatgaaaccaaaatacctactaagaaaacaaacttacctccctcttaaaattttgtaaaactgcaggaaaagatattttgaaaaaaataataaaccaattaacatgagaggcattgggtacattgggtaaatacccagacaccagagtcagactacctaggttcaaatctcagctctctaccatctaccagctatgtgaccttagcaaactgtttaaacctctgagcctcagtgtcttcattttcaaaatgggttgttttggccgggcgtgttggctcacacctgtaatcccagcactttgggaggctgaggcaggcggatcacttgaggtcaggagatcgtgaccagcctggccaatatggtgaaccccatctgtactaaaatacaaaaattagctgggcgtggtggcacacacctgtataatcccagctacttggaggctgaggtggaggttgcrgtgagctgagattgcaacactgcactccatcctgggtgacagagcaagactcagtctcaaaaaagaaaaggattgttttgagggttagaagagttaatatagtaagtgtatttgtttcctattccttctataacaaattacca

SEQ ID NO: 641125 - DNA, 562 bp, Homo sapiens
gatttaggtaggtagtggaaaattacagtcaaagggttctttgactggcaggggtgggggtcacaaggtgctcattgggggagcttttgagccaggatgagctaggagaaggaatttcacaaggtaatgtcatcagttaaggcaggaacaggccattttcacttcttttgtgattcttcagttacttcgggccatctggatgtatatgtgcaggtcacaggggatatgatggcttagtttgggctcagaggcctgscaatgatcataggtgtattagtcagggtctcaaaaggaactacaccacatattcatattataattttgggagggtttgcaaagatgagggcaggaggagtgaggggtacgttgtaacggctgatggttaaattttcagaaatttttgcaaacaagttgttaaacattactaaaacgtaaatttttaaagcagaattaaataagttatattaaaaataaaggtaataaatattcaaaacatcatttcctaattactgtttaccttctactattatatatgttcttgggggtatttaacttctattat

SEQ ID NO: 641126 - DNA, 571 bp, Homo sapiens
tcttatctataccatgggaataataatcatctctactctatttaatatggatattgtaagagtaaaatttgataagatatgaaagccagcatttaaactgtatgatctaaaactcataataagatttatactgatattcatggtaacattattacactgctgaaaatgggaaacaaccaaaattgtgtgaaaatagaagcatgattaaataaactgtagcatatcttacaactgaatgttcatttctgtacacaccacacacacacacagacttccaccttttctcttctgaatgcccattatggtatgtatgcatttgtcccttgacaccattaatgagtaggatcaccaggcaayagagagtcattcagttcccagagagaggagacttactgaataaaatcaaaatatagttgcattagaggcctttaagacagctcaacttactactgttgtgtaaaaatgaaatatctcatgaatcatggagacttgcaactgcccccaaattctaattttatacgagctatttctcttctagaaatcatcaaaccatacacggtgctgacactga

SEQ ID NO: 641127 - DNA, 573 bp, Homo sapiens
acatgtaatcacacggtatgtgttctttcatattgtttccttttagtcagcatagtgtttgtgaaattcattcgtggtgatgtgtagagtagcaattcacacattttcattgctatataatattccattgtatgaatatagcaaaatgtattgattcttactgttgagggaatttttagatgattctagtttgagagatatatgtaataatgctgacaagaacattatatatttttggtgtccatctgtgtacacaaagaaacatgtactaattccactaggaattaattttccaaagtggtagccaatttacactgccaccactggtgtataaaatctccagttgttccacatcctcaccagcatttggtaacgtctgtttcaatttttgccattctgatgggtatatattggtatcttgtttgggttttaatttacatttctgataaccagtgattttgagcacaatttcatgtttattggccacttggatatcttcttttgtgaaatgcctaygcaagtcttgcccagtttttttactggactgtctttttcacgttgatttatatattc

SEQ ID NO: 641128 - DNA, 627 bp, Homo sapiens
gtagtctatgggctatagttggctgactgctggtctcttggggagacaactgagagtcacataaatgtgtaaattatgagagggtttgcaaaagaatcctgtgcagtactatgaaaaaccatcatgagagagacataamctaaaggagtcatcaggctttccagaggaagaaacattcagactgagctctgaaggataaacatgagcaggcaaagaaaaggagagctttctgaacagggcaggggctaggcaaaggccctgagaagggaaagcacatggcatgtttgtggaattaaaatcaaagagcccttgaaagcagaggaccagagagagcatagtaggacatgagacgagctgcaccctacaaagatttattggcttgttaaggtatttggtctctatcccaaatttagcaggaagctgctggtattcagagtgtttgttgactaagtcagaggaactgtactaatctgcctagctatgagaccataagatctcagactaattacagacagtcctcaacttaagatagtttaacttaaaaatttttgactttaccatggtgcaaaaacagtgtgcattcagtagaaactgtactttgaattttgatcctttcctaagctaacg

SEQ ID NO: 641129 - DNA, 627 bp, Homo sapiens
tggggcaaacacgactgccagcccctagaggccacatctgtgtgacttctgaattaattctcctaaaatatgtcaagcagaactgaataaaagaaaatgaacaaccctccccagtaatatatgagggttagaaaaggcatgagtcagcaatgtctgttgtacacagttaaaaacttttatgtattataagaagtccaaacttcctccacattaatacattagcattagactatcctgcttcagccattagatccctgtcccatcggtaataataatagctaacatctcagtgctaaccatatgccaagtactgtcttaagcattatatgtrcataatctcatttaatcctcaaaacaactctttaagttgtaccaggtactgttactatttccattttaccaatgaggagaccagagaagttaaatgacttgctggcatctcacagtaaatggcagagtttgggttcaaacctagacagcctgactccagaactcacactcttttttgggctttcttgttttatttctaaactgttatacagagtccttaataaggttatacctcatctgctttttcttttggtaaaggatagagaaattagcaagctacctgattttaagaagttt

SEQ ID NO: 641130 - DNA, 590 bp, Homo sapiens
actctgccatccaggctggagtgcagtggcacaaccttgaattcctgggctcaagcaacccttccatcctaccctccytagtagatggtagtataggcatgcaccaccacactcagctaatttctttttattttctgtagacacacggtctcactatgttgcccaggctggtcttaaactcctggcctcaaaagattctcccacctcagcctcccaaagtgctgggatttacaggtatgaggcaatatacccagcctgttgtcttattttaagaaattgccacaaccactccaaccttcagcaaccaccacgctgatcagtcagcagccaccaaaatcgagacaagaccctccaccagcaaaaagattacaagtagctgatggtttggatatcattagcatttttttagcaaataaagtacttttaaggtatgtacttttgtagatataatgctttgcacacttaatagagtttataaggtaaacataacttctatatgaactgggaaaccaaaacattctttttactcactttattgtgttagtctggaactaaaccacattatttctgagctatggctgtacttgtct

SEQ ID NO: 641131 - DNA, 553 bp, Homo sapiens
agtctttattccattttgactcgatttttgtatatggtgagagataggggtctagtttttttcttgtgcatatggatatccagttttttccagcaccatttattgaagagactgtcttttacccagtgtatgttcttgtatgttcttagcatctttgtcaaaaatgagttcactgtaggtgtgtagatttgtttctggtctattagtcgggcatgatggtgtgtgcctgtaatcccagctattggtctatgtgtcttgtttttatgccagtatcatgctgtttggttactatagccctatagtataatttgaaatcaggtaatgtgattccttcagttttgttctttttgcttaagatagctttggctactctgggtcttttgtggttccatataaattttagctttttttttttttcctattcccgggcaaaaggtcttgggtatttagatagggatgcaatgaatctgtagatgtttggagtagtatggacatttwaacaatattgattcttccagtctatgaacatggaatatctttccattttttgatg

SEQ ID NO: 641132 - DNA, 590 bp, Homo sapiens
actctgccatccaggctggagtgcagtggcacaaccttgaattcctgggctcaagcaacccttccatcctaccctccctagtagatggtagtataggcatgcaccaccacactcagctaatttctttttattttctgtagacacacggtctcactatgttgcccaggctggtcttaaactcctggcctcaaaagattctcccacctcagcctcccaaagtgctgggatttacaggtatgaggcaatatacccagcctgttgtcttattttaagaaattgccacaaccactccaaccttcagcaaccaccacgctgatcagtcagcagccaccaaaatygagacaagaccctccaccagcaaaaagattacaagtagctgatggtttggatatcattagcatttttttagcaaataaagtacttttaaggtatgtacttttgtagatataatgctttgcacacttaatagagtttataaggtaaacataacttctatatgaactgggaaaccaaaacattctttttactcactttattgtgttagtctggaactaaaccacattatttctgagctatggctgtacttgtct

SEQ ID NO: 641133 - DNA, 576 bp, Homo sapiens
ctatttgaatatccttttctagagcttcaggtgaaataacagtgatcaacataaaataatctccaatggttgagtttcagctctcacaagtcttgggccttgggtgtgtgtggttttacacagtgctccttaaattttctccccacaggctcacctgaatatggtgacctagmagtctctgttaaaccagtgaatatttctgaacactcatccaggagattttctatttgacaggcttcatttatgtgaatagctgtgccatgctaaagaattgaaggatgataaagaatactgttgggaaaaatattcacaaactatgcatctgacaaaggtctaatatccagaatctgataggaacttaaacaaatcaacaagcaaaaaccaaacaaccccattaaaaaaagacattaacagccatttctcaaaagacagtcaagcagccaaataaacatatgaaaagatggcaacatcactaatcatcagagacatgcaaatcaaaaccacaatgagataccatctcacaccagccagaatgactattactaagaagtcaaaaaaataacagatgctggtaag

SEQ ID NO: 641134 - DNA, 576 bp, Homo sapiens
ctatttgaatatccttttctagagcttcaggtgaaataacagtgatcaacataaaataatctccaatggttgagtttcagctctcacaagtcttgggccttgggtgtgtgtggttttacacagtgctccttaaattttctccccacaggctcacctgaatatggtgacctagaagtctctgttaaaccagtgaatatttctgaacactcatccaggagattttctatttgacaggcttcatttatgtgaatagctgtgccatgctaaagaattgaaggatgataaagaatactgttgggaaaaatattcacaaactatgcatctgacaaaggtctaatatccagaatctgataggaacttaaacaaatcaacaagcaaaaaccaaacaaccycattaaaaaaagacattaacagccatttctcaaaagacagtcaagcagccaaataaacatatgaaaagatggcaacatcactaatcatcagagacatgcaaatcaaaaccacaatgagataccatctcacaccagccagaatgactattactaagaagtcaaaaaaataacagatgctggtaag

SEQ ID NO: 641135 - DNA, 545 bp, Homo sapiens
atctcatatttgaacaaaaaaagtagttgacattgggacaagtgcttttcccctaaagaaatgatcagaagtacaaaagtgatgtacattcatctcttctaagctctgaaatacaaaggtaccaaactatccaatttatacatcaagtaagctatatgcagactttaaacatcccttaattatcttttctagatacaagtttcctttaattatccttgtaataaagtttctagttcaacatgcaggccaaagttcttactacttttaaaactttttaactatagaaactaatgttgtataacagaaataactgatacatgacatttaaaagcaaatataattttttttttttkgacagagtctcgctcggtcacccaggctggagtgcagtggcgcgatctgggctcactgcaacctcggccccctacccctgccccatcccgaggttcaagtgattctcctgcctcagcctccccagtagctgggattacaggcgactgccaccacacccagctaaattttgcattttcagtagagactgggtc

SEQ ID NO: 641136 - DNA, 518 bp, Homo sapiens
ttctttgcctgcagctgtaggtctagagctaccttttatggcagcgttcactcatataggtaagataagtgaggggccagcaacggctcctttggagccaagattgggcccctgccattgatgagttttctgagctagtgacagaggcagttcttctttctcaatgtggcctggggtttttgaggctgtcagagagaaactgaattcttaaatccccagggccatcactgtcttatttggtccctgcagctggggctgaaggctctgaaatggggcatgtaactagggctcctattccccttagcagtcattttcacacttgcaaaaaatgatgtattttctcaggcgggtatgtggctgccwgtagcagccttcagctaaatgaaagcattttcttggtctctggggaaccagatgctgacagatggacttccaggatttaaaatttcctaggtttgttatttgaacctaacaaaagagaaaaatccatcctggatacaattagagcatttttttct

SEQ ID NO: 641137 - DNA, 573 bp, Homo sapiens
gttcttccagaggaatttcatttactgctgggacctcacataagtgtgggtgtgcagagaagtcatttttataaaagatgacttgggaggttccattttcatattgaatgcatttgtcaattggacacagctagcaggtagaaaccttcagacaaaggaggtgagtgacatatgagtgtatgtccttgcccataggatttatcactccctctctgtggacctttggaagacaagtagagttggaaggatgaaaggagtctctgtaatgactctgggccttcttaggattccacctggrttcacagtgttgattagaagtgatgcctgtggaaaaagagagcaaagtgtgggccctgggttgctgtgtctgatggctgagacttgtgtatgctccaggtagtgacatttctggccttagagacggcttttcatcttcatctcattgcaagtgggtgccagaggctgaggatattaaaatgaacaaatatgctctattcctcaaaaagctacagactatatacttttataaatacaaatgtatacaattaatttattacttgggctgagccttac

SEQ ID NO: 641138 - DNA, 573 bp, Homo sapiens
gttcttccagaggaatttcatttactgctgggacctcacataagtgtgggtgtgcagagaagtcatttttataaaagatgacttgggaggttccattttcatattgaatgcatttgtcaattggacacagctagcaggtagaaaccttcagacaaaggaggtgagtgacatatgagtgtatgtccttgcccataggatttatcactccctctctgtggacctttggaagacaagtagagttggaaggatgaaaggagtctctgtaatgactctgggccttcttaggattccacctggattcacagtgttgattagaagtgatgcctgtggaaaaagagagcaaagtgtgggccctgggttgctgtgtctgatggctgagacttgtgtatgctccaggtagtgacatttctggccttagagacggcttttcatcttcatctcattgcaagtgggtgccagaggctgaggatattaaaatgaacaaataygctctattcctcaaaaagctacagactatatacttttataaatacaaatgtatacaattaatttattacttgggctgagccttac

SEQ ID NO: 641139 - DNA, 569 bp, Homo sapiens
tgatgacaaaaaagggcttggtgaactcaaagcacagcacagtggccggtcatctgcagggagaagggagtcaagactgcagaggcagcttggaggcagaacagggaagtagggctgctgaagagcttcttggaggggaagggggtgaagttgttttctagtcagaaggggccaagggagagaatcaggaacaacaattaagaggcactgggtcccccaggtaatctcatttaccttyaaaatgttaccctcttacatattccttaggttactcagttgtcttgtgttcccaaatctctttgccttctggaaggttaacagccactggtaaatggatggcaaaggatttatttgatagtcgtggaacagggtcacatggccacagtctatttttagccacctcagtaagactgaatgaagtaagatgtatgaaagtgttctataacattctaaccttagaaaacatagggaacacttattgttaagcagttaatgtttgtgcaagtcatttggcaattaattatgaattacctgtgacatttcttctctagttttctggaattgttatt

SEQ ID NO: 641140 - DNA, 642 bp, Homo sapiens
aatcattgttccttacatcaatatagctctgattattattgcatggcccttttgaggtaagcatgggtgtactattatgaattgtgtgatgatgacttgattttcccacagttyttctgcttcagctactttgacctttttttatatgtaccatcacctgtgatgcggtttagattttacattgtgccaaagtcattattttcacaataaacatactgtactctatttaaattattctgggacaattaaggtagtactaattggtataggatccatcaccaatacaaacataggcttggacatggaaattgtgggctattgtttgaattaagacaagtccatatacactcatcttttctataataccgttgaaatgcaaatggaaaagtaagaattttttgggttgaatgtttggaacctcaggcatgtatttttggaactccaggcccatggaagccagtttggaaacactgcttcagttgcttaagtatgacctctggagtcagatggagctaaatttgaactccacctcagtttctacatttgtagcataaatatggtaatattatcttcagtattagtttcctattgcttctataagaaattgctacaaactgggtggcttagaacaagaaacaatta

SEQ ID NO: 641141 - DNA, 616 bp, Homo sapiens
cttctgaggatcacggggatgaaaggcrtgaactgggctcacacagctagtaagtaaaagaatcgctaaaatctaaggtgctggatttaccagggcagtggtctttccagttgataattctgagagaaagctgtggggaaagaaagctgaaggagcccccgggattgtctgtacttgtggctttccatagatgggagagtgaatttcaaaaggtctgtctctggtatcctgccttcccagttatgaagatatgcctttgaaaacttcctcatcttagcagtgccttctagtgctatatcccattgaagttaactattccaggccttattatttttccgatttaaactttaggggattcagcatttagtgctcacctttttgttgttcatacactttttatgtgcaatttcattaaaaggtgaattccattgatgacttacctagcaagcttattgaggaaaatcctagactgttgatcccaactatgttgagtgatgtggaaacaatgagggtttctttaggtttgatcaacatggggcaggctgggagaaagctcagtggtcatatttctggtttctaagaatttgagtttttgagtgtgcaagttatcccaggg

SEQ ID NO: 641142 - DNA, 616 bp, Homo sapiens
cttctgaggatcacggggatgaaaggcatgaactgggctcacacagctagtaagtaaaagaatcgctaaaatctaaggtgctggatttaccagggcagtggtctttccagttgataattctgagagaaagctgtggggaaagaaagctgaaggagcccccgggattgtctgtacttgtggctttccatagatgggagagtgaatttcaaaaggtctgtctctggtatcctgccttcccagttatgaagatatgcctttgaaaacttcctcatcttagcagtgccttctagtgctatatcccattgaagttaactattccaggccttattatttttcygatttaaactttaggggattcagcatttagtgctcacctttttgttgttcatacactttttatgtgcaatttcattaaaaggtgaattccattgatgacttacctagcaagcttattgaggaaaatcctagactgttgatcccaactatgttgagtgatgtggaaacaatgagggtttctttaggtttgatcaacatggggcaggctgggagaaagctcagtggtcatatttctggtttctaagaatttgagtttttgagtgtgcaagttatcccaggg

SEQ ID NO: 641143 - DNA, 603 bp, Homo sapiens
caagcttattgaggaaaatcctagactgttgatcccaactatgttgagtgatgtggaaacaatgagggtttctttaggtttgatcaacatggggcaggctgggagaaagctcagtggtcatatttctggtttctaagaatttgagtttttgagtgtgcaagttatcccagggaacatcttaaattgttttttggggagcttggacctctaatagcaattgtacttgcaaaatgtttctaaaagtacaggtgccgagcagacattcattcagaagtggccaggtatggtcaagaggtcaagggcagtccttttctcttgtgttcagggtgacttagtcaagattttctattacttattagataactttgatttcttyttttgcaacataattcctagctcattgtagtacataaattgcacgaagaagaatcttcagacagaataagtggttgctttggaaatggggtaaatttagggtccaaaagaagattccaagtcataatcagatactttcccttagtcatggaaaagtgtaattttactgtaattccatgtttatggagtataatataaatgacaatatgattttatatttgtaatctc

SEQ ID NO: 641144 - DNA, 626 bp, Homo sapiens
agcatcctataatacatgcacactgatctctaagcttctgttgtgcaggagctgggtgttattcattgttgtattcttggcctcttcaacaggatctgacacatgaaatttgagaaaaaaatttagtgaagtgataaaaccaggaagtgtatagattttaaaggaaaagtacagaatataagttttatgaaactgcacagaaatggggaaattcagttccatggagagagatgcaattacttttgtgtagtattaatttaagaaagaactttctgaaactagawctaataaccatggaatgaattactacaagattgtcacaaatagaagtaagttttctactcgaaggtattcaaaagagaactggtgaatctacctatcagaaatgttttctactacatataacaaacctatgtgtgttctaccagatctcagaaaaataaaactaaacatgtgggtacttgaaaaagtttgtggaaaaatgaaattaaaagataaacttatttctcaaaataaattccatcaaggtcaagacacttttgtaagcaataatactggtcatttagttcatccctaaagaactgagagtcctgggaatttaaccaggccaatgcagtctttttcac

SEQ ID NO: 641145 - DNA, 561 bp, Homo sapiens
gtaagcaataatactggtcatttagttcatccctaaagaactgagagtcctgggaatttaaccaggccaatgcagtctttttcacattgttaactgaataaaaatgggtgccttccatagatttttttaagattmggaaacaaacagaagtcagaaggagccaaatcaggacggtaaggtggatacctaaaaatttcccatcaaaactctcctcatatttcccttgtttgatgagaagaatgagcaggagcattgtcctgatggagaaggactctctgggaaatctttcctgggtttttttctattaaagtttttgctaactttttcaaaacactctcataagtggatgttatcattgtttggctctccagaaagtcaacaagcaaaattccttgagtattcaaaaaaaaattgttgctatgatctttgcccttgaccaatctacttttattttgactagaccaattccatcttttggtagccattgctttgattgtcctttgtcttcaggattgtattggtaatgacatgtttcatcttctgttataactcttcaaagaa

SEQ ID NO: 641146 - DNA, 374 bp, Homo sapiens
ttattgagcagaaattattatctctataattggtggttctggggctgcttctgaatttacacagagccgcattctctactgaaatgtcaggaaatatgctacaagcaacacttgccaagacagaaagcagacgtgcccctttcaaaagcccttcccacatttagtgaaggggtttcctaatgtccatagtcagtcttccccacccaaagagttgtgaaaaggggaaatatggcttttggaaataaccctccttcttaactttctctttcttcagaagtgccccatttaatagcataaggctttactccttgagmatggactcacacaaagtttttcgggagtaattccccttcctagaagcctgtgaattctac

SEQ ID NO: 641147 - DNA, 482 bp, Homo sapiens
tgcaggtgcaggtagactgaagtttggaagtcatgtatgaagcatcattgccacagggatgtaggtagggaattgacaatgtcagctaaaaggtcctatttctcattgatttattcatgaattacctgcttccttaaaaagtgatttgaatctcacaaacgtacatttagtgagataaaatcgtattgcatggtttgtaataaacctaagagcctcctaacagtgagaaattttaaactatatatagattcttgaagaggttaatatgcttgaatagtttatggatcttcattataatcacaacataatctgattagcaatctttgacaaaagaattttctaaacaaatgcaaacttcagcccaagygctatttgaacacctcaaatactagctaaccaagatcgaatttgtaaaggattttgttggttggtctgctgcttttctatatgacagtaactttttaagtggtcactgcacagta

SEQ ID NO: 641148 - DNA, 537 bp, Homo sapiens
ttattcaagcactcttctcctaattattaagtttgggtgtatttcaagggacatttactccatctctgagtcatttactttcagttcattcacatctagaagtagactgcaagaaatatttgcttcttaggtggtatcagagcgaccacataaccttaaaactttgttcactgggccaggagaaaatgaaaatgtcagttttcaagcaaatttttgatctttgagaattaaagaatgggttgttggcaaatagcagttgctttctaactttactttctgtgctaaaatttgagtcactccacacacttaggracacacaaaaggcaaagaaatgagttaattttgttgcctgtgccactctctcttctgccctgtattcatgtccctgggtcagtattcatgtttttgccctgaggccaaactgtgctccttttttttttttcatgtagcacatttccacatgaacctcttagaaaaagtcagcattcgataaagaaaagccaagtcagaaataaatcataatattaagttacagag

SEQ ID NO: 641149 - DNA, 581 bp, Homo sapiens
acgtgcccttcttaccacctggcataaatctggccttttcccctttgccttgtctctggctctgttgtgatttctcccaagcaatagggtgggtttttgctttcccaactccccttctgcttttattctctctccacctgtgatagacccaagtctaccaaccacagccaataaacagctgactgcttccctgcttgggttgctgtcygaggtactagacagtgatgggctctaaatagagtaaaaatgaatacctttgtatggagtcatttttttgaggaagtacattctggagttgcccaatcagcagaaaatctggtctggccttgtgtttttctgtctcagaggagagatcttggtcccatggtttgtccagcagcaatggccttcatggggaaatcagaactactggttgtgatttttcacgcattatgtttatatccttttctgttcacaataataaatggcaccaaatatttatttagtaaaattttcctctacacaaagtaggagtgacagttaacttctcagccaactagaaaggcctgagagagaatgtctttgcttttttggaatgagat

SEQ ID NO: 641150 - DNA, 584 bp, Homo sapiens
taaattataaatatgatgtcatgatttttcaaatatatatttaaagagcctggaatgtccttgaagcaatgtaacctcaatagcaattaatattcttcatatccaggtatggccctattaccattcccatgsgggaaaagaaaaacacacacacacaaggctcctcagagaaatggttaatttcaagtctggggcagaataagagcaatgtaagcttaggacttctcgcactggaaagcaaggaagcctgcaaagacaaatggggctgtgacaaacagaccaggagccagtgtggagccgaccataggtcaaagttgtgacaatctgaacctcaaaaagaataatgagtttagtggattgaaacagattgaatcaatgaaaagtcaatgagtccataatgatatttttaaaagaaagtcatagaaacctcattcgtcaccatttgaggtgggtattaaaacaactctttgaaaactgggaaataaagtgaaagaactgatcttttattttctgcctttctgctagtaactgggtttcagggtaacaaatttgcccacctggtgaagaaaccttttttacataga

SEQ ID NO: 641151 - DNA, 668 bp, Homo sapiens
ctgacttcccagcttccaagtgctcagccgcactctggactggaggatcccttctgcccagtggacagggacctctttcagcagctccttccttgtcattgatccccagggcttcagttcctgtcctgaggatccagaaggacttaggtgacgtaaaagaggtatgaaatgaagattgagtctctgggaaaggatgcatgatgtcttatcctaagctaagcctccatgtctgggaagtggggggaggctgaatgcacagagtgggaaaaatattctcagtggttaaggaagcmagtgactcacctgctctgaccttcatccatccactcccctggccagagtgacttcagggaggaggtggggtggaagagatttcccagtctcgttttttttttcttgagttttttaagacctcttacttatgatgccccttccatccatcacacttctcccaacagcttagctaacctgcctggaaaaaacagtcatcaaaaagcacacagcatgctaagtagaaaatgaaaaagcaggaggtgcctccactcttccagcagcttttccactgggttctgtgcctaaggagttgctccctccagtccgcagagtagctggaatgcattttcaaaattcaactttaaaaactgaagtggtcgggcgcggtggctcac

SEQ ID NO: 641152 - DNA, 668 bp, Homo sapiens
ctgacttcccagcttccaagtgctcagccgcactctggactggaggatcccttctgcccagtggacagggacctctttcagcagctccttccttgtcattgatccccagggcttcagttcctgtcctgaggatccagaaggacttaggtgacgtaaaagaggtatgaaatgaagattgagtctctgggaaaggatgcatgatgtcttatcctaagctaagcctccatgtctgggaagtggggggaggctgaatgcacagagtgggaaaaatattctcagtggttaaggaagccagtgactcacctgctctgaccttcatccatccactcccmtggccagagtgacttcagggaggaggtggggtggaagagatttcccagtctcgttttttttttcttgagttttttaagacctcttacttatgatgccccttccatccatcacacttctcccaacagcttagctaacctgcctggaaaaaacagtcatcaaaaagcacacagcatgctaagtagaaaatgaaaaagcaggaggtgcctccactcttccagcagcttttccactgggttctgtgcctaaggagttgctccctccagtccgcagagtagctggaatgcattttcaaaattcaactttaaaaactgaagtggtcgggcgcggtggctcac

SEQ ID NO: 641153 - DNA, 668 bp, Homo sapiens
ctgacttcccagcttccaagtgctcagccgcactctggactggaggatcccttctgcccagtggacagggacctctttcagcagctccttccttgtcattgatccccagggcttcagttcctgtcctgaggatccagaaggacttaggtgacgtaaaagaggtatgaaatgaagattgagtctctgggaaaggatgcatgatgtcttatcctaagctaagcctccatgtctgggaagtggggggaggctgaatgcacagagtgggaaaaatattctcagtggttaaggaagccagtgactcacctgctctgaccttcatccatccactcccctggccagagtgacttcagggaggaggtggggtggaagagatttccmagtctcgttttttttttcttgagttttttaagacctcttacttatgatgccccttccatccatcacacttctcccaacagcttagctaacctgcctggaaaaaacagtcatcaaaaagcacacagcatgctaagtagaaaatgaaaaagcaggaggtgcctccactcttccagcagcttttccactgggttctgtgcctaaggagttgctccctccagtccgcagagtagctggaatgcattttcaaaattcaactttaaaaactgaagtggtcgggcgcggtggctcac

SEQ ID NO: 641154 - DNA, 458 bp, Homo sapiens
gaacataatggttgctttgaagtctttattaaatctgacatcagagccctctcacaggcagctcctgttgcctaaattttccctgtgggctgatcacacttttctgtttctctgcatgtctcataattttttggtgaaaactagatgctttcagttacatactgctgtaggcactgatacccttctccctctgtggggcttgtttttgttgtttgcttagtgatttggctggaatattttagtgaagtctaattcccccacagtgtgaagcctctagtgccactcctcaaagaatacagacttaggtctgtgcccagttacccttgaataacaggggttttagcaagactctgtctctttccctgacctgtwaaactgtctgcctcatttggtatcacacccagcttttaggctctaccagtagctggctgattgctcacttatgccctgaagcataa

SEQ ID NO: 641155 - DNA, 530 bp, Homo sapiens
  misc_feature 312, 333, 360: n = A,T,C or G
aaaaaataagagaaaattaacaaagccaaagtgttattttkgggagattaattttattaataagccttttataaaacccattttgaaaacagaaaaatataaattatcaatcaggaatgaaacagtaaagaaatctgtatcgagtacaggttctacaaactcgaagaataaagttatataatgaacgggtttatgccaataaactcaacaatttagatcaaattttgactgagttttaaaaacacaactcagtcaaaactgatccaagaagaactagagaatttgaacagctctagttaaatcaaattcacnaataaaaaccctttcccacanaataaaatccccagccctgggattcanctggtaaaattttattaaacatttgaaaaatatacacgtatatataaactccttcagaaaacagaggaaacttctcccaactgcggtcatggatcacttaatgacagggacatatttgagaaatgcattgttaggtgacttcactgtgtgaacatcacagagtatactca

SEQ ID NO: 641156 - DNA, 598 bp, Homo sapiens
tgttggccaggctggtctcgaactcctgacctcaagggatctgcccacctaggcctctcaaagtgttgggattacaggcgtgagccaccacacccagctctttctgactctactgagatgattgtgtggtttttgtcctttattctattgataaggtttattatattaattgatttttcagatattaaaccaaccttaaattcctaggataaatccctcttgcttatggtgcaaaatcctttttatatgtcactggattcatcttcrtaatttttttttgaggatttctgcatccatattcattaggaatattagtctgtagttttcttatgatgtctttgtctggttttggtgtcagagtaatactgacctcatagagtaagttgggaaatgttctctcctcttctaatttttggaagagtttgtgaagaatttggtattaaatcttctctaagtgtttggtagaatttatactttttattgctgagctgtactccattatatgaatataccacaatttattcatccattcacctgttgatagatatttgggttgtttccagttttagaataaagctgctatgaacattagtgtaca

SEQ ID NO: 641157 - DNA, 580 bp, Homo sapiens
tttcagcataattaatagtacaggtactagcttcagtcctttctctgcctaacaatgaagcaaacaatgccccccaaaaaatgtccctaaaaagtggcaggtcttgtggcctaaattttcaaatagtagacagaacctttgcattcctattttgaaacttaagactcatcttccatgtacacccgtaatataggtcaagatgtaattctaaactaacacagttcatataggcagaaagtctctttgacatcagaaaataatggcttccaggagatttttttctgagacctaaaaaaaggaaggaacagagggagagagggaaggagacagagaggaaggaagaaagaaaagaataattttggactacatagcaattttgccgctattcatatttaatawccatgtgccgctatacattctgttaactatttccaaaaatttttccaggttaatatggtgcgctcttcttttacaatgttttatcacttcttgagggataacatttttccttctctactaactcttacacaggaagaaggacacatcatagagactggataagcccagattccaaagaaag

SEQ ID NO: 641158 - DNA, 622 bp, Homo sapiens
  misc_feature 456: n = A,T,C or G
aagcttaaccaaggaaggaaaagacttgtgcactaaaaactataaatgttgatgaaagaattaaagaaaacaccaattaataaaaagacattccatgttcatggattagaaaataatatttttaagatatcagtactacctgaagtgatctacagattcaatgtaattcctatcaaaattccaacaatggtttttgcaaaatagaaaaatccattcaaaaattcatatgaaatatcmaaggaccctaaatagccaaaacaattttagggggaaaaaaaaaacaaagctggaggactcacgattcctgatttcaaaacttgctagaataaagctgcaataatcaagacagtgtgatactggcataaagacagacatatacaccaactgaatagaatagagatgccagaaatgcaatttcacagatacaatacgacaatttttgaagggtgccaggcncattcaacgggaaagaacaatattcaacaaatgggttgggaaaactgaatatccacatgcaaaagaatgaagctggacccttgtcctacaccatacataaaaattaactcaaaatggatcaaaaacctagaaacgaaagctaaaattataaaactcttaggaaaaa

SEQ ID NO: 641159 - DNA, 584 bp, Homo sapiens
accactagttttcaagattgtactataagccctagcaagtgcaataagacaagaaaaggaaaggaaataaaaggcacactgattgggaaagaagaaataaaactgtctttgtgtacagatacccagaaaatccagaagaatcmataaaattctgaaactaataagcaactatagcaagattctaggatacaaagttaatatataaaggttaattgaggccgggtgcagtggctcatgcctgtaatcctagcattttgggaggccaaggcaggcagatcatgaggtcagatcaagctcatcctggctaacacagtgaaaccctgtctctactaaaaatacaaaaaattagccaggcgtgctggcacatgcctgtagtcccagctactcgggaggctaaggcaggaaaatctcttgaacccaggaggtggaggttgtggtgagccaagattgcaccattgcactccagcctgggcaacaagtgtgaaatttcatctcaaaaaaaaaagaaataaaaaaggtaatggctttcctatagaccagcgaagaacaaatgaaatatgaaatttaaaatataataccattca

SEQ ID NO: 641160 - DNA, 598 bp, Homo sapiens
gtgcatgcatgtgcacatacaggcatgtgtgaacatatgtgtgggtatgtgtgatttcccatagggcccagggtccaggtggratgggagcccttccaggtttggagcagagcagtgtctgggtgtaggtttccagagggtcagggtctctggggaatagatcacggtggaggcccaagggagaggcagggtgccataggggctgttgcagcgttgaggccctagggacggctccccaggccagggctgtggggtgcttggagtggaggaggaaccagaggatgcactgaggtggagagctggccgagggagatgtggtgcgtctgaatttctgctgagcactggaattccattttatcaggatgaggatggctggggaagggatggctttgatcattgcttttattgtgaggagacaatttgtcatcagcattggtgttattttggcctgacttttatcactcttgttcatcatgatcttgtttctgcctaactttcgtgcttgctaccctcttagaaaatgatgtatcacttatttaggatattatgtgttaattgttgtccagaaatcaaactaagtttctttccaagaaagacg

SEQ ID NO: 641161 - DNA, 562 bp, Homo sapiens
aggtccagttggccgcagagaaagttgtgtgagatttggaaggaggaaggcaagtcgccgtttgcagcgtcttgtggggttccaggtgctgtgaagccctcacacctcctttacctgaggtccccttgtccccactgggcctccccccgaagcatccccagtcccgggtgaggaatgtgagaagggcacctgtggagaagggcaccctcctcgtcctcaggtcaccagtatccctgaggttgaaggagtgtgagacggcccaggctgccctgtcctcaagggctccaggtgtccccgtgagtgtggtttgtcctcactctgcctgcgggcctgccagtcccagagccatggcctcccacggcttctcaccagccacagcggcccatcataaatccctggtcccaggctgctttcagaggctcygctttttcatcaaacactgacggaggcaggattgtgtgcctctgcatctccctgtcccgctggtgaggggtcgtttgtagagaacatagcaatgtggctttccttaccggaacgtgctccataagaaaagggcgaattc

SEQ ID NO: 641162 - DNA, 287 bp, Homo sapiens
atttacatttgtttctcctggtgacacatggattagaaaaagaagtaggaatgattaaaacaggaagggtaagcattagttaacccacagccagattttcaagacaaataacatctaaatcaataccaatcaaccaaccaaagacaccacatccctccactgaaattcctccacttttctgtactgggagagttataagcaccatggactatyggtcacttcccagctatgcaatgaaggattttcccattatgcccatgtaagaacatgagtcctgatcagcatct

SEQ ID NO: 641163 - DNA, 516 bp, Homo sapiens
cttccttagccagccaggaagttggcttgtgatctggtgatctggtccagcactatatagaactaatgggtctccataatttgtcttggcccctctcctttcatatcccatttactgacttctgccatcattgtaatgatgcttcttgggatggcagagaaggaatctcattccatctcctccagccaacagttccatattccaggtatagttaatacttttgcttttccattttgattacagagatttaaatatctacctgtttccctactagattgtgaattccttgatgactacaaccaccatttataattctttgcatctctatacctgggaaagtgcctggcacttagaattaactcagtttcttgaattaaatataattgtggttcaaatttgtgcataaccttccaaggagtggaattaattgaaactaaatttggtacattgttaaaagggcacaaartggcttcaagtcagatttttaactcagtcagctatcttaaaacaagatct

SEQ ID NO: 641164 - DNA, 610 bp, Homo sapiens
tattcatctgacctttgggtttccattaataactcaatgtagccagcaatgtgacagagctcttgcaagtttgaggtgatttgaggctgcattactagaattttgatggactgaggtaggtaatagttccactgtactttccttatcagtccacatctgaaattggtggtcaggcaggtggacaagagtatctgctattaaaagaaccgcatattcttactcttctcgcttcagtgattggcatttaatacaattttatagtttagatttccatagatatttgttccaaacagctagtcctttcctaatatgatgttcactgaaaatacgtattagcatgcttcgcctctaaattgtgcttttcttattaaaaaaaamccccagatctcttatattagaaaagcataagctttaactaatattagtgtaactattttattgaatatactgaactcaatggaatacaacaggaaatgtctgtcttatcctttcccatcactgtcttcagttatgcttggtccagtctccccttcatgacctttgagaaaatctcaggcagatctcaaaacttcaaagttcagtttgaaagtttagtgaggtatgatgtaaa

SEQ ID NO: 641165 - DNA, 610 bp, Homo sapiens
tattcatctgacctttgggtttccattaataactcaatgtagccagcaatgtgacagagctcttgcaagtttgaggtgatttgaggctgcattactagaattttgatggactgaggtaggtaatagttccactgtactttccttatcagtccacatctgaaattggtggtcaggcaggtggacaagagtatctgctattaaaagaaccgcatattcttactcttctcgcttcagtgattggcatttaatacaattttatagtttagatttccatagatatttgttccaaacagctagtcctttcctaatatgatgttcactgaaaatacgtattagcatgcttcgcctctaaattgtgcttttcttattaaaaaaaacmcccagatctcttatattagaaaagcataagctttaactaatattagtgtaactattttattgaatatactgaactcaatggaatacaacaggaaatgtctgtcttatcctttcccatcactgtcttcagttatgcttggtccagtctccccttcatgacctttgagaaaatctcaggcagatctcaaaacttcaaagttcagtttgaaagtttagtgaggtatgatgtaaa

SEQ ID NO: 641166 - DNA, 572 bp, Homo sapiens
gtttcttagcgggaagtttggttgggtgcagtgttgtagtcagaaatagaaatgagaatagtggctagaagagatggtgttttgaaaataggacttcagcaccccattcagtctttatgcccccctccccactgtgttccttagtgagcagcagaatgtttgcccttgtgctgggatcagtgtggaggtggcagcagctgccrgcagacccagagacctggccatctaaagggaaggatacaatagcagatgatgatcaaggaccatgtgccctgagcctgccccctcacacacttcaaggccttgtctctccttaaactcaacgtagagaaagaagaggagaggagtggagggtgggaaacctgcactgactgaatttactctgaattgactaaagactctgtttttatcatcaggcagaaagaggactcaagatagaacttaaaaaaaattacataatgtaaaatttatcattttaaccattaaaaaggacggaacttacatttagtcatagaaaaataaagacaaattttgcacatctgagtttgggacccatgaaggtcattcctgcc

SEQ ID NO: 641167 - DNA, 572 bp, Homo sapiens
gtttcttagcgggaagtttggttgggtgcagtgttgtagtcagaaatagaaatgagaatagtggctagaagagatggtgttttgaaaataggacttcagcaccccattcagtctttatgcccccctccccactgtgttccttagtgagcagcagaatgtttgcccttgtgctgggatcagtgtggaggtggcagcagctgccagcagacccagagacctggccatctaaagggaaggatacaatagcagatgatgatcaaggaccatgtgccstgagcctgccccctcacacacttcaaggccttgtctctccttaaactcaacgtagagaaagaagaggagaggagtggagggtgggaaacctgcactgactgaatttactctgaattgactaaagactctgtttttatcatcaggcagaaagaggactcaagatagaacttaaaaaaaattacataatgtaaaatttatcattttaaccattaaaaaggacggaacttacatttagtcatagaaaaataaagacaaattttgcacatctgagtttgggacccatgaaggtcattcctgcc

SEQ ID NO: 641168 - DNA, 622 bp, Homo sapiens
gtatttacccagaataattaaaatcaaaatctcaaagaggtattagcactattcacaatagccaagatgtagaaaggatctaaatgtcccttgacagataaatggaggataaaagggcatatacataaartggaatattattcagccttaaaaatatggaatgcctgcaatatacaacaatatggatgaatcttgaggacattatgctaaacacaatgagccagtcacagaaggacaaatactgcctgattccacttacatgaggtatctaaaataatcctactcatagaagcaaataataaaatggtggtttccagggattagaggtaggaggaaatgggaagtttctaatcaatgggtatacgatttcagttatgaaaaatgaagttctagagatctgctatataacattgtgtctgcagataacaataccatattatacacttaaaaatgtgttaagagggtagagctcatggcaaatgttctcaccacagtgaaaaaaactgtgataaagactaataatacatcttcaaacataacaacaaaaaagagttaattaggccaagtggtggtgctcggggtaggggtggtgttgagcagctttctaggcaaagaaacacca

SEQ ID NO: 641169 - DNA, 622 bp, Homo sapiens
gtatttacccagaataattaaaatcaaaatctcaaagaggtattagcactattcacaatagccaagatgtagaaaggatctaaatgtcccttgacagataaatggaggataaaagggcatatacataaaatggaatattattcagccttaaaaatatggaatgcctgcaatatacaacaatatggatgaatcttgaggacattatgctaaacrcaatgagccagtcacagaaggacaaatactgcctgattccacttacatgaggtatctaaaataatcctactcatagaagcaaataataaaatggtggtttccagggattagaggtaggaggaaatgggaagtttctaatcaatgggtatacgatttcagttatgaaaaatgaagttctagagatctgctatataacattgtgtctgcagataacaataccatattatacacttaaaaatgtgttaagagggtagagctcatggcaaatgttctcaccacagtgaaaaaaactgtgataaagactaataatacatcttcaaacataacaacaaaaaagagttaattaggccaagtggtggtgctcggggtaggggtggtgttgagcagctttctaggcaaagaaacacca

SEQ ID NO: 641170 - DNA, 622 bp, Homo sapiens
gtatttacccagaataattaaaatcaaaatctcaaagaggtattagcactattcacaatagccaagatgtagaaaggatctaaatgtcccttgacagataaatggaggataaaagggcatatacataaaatggaatattattcagccttaaaaatatggaatgcctgcaatatacaacaatatggatgaatcttgaggacattatgctaaacacaatgagccagtcacagaaggacaaatactgcctgattccacttayatgaggtatctaaaataatcctactcatagaagcaaataataaaatggtggtttccagggattagaggtaggaggaaatgggaagtttctaatcaatgggtatacgatttcagttatgaaaaatgaagttctagagatctgctatataacattgtgtctgcagataacaataccatattatacacttaaaaatgtgttaagagggtagagctcatggcaaatgttctcaccacagtgaaaaaaactgtgataaagactaataatacatcttcaaacataacaacaaaaaagagttaattaggccaagtggtggtgctcggggtaggggtggtgttgagcagctttctaggcaaagaaacacca

SEQ ID NO: 641171 - DNA, 552 bp, Homo sapiens
actgctgtgctggcagtgagaatttcaagccagtggatcttagtttgctgggctctgtgggggtgggatctgatgagctagaccacttggctccctggcttcagccccctttccaggggagtgaatagttctgtcttgctggtgttccagctgccactaggttacaaaaaaaatactcctgcagctagtttggtgtctgcccaaaaggctgcctggctttgtgcttgaaacctggggccctggtggtgtaggcacccgagggaatctcctggtctgcgggttgcaaagacagtgggaaaagcgtagtatctgggccacatagcttcgtctctcatggcacagtccctcatggcttcccttggctaagggagagagttccccaaccccttgcacttcccaggtgaggcgatgccccaccctgcttctgytcaccctctatgggctgcacccactgtctaaccagtcccagtgagatgagccaggtacctcagctggaaatgcagaaatcacccgccttctgtgttggtctcattgggagctgcagaccggagc

SEQ ID NO: 641172 - DNA, 533 bp, Homo sapiens
agaaggtagagcaaccggggctgccccmctgtgttcttgggattcaccagaacccagtctgtatgttccgctctctgccctccacacccctcacagtgaccaccactgcttattgcaattacttcccatgcttcctcagcattcttcataataaaaggaaatcaaatatttgtgttttaccattataaagtgctcctgattggtcatctcatctgatccccacaaaaagcttgtgaggcaggtgttattaccttcgttatacaggggaggatgctggagcccagaggactgagttgcccatggtcttccagatagtaagggacatcagcaagtctcatttccagattccctgagaccgttcactgacttattcaataaacttattgagaacctactgtgttccaggcactgtgctgggttcatggtccttgctctcaaggaacctagagtgtaaagaacagacagactagcaagctcataagagtaaagcagtataataggtttcatattatattaaaagtatgttatcaata

SEQ ID NO: 641173 - DNA, 533 bp, Homo sapiens
agaaggtagagcaaccggggctgccccactgtgttcttgggattcaccagaacccagtctgtatgttccgctctctgccctccacacccctcacagtgaccaccactgcttattgcaattacttcccatgcttcctcagcattcttcataataaaaggaaatcaaatatttgtgttttaccattataaagtgctcctgattggtcatctcatctgatccccacaaaaagcttgtgaggcaggygttattaccttcgttatacaggggaggatgctggagcccagaggactgagttgcccatggtcttccagatagtaagggacatcagcaagtctcatttccagattccctgagaccgttcactgacttattcaataaacttattgagaacctactgtgttccaggcactgtgctgggttcatggtccttgctctcaaggaacctagagtgtaaagaacagacagactagcaagctcataagagtaaagcagtataataggtttcatattatattaaaagtatgttatcaata

SEQ ID NO: 641174 - DNA, 531 bp, Homo sapiens
ttgtgaggcaggtgttattaccttcgttatacaggggaggatgctggagcccagaggactgagttgcccatggtcttccagatagtaagggrcatcagcaagtctcatttccagattccctgagaccgttcactgacttattcaataaacttattgagaacctactgtgttccaggcactgtgctgggttcatggtccttgctctcaaggaacctagagtgtaaagaacagacagactagcaagctcataagagtaaagcagtataataggtttcatattatattaaaagtatgttatcaataatttgtccaagttttgcattcatggggagaaagaagggtaagaaggtttcttaaagtagctggcctttgatcttaaattatataaataatgtgttgcatcaagtgaaaaggaaggttgctgtaacctctttccaagggtgattactttttcttggtgtgtcaaggctaagacctaaaagatagattgggatttcctgggaagagaagatgggggaaagatgttctaag

SEQ ID NO: 641175 - DNA, 575 bp, Homo sapiens
ttatacaggggaggatgctggagcccagaggactgagttgcccatggtcttccagatagtaagggacatcagcaagtctcatttccagattccctgagaccgttcactgacttattcaataaacttattgagaacctactgtgttccaggcactgtgctgggttcatggtccttgctctcaaggaacctagagtgtaaagaacagacagactagcaagctcataagagtaaagcagtataataggtttcatattatattaaaagtatgttatcaataatttgtccaagttttgcattcatggggagaaagaagggtaagaaggtttcttaaagtagctggcctttgatcttaaattatataaataatgtgttgcatcaagtgaaaaggaaggttgctgtaacctctttccaagggtgattactttttcttggtgtgtcaaggctaagacctaaaagatagattgggattycctgggaagagaagatgggggaaagatgttctaagcaaatatagcaatagcaaaactgtatggtttgagaggatttgtgggtggttctgaatggaggacagagtg

SEQ ID NO: 641176 - DNA, 597 bp, Homo sapiens
aaggatggggcaggagggaaagtcatgggtagggggcatgggctgctgtttgcctgcatgaagagttaaaccttagctctgaagatgaacactgaagagtgacactataggatttgaactttagacagatcatctggccccaggtaggagacagaaacagagtctgggagactagtcmagaaggaatttattccctatgagggaaatgaggaccttgtatgacgaatagtgaagcaaacacagacatgagaggcctaaggaagcaaaagactgggctcttttcagaattccttgagctccataacagcagtaataggagtccaagagctattgtcaacatgtcaaaaaaaactaatagaaaccttatatttatccatcataaatttacacagcttaaccaagatatcacattcctctgtctttgcctagaattaaatggaataaaactattaatactggttatctcacgcaagtatcaaaagttctgcttggcagttatgtgtctttaaacattggaaaataaattaactattaataaatgcaggatttttcaaaacatgaaattcatgaaggtgtactttgagactgaggaatatg

SEQ ID NO: 641177 - DNA, 597 bp, Homo sapiens
aaggatggggcaggagggaaagtcatgggtagggggcatgggctgctgtttgcctgcatgaagagttaaaccttagctctgaagatgaacactgaagagtgacactataggatttgaactttagacagatcatctggccccaggtaggagacagaaacagagtctgggagactagtccagaaggaatttaktccctatgagggaaatgaggaccttgtatgacgaatagtgaagcaaacacagacatgagaggcctaaggaagcaaaagactgggctcttttcagaattccttgagctccataacagcagtaataggagtccaagagctattgtcaacatgtcaaaaaaaactaatagaaaccttatatttatccatcataaatttacacagcttaaccaagatatcacattcctctgtctttgcctagaattaaatggaataaaactattaatactggttatctcacgcaagtatcaaaagttctgcttggcagttatgtgtctttaaacattggaaaataaattaactattaataaatgcaggatttttcaaaacatgaaattcatgaaggtgtactttgagactgaggaatatg

SEQ ID NO: 641178 - DNA, 593 bp, Homo sapiens
acctcctaaggttgttttgaggattaaaagagatattatagctatttaaagtgcttgtttarcacaatatctgacacattgtaggcccccagtaaatgctagtttaagctcccttaccctttactagcaatgatatcatattagtaagagttctaaaaacttgaaagataatgtgtcatccacccttagcctacacttcacatgagttttcgtccttttttgagcaaaagcttttattttaacaaagacacattaagttctacttatttatttgtgtgctgtggttgtgatttttttttgcatttgtatatgaaaaatcaatagtaaatgctgatttccttttcctgtggctgtaattgctatgttaatttaaaggtctgattacagaaatgaatgcagctgtgctgctcttgcactgcacagccctggatgtgctgtgtgtgtacccaggcatgctgcactccctgtacttacatcatttaggaggaagtttccagtaccacaacctcacaggcagtatttaatcacctcaaactctagctttgaggttagcctggaaatgaaaagccacttgggtttaccacaacagaaaa

SEQ ID NO: 641179 - DNA, 593 bp, Homo sapiens
acctcctaaggttgttttgaggattaaaagagatattatagctatttaaagtgcttgtttaacacaatatctgacacattgtaggcccccagtaaatgctagtttaagctcccttaccctttactagcaatgatatcatattagtaagagttctaaaaacttgaaagataatgtgtcatccacccttagcctayacttcacatgagttttcgtccttttttgagcaaaagcttttattttaacaaagacacattaagttctacttatttatttgtgtgctgtggttgtgatttttttttgcatttgtatatgaaaaatcaatagtaaatgctgatttccttttcctgtggctgtaattgctatgttaatttaaaggtctgattacagaaatgaatgcagctgtgctgctcttgcactgcacagccctggatgtgctgtgtgtgtacccaggcatgctgcactccctgtacttacatcatttaggaggaagtttccagtaccacaacctcacaggcagtatttaatcacctcaaactctagctttgaggttagcctggaaatgaaaagccacttgggtttaccacaacagaaaa

SEQ ID NO: 641180 - DNA, 600 bp, Homo sapiens
acttcacacattggcttatattggcttagaattgttctcagttgagctgtaaactcctcaaaaacagagaccatcaatgaatatccttatttcatttgaatcatacatgtacttatggtggccaaccacaaagatggtgcttaaccaatgcttgtttaatttaataagaagacagtctgtatgctctttctctggtaggtgcttgaagacaccatgcttagcaccatggcagatatagggaagaacaatgcacagctcctcctctcctatagcttgtttcaggagacgagatcatatacactgtgtgaagctgcagaagtccattttccaccacccacattattctttgtccttttaatcttttcatatgtccccatcagtaaccttctggaccacaggtgtccaaccttttggcttcactggaccacattggaaatagaagaattgtcttgggccccatataaaatatagtaacactaaagatagctgatgagctttaaaamaaatctgaacaatgctgacaacacctcactagggcaccctgcctgagccttgtttccatctccagcaagctgtatggtaaacgtatctgatagcaat

SEQ ID NO: 641181 - DNA, 626 bp, Homo sapiens
cctgttgtggtagaagcaggatggaaagcttcttatctcatcactctttgggcaggatttccccctcccctgttcccattctaaagcctgttttcaccttcaaatggacacaactgtgctttagggaaacaagcaaatgacccaatatcatttagagaaacaaggttactcagacagcactgagtccattttgacccagatcattgccaaagagattgcacagataggggatcagaaaagcaaagctgaggagggccttggagtcacatgcacacacctcctagggtcctcacagcactctgctgaatgagaatgagaagactgccaaccccaaccttagatttctggaggttcaggctgctttcctaaacactgtcttcctccatggaagagtggaagttctgcagcctgtttattcattcacttgttcattcaacaaatgtcgggggcctcttctgttctgggtgccttgctagatgctagggctgccactactttcctcacacagctcctaaaacctcmcttggcacagtgttggtattaagttggtgcctcctgcagcatattaaccaaaatgaagaatttcccattccaggggaagtgaaaggaatcataactttttaaaa

SEQ ID NO: 641182 - DNA, 586 bp, Homo sapiens
gatgttgatgttcacagagacctgcagagtgacctctcctccaaatgcctcaaaataaatgatggcatgcctgagactacatttagtgccatttggctaccaggctyttctaaaacctgtatcttctggtaagtaaagttaatatttaaagtctctttttaattaccagtaggtaatagcttgttctaaattaatgctgattgactaaatacatgactgaatgattgattgggtcatcattgaatagtatggaaattttaatttgcttttatagatgaatgctcagtttgtgggtctgtattttataacttaaattaataaagatattaacactacttcagtcttaatatcaaatactcttgtggtaggtatagaatgaactaaggcactatttcagttttgtccttctgccacatccctacgaaatagaaaacctacccaagattatacagttaataagtagcagagctggaatgtaaacacaggtctgtgtgctgctggccactgccatccatactggccactgcagtccatttgtgcaaaataatcatttttttgcacaaattttaagcattgcattctttgt

SEQ ID NO: 641183 - DNA, 586 bp, Homo sapiens
gatgttgatgttcacagagacctgcagagtgacctctcctccaaatgcctcaaaataaatgatggcatgcctgagactacatttagtgccatttggctaccaggcttttctaaaacctgtatcttctggtaagtaaagttaatatttaaagtctctttttaattaccagtaggtaatagcttgttctaaattaatgctgattgactaaatacatgactgaatgattgattgggtcatcattgaatagtatggaaattttaatttgcttttatagatgaatgctcagtttgtgggtctgtattttataacttaaattaataaagatattaacactacttcagtcttaatatcaaatactcttgtggtaggtatagaatgaactaaggcactatttcagttttstccttctgccacatccctacgaaatagaaaacctacccaagattatacagttaataagtagcagagctggaatgtaaacacaggtctgtgtgctgctggccactgccatccatactggccactgcagtccatttgtgcaaaataatcatttttttgcacaaattttaagcattgcattctttgt

SEQ ID NO: 641184 - DNA, 586 bp, Homo sapiens
gatgttgatgttcacagagacctgcagagtgacctctcctccaaatgcctcaaaataaatgatggcatgcctgagactacatttagtgccatttggctaccaggcttttctaaaacctgtatcttctggtaagtaaagttaatatttaaagtctctttttaattaccagtaggtaatagcttgttctaaattaatgctgattgactaaatacatgactgaatgattgattgggtcatcattgaatagtatggaaattttaatttgcttttatagatgaatgctcagtttgtgggtctgtattttataacttaaattaataaagatattaacactacttcagtcttaatatcaaatactcttgtggtaggtatagaatgaactaaggcactatttcagttttgtccttctgccacatccctacgaaatagaaaacctacccaagattatacagttaataagtagcagagctggaatgtaaacacaggtctgtgtgctgctggccactgccatccatactggccactgcagtccatttrtgcaaaataatcatttttttgcacaaattttaagcattgcattctttgt

SEQ ID NO: 641185 - DNA, 573 bp, Homo sapiens
acaattaacaaaactgtagacacaacatcaacaaacctaaaaataattatgtgtcatgaatgaaaccagaaaaaagaataaatacttcaygatctcatttataagaaaattctagataaggcacaaactaagctacagttaatatgtagtttccaggggattcgttatcagtagtgcagagaggagaggattataacagacatgaggtaatgtgttgggtgatagatatgttcattatcatagctatagagatggtttgaaatatatgtacatgaaaaatgtatcaaactgtatacttgcaacatgagttttattgcatgtcaattatactgcaataaagcgtttaaaaaagggttctacataaaaatacaaatccacttattttagaaaaccagaagttttggcaaccgtatgctgattctgccatctccagcctgattccttgggagaggttaaccttccacagtggtggcaaaagtcagcaggcaatgaaggctatttccacctgagtcaccagaaagaatggctaggtcataagccacatggctggactctatctacctccctgtaatc

SEQ ID NO: 641186 - DNA, 573 bp, Homo sapiens
acaattaacaaaactgtagacacaacatcaacaaacctaaaaataattatgtgtcatgaatgaaaccagaaaaaagaataaatacttcacgatctcatttataagaaaattctagataaggcacaaactaagctacagttaatatgtagtttccaggggattcgttatcagtagtgcagagagragaggattataacagacatgaggtaatgtgttgggtgatagatatgttcattatcatagctatagagatggtttgaaatatatgtacatgaaaaatgtatcaaactgtatacttgcaacatgagttttattgcatgtcaattatactgcaataaagcgtttaaaaaagggttctacataaaaatacaaatccacttattttagaaaaccagaagttttggcaaccgtatgctgattctgccatctccagcctgattccttgggagaggttaaccttccacagtggtggcaaaagtcagcaggcaatgaaggctatttccacctgagtcaccagaaagaatggctaggtcataagccacatggctggactctatctacctccctgtaatc

SEQ ID NO: 641187 - DNA, 615 bp, Homo sapiens
acctgccttgggagacctgacccgacttgcttagaagttacctcctcaacctctattccatgcccacactcctctgcaaatggttttagctagtccttggatgttggtgacattaggtgtctccagtctcaggaaaaacaaactgcaacagaggcacyggtgtcagggatgtttaagggtatgtatacctcacataacacattaaatgcaggccaacagtgaagagtaatgcccagatggggttgtgcctgtaccgtcaggcacccaggactcctggacctgctccacttaggcaactccgtgggatctgaaagatgcaagtcttcggggggaaagacagtgctggagaatagccatcccctgcccagggcaaccctgcaaggccacaattacaaagttctcgtgcatcacatggcagtgcaggagtctctgagcctcatcaaggagtctccactcctcctcctccttcacccccacaatctgttctccactctgagttctgggaggttctgttatgttaataaatgagttagatcacttccctcatctttggatttggggcttcccaaatccaaagccccacaactcagaatagaggcccaaatgctcaccctg

SEQ ID NO: 641188 - DNA, 615 bp, Homo sapiens
acctgccttgggagacctgacccgacttgcttagaagttacctcctcaacctctattccatgcccacactcctctgcaaatggttttagctagtccttggatgttggtgacattaggtgtctccagtctcaggaaaaacaaactgcaacagaggcaccggtgtcagggatgtttaagggtatgtatacctcacataacacattaaatgcaggccaacagtgaagagtaatgcccagatggggtygtgcctgtaccgtcaggcacccaggactcctggacctgctccacttaggcaactccgtgggatctgaaagatgcaagtcttcggggggaaagacagtgctggagaatagccatcccctgcccagggcaaccctgcaaggccacaattacaaagttctcgtgcatcacatggcagtgcaggagtctctgagcctcatcaaggagtctccactcctcctcctccttcacccccacaatctgttctccactctgagttctgggaggttctgttatgttaataaatgagttagatcacttccctcatctttggatttggggcttcccaaatccaaagccccacaactcagaatagaggcccaaatgctcaccctg

SEQ ID NO: 641189 - DNA, 602 bp, Homo sapiens
ctttgaccccatggtgctctggttgccagaaatatgaactgagcacaataagccttagactgggaggtcactctctatattagtttgttctcacactgctaataaagacatacctgagactggataatttataaaggaaagaagtttaattgactcacagttcagcatggctggggaggcctcaggaaacttacaatcatggtggaaggggaagcaagcatgtccttctttacacggtggcaggaaggagaagaatgactgcccagcaaaggtggaagccccttataaaactgtcamatctcatgagaactaactcactataacgagaacaggatggggggaaccacccccataatgcaattatctccacctggtcccactcatgacatgtgggattatgggaactacaattcaagatgagatttgggtggggacacagccaagccatatcactctcccttatatagggatggagagatcatgtggctggggttctgggtggatgtgggtctggggcacaatccactcacttgtgagtccatctgcaatgccaccagttggactctatgaaatgagtgggactcagaggtgaaaacagggtg

SEQ ID NO: 641190 - DNA, 596 bp, Homo sapiens
gagtcttcccttcccctactccatagctccccccacttcccattttcctcatgccataatgctgctttctgaaaaccatacacagtcatctaatctaagctcgctctacccacaggggtctgagttctcacaacccacttcacctctccttaataggtcaaccttggtcttgggaggatagtgatctgattggctcttctggctttcttgcactgaggatgtgaatgactgatagctttgtttaatgtttagtggtattattagtgttattcacaaataatttgattctcctcttctcctagacatatggttggtcatttctctstttttttatttttattttttgctttccttttgaagctagatgtagtcatgtgccttgctttagtcaatgaaatgcgactggaaatgacacataccactcctgggggtaagctttaagtgtgcaatttgtaatacttcctttcaccactaggggttgttgtgaaagtgcatgctaaaatgatgcctctgtgggcctggattactgagtgactaatctgagcagaatcccatgccaactcatcattcccgtctcagccaatgaggctcaatag

SEQ ID NO: 641191 - DNA, 608 bp, Homo sapiens
tcccactccccctttcctcacattctacatcccctttctgaggaagtgcatctcagttcttggtttccatcactatgtgtccgctgccaataaccagggcatatcccagcccagacctcactcctgaacaccccctcatccctctacagtcacttgtgggatggctccactggcttgtctttaggaccttatgttcaacatgtccattgggagagaacacatcttcttcactcctgatgttttcttctatgggaagtcatgtgcattagtacaacactttcagcctctttgtattccctctccactttggagaggagaaaactccctgattggcgagctgctcttggagagcatgtggtcttggttcctcttgaacttcaggaggcttagtgggaaagtccttgcactaccatgggaggtaaagggcacccagtcctcccagggtggggaggacaagcagcagtctaattcggggctcaacctgagcgaatccactggcctgcaggtatacactgtgttctataatrtcaaccttattttaaataatggggatgttttaatttcctatttgctttactgttttatttttttagtggttcagaagtcgg

SEQ ID NO: 641192 - DNA, 581 bp, Homo sapiens
tgactctgcaaaaaatgcccaaactagctgggtgtggtggcacatgcctgtagtcccagctacttggaaggctgaggtgggaggatcacttgagcctggaaggttgaggctgcagtaaactgtaattttgccacagtgctccagcctaggtgactgagcaagatcctgtctcaaacaacaacaagaaaacaaagcaaatttaaaaaaaaaaaaagagagagagatttcagagaaactccctgtaatcacaatattagttagctgcctattctacctttgtgtaaagccattaatgaaaatgaaaattcacatagcggagaagaagtgaatactccatgtatctttacacaaatagagatggtctgatatattggggctattgtattggaacaaaagggccaaatagctttgagaataagataagagatttgtaaatatgcccaagcaggctttgaggggccctcaataggggatcagattatytttcaccagctaagaataaagtgatcttggctataatatttttaggccaaaatgttaattagccatacaattagttcacattttctttggaggattta

SEQ ID NO: 641193 - DNA, 599 bp, Homo sapiens
aggctttgaggggccctcaataggggatcagattatttttcaccagctaagaataaagtgatcttggctataatatttttaggccaaaatgttaattagccatacaattagttcacattttctttggaggatttaataaccagttgtgcaactgaatctctagaaaattgcattagcagaatgttttcatattctgctrtaaattaaacagtacagaggggcacctttattttctttcatttccttcttaaacacagacattggtagatgttaggatttatgtgacttattacctcatttcctgcctagtcctttcctgccagtttccttgttcagttttcataacctttttttgatgcctgggagccactggatatgttcaggctgcttttacctccagatttgagacggtacctagactacaattgtttcaggtgttgctctgattaacaccttcctcacagggcatttaatcctgaaaaagctgtggcgatttggaagatcagggtcctgatgttaactagccataggagagacagaaacgatgttcccaggcggcattatctctagaaggtaccaaagctgcaagaaataaacat

SEQ ID NO: 641194 - DNA, 599 bp, Homo sapiens
aggctttgaggggccctcaataggggatcagattatttttcaccagctaagaataaagtgatcttggctataatatttttaggccaaaatgttaattagccatacaattagttcacattttctttggaggatttaataaccagttgtgcaactgaatctctagaaaattgcattagcagaatgttttcatattctgctataaattaaacagtacagaggggcacctttattttctttcatttccttcttaaacacagacattggtagatgttaggatttatgtgacttattacctcatttcctgcctagtcctttcctgccagtttccttgttcagttttcataacctttttttgatgcctgggagccactggatatgttcaggctgcttttacctccagatttgagacggtacctagastacaattgtttcaggtgttgctctgattaacaccttcctcacagggcatttaatcctgaaaaagctgtggcgatttggaagatcagggtcctgatgttaactagccataggagagacagaaacgatgttcccaggcggcattatctctagaaggtaccaaagctgcaagaaataaacat

SEQ ID NO: 641195 - DNA, 545 bp, Homo sapiens
tgtttttcttttcacatttccatttcacctaatttctttgcttacattttcccccaaactgagttttttttgatctccctataccatcttacacttgattttttttcccccatgaccttcatcttattctcttttgtttttcttatgtgtttacatcgctcagatcctttagatgcattttggggcattttctatatattatttataaaatgaatgcaggcctattctataaacaatttcaaacaatgcaaaatgcataaagttgtaaggggcctctcctgcatctagattttgtctatgcattttacatatatctatgtgtttgtgaatctartaatatatatacacacttaagaatttttatacaaagtcttttaacctctctttcatattttccttcttgttgactctgtctgctgcattcttggtaatttattcatcttgcttttctaatttccatattttctcttcagctgtttttaagctgcacttttacctatctgctgattttttttttcaattccaattctacctttgggaaactc

SEQ ID NO: 641196 - DNA, 545 bp, Homo sapiens
tgtttttcttttcacatttccatttcacctaatttctttgcttacattttcccccaaactgagttttttttgatctccctataccatcttacacttgattttttttcccccatgaccttcatcttattctcttttgtttttcttatgtgtttacatcgctcagatcctttagatgcattttggggcattttctatatattatttataaaatgaatgcaggcctattctataaacaatttcaaacaatgcaaaatgcataaagttgtaaggggcctctcctgcatctagattttgtctatgcattttacatatatctatgtgtttgtgaatctagtaatatatatacacacttaagaatttttatacaaagtcttttaacctctctttcatattttccttcttgttgactctgtctgctgcattcttggtaatttattcatcttgcttttctaatttccatattttctcttcagctgtttttaagctgcacttttacctatctrctgattttttttttcaattccaattctacctttgggaaactc

SEQ ID NO: 641197 - DNA, 545 bp, Homo sapiens
gagtttcaatcttggacgatgaaaaaagttctggagatagacggyggcaatggttgcacaacaatgtaaacacacttaatgtcactgaacggtacgtgaaaatagttaaaacggtaaattttattttacatgtataaaagaaaatcagtgtttttgtttgtttgtttgtttctttctttctttgtttttttgagacagagtcttgctctgtcgcccaggctggagagcagtggcacaatcttggctcactacaacctctgcctcccgggttcaagcgattctcatccctcagcctcctgagtagctgagactacaggagcatgccaccatgtccagctaatttttgtattttttggtggagatggggtttcactgtgttggtcaggctggtctcaaactccttgcctcaagtgatccacctgccttggcctttcaaagtgctgggattacaggcatgagccaccgtgcctggcctcacttttcagtattctgttctgagacatctaggattccacaatgctgggattagaaatccccaggggact

SEQ ID NO: 641198 - DNA, 609 bp, Homo sapiens
ttccttttcttcagtgactatcctaaattagtaatktattttactttgcattatttataggttccattatgatctttgatagtaacaacaatccaattcttctttgaggaacagatccacatttcatgtcagaagagcatggataaacttgtgtgtcagaataatttgacttgaaatcttatcactgtgtgtgtgtgtgtgtgtgtgtgtgtgtgtgtgtgtgtatggatgggtgctttatttgttcattcagtcattggtttgttccacaaatatttactgttatgtattagacattgtctaggcattgggggacacaggggtgaataagacaattttcttatttgcaatcagcaaataaacatcagcaataaacgaggtagtatcaggtaataagtctgcaaagaatacaaaacaggataatgagacagagtgtgatgtgagaaggggctgtgttggctaggaggtgctcgggaaaggagtccctggggatgatattgaaacaggggcgttccctgatccccctcgcaggacatacgacaggggtgtgacttgcctatttggctgctgctgctcaaaaccccatagaggaggggagcgtgcagacag

SEQ ID NO: 641199 - DNA, 609 bp, Homo sapiens
ttccttttcttcagtgactatcctaaattagtaatgtattttactttgcattatttataggttccattatgatctttgatagtaacaacaatccaattcttctttgaggaacagatccacatttcatgtcagaagagcatggataaacttgtgtgtcagaataatttgacttgaaatcttatcacygtgtgtgtgtgtgtgtgtgtgtgtgtgtgtgtgtgtgtatggatgggtgctttatttgttcattcagtcattggtttgttccacaaatatttactgttatgtattagacattgtctaggcattgggggacacaggggtgaataagacaattttcttatttgcaatcagcaaataaacatcagcaataaacgaggtagtatcaggtaataagtctgcaaagaatacaaaacaggataatgagacagagtgtgatgtgagaaggggctgtgttggctaggaggtgctcgggaaaggagtccctggggatgatattgaaacaggggcgttccctgatccccctcgcaggacatacgacaggggtgtgacttgcctatttggctgctgctgctcaaaaccccatagaggaggggagcgtgcagacag

SEQ ID NO: 641200 - DNA, 449 bp, Homo sapiens
gtaaactttatctttctcaagttaattaaagaaaggtttgcctctcccctggagtgaggagagggtgtaagcatgattttctggtgcctggttcagaattacctgggtagctttaaacacttggattcctaagccataccctaagtgtactactacataagatctctgggggtggcacaggggacaactgtattttagagagtttcctcargtaagtctttctgcacatccaagtttttggctggggggtcccagatttaaccttcaggcttagggcacataccagttacaaactggctgtggcagctccatggctctagaagaaaacaccagcctagctttccagcacttcttttgtctgttttctttaagcagtgaggcactggtgaaggaaacacaaaatcttatatagacactaatgaacttccttctattttataacaaataat

SEQ ID NO: 641201 - DNA, 449 bp, Homo sapiens
gtaaactttatctttctcaagttaattaaagaaaggtttgcctctcccctggagtgaggagagggtgtaagcatgattttctggtgcctggttcagaattacctgggtagctttaaacacttggattcctaagccataccctaagtgtactactacataagatctctgggggtggcacaggggacaactgtattttagagagtttcctcaggtaagtctttctgcacatccaagtttttggctggggggtcccagatttaaccttcaggcttagggcacataccagttacaractggctgtggcagctccatggctctagaagaaaacaccagcctagctttccagcacttcttttgtctgttttctttaagcagtgaggcactggtgaaggaaacacaaaatcttatatagacactaatgaacttccttctattttataacaaataat

SEQ ID NO: 641202 - DNA, 473 bp, Homo sapiens
gaggctcaggaaatactgcacatgaatgatggataaagtttaaaatcttcccttggttaacaaaacagaagactaagtgaagtgcagtggaaagcaggttgggcttggatcaagcgatgtaagttctagctttccgaacttccctgggctgtstgttatgggtctgccactaacctaattttaaattagggttagtcataatttattcttgtgtcataatctgcaagaaaaggtattggatgaatgctgaggctcctttcttacttaaagttcttgtgaatttctcattgtagagcttcatcttcaacaacttataagacaggacatttttggatggattagatgcgtaggcatccctgaaccccagaaatctctaatctaggtggatagtttctctctctctttctctctctctctcacacacacacacatgcacacatgcacgtgcacacacagtggtgaagtgggcttag

SEQ ID NO: 641203 - DNA, 596 bp, Homo sapiens
tgtgataccaaaggggtggcccccctgggacagttactgtaattgctgacaacatatgatctataatcttctcctaggcttggttacagaggaattctgggctctgtttttattctcctcttgggaggtgtgtgacmattttccttttgctggtcagcaattagaggctcctgacaatgtggtcggcccaaacacgctccccagagggaaggagaatcccctatatttggcagtaaagtttctcttgatctaggcttcccgtggcttctgattctcccttctttcctgtttttggggatttttttttttttcaaatagagattgaatagtgaaatgctgggatttttgtaaaaccttgaaagcaatacacaggaaacaagttgttaaattcaagaaacatgtgataaactcatactatgctgggcactattctaggtataggaagataaggagaaaagacatcgtcgctaccctaagttgctcatgaatctttccatggtagtttaggggtaacctgtcttgagacagcaaaattgaccagtgacatttttcaaagtgttttatggcactcttgacttccagagaaacttgacaag

SEQ ID NO: 641204 - DNA, 596 bp, Homo sapiens
tgtgataccaaaggggtggcccccctgggacagttactgtaattgctgacaacatatgatctataatcttctcctaggcttggttacagaggaattctgggctctgtttttattctcctcttgggaggtgtgtgaccattttccttttgctggtcagcaattagaggctcctgacaatgtggtcggccmaaacacgctccccagagggaaggagaatcccctatatttggcagtaaagtttctcttgatctaggcttcccgtggcttctgattctcccttctttcctgtttttggggatttttttttttttcaaatagagattgaatagtgaaatgctgggatttttgtaaaaccttgaaagcaatacacaggaaacaagttgttaaattcaagaaacatgtgataaactcatactatgctgggcactattctaggtataggaagataaggagaaaagacatcgtcgctaccctaagttgctcatgaatctttccatggtagtttaggggtaacctgtcttgagacagcaaaattgaccagtgacatttttcaaagtgttttatggcactcttgacttccagagaaacttgacaag

SEQ ID NO: 641205 - DNA, 596 bp, Homo sapiens
tgtgataccaaaggggtggcccccctgggacagttactgtaattgctgacaacatatgatctataatcttctcctaggcttggttacagaggaattctgggctctgtttttattctcctcttgggaggtgtgtgaccattttccttttgctggtcagcaattagaggctcctgacaatgtggtcggcccaaacacgctccccagagggaaggagaatcccctatatttggcagtaaagtttctcttgatctaggcttcccgtggcttctgattctccyttctttcctgtttttggggatttttttttttttcaaatagagattgaatagtgaaatgctgggatttttgtaaaaccttgaaagcaatacacaggaaacaagttgttaaattcaagaaacatgtgataaactcatactatgctgggcactattctaggtataggaagataaggagaaaagacatcgtcgctaccctaagttgctcatgaatctttccatggtagtttaggggtaacctgtcttgagacagcaaaattgaccagtgacatttttcaaagtgttttatggcactcttgacttccagagaaacttgacaag

SEQ ID NO: 641206 - DNA, 454 bp, Homo sapiens
ctatagtacatggtagagagtgacaagccagcctggccaacatggtgaaaccccgtctctactaaaaaaaaaaaaaaatacaaaaacaattagccaggcatggtggcacgtgcctgtaatcccagctacttgggaggcagaggcaggagaattgcttgaacccmggcggtggaggctgcagtgaaccgagctcacgccaccacagtccagcctgggcgacagagtgacactgtctcaaaaaaaaaaagaaaaagaaaaagagagtgacaaggactacagagacaccagtgaaaaaggctgtagtatttgaaaagagagagaaattatttccaaacgaagagcttcattgaaaggcggtatttagggtagggttttagtggagaatgtatgtatgtggatatggcaggaaggaacatggtgaaaccaattctggattcaccgagttggggatgcc

SEQ ID NO: 641207 - DNA, 568 bp, Homo sapiens
gctatcaaatactagatcttactcattccttctaactatyttttttgtacccattaactattctgcctcaccgccccactacccttcccagcctctggtaaccatccttctactctgtctgcatgagttcaacagttttaatttttagctcccacaaataattgagaacatgtgaagtctgtctttctgtgcctggcttatttcacttaacataatgagccccagttccatccaagttgttgcctttctcttcctttttctccggcattcacttattcattccctgtctgtctgtgactatagcatacaaagaactgatggatatttaagacagggtttctgcttaaggagtttatcatgtatcagatacggtgggcattaatgttttaccaaagagttctggttctttccttttctacatacatgataggattatttagtatccaggttgtcctcattttactatcgaggaaataatgttcagaacatgtaagtaacttgtctggtgtcacactgctcaggttcatctgatgctacaatctgctatttctattgcgccgtactgtgt

SEQ ID NO: 641208 - DNA, 568 bp, Homo sapiens
gctatcaaatactagatcttactcattccttctaactatcttttttgtacccattaactattctgcctcaccgccccactacccttcccagcctctggtaaccatccttctactctgtctgcatgagttcaacagttttaatttttagctcccacaaataattgagaacatgtgaagtctgtctttctgtgcctggcttatttcacttaacataatgagccccagttccatccaagttgttgcctttctcttcctttttctccggcattcacttattcattccctgtctgtctgtgactatagcatacaaagaactgatggatatttaagacagggtttctgcttaaggagtttatcatgtatcagatayggtgggcattaatgttttaccaaagagttctggttctttccttttctacatacatgataggattatttagtatccaggttgtcctcattttactatcgaggaaataatgttcagaacatgtaagtaacttgtctggtgtcacactgctcaggttcatctgatgctacaatctgctatttctattgcgccgtactgtgt

SEQ ID NO: 641209 - DNA, 568 bp, Homo sapiens
gctatcaaatactagatcttactcattccttctaactatcttttttgtacccattaactattctgcctcaccgccccactacccttcccagcctctggtaaccatccttctactctgtctgcatgagttcaacagttttaatttttagctcccacaaataattgagaacatgtgaagtctgtctttctgtgcctggcttatttcacttaacataatgagccccagttccatccaagttgttgcctttctcttcctttttctccggcattcacttattcattccctgtctgtctgtgactatagcatacaaagaactgatggatatttaagacagggtttctgcttaaggagtttatcatgtatcagatacggtgggcattaatgttttaccaaagagttctggttctttccttttctacatacatgataggattatttagtatccaggttgtcctcattttactatcgaggaaataatgttcagaacatgtaagtaacttgtctrgtgtcacactgctcaggttcatctgatgctacaatctgctatttctattgcgccgtactgtgt

SEQ ID NO: 641210 - DNA, 568 bp, Homo sapiens
gctatcaaatactagatcttactcattccttctaactatcttttttgtacccattaactattctgcctcaccgccccactacccttcccagcctctggtaaccatccttctactctgtctgcatgagttcaacagttttaatttttagctcccacaaataattgagaacatgtgaagtctgtctttctgtgcctggcttatttcacttaacataatgagccccagttccatccaagttgttgcctttctcttcctttttctccggcattcacttattcattccctgtctgtctgtgactatagcatacaaagaactgatggatatttaagacagggtttctgcttaaggagtttatcatgtatcagatacggtgggcattaatgttttaccaaagagttctggttctttccttttctacatacatgataggattatttagtatccaggttgtcctcattttactatcgaggaaataatgttcagaacatgtaagtaacttgtctggtgtcacactgctcaggttcatctgatgctacmatctgctatttctattgcgccgtactgtgt

SEQ ID NO: 641211 - DNA, 484 bp, Homo sapiens
cagctatccctccccactagttcttgaagatttctccttttctagcatgatccgtgtgttgtgtgacaattaccacctctctctgtgcacatctgtctccytcaccttcttacgatgtccatacattgctgtgtttacttgatcaagggatctgaattcatggtggcgagtggcaccagacagtgcatctaaataatgcaatgttacccagcactggaaggaggctggggtcagccagaagaacactgaaaataggaagaagcttaggaggccaaggaatgtgttcctaggtgggcaggaggacagcaaagttcctggtaatggcatagaaaccaggaacctgtctttaagaggataggaagtctgttgggtttggaaggctggccaaggaggagcaatctctacccagaacatgtaaagacagtacacaactggacacaggtcaacagatggctttgatatttagagaacagatgtttaaaag

SEQ ID NO: 641212 - DNA, 550 bp, Homo sapiens
attgtttgatggtatgtgaatggaaatgagtcatgttcccaccagtgtattttatatattgtggtcttcaagtttgtctgtgaccataaatcaataaattaaacagtatattttatatatcgtgatcttcaagttttcctgtgaacataaattaataaattgaacattgatatagaagtgtacattttctatatcaattacatccctaaaattttgtacattgaagttggtcccaaaccttttcttttggatcttttcactgggaaaccaggcagtcaccttacttcgggggttgtatttggacatggtaaatagcctggcctgtggctgggtgatggatgtcaagtgtgcctctcaaacctgctgcacagaatttagcaagaagcaggtgcttgagagctgtttgttgaatgctggctgaagcttctgtccctgagaacatattcctaaggctgaattgcscattacatcacctgctagtaggcactgatatggtttagatctgtgtccccgggcaaatctgatgatcaattgtaatccccaatgttgg

SEQ ID NO: 641213 - DNA, 550 bp, Homo sapiens
attgtttgatggtatgtgaatggaaatgagtcatgttcccaccagtgtattttatatattgtggtcttcaagtttgtctgtgaccataaatcaataaattaaacagtatattttatatatcgtgatcttcaagttttcctgtgaacataaattaataaattgaacattgatatagaagtgtacattttctatatcaattacatccctaaaattttgtacattgaagttggtcccaaaccttttcttttggatcttttcactgggaaaccaggcagtcaccttacttcgggggttgtatttggacatggtaaatagcctggcctgtggctgggtgatggatgtcaagtgtgcctctcaaacctgctgcacagaatttagcaagaagcaggtgcttgagagctgtttgttgaatgctggctgaagcttctgtccctgagaacatattcctaaggctgaattgcccattacatcacctgctagtaggcactgatatggtttagatctgtgtccccgsgcaaatctgatgatcaattgtaatccccaatgttgg

SEQ ID NO: 641214 - DNA, 572 bp, Homo sapiens
tggtgggaggtgattggatcatgggagtggtctggtgggaggtgattggatcatgggagtggtctggcgggaggtgattgggtcgtggggatgttttctcatggtttaaccccatcccccttggtgctgtcatcacgatagtgagtgagtgagttctcctcagatctggttgttcaaaagtgtgtagcgctcccttctcttgctcttgcttctactctggccacgtgaggtgtgtgctatcatgattgtaagtttcctgaggcctccccagaaggagaagctgctatgcctcttgtacagcctggagaactgtgagccaattaaacctctgttctttataaattactcagtctcaggtatttctttataacaatgtgaaaacagactcatacaaacacctatgctggtttctgagcagtcaaactgccagcctgaggagtggacagaacattctctgctttgtgtggatttgaacctgtgaagcagagagtagaacggtattacctaaaggaagcctttggcctattgctcargctgggtagatgatgtaaatgagacttgagtctttatat

SEQ ID NO: 641215 - DNA, 618 bp, Homo sapiens
caaaggggaggcacatgaacccagtaacacttagatgttagttattttaccaggttagctgatggtaacctagggaaggcctactgcagtggggcaatgagtgagttaaatttgagtggacctgaatggggccatctctggagagctctaggaagctaagggcagatggaggaccccagaatgttaggaggaagcagtgggaagcagaattttaagatgacttccaaggactttcctttgggtcatcgcctcctgatgagtgtgggtggaacctgtgaatgagatgagattcattcctgtctatgttctgttatatggtagaaggaaggttgcaaatgtaatgaagcttcggaaatcagttgaccttaagagggagattatctaggtgggcctgacctaatcacatgagccctttacatctgggtctagaggtcagagatgagggaggttggagattcagagcatgagcagatcctgcgtgccatagctggcttgataggtgggagtggacacaggggaaggggtacggaytggcattaaagagctgagggctgacactctgctgatagtcagcaaggaaacagggacctcagtccttcaatcacaaggaactgaatt

SEQ ID NO: 641216 - DNA, 484 bp, Homo sapiens
caataaatgggtgttgcatgtgaggagtcggggagtgcatcaggaagaatagctaatggatgctgtgcttaaaactggggtgccgggatgatctgtgcagtaaaccaccctggcacacatttacctatgtaaccaatctgcacatcttgcacatgtacccctgaacttgaaataaaaattgaagaagaaakaaaaataaataaataaataaacggatgttgtttcaagccactaaaactgtggtcattttttatgcagcaacagaaaatgaatacgttctgcgaaagtcacagtttttctggatgtgcgtattgctgttgaattactttcctccttatgagacaggtcggtggatgggtaacttttagagaagctccttatatgttatgactggggaacctgagaactgtggggtgccctttcccctttcacctctcttcacaacagctgtataccagctataatgttgtaaaataggcgtgag

SEQ ID NO: 641217 - DNA, 553 bp, Homo sapiens
taaacatgaggtcatccatgtgggccgtaatccaataagcttggtgtctttgtaagaaggggagattagaacacagggagagacaccagacagatgcagcccagagagatgagcatgtaacacacagcaagaatgcagccaccaggcaagccaaggagagagccttcagaagaaaccaaccctgccgacaccttgacctcagacttccagcctctaaaackgtgagaaaataaatctctgttgtttaagctgcccagtctgtggccttagttatagcagtcctagaaaattgatatactctgtatcttaaaacaaaacaaaacaacgcaggcttttacaaaaaaattggctccaagtagactctaagtagcttatattttctcaaatttctgtggcaagaacagtaaggaccttgctatttggagggggatggtgcagcggaggacgagaggaatattccttgagaacccaggcaaattggtatctcagtaaattgtccttccatgggctggtttctgtttgcccactgctcctgcctggttttcttcttgtg

SEQ ID NO: 641218 - DNA, 560 bp, Homo sapiens
aaacatgtcttttggattggaggaatttatttattttaaaaaaacgatcatagtttgtccgggtgaggtggctcatgcytgtaatcccagcactttgggaggctgaagcaggcggatcacctgaggtcaggagttcaagaccagcctggccaacatgatgaaactccgtctctactaaaaatacaaaaattagctggatgtgttggcacccggctatagtcccagctacttgggaggctgaggtaagagaattacttgaacctggaaggtggaggttgcagtgagccaagatcacaccattgcactccagcctgggagacagagcaagactccatctcaaaacaaacaaacaaacaaaaccaaaaaaccccaaaacaataatttactacttttccacgtgaatagatagtacattttgagatgtattctgtatctattcctcaaactatcaggtctgaaatctgaaatcctttatgatcgtgcttgttctcctttcaagaacaaattgaggcaggataaatgcaacacccctggatgcgatcagttggatttaactcatg

SEQ ID NO: 641219 - DNA, 626 bp, Homo sapiens
ctgagtctcttcataatagaatgagagatcataatactgcttgggtggtcatggggattagtaagggctcaataaatggtagctttaagacaatgagagatgctatgtcattcattggggacctctcttcctccaccttccttccttaccttgatgagaaatcttggtcaggagtgagagctgggttccaagtctttcatagcctggtcatcccttccctatatccattgaggaagtggtcaacttagtcttgttccactaatctgtgtgatctgcaaattctcgtgtctgctttttgccaaaaggcagaaatcacaggcccttcttgctaccaaagtgctggtatttcttcacacctcagttaccscaggacctgaatgctctcttggtgagcttaaatcatcactttcttctgccggccttttgggctccaaggtttcacctctgcttactctgctcacaccagggccgtcccagggcctggtcatcgttctcgtcatggtcacgtggtaggccttgtttctggcattatcaagaatctggtgaccttcaaagatctgcctgacaccggattctctcttgcatttcactctgcacttcgaaggccagttctctatccaatcctt

SEQ ID NO: 641220 - DNA, 626 bp, Homo sapiens
ctgagtctcttcataatagaatgagagatcataatactgcttgggtggtcatggggattagtaagggctcaataaatggtagctttaagacaatgagagatgctatgtcattcattggggacctctcttcctccaccttccttccttaccttgatgagaaatcttggtcaggagtgagagctgggttccaagtctttcatagcctggtcatcccttccctatatccattgaggaagtggtcaacttagtcttgttccactaatctgtgtgatctgcaaattctcgtgtctgctttttgccaaaaggcagaaatcacaggcccttcttgctaccaaagtgctggtatttcttcacacctcagttaccccaggacctgaatgctctcttggtgagcttaaatcatcactttcttctgccggccttttgggctccaaggtttcacctctgcttactctgctcacaccagggccgtcccagggcctggtcatcgttctcrtcatggtcacgtggtaggccttgtttctggcattatcaagaatctggtgaccttcaaagatctgcctgacaccggattctctcttgcatttcactctgcacttcgaaggccagttctctatccaatcctt

SEQ ID NO: 641221 - DNA, 570 bp, Homo sapiens
ttggcaggtagtttattgcctgctccattttatagatgaggcagtagagagctcttttttctatgcttgagcgaagactgtctgcagacatgaatgctacaagctgagaggcagaggccagtgttatcctgaatttgaagacacaacattcaggcttttcttgatgttcagaggaacccaaaactgagttgttcaaaaaatattttttctggtataattatttctaggttgggggaaaaaaaaaaaaaatcacaaacctcatccagggtaacttaattgaccactggatgtcaccattgctccatataagtactgtggacggctgctggacgctagaatttgggagcatttgaaggtctgtctctgcatttttagcactcttgctttgtccaatttgcattatagtcaccccagagcttctgcaaaacaagatgggattataaataagcaactcaacaaagaaataaaattcatcttaccaaggagtaaccayggttaatgatctgatttaggtgacaaagggatgcttgggcacttgcaaatcatcctcagcaaacctgagtgaaagcc

SEQ ID NO: 641222 - DNA, 430 bp, Homo sapiens
gagatatgtatttaatccaaagtgttagagttaagacatttctaagaagaatctttcagaaggggagagggaggtggttgtttctttctcttgaacataaatggctaaaatggacttttcgctgtccctcacttacaatacagattttgtatgtataggacatttgacctggatctcatcacattgtcctggatctcatcacattgtcctggggacacagaagtatatgctcattattttctataatataaataataagaaaactgattccaatccaaaaaccttacgtgtatactcacaacacaattttttaaaatgaacrttaaaaacctaataggacacttgaactgaacatagactgtggtgttatgtattaatactaaaacaccttgagcaactgcttaaaaaagatgatacaaaagatacattc

SEQ ID NO: 641223 - DNA, 477 bp, Homo sapiens
gaggtcatgagtcaaagcatgcaggcaacctccagaagctggaaagggaaaggacaggttttccccttgaacctactgagaggaacagagccctcttacttttagcccatgtcggactcctagcctcaagaactgcaggataatacgtttgtgttgttttaagccacgaagcttttggtaacstgttatagcagccatagaaaaccaacatggaaggtaatggtgaagtccctttgtaaacaatcatggtgataaggtgtgctacagagctcataaaaggagactccgcattatatgtacacagcaactctaagatatgtcccaaccttgggaacattaaaatacttaacaatgttaagtaaaaagggagagtcatggttccagacaagatggaataaacacacctctccctgtttgtcctggtaagtacagctaaaaactatgggcattatatatgaaacaaaattaaaagatgtt

SEQ ID NO: 641224 - DNA, 592 bp, Homo sapiens
ctcttcaggactgggagagcctagaataggaaagatctagttgtgttaatatagattctttacagatgcaagtttccccctacaaaagatagcttttcagggccatttcaaaatatgacagataaacatattttgggataaaatatttttatttccttttttatctctcatgtaattgttgttaagaacaaatagttcctcttcaaagggtttcagttcctggttaattgttctattctaaaaggtattcatacccattcatctatcagccctctctaactctgttgtgcccaaacaccccaagatgtaccgtacccgtccttcccrtcaaacacccatccttgcctcctttgatgatgtcaacagtagccaatcggaattagtctagattgtgtggtctgatcccagcccacaggaagaggacacaggagcagggtctgtgttagggataaaaaaactcctgctctccttcgttttgcatgctttcccttgcctctgtcttgcatgaagacagcacccttctataaaagtaaattcccttactgagaaaacttttgcctgagtgcttgttttaccttgtggcactaaaaat

SEQ ID NO: 641225 - DNA, 362 bp, Homo sapiens
acatgcaacagcaattacagggctcttcaaagatgcaggtgctgccctcacaaatctayttcacaaggcattggtcaagggtatatcttctggactgcctcaactgggatgagtaagtctaaaatgactaatccgctccaccattccaatctccctaacccttttgatcccttcctctatattaaaccaagggagatcaggcatttccagctcactcacagtgtgccaccttttaacccatatttcagctaaccaagcaaataaactattagaaccttttttaactccccgagctgcaacgttaaatgcagagtccctacttagtgggcccaaattaataaattcagcctgatccaactcta

SEQ ID NO: 641226 - DNA, 487 bp, Homo sapiens
aacagcaattacagggctcttcaaagatgcaggtgctgccctcacaaatctacttcacaaggcattggtcaagggtatatcttctggactgcctcaactgggatgagtaagtctaaaatgactaatccrctccaccattccaatctccctaacccttttgatcccttcctctatattaaaccaagggagatcaggcatttccagctcactcacagtgtgccaccttttaacccatatttcagctaaccaagcaaataaactattagaaccttttttaactccccgagctgcaacgttaaatgcagagtccctacttagtgggcccaaattaataaattcagcctgatccaactctacgttccttccatcattatcccatacccttaatatccattcccatgcctatgatctcaaacagttcttttctagtgtagcacatctcctcatgggtcacattctgaatctcacctctaggggccctctgggg

SEQ ID NO: 641227 - DNA, 529 bp, Homo sapiens
gagggtgaggaacttgatcagatatgaagagcggaggattctctctaaactgacttagcaggattcttgctaagactgggctctgcaggcctgggaaggacaagacaggcacagaaggctaaggctgaggccaagtcaagaagagagctccaaggaacctgactaaagtttgatgaaggaaaatttgccagaaaagttacctaacctggggcttgaaggcacgaagatccaggatagaggggctttggtctctactgttggagggcaaaatcaattgcaagcatatgttcctgagtgctaatgcagaatggggacaccgatagggaagtcatgaagctgctcttgggctacgggaacaacttcctgtaatcacccaatgggttcgtcttgtccacttcttacccagagccaatttatcaagatggaaattgcagtgaagaaagagtaattcacacagagtgggctgtatgagagactggagttttattattacccaaatcagtctccytaagcattcagggatcagagt

SEQ ID NO: 641228 - DNA, 291 bp, Homo sapiens
atgaccattatgattataattactttaatactacttcagaggcaatttgtatggagcaatttcattagcagtacccccctccccacccacaacacagtgacatctttgaactctcaaatattaagaaaaatgtggtatcgaatcattgaaggtacatctatcttagcttctcccttagtcccagctctttcctcaacaccgctcccccacaccaagtcgtgggcccccagactcttgagcmaaatgttgaaaatgactactggccgggagaggtggctcatgcctataaat

SEQ ID NO: 641229 - DNA, 526 bp, Homo sapiens
tgccaagccaccttcactcttgcgctctgtgtaccagcagacttaataccacatcgaagctgccaaagcttatggcttgtgccctctagagtggcaacactgagctgtgccaggatccctttgagctgtggctgaagctggagcagcctgggatgtggggagcagtgtccattgctagagaggtagtgtgatcttttgggtgtgtygcaatactctttttttctatggtcccagaattcttatgctggttcctttttggatttacttttgtttggatagaaatttattcccctcttgagggtgtgactataggatatattgtgtagggtcctttgactttgcttccgggtactttcagggggccaaatctatgaattttttgatgatagatggccttagtgtaatggttttctcaaatactattttttgtaagttgtagcggcagtgaattgggcatgtgagaaggatcactgcttcctgcaaagatgagcagggggaagtctcttattttattccccagcattgt

SEQ ID NO: 641230 - DNA, 566 bp, Homo sapiens
aagtctcttcttaatggaatcatcaaaaaaagaaaaaaaagaaccaaagaaaaagagaaaaaagaatagcatgtattaaagacttcaggtaaaacatagatcttttcaaaaccaaaaaaaaaatcaatatatatttcatctggtagctaagaaaggatattttaaaataaaaatataagggtataagatacaaaacaaaactgatgagctcagctacataaaggtatggaacacctkggaaaaataatggcaacaagtatgacaacggttattataaaagcagttaacaaattaaaatgtttactcacactattaaggtgtgaattaaggtgtaaataagggtaaaactaagaaaagataattctcagaaaaaacattagacatctaaaaagtcctctttcataagttaccaaagaaatgcaattttaaaacagtaaaatactgatgaattggcaaagatttatgatagttgtgttattcagtggtggtgaatgtgtgttgacataaaacattctagaaagaagtttgaccccttattataataagggttttgtaactagttatga

SEQ ID NO: 641231 - DNA, 566 bp, Homo sapiens
aagtctcttcttaatggaatcatcaaaaaaagaaaaaaaagaaccaaagaaaaagagaaaaaagaatagcatgtattaaagacttcaggtaaaacatagatcttttcaaaaccaaaaaaaaaatcaatatatatttcatctggtagctaagaaaggatattttaaaataaaaatataagggtataagatacaaaacaaaactgatgagctcagctacataaaggtatggaacacctgggaaaaataatkgcaacaagtatgacaacggttattataaaagcagttaacaaattaaaatgtttactcacactattaaggtgtgaattaaggtgtaaataagggtaaaactaagaaaagataattctcagaaaaaacattagacatctaaaaagtcctctttcataagttaccaaagaaatgcaattttaaaacagtaaaatactgatgaattggcaaagatttatgatagttgtgttattcagtggtggtgaatgtgtgttgacataaaacattctagaaagaagtttgaccccttattataataagggttttgtaactagttatga

SEQ ID NO: 641232 - DNA, 515 bp, Homo sapiens
gtattccttatgtttagaaatctactctagataaaaaatatagacaaaattatgtatacaagttgtatttcacaatatttttatactaataaaaaggtaaaaaactccaaatatacataaagaggaacagttaaatgaattatagttattctatgtcaagtgaacattaaagttatttgcaaaataattaataataattatttatacaaaaaaatacactgagaattaatggggtggaaagagtctttcaatataatattgagtgggaaatacaaaatataaaatagtttatatattatgacccaaatkgtttaaaatgccatatatccactaaaaatatatctgaaaaaagtacatgaaggataataatgcttatatgaattatgggattaagggaaattttaatgttcttttaaaaagtttctgatctcagttttctacagagagaatatattacttttgtagtcagtaaaataatttaataaaagttttattatcaagtcagggtctataat

SEQ ID NO: 641233 - DNA, 552 bp, Homo sapiens
tttagtataatttgcagaaatatttattctcctcactgtatattgatataactacaagttatcagggaaaggttaacattttatggattcctgagtcaatttctaggctttaaagtgtggagagagtgcagtaggtggatgggtcattgaagattttctccagrggtagggcatatgatgtaatgatagtcagagattggtttatgtagaatcactcatttccttgaaataatactctgactttgaaagtttccagggagaaaaagaggggaaatctcaccttgtactagtagcaggagatatgagaaacaattgaaaataaagaaagacaaagttaaattagagctgacagggtgtgtgaccttcaccgagctcaggacagatcagtatgggagggaagagaaggagagaatttggattatgttattcaaatgaaaactttagctctaagactgagatcaaaaggcaagtgcattaaaatacaggatctgcaagtaaagagtgtgcctgctgctgtaattaggaatctatattaaactccaggcttagggg

SEQ ID NO: 641234 - DNA, 190 bp, Homo sapiens
agactgagttgttctgtttgtatgtttgtgtctgcagggaagtaggaaggagatgaaaattgtaaaaaagmactgctctttaaatattttctaattacttcaagacttgcaagaaattgaataagtgagataatgaaaatgaatgagtcaagtttggagttttctgtctggttttgatcaggaagtctaa

SEQ ID NO: 641235 - DNA, 190 bp, Homo sapiens
agactgagttgttctgtttgtatgtttgtgtctgcagggaagtaggaaggagatgaaaattgtaaaaaagaactgctctttaaatatwttctaattacttcaagacttgcaagaaattgaataagtgagataatgaaaatgaatgagtcaagtttggagttttctgtctggttttgatcaggaagtctaa

SEQ ID NO: 641236 - DNA, 190 bp, Homo sapiens
agactgagttgttctgtttgtatgtttgtgtctgcagggaagtaggaaggagatgaaaattgtaaaaaagaactgctctttaaatattttctaattacttcaagacttgcaagaaattgaataagtgagatawtgaaaatgaatgagtcaagtttggagttttctgtctggttttgatcaggaagtctaa

SEQ ID NO: 641237 - DNA, 486 bp, Homo sapiens
gataaaaataatatttaatgctaattttttcagaaaaaaagttaaaatggaaaaagaaatttttgaaggaagtaagtacagtgtatgatataccaaaaaatcaaataaatttattctttttccagcagtgctattcggaaaatgttatagaagttaaaacctgtttttgaaaataagcaaggcatagaaataaaaagagaaatgtaaaaaaaaaaaaaattagccaggcatggtggcaggggcctgtagtctcagctactcaggaggctgaggcaggagaatggcgtgaacccaggaggtggagcttgcagtgagccgagatcgtgccactgcactccagcctgggcaacagagccagactccatttctaaaaagaaaaaaaagaaaacttgtcaatcccaattatgaataargttaaaaaaaatagaaaaaaataaaaaattttaaaaagcacagatttttaaaaaggtgtacagccatgtaata

SEQ ID NO: 641238 - DNA, 591 bp, Homo sapiens
atcattgaagcagaaaatgaacaaagaaactgtgaggtaaaactggattctaaaccaaatgaacctaatggacacttacagagcattctacccaacacatgaaaaatatacattcttctcatctgtgcatagaacattctcaaaaataaaccatatactagtctacaaggcaagtctcaataaatttttttaaattgaaaccatarcaagcattttcttggatcacattggaataaaattagaaataaatattaaaaggatctctcaaaacaatacaaatccatggaaattaaacaacctgttcctgaaaaaacttcatatcaatgatgaagcaaggcagaaattttaaagaaattggaaacaaatggaaatagaaacacagcatctcaaaacttctgatatacagcaaaagcagtgctaagagggaacttaatagggttcaatgcctacatcaaaaaagtagaaatatctcaagttgtcaacctaatgttgtacctcaaggaactagaaaatcaagaacaagcaatagccaaagttaaaagaaaaaaaactacacagatcagaactaggtaaaattggaaccaaaaaaat

SEQ ID NO: 641239 - DNA, 631 bp, Homo sapiens
caccacacctggctaattaaaaatttttttttgtatagatgggggtctcaatattttgccccagctggtcttgaactcctgagatcaagcgatctgcccacctcagcctcccaaagtactgggattacagtgtgagcaatcgcatgtggccatgaattgattttgaatgtgaaatcaacattttcattcctgggacaaaacttacttgctcatgatacattattatttttatatatggctgtattttatttgctaaatattgggtttagaatttttgtgtctgtgttaatgagagatatttatctgatattttttcttgtaatgccctttttcattttctctaatccctgaaaatgttgatataaaattggtagtattttttaaaagtgatatgtagaattcactgataaagctacatgggatgtaatcttgatatttttgggagaagtcaggggaaaatttttcaagagcgaatttagcacatgtatsttattcaggttttgcttgtctgtgtgtgcatgtgtgtttagaaagttgtgtttttccaaagaaatgataaatgtctgagataatggatatgctaattaccctgaattaatcactatacattatgtgtatcaaaatgtcacta

SEQ ID NO: 641240 - DNA, 400 bp, Homo sapiens
tcatttcctttaatcttttttattttctaatacttgcatttaaagttatatatttctctctgagcaattctttagctgcatcyagttttttttgtttttactgtctttcagttaaaattcattaaaaatttttcattggcacttctttaatatatgaataatttagaattgtgttgcttgatttataaataattgggggatgtttagttatatttttgttataaatttttagttgaagcctactattatgagatatgtgttctgtatggtttagtcctttgaaatgtattgcatcttgtaccgtggcccagtgtattttctattgtggtgtacattccatgagcacttagagataaacagaataatcctacatttgttttctctttctccactcccttac

SEQ ID NO: 641241 - DNA, 400 bp, Homo sapiens
tcatttcctttaatcttttttattttctaatacttgcatttaaagttatatatttctctctgagcaattctttagctgcatctagttttttttgtttttactgtctttcagttaaaattcattaaaaatttttcattggcacttctttaayatatgaataatttagaattgtgttgcttgatttataaataattgggggatgtttagttatatttttgttataaatttttagttgaagcctactattatgagatatgtgttctgtatggtttagtcctttgaaatgtattgcatcttgtaccgtggcccagtgtattttctattgtggtgtacattccatgagcacttagagataaacagaataatcctacatttgttttctctttctccactcccttac

SEQ ID NO: 641242 - DNA, 557 bp, Homo sapiens
tggggcatgagttcacttaccaggcaaagggcatttgagctggatgcaacagtgtccctaaaactcggtgtctcttgggagtcaccaaagttcagactcccatttattcacacctaaatcattataattacctcctagctgctcttctcttgggaggcttgacccttcaatccattttccatactgtagctagagttatcattcccaaaacaaatccagctacatttcttgctagtttaaaagtactttcactattttctccatggtacttagcatttagttttaacacaattatgagaccctttttgatcttaccaatatcctactttccagcttcatgtcttgtattttcccttttacaatctcagtgtcctacaccagtgcacagtgsgggttcaataaataattgttgaatgaatagataaattgataattacagtcataatgaattgtttgggtttcctgctgcctctttctcatcttctggcctttgttacctattccatctcatagatgcactcttagctcaaccttatgcctacttattctgctgaccc

SEQ ID NO: 641243 - DNA, 545 bp, Homo sapiens
tttctcatcttctggcctttgttacctattccatctcatagatgcactcttagctcaaccttatgcctacttattctgctgaccccttttctgcctttggcttctgttttttttttttttcgtttttgagacagagtcttgctccatcagccaggctggagtgcagtggctagatcttggttcactgcaacctctgcctcctgggttcaagtgattcttctgtctcagcctcccaagtagttgggactacagacatgcgccaccackcccagctaatttttgtatttttagtagagacagggtttcaccatgttggccaggctgatcttgaactcctgacctcaagtaatccaccctccttggcctcccaaagtgctgcgattacaggcatgagccactgtgcctggtcagcttctgtttttgatgtcttttcatctaggcatcctttttagatctcctaggtctttgttgtgtgtccttctaacatgctttcacagcactctgtaattccatgatcttactatttatagtattatgttgtaatt

SEQ ID NO: 641244 - DNA, 559 bp, Homo sapiens
aatgatagtactattcacctcacatactgttaygataattaattgggagaacatatatgaatatatctaccttactgttagggacatacacaggactttcatttatttttatggctgtataagcctacgagacaggataaattgacagtgtgatcaatataatacagagaaacatttgaccatgcattaagctcacaaagaaagttctccaattttccttttacagggctttatattattcagagcaagtgatcccaggaaagcttctccatgtttgtgcttggactaatgagatgatgatttgccatttaatattcatatttatgtcttttgtgtgtgtgaagtgtatttaaattttgttttagtcctcataccttgtctcattcactaaggaggtgtctcatggcaaaaacatggtacccaatatcagagagatgggttccacaaattgcttaatctctataagcctcaaatatttcaactgtcaaattaggctaatgatatttaccaactaccttttgaataattggagtgagaatgcaagactctattactctgt

SEQ ID NO: 641245 - DNA, 662 bp, Homo sapiens
attcttactttacggatttttttttaagaatcataaataggtgttagatttttttcaaatgctttttctgcatctattaatatggtaatttgattttttccctttaacatttcacacaatggattatgttaattgatttttgaatgttgatctcaccctgcatacctggactaaattgtacaccaggatctactgagatttagtccaggtatgcagggtggaatcaacawtcagaaatacctggactaaatctcagttgatcctggtgtacaattatctttatatattgttgaatttaatctgctaatattttgttgaggatttttgcatatatgttaaaaagagatattagtctgaagttttcttttgttgtaatgtctttgttcttgggaatagggtatggtgggcttcattgaatgagttaggaagtctttcctcttctattttctaaaagagatttagagaactggtataatataatccttaaatatttggtagaatttaccagtgaacctgtctgacctggtactttctgttttttaaggtgctatggatttaatgtttgtgtcaccctgaagttcatgtattaaaattctaaccccctatgtaatggtattaggaggtggagcctctgagaggagactaggccatcagggtagagc

SEQ ID NO: 641246 - DNA, 419 bp, Homo sapiens
tttttgcaccatggaatttctttaaaatagttctacagtgcaagtcataattttctgaaatacttagaaactctgaagacaatggacagacgtggccatatgatttcaaatatatcatcaaggaatgatacagctttttgtcttctgtgtgcatattggattgaagagagacttccagctccttktgagtgaggtaaagtgtttttcaaatcatagataagcttcccaaaggtaagattttaacaggtgttagtgaaaccaagctttgcagatgtgtgaattttttactacataggaaattatatcatttgattttataagaattgaaatgttgaaaaattttgctggtgcaaagttgctggttaggttttatatgatacttgtcatgagtatatttacaaaatagaaaagttaagtca

SEQ ID NO: 641247 - DNA, 419 bp, Homo sapiens
tttttgcaccatggaatttctttaaaatagttctacagtgcaagtcataattttctgaaatacttagaaactctgaagacaatggacagacgtggccatatgatttcaaatatatcatcaaggaatgatacagctttttgtcttctgtgtgcatattggattgaagagagacttccagctccttttgagtgaggtaaagtgtttttcaaatcatarataagcttcccaaaggtaagattttaacaggtgttagtgaaaccaagctttgcagatgtgtgaattttttactacataggaaattatatcatttgattttataagaattgaaatgttgaaaaattttgctggtgcaaagttgctggttaggttttatatgatacttgtcatgagtatatttacaaaatagaaaagttaagtca

SEQ ID NO: 641248 - DNA, 547 bp, Homo sapiens
aggtttcacattaaagttaaaaattgctaaaagtcagcattataacatgtaattaaaatagacttacatgcaaggtgtgtaaaaacagtaaaatatgtttttagtaaaagaatataagaaggcatagaaatgtacattttgctagggataaaggattgtcttaaattagatatgataaagctgaaggtttaagcaagttttggaaagattatatatattaatcttgcaaaaaatcccatgtgaaaacattaactaatttcaaaatrgtattatatggtcttttcataaataaaagcattgaaataaaagcacaacaatggtgtcttaaaacactggtctgccctttagcaaaagggttataaaaggtttgtaaaaattaacggtcaaattggttaagattagatggaattgccaatgaggtttcatttagaaattgggttcacattaataaactaatacaagggtaaaatttggctttgaacaggattttcatgtaatagtaaacgttaataaaagatttttgcctttttttcatcattatggcaaa

SEQ ID NO: 641249 - DNA, 547 bp, Homo sapiens
aggtttcacattaaagttaaaaattgctaaaagtcagcattataacatgtaattaaaatagacttacatgcaaggtgtgtaaaaacagtaaaatatgtttttagtaaaagaatataagaaggcatagaaatgtacattttgctagggataaaggattgtcttaaattagatatgataaagctgaaggtttaagcaagttttggaaagattatatatattaatcttgcaaaaaatcccatgtgaaaacattaactaatttcaaaatggtattatatggtcttttcataaataaaagcattgaaataaaagcacaacaakggtgtcttaaaacactggtctgccctttagcaaaagggttataaaaggtttgtaaaaattaacggtcaaattggttaagattagatggaattgccaatgaggtttcatttagaaattgggttcacattaataaactaatacaagggtaaaatttggctttgaacaggattttcatgtaatagtaaacgttaataaaagatttttgcctttttttcatcattatggcaaa

SEQ ID NO: 641250 - DNA, 589 bp, Homo sapiens
ccaaaaaaaaaaagataaatgaaataaaactgattatttgataagatatataagacctggcatggtggctaacacttgtaatcccagcactgtggggggccaaggcaggcagatcacttacggtcaggagtctgagaccagcctggctaacatggcaaaaccccatctttactaaaaatacaaaaattagctggccgtggtggtgtgcacctgtaatyccagctacttagaaggctgaggcaggaaatcactgggacccaggaggtggaggttgcaatgaaccaagattgtgcccctgcactccaccctgggtgacagagtgactctgtctccagaaaaaaaaaaaagaaaagaaaagaaaagaaaggataaataaaattgatagaccgttagcgagattaaccaagaagagagacaatacaaataagctcaattagaaacgaaacaggtgctattaccactgataccacagaaatactaaagatcattcaaggctactatgaacacctttatgtgcataaactagaaaacctagaggagatggataaattcctggaaatatacaaccctcccagattaaaccaagaag

SEQ ID NO: 641251 - DNA, 589 bp, Homo sapiens
ccaaaaaaaaaaagataaatgaaataaaactgattatttgataagatatataagacctggcatggtggctaacacttgtaatcccagcactgtggggggccaaggcaggcagatcacttacggtcaggagtctgagaccagcctggctaacatggcaaaaccccatctttactaaaaatacaaaaattagctggccgtggtggtgtgcacctgtaatcccagctacttagaaggctgaggcaggaaatcactkggacccaggaggtggaggttgcaatgaaccaagattgtgcccctgcactccaccctgggtgacagagtgactctgtctccagaaaaaaaaaaaagaaaagaaaagaaaagaaaggataaataaaattgatagaccgttagcgagattaaccaagaagagagacaatacaaataagctcaattagaaacgaaacaggtgctattaccactgataccacagaaatactaaagatcattcaaggctactatgaacacctttatgtgcataaactagaaaacctagaggagatggataaattcctggaaatatacaaccctcccagattaaaccaagaag

SEQ ID NO: 641252 - DNA, 659 bp, Homo sapiens
cattagagcaaggagaatactggaaagaatggtcagagtcaacattttcagaattctggaaattaagcaaaagctcgcatcagttcaaggagtacttatgcaagaaaaatggccaactctcaacaacaagaagcattattggtattttaatttaccctgttttcattttccctgcacagcttctctgtagtcttgaaaaacaacagcctgcaatcacattgatacccagcagcttggcaaccactgggaggggcagaacgagattggagctttttcgaagacccagataattgctattatttgacctatgtggtcattctctggaagacctaactcacaaatatacctttatttgacttgacttggagcatttttcgtggagaaatttgtcaaaaacagtcagaagcaattcttaaacattgcagcagctttaggcagtggattaagtaagaaaaaaaacaggctaaccaaaaggcttaaatacaaaagctgaggaatgagtatcaggactgtgcatatgcccaggactctgtacatgttcaagaaagacccaggaaggcrtaagctatcacctctggcttaccttgtgatcctgtgaaagcaggatatgaaggctaaggtaaagttttaagcttggctgagtgtggtagctcacacct

SEQ ID NO: 641253 - DNA, 520 bp, Homo sapiens
ttataatctatcatgggggaaggagcaagggatctctctggggggatctcttagataaggtgcccatcttattagtgagagctccactttcatgatctaatcatctctcaaagccccaaccttcaaacaccttcacattggagattaagttttaacatatgaattttgggaaggacacaaatttttgacaatagtgtgtgcacacacacatgtgaacacacacacatgtatacttatatataggcatgtatatatatgtataattcagttttcaataacaagaaaaatataatacatgaaaaaacaagaaagtacagcccttacataggggactaatgcagttgacagaaactgtctctggggaagcctagacttcagayttactaagcaaaaactttcaattagttattttgaatatatttaaggaaataaaactatgtctaagaactaaagaaaattatcagaatgatatctcagcaaatagatcatttcaataaagagatagaaattataaaaaaga

SEQ ID NO: 641254 - DNA, 610 bp, Homo sapiens
gatcctttaatgttctcaatatcctctccaaacactatgattcaagagaagctgttttcttattttaaaggcagaataagagaggggatattattagaatatttktgtcccttattctttttttttttactgcattggttttttttattgtttttttcttttttctttttttcaaatatattttcttgtatttttacttttacacaaacaatagcatgctatatacatttatatatatatattttttacataaggatatatatttagaatctttccacatcagtacacaaacgtgtcctccttcattttatacctgtacagtattccttagtttgagtgtatcacaatttttaaaaccaattcttcattatgaaaattaaatagtatacatttcttttgctgttgaaacaatgataccatccataacctataaacatatcttttcccatttatatgggtttgtaggataaatcctcaaaggtgcaaattctgggtcaaatgaaatataaatttcttttttttaaaattttattattattatactttaagttttagggtacatgtgcacaacttgcaggtttgttacatatgtatacatgtaccatgttgg

SEQ ID NO: 641255 - DNA, 562 bp, Homo sapiens
aagctgttttcttattttaaaggcagaataagagaggggatattattagaatatttttgtcccttattctttttttttttactgcattggttttttttattgtttttttcttttttctttttttcaaatatattttcttgtatttttacttttacacaaacaatagcatgctatatacatttatatatatatattttttacataaggatatatatttagaatctttccacatcagtacacaaacgtgtcctccttcattttatacctgtayagtattccttagtttgagtgtatcacaatttttaaaaccaattcttcattatgaaaattaaatagtatacatttcttttgctgttgaaacaatgataccatccataacctataaacatatcttttcccatttatatgggtttgtaggataaatcctcaaaggtgcaaattctgggtcaaatgaaatataaatttcttttttttaaaattttattattattatactttaagttttagggtacatgtgcacaacttgcaggtttgttacatatgtatacatgtaccatgttgg

SEQ ID NO: 641256 - DNA, 562 bp, Homo sapiens
aagctgttttcttattttaaaggcagaataagagaggggatattattagaatatttttgtcccttattctttttttttttactgcattggttttttttattgtttttttcttttttctttttttcaaatatattttcttgtatttttacttttacacaaacaatagcatgctatatacatttatatatatatattttttacataaggatatatatttagaatctttccacatcagtacacaaacgtgtcctccttcattttatacctgtacagtattccttagtttgagtgtatcacaatttttaaaaccaattcttcattatgaaaattaaatagtatacatttcttttgctgttgaaacaatgataccatccayaacctataaacatatcttttcccatttatatgggtttgtaggataaatcctcaaaggtgcaaattctgggtcaaatgaaatataaatttcttttttttaaaattttattattattatactttaagttttagggtacatgtgcacaacttgcaggtttgttacatatgtatacatgtaccatgttgg

SEQ ID NO: 641257 - DNA, 565 bp, Homo sapiens
ctttcactgggatactggtgggctgaggctggtaaatgaggaactgtagcctggactggcaaggaggaaataaccctctggggtgcaggtggacaaaggctaccccattatagataggcagttttggaaaactgattgctggagtatctgtgtgatttattggaatctccttgcagaggcatcactgaaactcaatgggaaattttccgtgaagttgtcagtgaaactcaatggaagtgagcacttctgaatgtctctccctcccccagccaaacacatgtgctggaagctacatagagtaagatgaaaacagaaacatatttaaatcaggaagagatgccccttttgatttcctatactggtaaaagttagcatcaaagaagactaggtrcagaggatacatttctacagggcttattttcattaatatgcagcaggcaatgaaggttgtatttggagctgagaggcaatacattgataaatagcacccaaattttatccttaattcttgtaacacattttacaggatatcgaagtgcatatatatggcatgatctgaccaaac

SEQ ID NO: 641258 - DNA, 613 bp, Homo sapiens
ggttgaattttttttttgagatggaatctagctccatctcccaggctggagtgctgcggcacaatctctgctcactgcaatctctgcctcccgggttcaagcaactctcctacctcagcctcccaagtagctgggattacagatgtgtgccaccacactcagctaattttcatatatttagtagaaacagggttttgccatgttggacaggctggtctcaaactcctgatatcaggtgatccatatgccttggtctctcaaagtgctgggattacaggcatgagccactgtgcccggcctggatttttttttagtcccttccaccagtctatatcctttaagtggagcacttaatcatttmcattcatagttgatattgatatgtgagcttttgttcctgtcataatggtaattgttacctaatggctttgtagtttcagttgtgtaactgctttataagacctgtaaattttatacttttgcatgtttttatgatggtgaatatgttagaccattcttacgttgctataaaggaatacctgggaccgggtaatttataaacaaaagaggtttaattggctcacagttcttcaggctgaacaagcatggcatt

SEQ ID NO: 641259 - DNA, 638 bp, Homo sapiens
gcttttactcgtggtggaaggtgaagtgggagcagacatgtcacacagccagagcaggagcaaagtgtggggaagatgccacagactttaaaataaccctgtygcataagaactcactcactatcacgaggacaccaccaagtcatgagggatccacctccatgacccaaacacctttcattaggccccacctccaacattgggggtgacatttcaacataagatttgggtggggacaaatatcaaaactctatctttccaccccatcctccccaatctcatgtttttgtcacactgcaaaacacaaacatttcttcccaatagtcccccaaagccttaattcattccagcattaactcaaaagtaccaagtccaagtccatagtctcatctggagattagtttcttccatctacaagcctgtaaaatcaaaataggttatgtacttccaagaaacaatagtagtacaggcattgggtaaactttccctttataaaagggagaaatcagccaaaagaaaggggctacaggccccatgcaatttcaaagcccagcgaggcagtcattaagctttaaagctcccaaatactctcctttgactctatgtcccacatccagggcacactgttgtgaggagtg

SEQ ID NO: 641260 - DNA, 398 bp, Homo sapiens
tattctgtctctctcccgtttgtttacagaaacaaagggctccaaggtagtggagccacacaagacaaggcgtctaaatagttgagtttctatttatagaacagtagctttatagagtcacctgactagcaccagatcacgctttaagtgagaaggaatcctttattatrctaagccattgaaactttggagttgttcctgcagttatcatggcttactctaattaatacactgtgccagttttcaattcattgcttctctgctccaaagccaccctcttttccttagttttaaattccaaagggaaaccttgcaaacatttctcctttgccagtaggcacaatgtaaagccttgtcagtagagggtgctagtgagatcctgcaggagggaggggatt

SEQ ID NO: 641261 - DNA, 529 bp, Homo sapiens
atgtcagccacatgcccattctcatgcctatttaggtcctattgttgagcctacctcgccagtcaggctctccttcccctcttggtasactccccttcagtcctttctgggtcagtggatcttttgtgaaaattaatcaattcatgagtaaaacttgaacctcaagaagaaaggagacagctcttaatccctccctctccagaggctcctaagtccctgttcacacttttctgcatttttcctcataccacagttctgcttatccagggtattaggtgcctagctgctttacattggcctaaggaacctgttaagcaaatctctgcctcataaataggtctggtttatggtgctttgctgttctatcattaaaaaaaagtagctgaagtttttttttaaatggcaagttttcttgattaaattccaaatactcaatatagtcatacaaaaaagactcacatgatcaaaacttcctaattccaagcagtctctaaattgccactaacattatcttttaaaaataaaaata

SEQ ID NO: 641262 - DNA, 529 bp, Homo sapiens
atgtcagccacatgcccattctcatgcctatttaggtcctattgttgagcctacctcgccagtcaggctctccttcccctcttggtacactccccttcagtcctttctgggtcagtggatcttttgtgaaaattaatcaattcatgagtaaaacttgaacctcaagaagaaaggagacagctcttaatccctccctctccagaggctcctaagtccctgttcacacttttctgcatttttcctcataccacagttctgcttatccagggtattaggtgcctagctgctttacattggcctaaggaacctgttaagcaaatctctgcctcataaataggtctggtttatggtgctttgctgttctatcatwaaaaaaaagtagctgaagtttttttttaaatggcaagttttcttgattaaattccaaatactcaatatagtcatacaaaaaagactcacatgatcaaaacttcctaattccaagcagtctctaaattgccactaacattatcttttaaaaataaaaata

SEQ ID NO: 641263 - DNA, 406 bp, Homo sapiens
tgtcttttccaaatttgtttgattaatattctcattttgctcagcactgaaactcatgactaatttgctatttttctctttacttctgaggtttctgccaattgcttgcacttgggtcttttgcagcatctgtgactgttcaccatttgtgatccccttgaacactgttggaaccagacagaaatgatgctcatcctggcctttcctcttcacagctgtatgrctcaaagtagaatacattatttctctcagtctcaatttcctcactggcaaaatcagtaagagtctgtcaatatcgcatgattgttgttatatctgtgatgattactgttcacattttcatcatatcattgtagggcacggataatgttgttcagattagcaaagggacagcagttcattaata

SEQ ID NO: 641264 - DNA, 245 bp, Homo sapiens
aattgaaagaaatcactacttaggagagttaatgagtttgccattcaaaacgtgtgttaataattagcattttattgaatgcttgccrcttcccatccactgaactaagcacttttcacacatgttcttattttatgcccacaacactttatgatatagtttctgttgttatccacattctacagacaagaacgctgaggcttagagaggttaagtgattttcccaaggtcacagaattaatagt

SEQ ID NO: 641265 - DNA, 589 bp, Homo sapiens
ataccaaagataattatgcttccctaatgcctctggtttatcttttccttttgcacatcaggtcatgtaaatattcacatttccttcttgttttggctgtcaaaaatacatggccactcacctgcagatttataggaacttgcgctgcgggtaagtacctctagctgatgcagggattttccaagcaattttttttcatttgtgaggatgctccaaggaattccctaaccccctgttatttttacctcctgttaatggggaaagtcagggtaattttgcagggggtagagatgaagaagaacagataaaagatyctaagcaatgaactagggctggggctgcacaggtacagataacaaattccccaccctcaaagagtttgtagcttaatggaggaaacacacaggctaaaaacttttgtaacacagtttttaaaaattgtattcatgtgaagatgagaacactagacaagacctccgagctccctactctgccgagggaaattaagaatgctttaatacaggagttaacatttggacaggaccttgcagcataaggaaacaacatttattgaacactacatgctgtg

SEQ ID NO: 641266 - DNA, 643 bp, Homo sapiens
gaaattaagaatgctttaatacaggagttaacatttggacaggaccttgcagcataaggaaacaacatttattgaacactacatgctgtgtgcttctttatttcgattagctaattgaatcacggcaacttcacaagataggtgcattttccctcatttttttttttkgatagactaatgaaagtaaggcccaggaaaatcaagcatttattcaggatggcacaggtatggagcttcagggctgggatttcaacctagatctgcttgtcttcaaccatgctcttgccttcatgtattaggactattcaggtctaatgaggccttcaaatgaggatgcatggttctgggaattgggagggcaaattccacccacgaatatctggttgaatgcctgtgtcctttgtgcaggcagaggaaagagcaaaatgatttctcaggatgtttttagctcactttctgtgcatgcttgtctcagggaagaaaacgtctccacttctaacttttgatcagtgttcctcttagtgtaagtgtctctccagtggtacagtgaagtttttagatcagctgcatttaaactggatgaaggaagggatcaggtcagtcttgtttaggactcatacctagtacctggccatagaagcca

SEQ ID NO: 641267 - DNA, 559 bp, Homo sapiens
caaagacctgtatattaatgtttatagaagctgtgttagttttctacagctgacataacacatactcyaaacctgacaacttaaaacaacagaaattttttgtctcatagttatagatgccagaagttatggatgttaaggtgctgacagggttggctcctcctggaagctctaaggaagaatccattctattcctatctgctagcttctggtggctattggtaatccttagttagcattccttggcttgtgacacattattgaatctctgcatccatctttacatagccttctcccctctgtgtcgctgtgtgtttgctccttctgtatttcatagaaggacatccatcattgactcacaacccgccctaattcaagatggtcttgtttcaagagtcttaccttaattatatctgcaaagaccctttttccaattaaggtcacattctgaagttccaggtggacataccttttggaacgccacattcaaccctctgtagcagctttgttcataaaaaccaaaatctggaaaagcccaatatccttcaactggtgaagg

SEQ ID NO: 641268 - DNA, 581 bp, Homo sapiens
ccttaaaaatcaaacgtaattgaaatagaatgaggaatttatttatgcagttttatcttatgcaaactgattatgtataatatgtaaaaaatgcaataaaatggtgaaaatgaactcttgggatttaaatcaagcctggcttatcattaaatatttaatgacttttatgccctagagctcaaggaaatccctttccttgttatgttattttgtttttttaattttcacagaattcatcacctcttcttaagtctcacaggttttcttgatgtgacactccgaaaatcaaaacgaggggagagaaagagaacttcaaatasatacaagtggaaattatttttaagtcacattaacattccattgttatcaattagaatctcctaaggggagtaaatcaatccgaaatataagcatagttgaattaaagcacaacatgggggcacttgtggtcatgtgcacacctcctcacccaaacacatagccctactcatgggagtctagtgtgtaggagaatatgttaagatgtcctagctaagccacctccaacaccagtgatatttgatatcctcctaggacaagag

SEQ ID NO: 641269 - DNA, 433 bp, Homo sapiens
ttctatctcttttctcatttctgattttatttatttgtatcttttctctcttttttagtcagtctggaacaaaacttttcagtttttttgatctttttattttattttattattttcaattttaatattttttctctgatatttactatttcattccttctactgtttttgagtttggtttattcccttctagttccttgaggtacatcattaggttgtttgaagtttttctgcttttttttttttgttttcttttttttgagacaaaatcttgctctatcactcaggctggagtacaacagtgaaatcttggctcacwgcaacctccgactcctgcgctcaagccatcctccaacctcagcctcccgagtagctggtattacaggcatgcaccaccatgcctggctaatttttgtattctttgtagagctgg

SEQ ID NO: 641270 - DNA, 543 bp, Homo sapiens
tgtgtttggaggagatagaccacaaacatttatattaagtactatcatatggataattctgggaccgaaaaaagagaaaattgaggtgatattttagataggtcatacaagactcatagggaaggttatatttgggcagagactgaatgaagtgaaaatgagtgtcataaattttctgttaaatatcatcttagtagagaaggctgtaacataaagagactgaagtaggagtgcatctgggaggtattcaaagagtaggagaaacagggaggctgatagaatatgagttcagagaagtacataggggmtgtatttttccttgtgagccattttaagaactttagatgggaggcattttgagtgttgatagcagggaatgatattatatgatttacattttaaaggattccatttattgcttgggattaaggagaaaaggtggaaacagaatagctagaaggctattgcaagttgcaggggtcctggcaaccattatgccttagagcagtgtggtggtagcagaaatggtgagaatgaattgga

SEQ ID NO: 641271 - DNA, 461 bp, Homo sapiens
tatatgtgctttgtaaactaaagaactttacaaacatgagttgtcattaatataaaaaactgttaggtttctcagcccattcattaagacagagaaactgtggttgaggtgagaaagaggaaagaatcatcttgatttcatgtatctagagatcttgggattgagaaaataaagcgggaaaagaagcttccaacctcacccatcccaactttaaccctatctttgacctagaccacttggctttctgatagcatgggaaatgaggctgacactgcaaaatcccatgtcttggtatagccatcaaagtttcagcacaaatcactggccttttttaaaaaaatkatttttaagcagcacctctcattggctccactgagctaatctgagctcaaggcagtaaaacgttccaaacttggagagataaacactgacatagtccaatgttaaaattaactttgcta

SEQ ID NO: 641272 - DNA, 508 bp, Homo sapiens
gtttctccctcttcttttagccatcactatccactcagtcccttggggcttccttctcccactcaaagcctagctgtgaatgggaagctagcttacagcttttctacctgcctctcccccaacccaacccctgaagacaagctcacagtaccttcttattctatgaattttkctctccacactgaacaggaaataaagtatgaaatgtagggaagagatcaaaagtttctaatttttcaaaattcatcactataatttcttactctctcctgatatggtaaatggcagtctaaacaggcttttgccctgcccttttcctctctttgcaaaaatctcctgaacccattacattaccaggggtcctcacctcaacctgaagataaagaacatcagcatcaggatcatgttatctaaagagaacaatgaatttctccccagactggatactatttccctaagtttctgccctaccctggaatggaacttaccactaattagatctgcttac

SEQ ID NO: 641273 - DNA, 557 bp, Homo sapiens
aagtatgaaatgtagggaagagatcaaaagtttctaatttttcaaaattcatcactataatttcttactctctcctgatatggtaaatggcagtctaaacaggcttttgccctgcccttttcctctctttgcaaaaatctcctgaacccattacattaccaggggtcctcacctcaacctgaagataaagaacatcagcatcaggatcatgttatctaaagagaacaatgaatttctccccagactggatactatttccctaagtttctgccctaccctggaatggaacttaccactaattagatctgcttacaatctgtgacaacctgatttccccatgcaaactataagagagctgggccaagagtggcaggttttagggcaggtccaggcaaaaatagcataccattactgtttattacacagaattaagagacaaaatgcctccaaaatatgagatttttgatagataycaaatgattctatcatttgatcagcaaagaactggagaggcaatggggatcttttaatatatactgatataattcaacagtttc

SEQ ID NO: 641274 - DNA, 610 bp, Homo sapiens
tcaaatactttcagtaaattggataagtgtttgggacttctctgagggccatatttaggagtcattaaatctgtttgagggattataggaagccttcatagaagtggtgacatttaagctgggtcctaaaggataagcaaagggaggaaaacttatgggattatgcagtaacttgttgctgtatcttctctgctgaggggttgattggcaatgttaatacctcagagattgtgcatttcattattagatacctctgattattataatgttcttatagaattctccatttcttcctcccttcccctgtctctctttttggttgggagggcaaaaggtgwtttgtatgacatgatgagagaactcttggacaattactttaggccactctaagactgcatccacattcctttcttagccttcaggattctctgtagctttttttctgactggtctttctagctccatttattcattcattccttcattcagccattacttatctgtcacccactgtttgcaaggaatagttctgaggtctggagataaagacaaagtctttgcctttgtggagcatatgttccattggagggagccagccaataggcaaata

SEQ ID NO: 641275 - DNA, 654 bp, Homo sapiens
ggctcccacttactaaatgccagtagcacttacccagttgttttaatccaaaatttcccttgacattgccaaatatcccctggggagcagagcaaatctgtcctgccctccctaactcctcttcaccccactattgagatccactgttgtacacaaaagttgctgatggtttggaccaaggtgataacagtaaaggtgatgagaagtggttggaccgtagatctgttttgaaggtatagttgatacaatttgctgatggatgcttgtgggggctgatagacaaaaagtggagtaaaaaatgaatcagatttttggcttagcaactgaaagagtagaattgccatttattgagggatgggggaggaaacacctgaaggaggaacagagttttgacttgttaagtctgacagtcagtggcacagctttgtctcctattgtctttaaaaatgcttttctttttgagggtaagaactaggtcatgtcatctttgcatccatagtgacgaacattgtgtctggcatgtagaatatgttcaataagtggtgaatgaatgatgagattatttactatttccaagaaggaccaagttatttactrtttcctaaaccgttcatacttttttctcctttgggcctttgtttttgtgattcactc

SEQ ID NO: 641276 - DNA, 651 bp, Homo sapiens
tcctatatcctcttttctgcctacttttggggctagactctaggtactgctgacatgaaaaaaagaacaatcccatgtggcaggtcactgtgccatagccaaacaaacactcattaccttggaagggaaacagacttcgtccctgttaacttctggctcgaggccacttgggtgactatatgctgagctccctctctgagtcatttgatctcttccttcctttcctccctgttccatttacttaaattcaatttctggcgggttgcagagtccagagaccagatgcagctaggctaggcattttygcttccactggcctctatagaatagggatttaacacctcatagggttggtgaggatcagatgaaataatgaatgcgtgaaaatgctttgtaaagtgctatatagatatcattgtggttgttcccgagtgcattttcaagccgtgaaaaattgctcagatgctatagcctgaaagcctagggttgccactgacaggcaagaataggcactcagtatagacaccaagatttactagaccctttctctgccctcgaaaaactcacagactaataggagaggattgaacctcaatcctccgtgagtaaaggaaaaggagtggggtagatagggctttaggactggtaatt

SEQ ID NO: 641277 - DNA, 650 bp, Homo sapiens
aaaggtgtgggaaatggatatatcctcatgaacatcctgtaaagatgtaatttatcctcaattttctagaaggtagcttaacagtaagcatcaaaattgtttaaaatatttctgccacttgatgcaatgatttcaatgctaagtccataagaaaataataaaaatatgcaagtacatatattgtttaatttcagttaccgtaaratggaatttgtctaaatacgttctaacagatatttagtaactgtaaattcttcataaaatactaaatgaccctttaaaagttgatataggttttcatttattgacatgaaaagaaggattacatatataaatatatacaggtgatattgcatgtatgtatacatatatatgtgcacagaaatactcaaataaaatatgacaaaatgttaacagtagttatgcctatgtggtgatattgagattgatctttcctttttctttccatttctttcttccttcctgccttcccattcaattttaatggttctttacattttatgctatcctctgttttcataaacttgactttaattttatatgcatatttccatgtttcaatatcttagatgcttatgcactttgacaacttaatttttcacattggtgtttctataatttgtgcttat

SEQ ID NO: 641278 - DNA, 650 bp, Homo sapiens
aaaggtgtgggaaatggatatatcctcatgaacatcctgtaaagatgtaatttatcctcaattttctagaaggtagcttaacagtaagcatcaaaattgtttaaaatatttctgccacttgatgcaatgatttcaatgctaagtccataagaaaataataaaaatatgcaagtacatatattgtttaatttcagttaccgtaaaatggaatttgtctaaatacgttctaacagatatttagtaactgtaaattcttcataaaatactaaatgaccctttaaaagttgatataggttttcatttattgacatgaaaagaaggattacatatataaatatatacaggtgatattgcatgtatgtatacatatatatgtgcacagaaatactcaaataaaatatgacaaaatgttaacagtagttatrcctatgtggtgatattgagattgatctttcctttttctttccatttctttcttccttcctgccttcccattcaattttaatggttctttacattttatgctatcctctgttttcataaacttgactttaattttatatgcatatttccatgtttcaatatcttagatgcttatgcactttgacaacttaatttttcacattggtgtttctataatttgtgcttat

SEQ ID NO: 641279 - DNA, 552 bp, Homo sapiens
ggacatgtgtctttatagtagaacaatatatattcctttgggcatatacccaggaatggaattgctggatatttctgttttaggtctttgaggaatcaccacactgtttcccacaaaggttgaacttagatacatgaggccaagaatcatatgaaaaagctcaacatcactgataattaaatacatgcaaattgaaaccacaacgagatactgtctcacatgagtaataatggttattatcaaaaacccaaaaaaatatcagatgctggccagattgggaagaaaaaggaacrtttgtacactgttggtggaagtgtaaaaaagcattcttctttgtccattattgaattttatttacatcaagagaaaccaaaaatgcaatgaactcctttccacatacatacgtataaatcatgggcaacattttaaaaccttttgcatatataaacaaattgctaatttagattcaattatagtgtcactgtgtctttggatgaaaaatgttaaacctctagagacttttaatatctaaggtacataaggttcttttgg

SEQ ID NO: 641280 - DNA, 630 bp, Homo sapiens
gtctgacttcagtaatgacttctacttttactcattctgccagtgatttattgtttgaggcatctgacatctgaacacagccatgagatgcatgggacatgcattgctatgatcatctatcctgacagatggtgcttttttgaacagttgtccaaccagaaagagactcactgaaattttatatgatgcaaaccaatattttgccaaaatgcataattatcaacgtgtagaacttttagcaacaggaaagagacaaattcgtaggcagacagggttcagtccctagtgaaactccaccttcaagcccaggacagtctaaggcctgaaaactgagccactagttccagatagaatccactgaccagagggagaactcccatccctatcttacccactctttcaattttttttttcctgaatgatgccttttaaccaatcgaatggtgtcttttccaagctcaccgataaatcagtcagcatgcattccctattctaaacccataaaaagctcagactcagccttacgtgaggctgtccactttkgggtcccctcttactgttgagagtgtttctttcacttaataaattttactgagccttacttactctgcagtgtccatgtacctcatt

SEQ ID NO: 641281 - DNA, 592 bp, Homo sapiens
ggactgttccactgacctgtccgtgggaggtctaacgtacatgcagaacagggttccataaaacacagtcactgccaccaggtgggacccgcaggtggagaacgctttgygcctactttcagcagaacgcatcctcaggatggcaatgagaatgaagatgtaggagatgagggttatgatgagggagctggagaggttaaatcatgctaccacaaacatggatgtttccttaatgaaagtgtcagagcaggaaagtcggatgaggggtgggtcagcacagtagaagtgattaatgatattggagccacagaaggtcaagtggtatgtccacatggtttccatcagtccactaagaaacccatagacatatggaccagcaatcaggcgaatacagagccctttggacatcttgctgctgtaaagcaaagggttacagatggccacatacctatcataggccattacagctagcatataatattcagtaatcaccacagcaatgaaaaaatagcactggactaaacaagcagcataggaaatggctttcttgtctgagaagaagttcaccaacatcttgggagtcacattagtg

SEQ ID NO: 641282 - DNA, 592 bp, Homo sapiens
ggactgttccactgacctgtccgtgggaggtctaacgtacatgcagaacagggttccataaaacacagtcactgccaccaggtgggacccgcaggtggagaacgctttgtgcctactttcagcagaacgcatcctcaggatggcaatgagaatgaagatgtaggagatgaggrttatgatgagggagctggagaggttaaatcatgctaccacaaacatggatgtttccttaatgaaagtgtcagagcaggaaagtcggatgaggggtgggtcagcacagtagaagtgattaatgatattggagccacagaaggtcaagtggtatgtccacatggtttccatcagtccactaagaaacccatagacatatggaccagcaatcaggcgaatacagagccctttggacatcttgctgctgtaaagcaaagggttacagatggccacatacctatcataggccattacagctagcatataatattcagtaatcaccacagcaatgaaaaaatagcactggactaaacaagcagcataggaaatggctttcttgtctgagaagaagttcaccaacatcttgggagtcacattagtg

SEQ ID NO: 641283 - DNA, 592 bp, Homo sapiens
ggactgttccactgacctgtccgtgggaggtctaacgtacatgcagaacagggttccataaaacacagtcactgccaccaggtgggacccgcaggtggagaacgctttgtgcctactttcagcagaacgcatcctcaggatggcaatgagaatgaagatgtaggagatgagggttatgatgagggagctggagaggttaaatcatgctaccacaaacatggatgtttccttaatgaaagtgtcagagcaggaaagtcggatgaggkgtgggtcagcacagtagaagtgattaatgatattggagccacagaaggtcaagtggtatgtccacatggtttccatcagtccactaagaaacccatagacatatggaccagcaatcaggcgaatacagagccctttggacatcttgctgctgtaaagcaaagggttacagatggccacatacctatcataggccattacagctagcatataatattcagtaatcaccacagcaatgaaaaaatagcactggactaaacaagcagcataggaaatggctttcttgtctgagaagaagttcaccaacatcttgggagtcacattagtg

SEQ ID NO: 641284 - DNA, 558 bp, Homo sapiens
gaaatatgagtatttacatcaattaacagatagtttgatatcaatatagttttaactgcccataccccaaagtaaaaatttctatagtgaggaatcaatgtaaataaaaaaaaatctaatttgtattttagaaaataaaacccttaaaaccagacctgggttttctttttggaaggagttaggcatatagttttaaactgcttcttaaacatatattaagctatttttttttttkgaaacagaatctcactccatcacccaggatggacgggagtgcaggggcatgatcacagcttacagcaaccttgatctcagggtttcaaaccatcctcccatttacacccctcacccctgccacagtagctgggactacgggtgtgcaccaccataccacactaatttttgtattttttgtagagacggggtttcatcatgttgcccagactggtcttgaactgctgagtgcaagtgatctatctgcctgggcctccaaaagagtttgcattacatgggtgagccactgtgcccagcctgtaataaggtttaaaaaagagcact

SEQ ID NO: 641285 - DNA, 620 bp, Homo sapiens
aactatgtgactctctatatacttttgtactttcttagaaaactaaggattataacgatattgattggttactcttaatgtcactggacaaagtgctgaaagataaggatgagcttggggattttaatttccagtccaaccctgagagcttctatgtatgtctggaaggagatccttgtctcctgtagcttcaattagagaattgcagaaagggatcctatatgttgygttgggggtttgtgggaagatcctgatgaagctggaaagactgagcccctaaattctgataagtgctatctgacagtgaaagaggtttccctactcctatactcctagtggaattggcctccccgttcccagtggtatcagcttttccacctatgtcttgggtaattaactccatattgccagaataaatggtaaagacttcccctgaggcagtttccatacaagacaatacagattctttttggggcccacctttaccacccttctttgcttctaaacttataactaaacccaagtaccaacagcccctgaaagaagaggtaccaagcaagaccatgaggtggtgcactaaaaaagtagatgagttttctaatttatacaaacagaaatcc

SEQ ID NO: 641286 - DNA, 576 bp, Homo sapiens
aattcatatataatagtttcttagtttgtaatttgagaagaagctgaacttcaccattaataacaaataatatatttttcaatatgatttagaaaaagcatgaaatgaggacttctttgttcaggtatactttttttttctttcttcttttttttcttttaatttttaggtttatgggtacatgttcaggctgtcatataggtaaacttgtgtcacagtgattggttgtacaaattatttkgtcacccaggtactaatcctagtacccaacagataatttttctgatcctctccctcctcccaaccctccaccttcaaggaggtcccagggtctgttgtttgcctccatgtgtccctgtattctcatcattcagctcccacttacaagtgagaaaaggttgtatttggttttttgtccccgtgttagtttgccaaggataatggcctccagcttcatccatccatcttttatatgtctcacatttcctttattcagtctaccactgatggacacttaggttgattctatgtctctgcgattgtgtatagtgctgcaatgaacatatgtgtgcatgt

SEQ ID NO: 641287 - DNA, 515 bp, Homo sapiens
ccaaaattgtcatttgtaaaatatggaagttcagacgctttatatagaaaatgttgtatgtattttaaatgatggtattttgaaatataagttaatacatttcttcctcagagaataacaaaggcctttacaattcttattcagagttgtaactggcactgtaagtgtctatatgtaactcatggcttagtccattctacawtatcctttttctcattcttatatctcatcacaaacataacttagaaaacagtgtctgtgagtaaagacatactaacaccatacccagagagtagacttgactgttcagataaatgtaatgtggcaattttttttaatcttgtcacattagactagatttgtttaccagtgtttaatgttgatcagtgagtgagtgtatactaaaagtcactatacaattccattctttcttactttcagcggatctatgagttcccatgcctaagttttctaaatttcaggaaaataaaaagattctgaagaactgcagcacc

SEQ ID NO: 641288 - DNA, 626 bp, Homo sapiens
tacattttttgcattaatttttgttttcctactctatttaatgttgtgtatcatcattttcttattcattttggataattttaaaattgaattattgaatacccaaatagtatcaaatatcatgtctctcaactcctctttcttctctctcccaccattatatctagtaatggaaaatagagctttccttaaaaacttataaatttcacgctttgaaaattactatgcaaatgaagtatataaataaaataagagcctgtgtttcttcactgttcttcagagtttactaatagctcttgagtatttacttctgctcaattaatcaaagaatccatttcagttatttgtgttttgtattaataaacatatttattgagcaacataatgtggtaagtartaactttcaaaaaatacttatttaccttaattttattctaaataaattatatttattatatgtataagatacatgttagatatgcaatatgtaagtatatactagatatcctaaaaccctaatacagatggaacattaatgtctaattatagcaacatggaaattgatggataaggacataggaacccataaattccaaatctctaattgcatgttaaaaactgaacgt

SEQ ID NO: 641289 - DNA, 626 bp, Homo sapiens
tacattttttgcattaatttttgttttcctactctatttaatgttgtgtatcatcattttcttattcattttggataattttaaaattgaattattgaatacccaaatagtatcaaatatcatgtctctcaactcctctttcttctctctcccaccattatatctagtaatggaaaatagagctttccttaaaaacttataaatttcacgctttgaaaattactatgcaaatgaagtatataaataaaataagagcctgtgtttcttcactgttcttcagagtttactaatagctcttgagtatttacttctgctcaattaatcaaagaatccatttcagttatttgtgttttgtattaataaacatatttattgagcaacataatgtggtaagtagtaactttcaaaaaatacttatttaccttaattttattctaaataaattatatttattatatgtataagatacatrttagatatgcaatatgtaagtatatactagatatcctaaaaccctaatacagatggaacattaatgtctaattatagcaacatggaaattgatggataaggacataggaacccataaattccaaatctctaattgcatgttaaaaactgaacgt

SEQ ID NO: 641290 - DNA, 589 bp, Homo sapiens
gatcttggctcactgcaaactccgcccctcgggttcaagagattctcctgcctcagcagtgaagtattatttcaaatacaaatttaaaatacagcaatgaagtattattttaaatacgaatagatatcctttagacagttctggaaaagcagacagtgtgaaggtatgaaatacagttaggatgcagtctgaatccatttaacattaaagcttaccgargagagaggcttctaatgaggatctgaggcatgggtggagggatgcctcttggctccatataaagactcacttacctgcttagcagtgatcttgactcctaatgagctcatttagaagttattcagatgatttattagttcctaggtcccattggatctaaacttgaacctctagaggtatctgaaagcttgatgtttcctcctatgtttctctcaatgtgagatgagctggacaaattacattgaaaaaaatttttaatccttcaaactacctgtattcctgagacagtcatacttcaaaaatacttatatacatatccatgagggcaaatgtgtgatctactactggaaatgatataataaaccataac

SEQ ID NO: 641291 - DNA, 570 bp, Homo sapiens
gatatagtgttaactctctgtaacttaactccacatttttaaataagtgactatgacaggatttctttgggccaggtgtccacaacaggggaactataaattgtagcagagactccagttggcttagttaggggtagaagattatcctaaatataaagaactcaagggaaatatttagccatattaaaatagcatttaaattctatgtcaaatatgagcattgtagttatcacagaaagtctataaaataacaatatttactcattacagtgataaaaatataaaaatataaaaaagatgaataaaaatcaactgaaagagcagatatactttataagtggtaaaaataatatctaattatataaataaaaatkgtgattaaacataaaatacaaagtgaaaactatgaggagctgtaaaaacttgtgaaacagaaccaacaaaaagacatgagaaagaaggaacagaaagtagtatccagtaaagcataatgccaagaaattacaaaactaatacaattttcaccaatattatacattgaaagctaaaaaaaattgtcacctgaaaaat

SEQ ID NO: 641292 - DNA, 561 bp, Homo sapiens
acatttagtgtgacactttaccctcgttcttccatccatcccggcgaaaaacgcttaaggaacaaaccactacacttgggcagcataaggatgattagaaatatgggctctgctgtcagttatacatagtcacactaatactctgtgaccatcaccagaaagtcggatatatccaatgtatataaggagttatgggtgagagccttcctcatagggtaagcaagagactatcttaatacatgtaatgcactcagaatatctgataaggacatcactcaatcgcaatagataaaataataatagtactaatcaatggaatatgaaagacaaagtggttagatatgatgatctctcaaagcattttctagttaatatttcatgattctattttttgaaaaataaagccaggaccaaattaaagtttaaataggctaatrttgggcttaacaagatgaatcctctttttttcagggctggtagaaatacaaataattataattatcctaaaagatgcatcaaaaactccacccaccagtatatgtttccataaaactttttaca

SEQ ID NO: 641293 - DNA, 644 bp, Homo sapiens
acatcctcacactgtctccttgccaatctctcaatcctacaaattctggttaactttttatttggcaagttcaattccatagccaatttatatgaacagcataacatggtcacattcccgttaacccagtgttttgtccctgcagccatctgtggcaatcacatccacatggtcatctgccttccatgtagtcacaatattgggtccaaagtgctccacgtttatatggctgtccttctctatgtttgcatttcatgtaaacttatttaacatggtgttatccccagagctgacgacatggaatagcatcatatcctgccaccttgtggctactccgaccaaataaaaccaatttcaccacacgccrtgttgctactccataatgtgatggaagtgtatgagagttctaactttatattttccaaacaaatttggaatctttctactctttgtaagccagaaaaacttctctgtttttgaatttcaccttatgaatatgtctagataatgttacctccttgaaggaatcaataacacaaaacagtagctgccctatatgtttgtgactctttttgaacaaccaaataaatagaaatagaaagaacgtaacgtttgaaaatagtagcatgatggttaattttatg

SEQ ID NO: 641294 - DNA, 611 bp, Homo sapiens
gcctccagttttgctcttctttttgtatagtagctacttttccccaaactgtcactaaactgtaaagcacctttatagggtcaaacacaatagatgatctatagtttccatatttttttctcagacgttctctgtcctcccattggattctgctctgtttgcagagctgttatttgaagataatgattccaatcattggtttaaggcatttcattcattcaacttgattacatgacaatatgcaacaaactggagattcaacaaaaataagacagaaaaragtcttaaagagagttttatggaacagttaatgaacttttctgctgttatcatgagtggcacaaggtcagagataactaggtccatgcatgtttgtatttttctgcaatgtcagaattttcttgatgctatttcaatcataaaatccatgagctacatggggttcccgaggaggcaattctccttaaaacttcctgttcactcagtagtcagagccatgggcaaacaggctcaagtcattcaacaagtcagtcagtattgcagtccatgaattacagtatatttaatcagtctataaatgtaatagattacacattgtacagcaaacaaag

SEQ ID NO: 641295 - DNA, 580 bp, Homo sapiens
cctgatctggaaaagaatccatatttatgggcattttaatttgaaataaagtaattcaataagggaaggtcatgtgtgtatttttaaatttaggtggtgaggaaattctctaaatactcttgaggtcccctaatctctatttctttgtacacttcgcaccccctaggatgaaatctaacccctagtttcctgtaattttactattgctatttatcacctggataaccgtcactcagggctcttggtatttagcttgaggggagtactaacaatgccatcttctacatccttgtttgtgctgaatcacccgtcactacaaaatgagatatgactttccaaataagaatccctctattgccagcaagaacatttcaggcagccacagayataaactgttgaaccagaaatctggagttatctgttgacatgtctgtaatctccgtttggatataaatctaaggatcttagagattttaacaactctgtaacagattttacagtctatatataaatatattctaaggcagtatacacagtttttagaactttaactattattcatttttaaaaatgtacccac

SEQ ID NO: 641296 - DNA, 552 bp, Homo sapiens
cacccgtcactacaaaatgagatatgactttccaaataagaatccctctattgccagcaagaacatttcaggcagccacagacataaactgttgaaccagaaatctggagttatctgttgacatgtctgtaatctccgtttggatataaatctaaggatcttagagattttaacaactctgtaacagattttacagtctatatataaatatattctaaggcagtatacacagtttttagaactttaactattattcatttttaaaaatgtacccactaattaatccttcaaatttttattaattagaccaaacctctggggccatgtagaatgcaatctgtttcaattagtaattttctcctctagtcataraaaaatgttctttccaagtttgtggttgaaaagttttggattattactatggataaatgttcacttattttcactatccattgtgatttaccttcctgactgctaattttctgggtaactgctaaccagtaataatatggataaatttcatcaaattgtgattgaatacagtttaacatt

SEQ ID NO: 641297 - DNA, 611 bp, Homo sapiens
taccagctgtgtgctaggaactttgcaaagctctatatttataatgttatttaatcttcacaatcagtccaagagataagaaactacaagcgcattttgaagatgaggaaactaggtacaaaatgtgaaataatttaccaatgacaacagttgattatcacagaaactaaaattattagtcaaactgtttgaagatttgaagagtccagttactaatcagatgcttatatagagcaggcagtgaattataatggtgtgaaatggctctagtggtccaaatggatacggaattcatggtaactctgctggtgctacccttcccagtagaatgcagagaaagtagagtgctaaggaaattatccagtcttaaaacmaagaaaagtatccttgctatttaaactttgacactgtttccagataatctgtgcagcaaatttgaaatgtaagataacagatgttgaactttaatataattcaaatatcacacatgatttaaataaaacagctatttcccatgctgtttatttcattattgatgaagctgtgttgttcagagaggagtaagattctctctctctctctctctctctctctctttccttttcttttac

SEQ ID NO: 641298 - DNA, 632 bp, Homo sapiens
gcttcaggtagtgactatctcatactgtttgccaaataaatcaattttagctcttgatagygttaatattatttagattgaggcttactctgcagaagcctgtgagtaatctcttcatattgatgattgtaggagcttaatcttttttggaatattttgaagtgttcttccattgcctgtctaaattgtaatctctaatccttacctctcctggctcttactcttttcagtgcttacattgctgtgctgaattgaaacctgtgtgccttttgctctgatattaccagactctccaacatcttgaatcatttgatttctcatttcttaaaacagaacttggctactccttgaaaatctgtttttcctcaggacatttctatgctcaatttaaaattctccacacatttcaaatatggcaggtgggataaggcattgctgatgcttggaaaattgctgcatattgataattatatcttgcatttgtgtcaactcccttgatgctttgaagcttacacacttatatgctttgtcactgtattagtccattctcacattgctgtaaagatactactcaagactgggtaatttacaatgatggtggaagaggaagcaggcactttctttacaaggca

SEQ ID NO: 641299 - DNA, 632 bp, Homo sapiens
gcttcaggtagtgactatctcatactgtttgccaaataaatcaattttagctcttgatagcgttaatattatttagattgaggcttactctgcagaagcctgtgagtaatctcttcatattgatgattgtaggagcttaatcttttttggaatattttgaagtgttcttccattgcctgtctaaattgtaatctctaatccttacctctcctggctcttactcttttcagtgcttacattgctgtgctgaattgaaacctgtgtgccttttgctctgatattaccagactctccaacatcttgaatcatttgatttctcatttcttaaaayagaacttggctactccttgaaaatctgtttttcctcaggacatttctatgctcaatttaaaattctccacacatttcaaatatggcaggtgggataaggcattgctgatgcttggaaaattgctgcatattgataattatatcttgcatttgtgtcaactcccttgatgctttgaagcttacacacttatatgctttgtcactgtattagtccattctcacattgctgtaaagatactactcaagactgggtaatttacaatgatggtggaagaggaagcaggcactttctttacaaggca

SEQ ID NO: 641300 - DNA, 618 bp, Homo sapiens
atcattcaacccatgattcattcaacccatgattcaattacctcccactaggttcctcccttgacacgtggggattatgaggattacaattcaagatgagatttgggtggcgacacagagacaaatgttaacagtcacttatgtatttccaggtcagtccttgttatttattgagaatgttgacaccaagatcactgtcctgtcacaaagttgtcattagttcccatgaacwtgacacatttaacatacggcttttctgattattgattatttttatcagtgaccccagcaccattccacttcagctttccacccccatggttccatgtttaaaattatttgtctacaagtttaccaaatgctagatatccaaaacttaaacattttcttatgatcacaaacttctaccctccccttttcacctcagttatgactacaggtcttcacttattcacacatatcactattccttaaacatcttaaaatactcatttattttgtcactttattttttcaattcttctcctatacagcttagtctccatgacgtattgcttcaactacgcttcccaacaaccaacatttttttaggtatacccaaatctgggtattttgtaa

SEQ ID NO: 641301 - DNA, 618 bp, Homo sapiens
atcattcaacccatgattcattcaacccatgattcaattacctcccactaggttcctcccttgacacgtggggattatgaggattacaattcaagatgagatttgggtggcgacacagagacaaatgttaacagtcacttatgtatttccaggtcagtccttgttatttattgagaatgttgacaccaagatcactgtcctgtcacaaagttgtcattagttcccatgaacttgacacatttaacatacggcttttctgattattgattatttttatcagtgaccccagcaccattccacttcagctttccacycccatggttccatgtttaaaattatttgtctacaagtttaccaaatgctagatatccaaaacttaaacattttcttatgatcacaaacttctaccctccccttttcacctcagttatgactacaggtcttcacttattcacacatatcactattccttaaacatcttaaaatactcatttattttgtcactttattttttcaattcttctcctatacagcttagtctccatgacgtattgcttcaactacgcttcccaacaaccaacatttttttaggtatacccaaatctgggtattttgtaa

SEQ ID NO: 641302 - DNA, 618 bp, Homo sapiens
atcattcaacccatgattcattcaacccatgattcaattacctcccactaggttcctcccttgacacgtggggattatgaggattacaattcaagatgagatttgggtggcgacacagagacaaatgttaacagtcacttatgtatttccaggtcagtccttgttatttattgagaatgttgacaccaagatcactgtcctgtcacaaagttgtcattagttcccatgaacttgacacatttaacatacggcttttctgattattgattatttttatcagtgaccccagcaccattccacttcagctttccacccccatggttccatgtttaaaattatttgtctacaagtttaccaaatgctagatatccaaaacttaaacattttcttatgatcacaaacttctaccctccccttttcacctcagttatgactacaggtcttcacttattcacacatatcactattccttaaacatcttaaaatactcatttattttgtcactttattttttcaattcttctcctatacagcttagtctccatgacgtattgcttcaactacscttcccaacaaccaacatttttttaggtatacccaaatctgggtattttgtaa

SEQ ID NO: 641303 - DNA, 414 bp, Homo sapiens
ctgtctacttctaatatcctccatattttccttattagagcctcaaataactgctggggattgttaccctctaactgttatcttccaggcagttttgccaccctatatccatgtggcaccttgagggtacgttctaacatgcaaatcttagctttctgtttcccattagctttggaytacagcccaaacttcttaacctggtttattaaagctttcctaaataaacccttctttgtaaactagtctcctttcttgcaatttcctttatgcaatccccatgcaccaaccatgttgcataccatcagtttctcagatgtgaccatggactttgaacatagtttggccagaatactccttcctttatatctttgttcctctggctggctactatctttccacttgtcaaatctgagg

SEQ ID NO: 641304 - DNA, 611 bp, Homo sapiens
tattctaggacctgttaggtgtgtgtgtgtgtgtgtgtgtgtgtgtggtgtgtataaaaactgaatgaaattatcaaggaaaggaagatgtgcagctataaaaagacaaagtggcagagaagtgactggatctgtgtctctccaatattaacaagagaaggcaatgaagaaggaacagcaataaaaccgagaaggtacatccagagaagtaggagaaaatcaggagagtgtaggaatccacataaggaaagataatcaaagagtgactagctctggcaaatactgctgacaggataaacagcatgtgatggagacttgacaatcgttttatgcaacatagrggtcgtgtatggccttggtaagattttcagtggagtggtggaggaggcgggtgtaaaaggctatggaagctattttaaaaaaaatgaaaggagacaaactggaagcaacatgtaaagacacaacactctaaggagtattatcagaaaaagttaatttagcaataagtaaaaagttttacagtagccatattgtcttgttcaacacatattttttagtattttgttctaaaaatgttggattatttctaacaagttaagaataaaatattt

SEQ ID NO: 641305 - DNA, 611 bp, Homo sapiens
tattctaggacctgttaggtgtgtgtgtgtgtgtgtgtgtgtgtgtggtgtgtataaaaactgaatgaaattatcaaggaaaggaagatgtgcagctataaaaagacaaagtggcagagaagtgactggatctgtgtctctccaatattaacaagagaaggcaatgaagaaggaacagcaataaaaccgagaaggtacatccagagaagtaggagaaaatcaggagagtgtaggaatccacataaggaaagataatcaaagagtgactagctctggcaaatactgctgacaggataaacagcatgtgatggagacttgacaatcgttttatgcaacataggggtcgtgtatggccttggtaagattttcagtggagtggtggaggaggcgggtgtaaaaggctatggaagctattttwaaaaaaatgaaaggagacaaactggaagcaacatgtaaagacacaacactctaaggagtattatcagaaaaagttaatttagcaataagtaaaaagttttacagtagccatattgtcttgttcaacacatattttttagtattttgttctaaaaatgttggattatttctaacaagttaagaataaaatattt

SEQ ID NO: 641306 - DNA, 594 bp, Homo sapiens
ttatatagccactgcaagtgataattctgtgccaattgtcacaaatagaaagcaacaaatattatatattttcaaatattgaaaataccaaaatgtctgtgtgctatacataacaatctcatatgatattttagtaaatattggcaaaaattgctgtattaggaattaatgagaagtctttgaaaatcacattagcttaagttagttcaagttatcttaaaacaggttttatggttaaatttagatactaatgtgaagacattaatattattgtattaaattatgtattttttaaaagcatttttatatctgccttacccaatctgaacattatcataaaagcagaaaggargtgttctaaatgaattactgtcaaggtacaaattctggacaaaaggaatgagctataattatgacattcaggctcgaaagtttattttgcagaggtagtgtaaaaagcagaaaataaattttgaagccagagtgagaacacacttataatgacaaaataacgatttttctaatcataggcaataagggttgaacctgaatttggcaatgtgggtaggatttaaaggctattgaatcgttgaa

SEQ ID NO: 641307 - DNA, 555 bp, Homo sapiens
ctctttcagcttgtcttccatggatagcttaagtgttaacagctcattgggcctgtggcttccctccaccagggagggcaaaggcgagtgtgacagccctttgtatccataatcatggctcctgagttcttgtccagcgtccaggaaatatgaggtcacacaagtgaattgaaggatggtaaatgcmgatgattttattgccagtggaggtgtctctcagtgggaaggggagctgagaagaggatggggagggtaggtaatcttcctctgaagtccagcccactccagctggattcttctccaaagttacaccatcaagctgaagtcaagccacttctctctgatgtccagctatagtccccaacatccagctgcttatccactctgccggctgagtctggggtctttataggcacaggacggggcagggctgggccatggatagtttaggaaaagcaaacgttccatcaggaatacaaggatggaagttctcactttgggccatggtctcaagcttttcagcttgaggtgggaattcactagggacctgcccca

SEQ ID NO: 641308 - DNA, 555 bp, Homo sapiens
ctctttcagcttgtcttccatggatagcttaagtgttaacagctcattgggcctgtggcttccctccaccagggagggcaaaggcgagtgtgacagccctttgtatccataatcatggctcctgagttcttgtccagcgtccaggaaatatgaggtcacacaagtgaattgaaggatggtaaatgccgatgattttattgccagtggaggtgtctctcagtgggaaggggagctgagaagaggatggggagggtaggtaatcttcctctgaagtccagcccactccagctggattcttctccaaagttacaccatcaagctgaagtcaagccacttctctctgatgtccagctatagtccccaacatccagctgcttatccactctgccrgctgagtctggggtctttataggcacaggacggggcagggctgggccatggatagtttaggaaaagcaaacgttccatcaggaatacaaggatggaagttctcactttgggccatggtctcaagcttttcagcttgaggtgggaattcactagggacctgcccca

SEQ ID NO: 641309 - DNA, 623 bp, Homo sapiens
gttcaagttctttatcataaatggcccactgaaagcccagcaacgtgaatcataactgagcaagaattggagaaagtaatttcattggcagcagacaggaaagatcacatactacatcctattcttcatagcagagagacagataacaataaatgctgaactacagtaaaagatgttaagggaaatatttgtgaggaataaatctttgtagcartgtattttccttgatatgcaatcataattatccatagcatttgggaaacaactgacaatttttatcacctttataaatgttagttttgatctttatagcaaggttataatggaaaaatcaaccactgtgtaataaaattattttaaaatgaacagaattacactaggctgtctgggacagaggcaagggaagggctgagtcatgatttaaggtgcaggaaacaaaagggacctcattgttgctcagacagaaaagaggtttggtgggaatcagacaacaggtatatattgagacaacgaaatatccaatccttgaaaaagtacattcttgtgcatcactttttcatagccaaccgtcctaagatttatgccatgtgataagctgatgataaaacattctcttcaagttg

SEQ ID NO: 641310 - DNA, 640 bp, Homo sapiens
ttaaaaaaaattccccctttttgctcaggttctcacttagatgaaagtgtgaccaaagcttagggccttagcaccactctcagttaccatcattttgggtttctagtctcagcatgtcactcataagttacggtgtcctcatggtagcacatttctttyagctttcgtcattctagttgaagagaaagcacttgacattctagagatggctgcatgcaaacatttaaagcctttgagaaaaatacagtgcatcagggaaactattactatgaatatctggaggataacaccaagagtttggagttatccttacccagggtccccgtaaaacaaaacaaattaaatagattaaagaatgagctaggtgcaaagtctactcacttgactaagtggtctttcattaatcccctgcaactgaatttttatattttacatttggtgtatttctccataggccacaagtgtcagcagctgcacatgtgcttttctgtttagccaatctattatttagcataactttcacaggacaatttaaagtttgttgtgtaacaatatcctttatagtgtaatttgctgttgagcctattatgagggagacatttctgattatggccttttttattctaaaccatggaaaaag

SEQ ID NO: 641311 - DNA, 403 bp, Homo sapiens
acatttaaagcctttgagaaaaatacagtgcatcagggaaactattactatgaatatctggaggataacaccaagagtttggagttatccttacccaggktccccgtaaaacaaaacaaattaaatagattaaagaatgagctaggtgcaaagtctactcacttgactaagtggtctttcattaatcccctgcaactgaatttttatattttacatttggtgtatttctccataggccacaagtgtcagcagctgcacatgtgcttttctgtttagccaatctattatttagcataactttcacaggacaatttaaagtttgttgtgtaacaatatcctttatagtgtaatttgctgttgagcctattatgagggagacatttctgattatggccttttttat

SEQ ID NO: 641312 - DNA, 515 bp, Homo sapiens
ctcctgataaagttctctttaattcatgatatgggttaagaggagttttgactgattatgaggcaacatatgcaccactaaagtttctcgcctatattgggccttcatcttttatctattgaagtataagtttattcatgtataagactggctggaaaatccttcacaaagaaaagtatacactataattgcacataatggaaccccttttcacttctattgttgttcatagagacataacaaggaaaaaatattcaaagwtaagagtcttatggtagttgaagttttgatccatgatcttgggaaaagctgttcacatcaagtattccatcttcttctggggagaaacttccctggttagttttaccttaagggttccaatgggtgtacagttccaggagtgtggaaggaaccttctcagttgtgagattataaacccaaaattcaaggggccaaagttttgctgtagtgtggatggcaaggacagtcttcctcagatgttctcagaagatcca

SEQ ID NO: 641313 - DNA, 534 bp, Homo sapiens
agtgaaccataaaaagctttatttactastgaaaatacactgtagcataataaactactggtataataacatcagctcccttgcatggaaaacctttaatagaaccagaaaacatgcattaaaaatgacaatggaatgaaatccctttataaatgtttaaatggtccatctggtagccaattgtatctgaagctttgattgtcttcccaggaatatggaaccaaacattggttttaaactatttttgcaatttataagtcaccacatcaatatatttaatttagattattttgtctttcccatgacgagttacggaaggtagaacctttaacaacaaaagcttgaagggctcaggaaggacaagtaggccatcctggttcttcatgaatccatgcttaacagtggactcatgtcctcttgaataccagttgtttctccaatttaggtgcatagcactgataactaatgggttatcataatctgacttagaccatggagttcaattacattgtatatttaaacaattttagtatt

SEQ ID NO: 641314 - DNA, 534 bp, Homo sapiens
agtgaaccataaaaagctttatttactagtgaaaatacactgtagcataataaactactggtataataacatcagctcccttgcatggaaaacctttaatagaaccagaaaacatgcattaaaaatgacaatggaatgaaatccctttataaatgtttaaatggtccatctggtagccaattgtatctgaagctttgattgtcttcccaggaatatggaaccaaacattggttttaaactatttttgcaatttataagtcacyacatcaatatatttaatttagattattttgtctttcccatgacgagttacggaaggtagaacctttaacaacaaaagcttgaagggctcaggaaggacaagtaggccatcctggttcttcatgaatccatgcttaacagtggactcatgtcctcttgaataccagttgtttctccaatttaggtgcatagcactgataactaatgggttatcataatctgacttagaccatggagttcaattacattgtatatttaaacaattttagtatt

SEQ ID NO: 641315 - DNA, 534 bp, Homo sapiens
agtgaaccataaaaagctttatttactagtgaaaatacactgtagcataataaactactggtataataacatcagctcccttgcatggaaaacctttaatagaaccagaaaacatgcattaaaaatgacaatggaatgaaatccctttataaatgtttaaatggtccatctggtagccaattgtatctgaagctttgattgtcttcccaggaatatggaaccaaacattggttttaaactatttttgcaatttataagtcaccacatcaatatatttaatttagattattttgtctttcccatgacgagttacrgaaggtagaacctttaacaacaaaagcttgaagggctcaggaaggacaagtaggccatcctggttcttcatgaatccatgcttaacagtggactcatgtcctcttgaataccagttgtttctccaatttaggtgcatagcactgataactaatgggttatcataatctgacttagaccatggagttcaattacattgtatatttaaacaattttagtatt

SEQ ID NO: 641316 - DNA, 643 bp, Homo sapiens
taacacaaaaatgttttaaaggatgaaacattattctgatacataggagactcagctttccaaacaagacaatgaagacagcatgaggacaactgaccctgtctcccttctttccttcccccaccttttctcttttgtagtttacttagaaggtaaacaaaaacatttcattatcttttaatattacatttctcttttaaaagagaaaaccagattttatgtttccattagtgtatttttaatgtttaagtcagtttttaataacattttataaatctattcagttttaattattttggccataakgtaagatttttataaaccttttataaccccttcacattttgttttcctcagagcagagcaatgttctaaaaaaactctgttgtgcttctattctaatgcttaattcatgggaaaaaaaactgaataatgccattttaactttagccaatatgttcacacatagaatctcttataattactttccataaacttttaacaactggttcaaacctttagcttaattttttaaaacaatattttaattctctaatctaggcagaaatttacatttttaattttttaattttataatgtttgaatttttgagaaaagcatggcctgtggcagggtgggaaag

SEQ ID NO: 641317 - DNA, 643 bp, Homo sapiens
taacacaaaaatgttttaaaggatgaaacattattctgatacataggagactcagctttccaaacaagacaatgaagacagcatgaggacaactgaccctgtctcccttctttccttcccccaccttttctcttttgtagtttacttagaaggtaaacaaaaacatttcattatcttttaatattacatttctcttttaaaagagaaaaccagattttatgtttccattagtgtatttttaatgtttaagtcagtttttaataacattttataaatctattcagttttaattattttggccataatgtaagatttttataaaccttttataaccccttcacattttgttttcctcagagcagagcaatgttctaaaaaaactctgttgtgcttctattctaatgcttaattcatgggaaaaaaaactgaataatgccattttaactttagccaatatgttcacacatagaatctcttataattactttccataaacttttaacaactkgttcaaacctttagcttaattttttaaaacaatattttaattctctaatctaggcagaaatttacatttttaattttttaattttataatgtttgaatttttgagaaaagcatggcctgtggcagggtgggaaag

SEQ ID NO: 641318 - DNA, 578 bp, Homo sapiens
attggtgtatttacaatcccgagctagacataaaggttctccaaggccccaccagactcagcagcccaggtggcttcacccagtggatcctgcaccggggctgcaggtggagctgcctgccagtcctgcaccgtgtgcccgcactcctcagcccttgggtggtcgatgggactgggtgccgtggagcagggggcggcgctcatcggggaggctggggcagcacaggagcccackgagggggtgggaggctcaggcatggcgggctgcaggtcccgagccctgccccgcaggaagggagctaaggcccgcgagaaatcgaaagcagagctagtgggctggcactgcttggggacccagtataccctccgcagccgctggcctgggtgctaagccccttattgcccagggccagcagggccagccagctgctccgagtggggggcccgccaagcccactcccacccagaactccagttggcccccaagcccagcgtgcagccctggttcccgctcgtgcctctccctccacacatccctgcaagctgagggagccggctcctgtcttggccaaccccgaa

SEQ ID NO: 641319 - DNA, 578 bp, Homo sapiens
attggtgtatttacaatcccgagctagacataaaggttctccaaggccccaccagactcagcagcccaggtggcttcacccagtggatcctgcaccggggctgcaggtggagctgcctgccagtcctgcaccgtgtgcccgcactcctcagcccttgggtggtcgatgggactgggtgccgtggagcagggggcggcgctcatcggggaggctggggcagcacaggagcccacggagggggtgggaggctcaggcatggcgggctgcaggtccygagccctgccccgcaggaagggagctaaggcccgcgagaaatcgaaagcagagctagtgggctggcactgcttggggacccagtataccctccgcagccgctggcctgggtgctaagccccttattgcccagggccagcagggccagccagctgctccgagtggggggcccgccaagcccactcccacccagaactccagttggcccccaagcccagcgtgcagccctggttcccgctcgtgcctctccctccacacatccctgcaagctgagggagccggctcctgtcttggccaaccccgaa

SEQ ID NO: 641320 - DNA, 578 bp, Homo sapiens
attggtgtatttacaatcccgagctagacataaaggttctccaaggccccaccagactcagcagcccaggtggcttcacccagtggatcctgcaccggggctgcaggtggagctgcctgccagtcctgcaccgtgtgcccgcactcctcagcccttgggtggtcgatgggactgggtgccgtggagcagggggcggcgctcatcggggaggctggggcagcacaggagcccacggagggggtgggaggctcaggcatggcgggctgcaggtcccgagccctgccccgcaggaagggagctaaggcccrcgagaaatcgaaagcagagctagtgggctggcactgcttggggacccagtataccctccgcagccgctggcctgggtgctaagccccttattgcccagggccagcagggccagccagctgctccgagtggggggcccgccaagcccactcccacccagaactccagttggcccccaagcccagcgtgcagccctggttcccgctcgtgcctctccctccacacatccctgcaagctgagggagccggctcctgtcttggccaaccccgaa

SEQ ID NO: 641321 - DNA, 578 bp, Homo sapiens
attggtgtatttacaatcccgagctagacataaaggttctccaaggccccaccagactcagcagcccaggtggcttcacccagtggatcctgcaccggggctgcaggtggagctgcctgccagtcctgcaccgtgtgcccgcactcctcagcccttgggtggtcgatgggactgggtgccgtggagcagggggcggcgctcatcggggaggctggggcagcacaggagcccacggagggggtgggaggctcaggcatggcgggctgcaggtcccgagccctgccccgcaggaagggagctaaggcccgcgagaaatcgaaagcagagctagtgggctggcactgcttggggacccagtataccctccgcagccgctggcctgggtgctaagccccttattgcccagggccagcagggccagccagctgctccgagtggggggcccgccaagcccactcccacccagaactccagttggcccccaagcccagcgtgcagccctggttcccgctcgygcctctccctccacacatccctgcaagctgagggagccggctcctgtcttggccaaccccgaa

SEQ ID NO: 641322 - DNA, 591 bp, Homo sapiens
attcctgtaatctcagctactcaggaggctgagtcaggagaattgctggaacacgggaggtgaaatttgcagtgagccaagatcttgccactgcactccatcctgggagacagagcaagacactgtattaaaaaaaaaaaagaaaaaagaaaagaatgaatatacttatactggacaagatatwttacattctgtgtgtatgttcaccttatttataagggtgttccagtgtagaagagtttcttcaattatagggagtaaatcttaagtcatgataattatgatacatcaaaagaaatgtaggagagtggagctagatgtttgaataggattctccagggatcactccccagagaaccatcaatttgaacaaatatccatgcacaaaaatatcttcacaagagctaaggaaaccaggtggagtttgcagcacctgattagagcatagtaataagaaaagctgcattgaggagagtaagaagagcaactttacatcacccacatcacctctcctccaaacccaggaaacacatcatagacagacacaccatttgctttgtaaaaagaaaataaaatgagcataggatatgt

SEQ ID NO: 641323 - DNA, 591 bp, Homo sapiens
attcctgtaatctcagctactcaggaggctgagtcaggagaattgctggaacacgggaggtgaaatttgcagtgagccaagatcttgccactgcactccatcctgggagacagagcaagacactgtattaaaaaaaaaaaagaaaaaagaaaagaatgaatatacttatactggacaagatattttacattctgtgtgtatgttcaccttatttataagggtgttycagtgtagaagagtttcttcaattatagggagtaaatcttaagtcatgataattatgatacatcaaaagaaatgtaggagagtggagctagatgtttgaataggattctccagggatcactccccagagaaccatcaatttgaacaaatatccatgcacaaaaatatcttcacaagagctaaggaaaccaggtggagtttgcagcacctgattagagcatagtaataagaaaagctgcattgaggagagtaagaagagcaactttacatcacccacatcacctctcctccaaacccaggaaacacatcatagacagacacaccatttgctttgtaaaaagaaaataaaatgagcataggatatgt

SEQ ID NO: 641324 - DNA, 532 bp, Homo sapiens
agtgttcccagaaaagaatttcccagactgtgaagaccaaaataaataataaaatgcctcccatcaaaacaaagcccaggacccgatgtcttcactgcctaattttaccaaacattaaaaagcaaactaatagcaattctgaaactcttccaaaagtttaaagatgagggaatatttccaaacttattttacaaggccagcattattaccctgatatcaaaaccagaaaaaaaaaaacacaagaaaaaaaggaaactacaggacactatccttgagaaacatacttgcaaaaattctcaacaaaatactagcagactgaattcaatagcatactaaaaagataatttactatgatcagkggaattattccaggaatgcaaagatggttcaacatatgcaactcaataaatgtgatacatcacattaccagagagaagaatgaaatcatatgatcgattcaacataaacagaaaacacatctgacaaaattcaatatcctttcatgataaaactctaaacatattagtataaa

SEQ ID NO: 641325 - DNA, 554 bp, Homo sapiens
ttttcttaatctttagaagtttcttcataaaarcattgagtagatattttccaatcctgtctgttttatgcttcctctctcttgtgaatcagggtacatgggttccatctattactttcctttattgctctccttaaaaaaacatgtaaaaaataacaagataatgcctacagcaatgaaatcatacactgtgaatttaccataatatctgtgaatatttaaacaccactattacttttttaaatagaaaaaggtggttgtgtaaaataattatttattaaaggaaatgagaagacttgcttgaaaggagggatgaaagggtgtagttacataggtaagacacatggaattatttcctgtagtcaaactattcagtatgatataataccgtaatggtagataaatgacaccatccctttttcaaatactcatagaggtatacagaacagagagtaaatgttaatgaaagataatttaaaaataaatcatttagtaggtctgaggaacctgaaaaggagtgcagaatgtggcaaaacaatacattgtattaaaaa

SEQ ID NO: 641326 - DNA, 623 bp, Homo sapiens
aaacaatttccctggaagagatggggtaaatgtgctgatgtaagtaacatctaaaagagtgtgaaaattaaaggcagaatgaactawtgaacgatacattacactgtaattataaagttgtgtctcatagggatatgttttaacaattctgaaacaagtatgattgtatactagaaatgaacagttaaataaatggatggcatatggttgttcccacatttcacattattggagtagaaggttatagattagcaaggagagtattctagagtgatccatgtgatcagggattagtgttaacgatgaaatgaacttataatcaacttaatataaacactagatagaaatagttatggatatgtatatacaacatatatgagtgagtatccacagttctacctccttgatctgtcagctgagaaggcctaaaggtatgtgaacaattcagtgcagcaaacagacttagaacccaaataacagtttctaataacaatattccaaaaaaggagccagagctcctttgagacttgactaggaaagggtgggacatttacgtaatgaatccagagcatattatagttccagaggttaaggaagcactgaacgaacgtgagagagagaaa

SEQ ID NO: 641327 - DNA, 640 bp, Homo sapiens
gacaccatccctttttcaaatactcatagaggtatacagaacagagagtaaatgttaatgaaagataatttaaaaataaatcatttagtaggtctgaggaacctgaaaaggagtgcagaatgtggcaaaacaatacattgtattaaaaatgcacaaaacatgccaggcatggtggctcatgtctgtaatcccagcggaggtggacatatcatttgaggccaggagttcgagtccagcctggtcaacatggcaaaaccccctctatcctaacaatacaaaaattagctgggagtggtggcctatgcctataataccagctactcaggtggttgaagcaggagaatcacttgaacccaggaggcagaggttgcagtgagccaagtttgtgccactgcactccagccggcaagacagagtgagaccctgtctcacacacacacacatacacacacacacactcacacaaatcatgaaacaatttccctggaagagatggggtaaatgtgctgatgtaagtaacatctaaaagagtgtgaaaattaaaggcagaatgaactaatgaaygatacattacactgtaattataaagttgtgtctcatagggatatgttttaacaattctgaaacaagtatgattgta

SEQ ID NO: 641328 - DNA, 631 bp, Homo sapiens
attctcgggtcattatcaaattcatcatcatcaaagttattgactgcatttgaatgtttgttttgagtgtttcttgcctctcagcagcagtggacagatttctcatgggctctatatctgtatattagctgtctctgattgccattgtcccgcaatgctagaattaaaatatggttaaygataatggtctccactaaaagtgcatgtccagatgaccagtgaaacctgagcaaatttgcaaagctccttagagactaagtcaggactaaaaccaagaccctggattgaagaagttgctcaccaccagagagttaaaagaagcccttgtgccttccttcttgccaattaagttacaattcataggcattattctagattcttggcccagatttttcatattctttacagtttcggcactgatacctcggctggctcgctttcttcttcctcatccatctcttatctttgttagagtgcttgtcactatcatctgtaactcaaagacaactctaactcaaagtcctcatttattcatatttgtttcctgggacaggataaggaggcaataatattagataaattgaattttaacattttggaaacaatttctgtcattacccaaccagtcaat

SEQ ID NO: 641329 - DNA, 584 bp, Homo sapiens
tgtctagagacctagtttttttacaagcaatacttgtgcctcagtgagactttagttttcagaatattattttacttttttcaacaaaatacttgaaacataaatcagcctgattataatcaaatcagtctgattataatcaaatcagtctgattctaatcaaataactaacttgtgtcaaggaccttaaacagtaagttgatgaatgaaattctcatacctatttttctaggctgcacaagtagtcacagaatcattctcgggtcattatcaaattcatcatcatcaaagttattgactgcatttgaatgtttgttttgagtgtttcttgcctctcagcagcagtggacagatttctcatgggctctatatctgtatattagctgtctctgattgccattgtcccgcaatgctagaattaaaatatggttaacgataatggtctccactaaaagtgcrtgtccagatgaccagtgaaacctgagcaaatttgcaaagctccttagagactaagtcaggactaaaaccaagaccctggattgaagaagttgctcaccaccagagagttaaaagaagcccttgtg

SEQ ID NO: 641330 - DNA, 606 bp, Homo sapiens
catttagaaccatgtaaacttcaaatgtagggccatattgttgacttcagtatcactaaaaaaaaaacccaagttcactacggttcttctgtcaattataaatcctccactggaaaaaataaattgtcagctggaaaaatttaagatctagaaagctcatatttcttagataaatgtttattcttcttagattagaaagatatattttatctttaataattttcctagaggaaaattagatagtgagagtcattttgtgtgcctgagctaaaatacatttcctcaattattgaaattacatttcaatgacagacttgagactctagaaattgcatatttattagtaatttcatgatttttcttaactatgaaaaagtctctacaccatttaatgttttttcctttgtttacattggctctacctaaagttctcacataataatttcccacaactcaggagaaaaggtgagattaatarcaatgtcccagtagagtcttctttgaggacatcagatgaaaagtacaccttattttaaactctctagggccttaaaatgaggattaaaacaaacaaataaacctcccaatctccacctacacaagtca

SEQ ID NO: 641331 - DNA, 534 bp, Homo sapiens
ggtacatggccggctgcaaccctctgctttatggcagtaaaatgtctaggactgtgtgtgttcggctcatctctgtgccttatgtctatggattctctgtcagcctaatatgcacactatggacttatggcttatacttctgtggaaactttgaaatcaatcacttctattgtgcagatccccctctcatccagattgcctgtgggagagtgcacatcaaagaaatcacaatgattgttattgctggaattaacttcacatattccctctcggtggtcctcatctcctacactctcattgtagtagctgtgctacgcatgcgctctgccgatggcaggaggaaggcgttctccacctgtgggtcccacttgacggctgtttctatgttttatgggacccccatcttcatgtatctcaggagacccactgaggaatccgtagagcagggcaraatggtggctgtgttttacaccacagtaattcctatgttgaatcccatgatctacagtctgagaaataaggatgtaaaagaag

SEQ ID NO: 641332 - DNA, 490 bp, Homo sapiens
attcatgcaaatttaccatggttcactttcctagtaacttagaatggatctgagtaaaggtagatgggatacgtactctttcataaatttacattctgaaagtaaagtatgatctgcttgtattgaaaattgtgttaacactatgtttatatttctaaaccacccaaatttgcttctaaaaagtcaggatgaagaacaaaacgcagggctactyaagcaacaacttcttttacagagatcggcgtcacaacctgacattctaaggccttattttttggggggtcattatggcagagctattcctcattctccactagttcatttttccttttagaaatataaaacttgctatccaactgtatgtcagagttctaatctctccttattatcctgatatacatttgtgggggtttgggcttttttgttttaacaacttaaacagcataaatttattatttcagaattgccatgggttatgagtgcaggtaaa

SEQ ID NO: 641333 - DNA, 616 bp, Homo sapiens
tctgactggtgtgagatggtatcttattgtggttttgatttacatttctgtgatgattagtgatgttgagtattttttcatgtgtctctttggccacttgtatgtattttttagaaaattgttcatatcttttgattactttttaatggagttatttattttttgcttgttgaatcatttaagtttcttataaactctggatattagacctttgtcatagtttgtgaatattttctttcatcctgtaggctatctgtttcctctgttgatagtttctttggctgtgcagaaacacttcatttaattaggccccacttgtgaatttttgtttttgttgcagttgctcatttaacaattgctaaattgctgaatgcatttagtcacaaattcttttccaaggcccatgtccagaagggtgtttcctaggttttcttctaggcttcttactttttgagcacttacatttaaactttaattcatcttaagttaawttttgtatatggtgaaaagtaggggtgaggtttcattcttctgcatatgaatagccagcaacatttaatgaataggaggtcattttttttttttgactttcacaattatcagatggctgtaggtg

SEQ ID NO: 641334 - DNA, 526 bp, Homo sapiens
tcccagcctctagaactataagacacaaatattttttcttattaattacccagactatggataatttatatgttatagcaatgcagatgaagaaattttttttaattttttttaaatatgtgtatgcaaatatctctcttctaataaggatatcagtcacattggattaagggcacacgctacaatatgacttcatctagtcacatctttcatgactgtattttcaaatatatatcattcagagggattgggctttagaacatgtatttttagagaacacaatttaacccatagtaagtaacaatagcttaagatctgtattggttaaaaatgtatagtggaggtttgcctagtttatacctagctagaaacatggtgcagagaaaataactaagaattaatgaacccaagaaagagcttgtatgaaaatgctaacagagagaaatagcctrgaagtaggacacagtattaactaatgtgtcacagtgtggctaaggactcaccaagtgttaaagtaaaatgaatc

SEQ ID NO: 641335 - DNA, 569 bp, Homo sapiens
atgaaaatgaggagaaagttcaggtttagtggctttggcctttaggagattattcttaactttacatataactttcttctgatctattgtcaaaacttagtaacaaatgtatacttctgttcataacagtctctgaggatcttttgcatttctgtgggattggttatatgcacacaacctagaaaatttagaggaagtggataaattcctggaaacacacaccttccccaaattaaatcaggcagaaattgaaacccygaacaaaccaaattatgttctgcaattgaatcaataataaaaattctagcaactttttttttaaataaaagccctggaacagattgattcacaggtgtaccagatgtacaaagaagagctagttaccaattctactgaaactattccaaaaaattgaggatgaagatatactccctaactcattcttaagccagcaacaccctgacaccagactctgtcagaggcactcacacatacacaaaggaaacttcaggctagtatccttgaagaacatagatgcaaaaatcctcaactaaataccagcaaagtga

SEQ ID NO: 641336 - DNA, 493 bp, Homo sapiens
ttcaaataattttattattgctttgtgagttcctactcataatcatacctcaacagaatgatactgacctctattttagaccaggcccttctgttacacattctcctagtacaacacaatttttttttcataattgattatagttkgggaaaatttatttcactgtgcattaatatcccttccccatcaaaatatgtgacatatgagcatgggtcttctctgtatttacttgccgttgtgtctcaagcatataatatagtgtttgacacatagtaggtactcactattttaaataaacagaaaaagatgtcttaaacaccaaatgaggctctgatcatcaaccaattttatggagaataaataaagttaaaatgtggaatccttgatttattccccatagtaaaataaattattgattaatgagttatttatagttattataaaaataattatgactaattaaagagttaattatacttttaaaagacataaa

SEQ ID NO: 641337 - DNA, 493 bp, Homo sapiens
ttcaaataattttattattgctttgtgagttcctactcataatcatacctcaacagaatgatactgacctctattttagaccaggcccttctgttacacattctcctagtacaacacaatttttttttcataattgattatagttggggaaaatttatttcactgtgcattaatatcccttccccatcaaaatatgtgacatatgagcatgggtcttctctgtatttacttgccgttgtgtctcaagcatataatatagtgtttgacacatagtaggtactcactattttaaataaacagaaaaagatgtcttaaacaccaaatgaggctctgatcatcaaccarttttatggagaataaataaagttaaaatgtggaatccttgatttattccccatagtaaaataaattattgattaatgagttatttatagttattataaaaataattatgactaattaaagagttaattatacttttaaaagacataaa

SEQ ID NO: 641338 - DNA, 461 bp, Homo sapiens
atttctggaagatgagattaaaattcacatatgtcacttctcagttgaatacttaattgattgttagaacatttttgagtggatctgttgtttttattttttccatggtgaccagcaagacttaatatagtggctgcccagtcaggagacatggaacactgttctcatccgactcacaatggcaatacaaaacggctgataaataacgttttcataagctactatgatatgtggagtttgcttgtttccctagcacaaaatagcctattctgattgatgccatattaattatacaaattcacacaggctgaattatataayatagaatgagaacatcacaaaccttgaagaaatcacatttgagattttgttttgtgttcttgtagtcatttttaatgcttttacatacacatgtgtgttcagttaaaattatttattataattaccatttgaacctactc

SEQ ID NO: 641339 - DNA, 617 bp, Homo sapiens
tactcttttaaagatgatgaaaataagacacagagatgttatgtgaccaagttcttatagaaggtaatggcagagccagatttacagccagatagtccacctccagggctctcacactttataaccatggaagtgtcagtaagtgagagaaagcatagcaatatctgagaaagacttattccaggaagggaaagcaagtacaaatactcacggctgccctggccctggagtgtttgaggtcagagtggatagaagaatggtgatttcaaggtagcactaagagatcaagaatcagaaagttaacaggggccagatcatgccrgattttacgggctgtcataaggactttgaatttttgggtgaaacagggcaaccattgcagaatttctgtgcggaggcaattctttttaaaaggattattatggctacagtgttaaaacaaaaacaaaaaaacaaaaaaaacaaaaacagtcgactgtaggcggaaagcatagaaactacaaacctacttggaaaaatatttgtattacaaaaaaatggtaagcaagaccacagaatatgagtgcagttggtaaatgtagttgtacgctggagccagaattcctaccagagtgaat

SEQ ID NO: 641340 - DNA, 620 bp, Homo sapiens
atcacaataggaattatttattatatttgaatctcagaaagacaagtggaatgtaagaattgcctgtaggagtctcacagaaaagccatacaaatatgtacttaccaccatttgaatacagacccttctgttcatgatgatactatagagtaaagggttgcagatggccacatacctgtcatatgccatggctgagagcacatacatgtcacaaaccacaaacatgataaagcaatgcaactgagaggcacaagtaggtaaggatattcttttagtttcttggaggaggttcactaggctgttaggggtgatagaggaggtgtagcaaaaataaacaaaagctacgtggctgagaaaaaaatacatagctgtgtgaagctgaggactgatatgaattagcataattaacccaaggctacccatgacactacttaaattgatcactagaaagatccccctaaaaaagggcttggagctctggattgtctgtgagtcccaagaggatgaattcagtaacttctgaattattggttttggccatgaaatatrtgtagaagtatttcataccattatcttcaaaacattcatcctggataatcttccatttcttggattaaaga

SEQ ID NO: 641341 - DNA, 590 bp, Homo sapiens
gatctgtctgatttcagaaccactagtactctttaccattccatactgtgactctaccccatagcagcttagtgagcctaggacagccacttaaccagatactctatcacggaaacaataacacctacttcacttgattttgtcaggattaaataagatgacaatttgccaaaagccagtggatgctgataaaggtgtttccttccttatgagatcagtggcaagtaaatatttactgacttcacttttagatgctttgatgcaaatgttatacctaccacttattttctactgcacctcttttgcattcaactactgaaaacaccagtgctttaggctgtgtattttagagtcagacaaaccgcagggcccagccaactcccttcttgctgagcctcctttcaaggctgtggatatcctttctttttaatatgggcctgctgttaggactcagacgtagcatgtcttttaaaaatactggctttgaggtaaagaaagagagatwgagagaaaccttgcaaggcacatggggaaatcgtggacagggcgcttctccacagcctgttttgtaattttcctcatgagaattc

SEQ ID NO: 641342 - DNA, 525 bp, Homo sapiens
gcttaaggaacaacagatgaggccctgtggattctcaatcctcttggctacacagcaaaatgaaaagcataaccatttggaacccttcccctggaccgtatgaagtctgggcccaaaagatgaccttttaacgatagctycctgcctctgaagggttagagtgtgtcgaatttttcttcgctcagggcctggttttaatcattgccacagtcagaagaaagggctcttatccacaccgcttactttttaaaatatctgaaatgttctttgaggttacaatcaaaattttttggataagatttcctgtcctttgcctggtaatctgcagtgtgacctttgtcacattcagcaaacttccattgagaacccgttgtggcccgggccagttcacatgggtgggtgaatttcatcttccccaggatcctgacattgaggctttgtattttcctcatttataggtgagcgtaccgaggctcagataggataagtcattgtcaagatcatacacagctaatggatgagtaa

SEQ ID NO: 641343 - DNA, 525 bp, Homo sapiens
gcttaaggaacaacagatgaggccctgtggattctcaatcctcttggctacacagcaaaatgaaaagcataaccatttggaacccttcccctggaccgtatgaagtctgggcccaaaagatgaccttttaacgatagcttcctgcctctgaagggttagagtgtgtcgaatttttcttcgctcagggcctggttttaatcattgccacagtcagaagaaagggctcttatccacaccgcttactttttaaaatatctgaaatgttctttgaggttacaatcaaaattttttggataagatttcctgtcctttgcctggtaatctgcagtgtgacctttgtcacattcagcaaacttccawtgagaacccgttgtggcccgggccagttcacatgggtgggtgaatttcatcttccccaggatcctgacattgaggctttgtattttcctcatttataggtgagcgtaccgaggctcagataggataagtcattgtcaagatcatacacagctaatggatgagtaa

SEQ ID NO: 641344 - DNA, 541 bp, Homo sapiens
aataaggactttgttttgtggccctaataggttgaccagggtccagtgaataaggactatagtccttgggaaacagacttggttcaaaagaagaatcaacttactcactttctaagagtcagagctgaatactacttactacattgggttacgttctgtttacatgtatgtatctgcccaaatattgtaaacttcttgaaggcaggaaatgtgttattcatctctggatctctggcaaataatatctgactcaaagcaggtaatgaatgtttgttagctgaatgactaaaacgaatgacctaggtgatctacaaagtcatatattttcagtcgctggatgtattcaaggagagagcaaattaatgactagtggggatactgcagggggtattaaagatgaagygtatgacatcttccaagcctgaaatcttatgactctgtgagtcatggtgtaaaggaacttgcttggactgtctcaagaaacttgggttctagtcctactcctgccatccacttgttaagtgacactgatcaaattctt

SEQ ID NO: 641345 - DNA, 603 bp, Homo sapiens
tctacctccgggtgcacctaacctcccgaatgcctctccttgtattttgtacttgaggaacatttttgtttaactcactttcctgatatgtcacaggtcttaggcctttggggctgatgcctgctgaactataatcacatgtttgacgtgtttgaccgggattctcwtgctgttgccttcattcactgctagtctttggatcaccatgcaaagggttttctttttgaagttaaaatctgcctttggataggatattcagaaatgatatttgtgtctgtgtcagtccaatctgtttttttcgcatgtaggaatgtagtcctcattttatcataagagttaagtcagattttattgcaaacagagcactgtgtggactctagggagaaacagagatttaaagaagtatttagacatgttgtcctaattggagacactaggcaaaaacacatgaggagttaacaagagaattgtcatcataaagacatcatgagggcaaggcttaattaaattaattggcttttgaaaggtataggctgccctcctattattttctgcctgcctgcctttcctcatgctgtctctgcatattttataccttgtccc

SEQ ID NO: 641346 - DNA, 662 bp, Homo sapiens
gaagggcccccgcccaaagatctgcacgccttcctgctgagcaaggaacaggtgcaaatgaagctgtttctaaaattccagtcatgtggaaacagagtcttgctccccgggacctcctgggaagtcctttcataagtctgcatttagcactagaagaggtaataagtataattgttctattttgctgaggacctgagattccaagagtgaccttaagaaattttaatagagggttaattttaaatgattcctgccacgattttttgttttatcactagctcatctgagttactgcacaagtgggggagtttatcagaaattctggcatacttaaagtccaagccaaaccattaatagtcagcatttgaggcaaaaataagaaaatgaagtaccttcaatgttccagaactgcaactgttgttgttggaacacaaatattaactcattaaattctckcaatagtcctgcaatgatgctttcactcccatatcatagttgaggaaacagcttggagacattaagtgctcaaaggtacttagctagaaatgaaaggtgactgtgattcacatgatttttggcctatgagttgtgggatcaggtttagacaatacctcagatgccatatgagtgtatcccctgattgttaattacatcttagatca

SEQ ID NO: 641347 - DNA, 580 bp, Homo sapiens
catcgtgctgctgaccaacacgcattataattattgtgaagaaaaatccaccgcagcctgagaatttatccatcttgctattcaacttactgtgttatatcctgatagaaataatttaagtacataattcacagatgccatcttggcagctcttgctagagaaaagaattggggtcctgcaaagtgatattactacatgccccccaaatacatggttagtgctgttttgggagaagagaggccagtaccatgtctagctaaacgtaaaaggcccagaggaagacagatcacagtgaagctgcaggtctggaaacaatttataaaaagggaatttgaaaaaacagaaatcagcaaggaagtaagcagtgcattctccacagagagagcccagccttaagatttgaggctgaacacaccaaaggacataaaaccaaccagaaattgcactttgtcatttgatatttaamaagtgttgactgcccagctactccagacagaacactgtgctagtcactgtggcagcacagatagagggagaattggaaatggatccttcctctcaatgaatttgcagtctact

SEQ ID NO: 641348 - DNA, 635 bp, Homo sapiens
ttattgacacatgacaatgatcagggcttttacaaaggtttccttagttcatcttcagaggaacagtatagagtaggacttaatttctccattttgcagatgagaaaactgagcctcagaaatctactcacatctttgtttatgaaatttttcaatttttttcaatgatgggatatttcaggccctagcattggggtcaactctgttaaatgtgacatcttgatttaaaaagcaaacaacatacaaaacaagaaatctgcccatggtcacactgctgggaaatgataaaagctaagatcccaatacaagcttctgattgctctttctacttttgatgcctcctagaggcagaagaagaaaaaattaattctgaagtacctcggctacatgcactgagcaatttattaaatgcaaaaacccctcatgtatttttgttatgcttgaacagcaaccatatcaatagttatatgaatgatgttttggggaccacaaaaagtgttgctgtttgataacacaccagaaggacaatcctaagatatgggtgttattatcctcctttcacargtaagaaaatggagactttgcaaggctacacagcttgcccaggtggcagagcccataaacagagactccaa

SEQ ID NO: 641349 - DNA, 571 bp, Homo sapiens
tgtagagattgggataagtgcttggcttgtcagaaagataatctccccacacctgtgccctggaaacacaatccaggccctgagatgcactttcatctgtcaccatggcatccccagggtgacctgcccaagcatatccaagccagtggggctcaggttacagggcccattctcagggtccttgagtcccaacaatgcctgtttgtcctttggtactgccatctcccaggargaatgttaatgggatggagaatggaggggggctgggaggaagaagagactgacttcagtctgagcctgctgccctgtcagcctcttgagtgagctcatccgtgaatgtctgctagtccttccaagagacacttaaaccatccccaggaaagaggaattcgtcctctgctcttctagaccagaccatcatcactcctaagtggggatgggggtcctctgtttaatgtgggacttagcctaccccttggcagaacttatgattcaagtcaagaaatatttccaaaaacagaaaaactgaaaatgacttagatgtctaatagtaggaggttggtaaaataac

SEQ ID NO: 641350 - DNA, 437 bp, Homo sapiens
tggggatgggggtcctctgtttartgtgggacttagcctaccccttggcagaacttatgattcaagtcaagaaatatttccaaaaacagaaaaactgaaaatgacttagatgtctaatagtaggaggttggtaaaataacatcttctgtccatttgatgaaattttaggtagtcattaaaatcatgttttcaaataatatttgaaagataaaattctcatagtataatgttaagtggagattggatataaactgtatatacagtatgaacctaatttgataaacatatgcttaaatatgtaaaagaaaagactaggaggaaatgtatatataccagggagcattaacagcagttattactgttgtagctgtgactgggttttgttttttttcctttgtacttttttcttttatacatttttttcctttgtacttttt

SEQ ID NO: 641351 - DNA, 445 bp, Homo sapiens
tggggatgggggtcctctgtttaatgtgggacttagcctaccccttggcagaacttatgattcaagtcaagaaatatttycaaaaacagaaaaactgaaaatgacttagatgtctaatagtaggaggttggtaaaataacatcttctgtccatttgatgaaattttaggtagtcattaaaatcatgttttcaaataatatttgaaagataaaattctcatagtataatgttaagtggagattggatataaactgtatatacagtatgaacctaatttgataaacatatgcttaaatatgtaaaagaaaagactaggaggaaatgtatatataccagggagcattaacagcagttattactgttgtagctgtgactgggttttgttttttttcctttgtacttttttcttttatacatttttttcctttgtacttttttcttctat

SEQ ID NO: 641352 - DNA, 565 bp, Homo sapiens
acacagccagtaaatggtagagtctgggatatgagcccaggtctgtgactccagggctctcgctatctccataagcttccccacctgacttaccccaaggttacaaggccctgaaggagatgtgggtgtgaarttctattgtacaatgagacatggatatttcctatcaatgatggaaatggtggtggcattgggtttgctattcctgagtgggatatccataggcccatgttctcaatgtcttagaaatatttctaacatgccatggacattgtcagccaagagtggcacagactcacaaaaattggcacccagaaagatgtctgagctaataacccagcctggttgtcattctgggcagtgtggcgttcccttctcctgcacctgctatggcctgctttctctccctgtgacccttcagtcagcacattggcaatagctgcctctaactttcactgcttacatcttcttttctctcagttgacttttgggtcatagcatctgagcctctctgcccttgcaataatttgccttccagccaccagtttgtttaacagggtggcat

SEQ ID NO: 641353 - DNA, 558 bp, Homo sapiens
gccaacattttcagcaagtgctcatgtctctccaaattccagagagatctaaataattaatatgcacatgagcatgagtgtggaagctctttcaggagactggggcaccctcttactctagaaatcctttactctgttgcatcacctcttcccctctcctaacagatctgtacttttagaagataattgtccagtctctctttttttaaaaataactgtttctttttaaattgtaaaagttaaaatcagaatcactgtttttccagtcacttgaaaatccttactgctaacattttgatctttatcctttatgtcyttttctctgaatgtatttttttgtttatttctgatggttttaaggtataaatttgactctgtatcttaaaatgggatctgagccttctgactcaagccagactcccaggtcttctagggagcatgccatgcagccagcctcaggtcccggggggcagcaggagttcttccttggacctgctcatgctgtagagagagtggacagttccctcctgaaatgcagggatggaggaaacaatcaga

SEQ ID NO: 641354 - DNA, 341 bp, Homo sapiens
gcttacagtgacgggtaggtgacatccccattctcctctctgtgtgtgctctccttgtggctcctgcacttgcatgcagaccctgagacctttccctgggatcttctgggggaggtgatccatgtggcatgctcatcaccaagtccrtgttcaacttgcaacagtttatcctttaaataccctatcccccagcatattaacagcagtcttgttaatatgcagctcttggcatctcattggctgccgttgccattccaaaaccatctcacatagcatttttaatgcagcacaggccctgtattgtatggactctggccctgagtgtgtattctgtgacctga

SEQ ID NO: 641355 - DNA, 561 bp, Homo sapiens
ccaagtccgtgttcaacttgcaacagtttatcctttaaataccctatcccccagcatattaacagcagtcttgttaatatgcagctcttggcatctcattggctgccgttgccattccaaaaccatctcacatagcatttttaatgcagcacaggccctgtattgtatggactctggccctgagtgtgtattctgtgacctgaggcaccttgtaccccaataggggtgggtttgccctaaggcttctgggggrtacagtgcaaccagcacactccatttcccaggctgtgtgcaagtcctcccatggccatggttaaagccaagctgtggaggagctcctgacacctagtttggtcacaaccatgtgctttgaccataccccgctgccctcatgactaggctgtagggtgcagttgcctgtctgtcccccgacacagctttcaccttggacttgggaggcagcagtctggcttctggacagagtgctttgaaggcatttgctgccattggctgtgtgacagccactaggggactaatggccatggcataacttagtggtgg

SEQ ID NO: 641356 - DNA, 612 bp, Homo sapiens
cttggcttcaacaccaataaaaccccctttaaaaagaagggtattccaatcctcagttgagatacaccggcaacagaagcattggagggagaagaacaattttaagtctcattatctccagggtacacaacaggattttagatmctttccaagttactgtaataattttagagaataggaagtttattccccaagaaacagtatcccagccccatccgttcccaggaaaaggatctcagtgccagccttctgttgagttggttaacaccttctgccttgccgtgggtgggttttcccatgggtagggctgtcccatccgtgttcagtggaaacgtgtctctgtgtgccctgttccatggtctagtccgtagctctccttgttcctgtcctttcccaggtctctgtggtgactctctctatccaggctcctctgcatgcttcttctactgccgcctctggcctccaggtttgtctgggtgcctggtctgtgggcagcccctgacaccctcttgctgctctccatctgcaggcacttcctcttcaagcctggaggcacctccccgctcttctgcaccacatcaccagggtacccactgacgtccagcacagtgt

SEQ ID NO: 641357 - DNA, 612 bp, Homo sapiens
cttggcttcaacaccaataaaaccccctttaaaaagaagggtattccaatcctcagttgagatacaccggcaacagaagcattggagggagaagaacaattttaagtctcattatctccagggtacacaacaggattttagatcctttccaagttactgtaataattttagagaataggaagtttattccccaagaaacagtatcccagccccatccgttcccaggaaaaggatctcagtgccagccttctgttgagttggttaacaccttctgccttgccktgggtgggttttcccatgggtagggctgtcccatccgtgttcagtggaaacgtgtctctgtgtgccctgttccatggtctagtccgtagctctccttgttcctgtcctttcccaggtctctgtggtgactctctctatccaggctcctctgcatgcttcttctactgccgcctctggcctccaggtttgtctgggtgcctggtctgtgggcagcccctgacaccctcttgctgctctccatctgcaggcacttcctcttcaagcctggaggcacctccccgctcttctgcaccacatcaccagggtacccactgacgtccagcacagtgt

SEQ ID NO: 641358 - DNA, 594 bp, Homo sapiens
agtgctgcccactgtgaaaaagaacttggtaaccagcaaagtcactgtggctgaacaggggctgtcttgagaagtagtaagaggtgtcactaagaatgattaatacaacatgggccatcacatgttcaagagatagagaagtggttcaagcatggatggggtttgagtggcataagctgtaaggtcaattccactcaagattcttgaattttataaaaataagtgaccaggaagatgacagtcctgcaaagagggaggtccccttcaatatctcaagctgtaataagcctcctctggcatgtcaggtctcttttccccttctgaatattggcttagacaattccatggctccaaggccaaggtggcatgcatgtcatctcttcttctgtctgattgtttagttgctgctgcctagaatgctgtgttgaggaagatactggggctatatttaggctcaatgtaagagactatctgtgattgattagtgatgtctgttatggtcacagaaatggagaatattgatracatgtcaagtatttgccatccctgctatgggtcattgtataaatgaaacagccagactgggagaggtca

SEQ ID NO: 641359 - DNA, 471 bp, Homo sapiens
tatagtcactacccttgaggtattcgtagcttaaaagaagagatagctatgttagcaggcaaatctgaaacagtgactgatttacacagagctcagaggctgtgggaatacccaaccccagccaagaggagtagggaaggcttcctgggaaaggtgatgtttgagctgaattttaaagtaggcattagccagaagtagacatacagaaagggtatttcaaagcaagggagcttwcaaagacttgaaagaggatgatgtggtagcaaagatgttttctgtgtttgaagcatttgaggagtgtggggtgcaccgttggagctaatacagaagtgtttcatcagattgtggagatcagcttggaggacaagttgaggacctaattgggtgggcaactggggtaccactgaacagttttaagcagtgataggacacagatttttattttagaaaggtaagggtagaggaaggagg

SEQ ID NO: 641360 - DNA, 609 bp, Homo sapiens
tgacatagctgggatgcaaccaagacttgggatttcaaaggccatgctttcagccaactatgctatataatagccctgggctggaacagacaatgtagaatcaaaagatctcacytcagaccctggctgtatcacttgctgacggtgtaaacttgggcagtttgcttaacctctctgaaccttggttttcactttccttatggaagtggctggaaagactgtcccattttataggagagggaaccaggagccgcatgatggttgagagcataggttctgaaattaggctgcctgcttttaaatctcagcactgctgcttccaagctttgtgacatttggcgagtttacacaacctctctctgcctcagttgccctatctgtaaagtgaggattataatagtggttacttcacagggttggggtgaaatttctgtaagataatttacaagaagtacctagctcactccctgacacagagcactcagtaaaagttagacactactgttgttaaaagtattattagaattattagcatctcatgtaacagagtattagttactcctgagtgagaacttggacctggcttgtctcactgcagcaccaacaggc

SEQ ID NO: 641361 - DNA, 364 bp, Homo sapiens
aagctttgtgacatttggcgagtttacacaacctctctctgcctcagttgccctatctgtaaagtgaggattataatagtggttacttcacagggttggggtgaaatttctgtaagatratttacaagaagtacctagctcactccctgacacagagcactcagtaaaagttagacactactgttgttaaaagtattattagaattattagcatctcatgtaacagagtattagttactcctgagtgagaacttggacctggcttgtctcactgcagcaccaacaggcttcctggcccgtgttagtcacaagggcagctgacagaacaaccagggggacctgtcagaaaacatttgtagggatg

SEQ ID NO: 641362 - DNA, 605 bp, Homo sapiens
agttgtggagattaaaagaagtgacgtgttttatgagctcctcatggagcttggtatttactgacatgaactaccagatgggagctctctttgttggcatcatcttcattgtgtatcaaggttttcactgaraaatgaagtgaggacatatcaggacctggggagtgagaagcctgagttttgtattaggggacattgctatgactgacatctcagctcccaggtacctaccaacccactcaccgcacagatgaagaaactcaggcttgattagcgcctttgtgtcagggcctgggactgagctaagcccagttcttcagacttctagttcaaagctcttcccacgaagtgaccctgttattacattaatcacaatagaaaatcatgtccagagcaggacagccatcctcattgcttgttcttccatcaggcgctgcttcccaggtgaagggaaccatctccttgggtctaaggtaaggggaatgaacccacagcacgggccatgtcaggccatcaagcagccctccctttagggcagggattattccagtcatctctgcccccccagaacctggtccaaaggggtgaagaagaaagcaaggaaa

SEQ ID NO: 641363 - DNA, 605 bp, Homo sapiens
agttgtggagattaaaagaagtgacgtgttttatgagctcctcatggagcttggtatttactgacatgaactaccagatgggagctctctttgttggcatcatcttcattgtgtatcaaggttttcactgaaaaatgaagtgaggacatatcaggacctggggagtgagaagcctgagttttgtattaggggacattgctatgactgwcatctcagctcccaggtacctaccaacccactcaccgcacagatgaagaaactcaggcttgattagcgcctttgtgtcagggcctgggactgagctaagcccagttcttcagacttctagttcaaagctcttcccacgaagtgaccctgttattacattaatcacaatagaaaatcatgtccagagcaggacagccatcctcattgcttgttcttccatcaggcgctgcttcccaggtgaagggaaccatctccttgggtctaaggtaaggggaatgaacccacagcacgggccatgtcaggccatcaagcagccctccctttagggcagggattattccagtcatctctgcccccccagaacctggtccaaaggggtgaagaagaaagcaaggaaa

SEQ ID NO: 641364 - DNA, 588 bp, Homo sapiens
ttacattaatcacaatagaaaatcatgtccagagcaggacagccatcctcattgcttgttcttccatcaggcgctgcttcccaggtgaagggaaccatctccttgggtctaaggtaaggggaatgaacccacagcacgggccatgtcaggccatcaagcagccctccctttagggcagggattattccagtcatctctgcccccccagaacctggtccaaaggggtgaagaagaaagcaaggaaaggaagkagacagagtgaggattattattaaagaaacaacagctcctacttattaaaattttaccttgtgcatgatataatactggaggattcacatttattatgtcattcaaactcacaactctttaagttagatagtattagtaactccattttatagattaggtgcctcaaaacagagataagtagtacatattactactttaattttctatctctagaaaaccgaggatccagaattgtctacaattgtaccgttcaacatagcagtgccaagatccaaaagcagattccagtgatgccagatatgaagttcttgtcacactgtcatcaaggaagcacag

SEQ ID NO: 641365 - DNA, 637 bp, Homo sapiens
gttgttttactgataggaagaagcactgagtggaaggagaaatactgtggttttttcagccctctctcttcctctcactgctcccttcttccttccaccctgctcttcctccctgccatgaaaagaggctgagctctgctcccgccttgtcccctaagcctagcagacttaagtktggccccttcctaacttctcctccagttaggtatttactcagtgcaagaatagccatcaggggggctgttttctctttctctctgcacttaagtgcaattaaattatgttatttcacagtaattagtctggaatacaaacgagacggggaaaatcctttccaagaaggctaaaaatctataaaatcaactccttttccatactccctgggcaatgttgtaaaaggagcacccagagatgcagttgggggtccttcctgaccaaccatggctgtgctgcctcccctgggggctttaaattgcccccagggcctccaacccctaggagagtgtgttgtttctgcagctgctgctgttattattaaaaatgaatatatgagtaaatgtgggtcccttctttttgacacatttccaaactcagaaactgcttggccctcaaattcaacacatcttgtttgccaggg

SEQ ID NO: 641366 - DNA, 637 bp, Homo sapiens
gttgttttactgataggaagaagcactgagtggaaggagaaatactgtggttttttcagccctctctcttcctctcactgctcccttcttccttccaccctgctcttcctccctgccatgaaaagaggctgagctctgctcccgccttgtcccctaagcctagcagacttaagtttrgccccttcctaacttctcctccagttaggtatttactcagtgcaagaatagccatcaggggggctgttttctctttctctctgcacttaagtgcaattaaattatgttatttcacagtaattagtctggaatacaaacgagacggggaaaatcctttccaagaaggctaaaaatctataaaatcaactccttttccatactccctgggcaatgttgtaaaaggagcacccagagatgcagttgggggtccttcctgaccaaccatggctgtgctgcctcccctgggggctttaaattgcccccagggcctccaacccctaggagagtgtgttgtttctgcagctgctgctgttattattaaaaatgaatatatgagtaaatgtgggtcccttctttttgacacatttccaaactcagaaactgcttggccctcaaattcaacacatcttgtttgccaggg

SEQ ID NO: 641367 - DNA, 638 bp, Homo sapiens
tgaccttaactggttgaaggcacaaaactaacaaggcacggtttaggagggatcagcatcaagtctggcagactgaatcacaagctgaccaccttggcaaggtggacagaatatggccttcaaagtcagagggaccttcatacctgccttggctttaacgcttactagctggccaagttccctaacatccctgaaccttgatttcctcatctataaattgggataagaattcgtgcctctcaaagaggttgggaggaagtaaatgtgatatataagaagcacacagcacagtgcctagcatttagaaamcacactctaaaagctatttcccatttttttcatatacatcttctctccatatccaccctgtggataaaaatgtcattcaaaaagagtttcttgagctcctactcgccccaaaggagttgaggggaaatagtaggttctacctcttctctacttcagagaagtaagtttggccttatgttctgagggtacaagtgatggcccattcaccatagtgagtttgaagcaccggttttaggatcagacataccctatcctcagaaaccccaccctagtgctcactagctatggaccaagaccttcaatttcatctctaaaatggagaaaataaa

SEQ ID NO: 641368 - DNA, 616 bp, Homo sapiens
aagtgtctcttcgaacatctctaacatcacaaaaaaaccgcttggaaccaggatacccaggaagtccttcataacaacaaataaaatacagcctgttgacttgatgctggtctttcastgtgctaagggtggtcttcctaacatccctagagtctctcctgttccttctcaactcttcaggaggctgatgtctggcaggaagttagggtttgtatttttcacatatgagtgtgcttaattactaaatagaaggagtttgataagctgccttccttgcttgcatttgtggtgcccccagagagctgtcaccctcctaatcagtatagaaatggccgagagactttactcatgacaccctgcatggatgcttagcacagggttgggagcctgggtggaatttccaggtatggcataggcttggtgtgtgaacttgggaaattccctcagcttgacccattttagcacagatattatatttaccctcatccaaagacaaaggaacattttgcagaaatatttcctcttttcagaagtaccttttcctcatcttccccagcccctaaccctgccctaagcacaaccccccatccacatatcagcctcagaatttggcttc

SEQ ID NO: 641369 - DNA, 599 bp, Homo sapiens
acaaattctgccttgaggtagacacagctttaagttgggggaaagcatgtatccagaaaagatcccacccctccggctgcagctggcctttcccaacaaaatctgcctgttcagattttacaggcagaaactttgtctaatccatctctatgtctccagtatcgaggacaaggcatataaaaagtgatgtttgtaaaagaaatgaaagcagagaagcaggaagggaaggaaggaggaagggaagaaccatcacatgtttccctttctttcattccatcsttttgccttgtttggtgcccagtcacacaacacaatataatacacgacttgctgtgcacatattttgtaagcagatgttcattaacaagtacaggttcagaatgatatagtcttagattttaaaattggaatggactcccaccacctccttttctgtttgtcaattggggaaacgggctcagataggttaagtgttttgcccaaggtcacacagcaaattagccgctgattgggataagcgcaagaatgaaatttggtggagtatatgttgtgagagagttctacttttggattcaaatggtggcccagtcaaattatgc

SEQ ID NO: 641370 - DNA, 485 bp, Homo sapiens
gggaggcaccctgccatcagtctagggggttcttatagcctgtcccggcctggttcatcctccacgtggccaccagaaatcttcctcacatactaatgtgaccccccaccctctggataaaggccaaggtctttagcctggcacctccaggaagtgaccacctgggcctgccccagtgtctctacctcacccgcagccactgttttcacatagccatttcactctagttataaaactgtccccagctggccttgcttctgaacccttgcacatgcattatcttctgcctagaatgcccctcagacataggtctcatgtcacttctcagaaacctttcctgagcctgacagtcagtctggcagctgccctccatacctgtggtgctccctggggctrtggcgtatgccgataagaattattgtggtcgacacttggaaagtgctcagtatgtggcaggccttgatgtaagcaccttacctgcattc

SEQ ID NO: 641371 - DNA, 570 bp, Homo sapiens
agtgtcttgctgtttggcaccaagaacaggatttaatgaaagcagcttaaatcaacatgccctgcactcaacaaccagccctgtattgaaatgtgagctgacaagttcctcagcactttggttaggtttgtggaaacagtgaagtcagattttatacaagtgtttactcagttccctggcttcctggcaacttggcttccagtctcgtctcagaaattcctctttcartccagcctcatgcatgtggtcttccttcctgataaatcacacgacataactgttgcaacagattcttatgccccagaagagcacaggacataggccccagtgggacttcacttcctgagtcacttgtgaggatgatactgatcatggtggtggtagtgatggtgggggaggtggctactgctgttgctgttaaacagatagaaaagagttggaagcggggaatgactggccctaagtgactcagcttacctgaggcagtttgaattaaatccaggccctttgttcccaagtcctcagctcttgcctcatgccccctttctatccaaagaggtgttcatgttg

SEQ ID NO: 641372 - DNA, 570 bp, Homo sapiens
agtgtcttgctgtttggcaccaagaacaggatttaatgaaagcagcttaaatcaacatgccctgcactcaacaaccagccctgtattgaaatgtgagctgacaagttcctcagcactttggttaggtttgtggaaacagtgaagtcagattttatacaagtgtttactcagttccctggcttcctggcaacttggcttccagtctcgtctcagaaattcctctttcagtccagcctcatgcatgtggtcttccttcctgataaatcacacgacataactgttgcaacagattcttatgccccagaagagcacaggacataggccccagtgggacttcacttcctgagtcacttgtgaggatgatactgatcatggtggtggtagtgatggtgggggaggtggctactgctgttgctgttaaacagatagaaaagagttggaagsggggaatgactggccctaagtgactcagcttacctgaggcagtttgaattaaatccaggccctttgttcccaagtcctcagctcttgcctcatgccccctttctatccaaagaggtgttcatgttg

SEQ ID NO: 641373 - DNA, 570 bp, Homo sapiens
agtgtcttgctgtttggcaccaagaacaggatttaatgaaagcagcttaaatcaacatgccctgcactcaacaaccagccctgtattgaaatgtgagctgacaagttcctcagcactttggttaggtttgtggaaacagtgaagtcagattttatacaagtgtttactcagttccctggcttcctggcaacttggcttccagtctcgtctcagaaattcctctttcagtccagcctcatgcatgtggtcttccttcctgataaatcacacgacataactgttgcaacagattcttatgccccagaagagcacaggacataggccccagtgggacttcacttcctgagtcacttgtgaggatgatactgatcatggtggtggtagtgatggtgggggaggtggctactgctgttgctgttaaacagatagaaaagagttggaagcggggaatgactggccctaagtgactcagcttacctgaggcagtttgwattaaatccaggccctttgttcccaagtcctcagctcttgcctcatgccccctttctatccaaagaggtgttcatgttg

SEQ ID NO: 641374 - DNA, 457 bp, Homo sapiens
ttgcctcatgccccctttctatccaaagaggtgttcatgttgccattcttatctctctttctgacaagccacaggatagrgtaacaaagagccatccatttcttagtatttagcatgtaccaggcactgaactaagtcctttacaaccttatcttagctaaggttcataagaaccctgggaaggaagtattactagtattaccatttccagataaggaaattgaagctcagaaagattaaattacatactggcatcccttttctcccccaaccctcacccgactcataagtggcggagtccagattcaaaccacatctggctccaaggtctctcctaaacactatgttatattgactgatgtattctaatcaatctctctctctctctctctctctctctctcccctgtgaactctgtgaggtcagggcctataagtatccctagcatagggacaaa

SEQ ID NO: 641375 - DNA, 569 bp, Homo sapiens
tctgggcatcgcctgcacaactctgtcttctgtcctgagctttacatttggtgtgtaaatttagggcccagacaggccatgttcttcatatccttccttgggtgcctcatgggtacttgagaaccaggacaactggggaagatataaggaagagtacttgtgtaatagtttcaaaactatttttagtaatttaaaatcctaaaatcatgttatgttaagtaacatattaccgtaaagtgtatgaggcatctctaagtaaattaaattactgaaccattaatttttaaatgtaagtttatatatgttggaatctaatttcttatggtatagaaaagctaaatatatttagatctaataaacataaaaaatgagaaaacatttataaaattacatctacaaatttcaaatkgatggaataaaaagaaatataggtaaaactagattaatatataaagttgggaaaataaaaagaacagataagaattatgtttatggaaatctcaatatggtcaaaagctaactgacattggatgaatttgtttataaaattttattaaaattagctaata

SEQ ID NO: 641376 - DNA, 576 bp, Homo sapiens
gagactaattccatctcatgctgttgttattgggtcttttaattgtttggaaaactgagtctccactctgtaaaagagtaaaaatatttgcttttaaaaaacttttttagttatcatttggctaaataaattatattactttacattgacctgtgatttgatttggattaagtattaacctttgatgtatttaacagactttccaaaatcaaattttaaytctaaaatgtttattgacctcaaactaactttgagatgttcccaagggcccctgaagcatccaaaagactgataattaacaggtttatttgatgtgttatgttacatgggaggcattgcagtaagaaataatatttaatttttaagttatatttgtataaatataacttaatatgtgtttcaaaattgtatgaggtttctaaaactctgatatgtttcggtatatgttatcgcacataattatggctattattttaatcattgaagcccacagaaattactgaatttttcatcaattgtgtctatagtcatgaaaatttatcttgtccaagttaattgcttaattctgatgattgt

SEQ ID NO: 641377 - DNA, 576 bp, Homo sapiens
gagactaattccatctcatgctgttgttattgggtcttttaattgtttggaaaactgagtctccactctgtaaaagagtaaaaatatttgcttttaaaaaacttttttagttatcatttggctaaataaattatattactttacattgacctgtgatttgatttggattaagtattaacctttgatgtatttaacagactttccaaaatcaaattttaactctaaaatgtttattgacctcaaactaactttgagatgttcccaagggcccctgaagcatccaaaagactgataattaacaggtttatttgatrtgttatgttacatgggaggcattgcagtaagaaataatatttaatttttaagttatatttgtataaatataacttaatatgtgtttcaaaattgtatgaggtttctaaaactctgatatgtttcggtatatgttatcgcacataattatggctattattttaatcattgaagcccacagaaattactgaatttttcatcaattgtgtctatagtcatgaaaatttatcttgtccaagttaattgcttaattctgatgattgt

SEQ ID NO: 641378 - DNA, 574 bp, Homo sapiens
acttttcttcttaagagatttagtgaccatcactggtttatactttggcaggttttagaatcaatcccaggcctggggcaagctacgaggaattcaagcttaaaatccgggagtcttccgtatttttcattcaagctataaaacacatgtatgtaaaaagaatcaatacggggtcatggtaagagcttggaataaggttcaggtgagagagagctcagttatactcctggctctatcactaacttgtgtatttgggcaattatgtttcttgacttgtttggaaaatgtgggggttagattacaagtaaattgtttttaatggtaattccagtacatttctttctttatcaaaaataaaacagagattatttgccaatatttatgtcagctgttyggaagaataataaatgccatattttatatagctcctagctctacagctcaatgagaaataaactgtatagaatttaaagtccatgaggagtggtaataagagaagatattcattatgctactcattattattttaataaaaatagagttacagaatctcaaggagaacagttaaattaat

SEQ ID NO: 641379 - DNA, 609 bp, Homo sapiens
ccatttcttttgccttaaaaagattttattttgcacccactcttgaaaaattttggctgggtatagaatttagtaaatgaacatttattttctttaacacactctgcaaccatctcactgtcttgtggcatctatgttactgttagtccatttttcactattttaatagtgaatctgtcttttattctcactagttttaaaatcctcggattcaaagttctgcagttataatatacatagttctggatttctttttatttgttttactttgatgttgtttggcttctaagttttctggaaaatctraactgttatctgttcaaatattacccctgccgcattctcccccaccaccgtcattctattcctcgtggcatctcagttaaacctgtgttagcttttctgactttatcctccattcctctttatctttatttcacatttctatctctttatttacctaatatgccttcccttattataaattctatctttccattcactattcttttctaattgtgtccagtctgctgttaggcttatagatggagtttttaattacattattatatttattcatttctataaattttgtcagctctgtttata

SEQ ID NO: 641380 - DNA, 609 bp, Homo sapiens
ccatttcttttgccttaaaaagattttattttgcacccactcttgaaaaattttggctgggtatagaatttagtaaatgaacatttattttctttaacacactctgcaaccatctcactgtcttgtggcatctatgttactgttagtccatttttcactattttaatagtgaatctgtcttttattctcactagttttaaaatcctcggattcaaagttctgcagttataatatacatagttctggatttctttttatttgttttactttgatgttgtttggcttctaagttttctggaaaatctgarctgttatctgttcaaatattacccctgccgcattctcccccaccaccgtcattctattcctcgtggcatctcagttaaacctgtgttagcttttctgactttatcctccattcctctttatctttatttcacatttctatctctttatttacctaatatgccttcccttattataaattctatctttccattcactattcttttctaattgtgtccagtctgctgttaggcttatagatggagtttttaattacattattatatttattcatttctataaattttgtcagctctgtttata

SEQ ID NO: 641381 - DNA, 609 bp, Homo sapiens
ccatttcttttgccttaaaaagattttattttgcacccactcttgaaaaattttggctgggtatagaatttagtaaatgaacatttattttctttaacacactctgcaaccatctcactgtcttgtggcatctatgttactgttagtccatttttcactattttaatagtgaatctgtcttttattctcactagttttaaaatcctcggattcaaagttctgcagttataatatacatagttctggatttctttttatttgttttactttgatgttgtttggcttctaagttttctggaaaatctgaactgttatctgttcaaatattacccctgccrcattctcccccaccaccgtcattctattcctcgtggcatctcagttaaacctgtgttagcttttctgactttatcctccattcctctttatctttatttcacatttctatctctttatttacctaatatgccttcccttattataaattctatctttccattcactattcttttctaattgtgtccagtctgctgttaggcttatagatggagtttttaattacattattatatttattcatttctataaattttgtcagctctgtttata

SEQ ID NO: 641382 - DNA, 665 bp, Homo sapiens
aatgctacatgtttaggtttttgttacagcagtttatattgtaaacagaactctcctctaataaatatgttctaatttatgttttkattatttattgctttccaacaaaccatctgaaaacttagtggcttaaaacaacatggttctcccattgttctgaaagttggctggacttagctgggtggttcttgccttggctctctcatgtgctaacagtcagatggcagctgatgtcacgtgggacatctgggtatttcccccacaaagtagtcccagggtctctcttttccatgtggccttatcatggggcctgtccaagtggtcttttcagcaggatagctgattttgcattacatgcaggtcagaattcccaaatgcacaaaagtggaaattaataagccttcttaaggcttaggcttagaactggcacatgtcacttctaccataatctgtgggtttaagttagtcccaactgaggctgaattcaatgctgtagggaattatataaaaatgtgaattcctagaggcctagttcattgaggggccatctctggagactagttgtcataagtatgtattctttagtgttgagctttttttgctgaaagacattgtgagatcaattttcacagttcctcacagcgggagctgagggtcttttttct

SEQ ID NO: 641383 - DNA, 665 bp, Homo sapiens
aatgctacatgtttaggtttttgttacagcagtttatattgtaaacagaactctcctctaataaatatgttctaatttatgtttttattatttattgctttccaacaaaccatctgaaaacttagtggcttaaaacaacatggttctcccattgttctgaaagttggctggacttagctgggtggttcttgccttggctctctcatgtgctaacagtcagatggcagctgatgtcacgtgggacatctgggtatttcccccacaaagtagtcccagggtctctcttttccatgtggccttatcrtggggcctgtccaagtggtcttttcagcaggatagctgattttgcattacatgcaggtcagaattcccaaatgcacaaaagtggaaattaataagccttcttaaggcttaggcttagaactggcacatgtcacttctaccataatctgtgggtttaagttagtcccaactgaggctgaattcaatgctgtagggaattatataaaaatgtgaattcctagaggcctagttcattgaggggccatctctggagactagttgtcataagtatgtattctttagtgttgagctttttttgctgaaagacattgtgagatcaattttcacagttcctcacagcgggagctgagggtcttttttct

SEQ ID NO: 641384 - DNA, 596 bp, Homo sapiens
gagatacacgaagtttaaaggttgcaattagaatcaacccaaagaggtcctcttcaaggcacattataatcaaacttccaaatatcaaagacaaacagaacattctaaaagcagcaagagaaaaatgtcaagtcatatttaatcctcattagattatcagcagatttctcaacaaaaccttgaaggcgaggagagaatgggattatatattcaaaatgctgaaaagacaactgttatcaaagaataatctccccagcaaagctatctttcagaaatgaagcaagcagaagctgagggaattcatcactactacagcagccttacaaagaaacatttatggcagtacttcaactagaagtgaaaggatgccaattactactatgaaattatatgaaagtataaaactgactggtagaggtaaatgcataattcagaagacttcattactgtaatagtggcatgtaatcttttaagtctctcctatgaagataaaacatcaaaatagacatggatatctatagctacaataagytgttaaggaatataccctatacaaatgcaaattaaggtaacaaaattacacattatggggaagg

SEQ ID NO: 641385 - DNA, 573 bp, Homo sapiens
aaacagatgaattgagaagttattttgaagggtgattaatatttcaataaaaaagcccattaaaaatgtaattaggcggggcacggtggctcccgcctgttatcccagtactttgggaggctgaagcgggtggattgcctgaggacaggagttcaagaccagctkggccaacatagtgaaaccccgtttctactaaaaatacaaaaaaattagctgaacgtggtggtgggcacctgtaatcccagctactcgggaggttgaggcagcagtattgcttgaacctgggagacagaggttgcagtgagctgagattgcaccattgcactccagcctgggcgacaagagtgaaactccgccacacacacacacacaaatgaaatccagcaccaaaacagtatttgcctatttggcaattaaatgtaccatcaaacagagggatagagaatgtggtatattatatatatatcatacattataatgtgatataatatataatacaccacagtttctttatccacttgttgtttgatggatatatacatatatattatatgtaatatatatacaaaatgt

SEQ ID NO: 641386 - DNA, 583 bp, Homo sapiens
ggatccaaaatcactcagggctgctgactgggctccataatcaggtaagaccattcactgtggtatgtattcgagtggggctgctggctgtggtccacagattgatggggtcactgcctttgctccaaatttaggtgagatcactgaccagatctcttggccagatagggccactggctatttcctgcagttttttggggctgcaagctgatccataattgggaagttttactggatgtgctctgtagtttggagagataattgaccagactccgtcgtcagatgggactgcaggctatgcccagcggttgagtggggttgctggcttggatctctacctgagtggggtgggctgcaagttgtgctttrtggttgggtggtgctctaggctgtgctctgcagctggtccagcttactgactggtaccacagccagacagaactgttcaacatgcctcctgaccgaaagggcctgccaactcagctccacatgtgagcaatgctagtggctgggctctctggtcacataaagctgccagctagaacatgatgccaccaccaagatcgggtgctggttgccgtaa

SEQ ID NO: 641387 - DNA, 396 bp, Homo sapiens
ctgtgcaagaacacattgttgttatcttaagccattcagtgtttactttgttatggcagctgaagaaaactaatactttactcttcaatttggaactgtcatttacatgagcctttattagtctctttgtctaaaaagcccaggaaggtgggcagtttttccttctcctctgggacatcttcaaactgatccaacctttctaagcctcagtagctcattttaaaattaaacatttttgtaaattttgattggtctctgcctacttctcataccatcaggtagcagtatcagtcagggaatatatttttgtttgttctccaagaatatcacacaatatcaaccacatgatagacaytaaacatgtgaatggataaatgaaaaaaatacatttattat

SEQ ID NO: 641388 - DNA, 351 bp, Homo sapiens
ccatcaggcttggtcagtacttagsatctttggcacatctttgctaggtattgcttctcttgctatgcagtaattcagcttgtgacccctaacagttttgtgtctgtttccaatttttagatggttggataatgtgctttcattagcaacacagaaggagagttctaggtcctcaaatcatccatgagggtgagaagaatctttagatggctgggtaaacagccaagtaatctgattccaactctttcctgatacttggattttattttattttattttattttttcagagacagggtcttgctctgttgctcaggctgaagtgagtggctgagtggcatagtcacacctc

SEQ ID NO: 641389 - DNA, 332 bp, Homo sapiens
  misc_feature 294, 295, 296, 297, 298, 299, 300, 301, 302, 303, 304, 305,306, 307, 308, 309, 310, 311, 312, 313, 314, 315, 316, 317,318, 319, 320, 321, 322, 323, 324, 325, 326, 327, 328, 329,330, 331, 332: n = A,T,C or G
acaaattctgtcagttcagtatagtttcttctggacatttcttcatctcatatgagacgcattggtctgaatatctaaggagaaagagaaactttttaaaaatcactaaaaccctagttaaatatcatgctttgtataaaaagagccaaaaggctttagttatgttatctcagtagcagttctgtaactgaagatgaacagttatactatgamgcaagtcgaaacatttgcaacaagtggtttccactgaggctgaatttgtaatcacagtgtgcaattaagttggaggcttannnnnnnnnnnnnnnnnnnnnnnnnnnnnnnnnnnnnnn

SEQ ID NO: 641390 - DNA, 332 bp, Homo sapiens
  misc_feature 294, 295, 296, 297, 298, 299, 300, 301, 302, 303, 304, 305,306, 307, 308, 309, 310, 311, 312, 313, 314, 315, 316, 317,318, 319, 320, 321, 322, 323, 324, 325, 326, 327, 328, 329,330, 331, 332: n = A,T,C or G
acaaattctgtcagttcagtatagtttcttctggacatttcttcatctcatatgagacgcattggtctgaatatctaaggagaaagagaaactttttaaaaatcactaaaaccctagttaaatatcatgctttgtataaaaagagccaaaaggctttagttatgttatctcagtagcagttctgtaactgaagatgaacagttatactatgacgcaagtckaaacatttgcaacaagtggtttccactgaggctgaatttgtaatcacagtgtgcaattaagttggaggcttannnnnnnnnnnnnnnnnnnnnnnnnnnnnnnnnnnnnnn

SEQ ID NO: 641391 - DNA, 585 bp, Homo sapiens
attaacgtaagacagtttagataatttgacactgtggtggtggtacgatttgttactgatgaagctagaatcaaaatcactaatggggattagattcataaaattgttactttttgaatactaaaatatttactcagacattcagtatattagagtaggcccagtatcatgtaatctaatttattttgcaaaaattgcaaatgagcgagatattaaccaagttcaattagaaagttagttggtggcagagctgagcataggttccagagccacccagaacttttgtttgcttgggagaatctstgagcacacctggatagcttagggaattgctgcttttgggtatcactggtcatttgcatctgatcataggtactagactgctgacaagttggccattagtggacaggtatattgagagttgatttaagtgttgcatctgtcaaggttaacacgaaacattctgttggccctgagtctcacatttcaatctagaatccatctgtgtactttactttccttgcaaataaatgatctagtgaatttatatattttttccacttagctcctagcacacatcatttg

SEQ ID NO: 641392 - DNA, 615 bp, Homo sapiens
catcctcacactgtctccttgccaatctctcaatcctacaaattctggttaactttttatttggcaagttcaattccatagccaatttatatgaacagcataacatggtcacattcccgttaacccagtgttttgtccctgcagccatctgtggcaatcacatccacatggtcatctgccttccatgtagtcacaatattgggtccaaagtgctccacgtttatatggctgtccttctctatgtttgcatttcatgtaaacttatttaacatggtgttatccccagagctgacgacatggaatagcatcatatcctkccaccttgtggctactccgaccaaataaaaccaaatttcaccacacgccatgttgctactccataatgtgatggaagtgtatgagagttctaactttatattttccaaacaaatttggaatctttctactctttgtaagccagaaaaacttctctgtttttgaatttcaccttatgaatatgtctagataatgttacctccttgaaggaatcaataacacaaaacagtagctgccctatatgtttgtgactctttttgaacaaccaaataaatagaaatagaaagaacgtaacgttta

SEQ ID NO: 641393 - DNA, 642 bp, Homo sapiens
aacacttggaggaagttggttaaaaatgtgagggcacaaaagtaatttacaacattaaaacatgcaacaaaattatatccaggataattcatgatattcccataaaatattgcaatgaaagccaataaccccatataagtgcttgtttattcaattgtggcataagaaaaagttacaaaacaacaataaacaaaatataatttttctccataaaaatacaaatattcttcatgtaagacaccatcataacatgaaagaaaattattatatgtagcctttatttgttaaatatattcttcaatttctaatctgtgcaaattaaaacagartttgtttctaaaacttcctttgagagatcaaagtagcatataaccataaacaagagctcctactgctgatagagttatagtaaaatgattgttttcaaacattagtggtacaggtttgttacaagctttctggataaaaatttatccatagaaatgtttagcaagacctttaaaaatgttcaaaacatttaattcagcaattacacttctgggaacataacaaaaggaacaattagagagagacgtacagatacgtcggtcatcaaaatactaagatacattgatatgatggaatcatgatttgcaagataat

SEQ ID NO: 641394 - DNA, 602 bp, Homo sapiens
tatatgtttgtgactctttttgaacaaccaaataaatagaaatagaaagaacgtaacgtttaaaatagtagcatgatggttaattttatgtgtcaacttgactgggcgacagggtgcacaaatacttggtaaaatgttatttctgggtgtgtctgtgaatgtgtgtctggaagagattttaccatttgaattggaagactgagtaaaggagagtgttctcaccaatgtgggctggcatcatgcaatctgytgagggcctgaatagaatagaaaggcaaaagaagagcagatttgttttctctgggtgagttgggacatcaatcttcgcctgctcttggacaatgttggtgctcctggacctcggacctgcagactctgaccaggacttaaactatttgttcccctaccaggtcttcaaacttagactgaattaaaccaccagctttcctggttttccagcctgcaggcggcaaatcacaggactttttggcctttatagttgcatgagccagtttccattgtgtgtgtgcgtgtgtgtgtgtgtaatcatgtaatgttatatatatatatatgtaaaatcttcattctatatatagaatgct

SEQ ID NO: 641395 - DNA, 527 bp, Homo sapiens
cttggggattttaatttccagtccaaccctgagagcttctatgtatgtctggaaggagatccttgtctcctgtagcttcaattagagaattgcagaaagggatcctatatgttgygttgggggtttgtgggaagatcctgatgaagctggaaagactgagcccctaaattctgataagtgctatctgacagtgaaagaggtttccctactcctatactcctagtggaattggcctccccgttcccagtggtatcagcttttccacctatgtcttgggtaattaactccatattgccagaataaatggtaaagacttcccctgaggcagtttccatacaagacaatacagattctttttggggcccacctttaccacccttctttgcttctaaacttataactaaacccaagtaccaacagcccctgaaagaagaggtaccaagcaagaccatgaggtggtgcactaaaaaagtagatgagttttctaatttatacaaacagaaatccagggaacatgtgtaggaatg

SEQ ID NO: 641396 - DNA, 596 bp, Homo sapiens
gcctccagttttgctcttctttttgtatagtagctacttttccccaaactgtcactaaactgtaaakcacctttatagggtcaaacacaatagatgatctatagtttccatatttttttctcagacgttctctgtcctcccattggattctgctctgtttgcagagctgttatttgaagataatgattccaatcattggtttaaggcatttcattcattcaacttgattacatgacaatatgcaacaaactggagattcaacaaaaataagacagaaaaaagtcttaaagagagttttatggaacagttaatgaacttttctgctgttatcatgagtggcacaaggtcagagataactaggtccatgcatgtttgtatttttctgcaatgtcagaattttcttgatgctatttcaatcataaaatccatgagctacatggggttcccgaggaggcaattctccttaaaacttcctgttcactcagtagtcagagccatgggcaaacaggctcaagtcattcaacaagtcagtcagtattgcagtccatgaattacagtatatttaatcagtctataaatgtaatagattacacatt

SEQ ID NO: 641397 - DNA, 558 bp, Homo sapiens
tgtagcctgtagggtgaccgttctgacaggctgtgaagcatatcctccagctagaagttggaaagagacacttcgacagtatgaagagtaagacagggatttatgctgaatgggatgaccaaatatattacacatatatgataatacatattcaacaggctatagaaaaaactatgaatattcacaaagaagaggcacaggcatgaatagtaggctaatataagcaacatgcatcccatgttccctttggagtggggacttaacatttaaatgtgtcatgattagactctatgcaccaaaaggtgaatcagaagacaccaagrccctctgtgcacagcctctgttgactggcaagagccactaggttattggtggtctcttatcaagaaggaatgctggtcaattgctgtgttgaaaccgcaaaaagagaagtccagtgtcaggtggtttgcagatatcagtggtggtgcgagtctcacaagggcaggtttctgtttaacccttattgtaggaagcctaatggtgtttagcaagggaggggagataacgaggcatgtc

SEQ ID NO: 641398 - DNA, 625 bp, Homo sapiens
attgactggttgggtaatgacagaaattgtttccaaaatgttaaaattcaatttatctaatattattgcctccttatcctgtcccaggaaacaaatatgaataaatgaggactttgagttagagttgtctttgagttacagatgatagtgacaagcactctaacaaagataagagatggatgaggaagaagaaagcgagccagccgaggtatcagtgccgaaactgtaaagaatatgaaaaatctgggccaagaatctagaataatgcctatgaattgtaacttaattggcaagaaggaaggcacaagggcttcttttaactctctggtggtgagcaacttcttcaatccagggtcttggttttagtcctgacttagtctctaaggagctttgcaaatttgctcaggtttcactggtcatctggacatgcacttttagtggagaccattatcattaaccatattttaattctagcattgygggacaatggcaatcagagacagctaatatacagatatagagcccatgagaaatctgtccactgctgctgagaggcaagaaacactcaaaacaaacattcaaatgcagtcaataactttgatgatgatgaatttgataatgaccc

SEQ ID NO: 641399 - DNA, 650 bp, Homo sapiens
tgttaccaacgtgttttggaatgagggaatagtgtcctaaagtttgtcgaaaaatggattaagccactaactgcctttttcagttgactatacaatcatgggcttcctttataacaacagtccccaacctttttagcaccaacgaccagttttgtggaagacaatttttccatggatgggggttggagggtggggttgttggggataatcaagcattagattctcgtaaggagcacacaacctagatagctggcatgcgcatgcagttcacaatagggtgggtgctcccatgagaatctaatgccaagactaatctgacgggaggcggagctcaggcaggaatgctcacttgctggtggcttgcctcctgctgtgtggcccagttgctaacaggacatggaccataccagttcatggcctgggggttaggggacccctgctttagtgtctccacctttgagaatttcactggctatgtgctgtattagagagtccagaatcataggggtttgaaggaaattctgggttttttttyttcactttttttttcttactgctataccaacaaaatcaaaagcaattcatttctttgtgaataaaccaaagataaggtttctaaatttggaataacaagggcctatatgaattac

SEQ ID NO: 641400 - DNA, 483 bp, Homo sapiens
gcatggcatatgtagctcctttattttggccaatttcttccttttggaacagaagcatttatccactgcctgtaactcccttgtatcttagaagtaaataacttgtttttagttttacaggcttacctgtggaccttgtctcagatgagattttggacatttggacatttggacatgargaattggacatttaagtttgtgctggaatgagttaaaactttggggaactattgggaagacatgattgcgttttgaaatgtgagaagaacatgaaatttgggagggaccgggacagaatgatatggtttgactctgtgttcccacctaagccttatattgaattgtaatcccccagttttggaggtggggcctggtgggaggtgaatggatcatcggggtgttttctaatagtttaataccattcccctagtgctatcttatgatagagttctcatgagatctgtttgtttaaaagtgtgtagc

SEQ ID NO: 641401 - DNA, 320 bp, Homo sapiens
gtggggcctggtgggaggtgaatggatcatcggggtgttttctaatrgtttaataccattcccctagtgctatcttatgatagagttctcatgagatctgtttgtttaaaagtgtgtagcactttcccctttaccctctctcctctgtcgccatgtgaagatgtgcttgcttccccttcaccttccatcatgattgtaagtttcctgaagcctcccagccatgcctcctgtacagcctgtggaactgtgtgtcaattaaacctcttcactttataaactactcaggctaaggtaattttgtttagcaatgtgagaacaga

SEQ ID NO: 641402 - DNA, 431 bp, Homo sapiens
ttactaagaagtatagcattcaaagcagtgtgtggatctaaggatgatgaagaggttaagtgtacagaataaagagatcacaaatagatccactcgtatatgtagccaatggatttttgaacaaaggtgcaaaggtattttaatggagactgctactggaaaatatggatatgttcattaaaatatttaacttcctataacacaccacatgccaatactcaaaactaaattggtggaaataaaaattytaaatgtaaatgctaaatctacaagtcctccaggaaaaaaaaaaaaatggaagaatagctttatgatcttgaggaaagcaaagatttcttaggaagaaaataaaagcactaattgtgaataaaatatatatatataattatatatatataaagtgtgtgtgtgtcatcaaattttaaaacacg

SEQ ID NO: 641403 - DNA, 654 bp, Homo sapiens
gatggcaatgctgtgtctgagctcacgctkgtaatcccagcattgggtgagaccgaggtgggtggatcacctgaggtcaggagttcgagaccagccgggccaacatagcgaaaccttatctctaccaaaagtaacaaaaaaaattagctgggcgtggtggtgggcacctttaatcccagctattcgggggctgaggcaggagaatcacttgaaccagggaggcaggggttgcagtgacccgagatggtgccgctgcattccagcctgggcaacaagagagaaacttcatctcaaaaaaaataaatacataaaagaaaaagaaaaataggtttgcattattttgttccaagagaatacatttttctgtcctttgccaacactgctatggatttatggagctttcacctgatgtgtcccacttggcagaatttttcagaaaatactctgcatggcttgaagttgtgttttttcctcctgcattgtacacagagctttaactcttccctgccctaagcatagtttggtttctttccaatagttccattatttaaaatagaataatttcatatatttaatgattattctctttattcttcccattttcttactcatctctctcctgacgtgacagaacaccactgaatgaaaagtgaa

SEQ ID NO: 641404 - DNA, 654 bp, Homo sapiens
gatggcaatgctgtgtctgagctcacgctggtaatcccagcattkggtgagaccgaggtgggtggatcacctgaggtcaggagttcgagaccagccgggccaacatagcgaaaccttatctctaccaaaagtaacaaaaaaaattagctgggcgtggtggtgggcacctttaatcccagctattcgggggctgaggcaggagaatcacttgaaccagggaggcaggggttgcagtgacccgagatggtgccgctgcattccagcctgggcaacaagagagaaacttcatctcaaaaaaaataaatacataaaagaaaaagaaaaataggtttgcattattttgttccaagagaatacatttttctgtcctttgccaacactgctatggatttatggagctttcacctgatgtgtcccacttggcagaatttttcagaaaatactctgcatggcttgaagttgtgttttttcctcctgcattgtacacagagctttaactcttccctgccctaagcatagtttggtttctttccaatagttccattatttaaaatagaataatttcatatatttaatgattattctctttattcttcccattttcttactcatctctctcctgacgtgacagaacaccactgaatgaaaagtgaa

SEQ ID NO: 641405 - DNA, 581 bp, Homo sapiens
gatctctcaaaaccacaaaattatacgggaattaaacaatttgctactgaatgacttttgggcaaacaactaaaccagaaattaacaaaatatatatttgaaataaataaaaacagagacacaacttaccgaaatctctgggatgcagcaaaatcagtgttaaaaggaaagtgtacagcgctaaacacttccctcaaaaagttagaaagttctcaaattaatgatctaacatctcacctagaggaactataaaacaacaaactaactccaaagccagtaaaagaaaataaataactaaatcagagtaaaactgaatgaaactgagaccccaaaatacatccaaaaaccaataaaaccaaaagtttatttgaaaggatacacaaaatggatagactgctagctagattaacaaagaaaataagaaagaagatccaaatcagcacgatcagaaatgacaaaggtgacattayaatcaattcctcagacatataaaagactatcatagactactatacaaaaatctaatcaaaatgttttaaagacaaatgtatgacctgaaactataaatctactagaagaaa

SEQ ID NO: 641406 - DNA, 599 bp, Homo sapiens
ctactatacaaaaatctaatcaaaatgttttaaagacaaatgtatgacctgaaactataaatctactagaagaaaactctgggaaaatacttttagacattggtctaggtaaagagtttttggataaggcctctaaagcacaggcaacaaaaccaaatatagataaacaggatttcatcaaacaaaagaaatctctgcacagcaaaagaagtaatctatagagtgaaaagacaacctacacaatgggagaaaatacttacaaatcattcatctgacaagggactaatattcaggttacataggaaatttgaacaactcaatttcaaaataaataaatttttaaaaatctgattgaaatgtgcaaatgattatagatatctctttttcatcttttttcttttttgttktattttaataattttttctatttttagtttcaggggtatatgtgcaagtttgttacataggtaaattgaatgtcactgatatttggtatacaaatgatcccatcacccaggtagtgagcatagtacccaacagttttcctttaaaaaaaaaaaacttttattttagtttgggggatacatgtgaaggtttgt

SEQ ID NO: 641407 - DNA, 599 bp, Homo sapiens
ctactatacaaaaatctaatcaaaatgttttaaagacaaatgtatgacctgaaactataaatctactagaagaaaactctgggaaaatacttttagacattggtctaggtaaagagtttttggataaggcctctaaagcacaggcaacaaaaccaaatatagataaacaggatttcatcaaacaaaagaaatctctgcacagcaaaagaagtaatctatagagtgaaaagacaacctacacaatgggagaaaatacttacaaatcattcatctgacaagggactaatattcaggttacataggaaatttgaacaactcaatttcaaaataaataaatttttaaaaatctgattgaaatgtgcaaatgattatagatatctctttttcatcttttttcttttttgttttattttaataattttttctatttttagtttcaggggtatatgtgcaagtttgttacataggtaaattgaatgtcactgatatttggtatacaaatgatcscatcacccaggtagtgagcatagtacccaacagttttcctttaaaaaaaaaaaacttttattttagtttgggggatacatgtgaaggtttgt

SEQ ID NO: 641408 - DNA, 599 bp, Homo sapiens
ctactatacaaaaatctaatcaaaatgttttaaagacaaatgtatgacctgaaactataaatctactagaagaaaactctgggaaaatacttttagacattggtctaggtaaagagtttttggataaggcctctaaagcacaggcaacaaaaccaaatatagataaacaggatttcatcaaacaaaagaaatctctgcacagcaaaagaagtaatctatagagtgaaaagacaacctacacaatgggagaaaatacttacaaatcattcatctgacaagggactaatattcaggttacataggaaatttgaacaactcaatttcaaaataaataaatttttaaaaatctgattgaaatgtgcaaatgattatagatatctctttttcatcttttttcttttttgttttattttaataattttttctatttttagtttcaggggtatatgtgcaagtttgttacataggtaaattgaatgtcactgatatttggtatacaaatgatcccatcacccaggtagtgagcatagtacccaacagttttcctttaaaaaaaaaaaacttttattttagtttkggggatacatgtgaaggtttgt

SEQ ID NO: 641409 - DNA, 487 bp, Homo sapiens
agttttcctttaaaaaaaaaaaacttttattttagtttgggggatacatgtgaaggtttgttacataggtgaacatgtgtgatgggagtcggttgcacagattatttcatcaccagagtattaagcctggtacccataattatcttttctgctcctatccctcctcccaccctcccccctcaagaagaccccagggtctgtkgttcccttcttggtgttggtaagttctaatcatttagctcccacttataaataagaacatacggtactgggtttcctgcttcagcattagttggttaaagataatagcctccagatccatccatgttcctgcaaaagacacgatcttcttcttctttatggctatgtagtattacatggtgtgtatgcaccacattttctttatccaaactgtcattgatgggcatttaagttgattccatgcctttgctattgtgaatagtaccaaaatgaacagtcacatgaa

SEQ ID NO: 641410 - DNA, 487 bp, Homo sapiens
agttttcctttaaaaaaaaaaaacttttattttagtttgggggatacatgtgaaggtttgttacataggtgaacatgtgtgatgggagtcggttgcacagattatttcatcaccagagtattaagcctggtacccataattatcttttctgctcctatccctcctcccaccctcccccctcaagaagaccccagggtctgtggttyccttcttggtgttggtaagttctaatcatttagctcccacttataaataagaacatacggtactgggtttcctgcttcagcattagttggttaaagataatagcctccagatccatccatgttcctgcaaaagacacgatcttcttcttctttatggctatgtagtattacatggtgtgtatgcaccacattttctttatccaaactgtcattgatgggcatttaagttgattccatgcctttgctattgtgaatagtaccaaaatgaacagtcacatgaa

SEQ ID NO: 641411 - DNA, 487 bp, Homo sapiens
agttttcctttaaaaaaaaaaaacttttattttagtttgggggatacatgtgaaggtttgttacataggtgaacatgtgtgatgggagtcggttgcacagattatttcatcaccagagtattaagcctggtacccataattatcttttctgctcctatccctcctcccaccctcccccctcaagaagaccccagggtctgtggttcccttcttkgtgttggtaagttctaatcatttagctcccacttataaataagaacatacggtactgggtttcctgcttcagcattagttggttaaagataatagcctccagatccatccatgttcctgcaaaagacacgatcttcttcttctttatggctatgtagtattacatggtgtgtatgcaccacattttctttatccaaactgtcattgatgggcatttaagttgattccatgcctttgctattgtgaatagtaccaaaatgaacagtcacatgaa

SEQ ID NO: 641412 - DNA, 487 bp, Homo sapiens
agttttcctttaaaaaaaaaaaacttttattttagtttgggggatacatgtgaaggtttgttacataggtgaacatgtgtgatgggagtcggttgcacagattatttcatcaccagagtattaagcctggtacccataattatcttttctgctcctatccctcctcccaccctcccccctcaagaagaccccagggtctgtggttcccttcttggtgttkgtaagttctaatcatttagctcccacttataaataagaacatacggtactgggtttcctgcttcagcattagttggttaaagataatagcctccagatccatccatgttcctgcaaaagacacgatcttcttcttctttatggctatgtagtattacatggtgtgtatgcaccacattttctttatccaaactgtcattgatgggcatttaagttgattccatgcctttgctattgtgaatagtaccaaaatgaacagtcacatgaa

SEQ ID NO: 641413 - DNA, 533 bp, Homo sapiens
tgtgggcaaaattggtttcattctgagttctctttctggcttgtggatgatcatcttatcccgacctctttacactttmtttttctgtgtgtatctgtattctaatctcttcttataaggatgcaagttatattggattagggcacagctcacccattaggctttattttactaaatgttctctttagatattgtgtctccaacagtcatgctctgtggtgcttggagttagaacttcagcatatgaattttggagagtgagggaaggggcacaatccagtccataacacagattaagaaacgtgaaaggctaatagaagtttgacacaaagtttgtgacactagtacgagagaaactgtatcagaaaagttgaattaagttgaaagtaacatggtaaacctaaggcaatgtgagaatccatggcagacatgaatgttatcttatggattttccaatgtaagaaggaaaatactgagaatgaaacataaggcagagaaggaccagagagttgtgagttcccattttaaatttg

SEQ ID NO: 641414 - DNA, 533 bp, Homo sapiens
tgtgggcaaaattggtttcattctgagttctctttctggcttgtggatgatcatcttatcccgacctctttacactttctttttctgtgtgtatctgtattctaatctcttcttataaggatgcaagttatattggattagggcacagctcacccattaggctttattttactaaatgttctctttagatattgtgtctccaacagtcatgctctgtggtgcttggagttagaacttcagcatatgaattttggagagkgagggaaggggcacaatccagtccataacacagattaagaaacgtgaaaggctaatagaagtttgacacaaagtttgtgacactagtacgagagaaactgtatcagaaaagttgaattaagttgaaagtaacatggtaaacctaaggcaatgtgagaatccatggcagacatgaatgttatcttatggattttccaatgtaagaaggaaaatactgagaatgaaacataaggcagagaaggaccagagagttgtgagttcccattttaaatttg

SEQ ID NO: 641415 - DNA, 599 bp, Homo sapiens
gtgtggtcttatttctgggctctctattctgttccattggtctgatcatttttcagtctgcactccccagctcttccccytctattaacccccagtgttgcttgttctcctttatttttcatgtgtattcaatgtttctctcatacctttaataagaacatgggcacatttggttttctgttcctacattaattcacttaggataatggccttcagctgcatctatgttgctgcaaaagacatgatttcattttcatggcttcatagtattcaatagtgtgtatgtatcatattttctttatcccgttcatcattgatggttatctacgttgattccatgtctttgctacagtgtatagtgctgcaatgattgcacaagtgcatgtggttttggtaaaattatttactttcctttgggtttatacccagtaataggattgctgggtcaaatggtacttgtgttttaagttctttgagaaatttccaaactgcttccacagtggatgaactaatttacattcccaccaaaagtgtataaggattccattttctccacaacctcaccaatgtctgttatttatttcactttttaataatag

SEQ ID NO: 641416 - DNA, 634 bp, Homo sapiens
cttctcattctgtattttcagtgtcagtttttatggcttgtgtgttccaggtatggttgggtcatggtcatgcagtctattcacaaggccttgtgcttagaagamcatcccaagcttggtttaatgctttgatctcatggtcctgaaattttacataatttttttgtacaaggattcttgcagttttatttcgtattgaaataggagagtttccttatcctcctcgcatggcaagtgacaggagtgtggcttgcttctttggtgccccactgctcaaatccctaggggtggaatgcagacaggcaggtgtacaggtcgtgggagtgtttttgggctccaaccccacagcagcatctagggttaagtgtttacagctcctgaagccccaatgggtgtgtgttacagtgtgatctttcagctttgctgtcttcaggcggcttgcattaatcagctcagttagaccctctgcattaccacaagggcagcaggctttctgtattccaagttcttgcccagtgtatcggaaaaattggatcacatgtggacatggaggatgagtgcaaggttttattgagtggtggaggtggctctcaatgagatggatggggagccagaaaggggacggagtgggaaa

SEQ ID NO: 641417 - DNA, 634 bp, Homo sapiens
cttctcattctgtattttcagtgtcagtttttatggcttgtgtgttccaggtatggttgggtcatggtcatgcagtctattcacaaggccttgtgcttagaagaacatcccaagcttggtttaatgctttgatctcatggtcctgaaattttacataatttttttgtacaaggattcttgcagttttatttcgtattgaaataggagagtttccttatcctcctcgcatggcaagtgacaggagtgtggcttgcttctttggtgccccactgctcaaatccctaggggtggaatgcagacagkcaggtgtacaggtcgtgggagtgtttttgggctccaaccccacagcagcatctagggttaagtgtttacagctcctgaagccccaatgggtgtgtgttacagtgtgatctttcagctttgctgtcttcaggcggcttgcattaatcagctcagttagaccctctgcattaccacaagggcagcaggctttctgtattccaagttcttgcccagtgtatcggaaaaattggatcacatgtggacatggaggatgagtgcaaggttttattgagtggtggaggtggctctcaatgagatggatggggagccagaaaggggacggagtgggaaa

SEQ ID NO: 641418 - DNA, 634 bp, Homo sapiens
cttctcattctgtattttcagtgtcagtttttatggcttgtgtgttccaggtatggttgggtcatggtcatgcagtctattcacaaggccttgtgcttagaagaacatcccaagcttggtttaatgctttgatctcatggtcctgaaattttacataatttttttgtacaaggattcttgcagttttatttcgtattgaaataggagagtttccttatcctcctcgcatggcaagtgacaggagtgtggcttgcttctttggtgccccactgctcaaatccctaggggtggaatgcagacaggcaggtgtacaggtcgtgggagtgtttttgggctccaaccccacagcagcrtctagggttaagtgtttacagctcctgaagccccaatgggtgtgtgttacagtgtgatctttcagctttgctgtcttcaggcggcttgcattaatcagctcagttagaccctctgcattaccacaagggcagcaggctttctgtattccaagttcttgcccagtgtatcggaaaaattggatcacatgtggacatggaggatgagtgcaaggttttattgagtggtggaggtggctctcaatgagatggatggggagccagaaaggggacggagtgggaaa

SEQ ID NO: 641419 - DNA, 213 bp, Homo sapiens
aaaaagcagaaatttttgaaaggtttgttcgcttctgcatctatagtgcccaatcacacaaaatattgagtatcagtaaatacttgtttcatgaatatctattttgatgcccaaaatgacatgagaagaggaaagataaatattattatttcyatttacacatgggaaaacacagtgattcattcagttgcaaagcttttaaattactgaagt

SEQ ID NO: 641420 - DNA, 613 bp, Homo sapiens
cattttacttgggctcacagattgcccggaactccagtctctgctttttgtgctgtttctggttgtttacctcgtcaccctgctaggcaacctgggcatgataatgttaatgagactggactctcgccttcacacgcccatgtacttcttcctcactaacttagcctttgtggatttgtgctatacatcaaatgcaaccccgcagatgtcgactaatatcgtatctgagaagaccatttcctttgctggttgctttacacagtgctacattttcattgcccttctactcactgagttttacatgctggcagcaatggcctatgaccgctatgtggccatatatgaccctctgcgctacagtgtgaaaacgtccaggagagtttgcatctgcttggccacatttccctatgtctatggcttctcagatggactcttccaggccatcctgaccttccgcctgaccttctgtagatccartgtcatcaaccacttctactgtgctgacccgccgctcattaagctttcttgttctgatacttatgtcaaagagcatgccatgttcatatctgctggcttcaacctctccagctccctcaccatcgtcttggtgtcc

SEQ ID NO: 641421 - DNA, 550 bp, Homo sapiens
ttgttacacgtacagaatcaaagtctgcacctcaggtgcactgtatttaaatatgtgttttatccaaactcctagatgattgataagcacactgaattttgaggagcactgctgtgggtgaaacgtggcatgccctggaacactgttgtgctctttttgtttacaayggcaaacaaaataaatgtgctcccagcccaatttcttgaatgtattctattcttattctcgcctgctgcttcagcagagatgtctttaagaaacccattcttctgcactccaagaaatccattcttctgtactcctttcctgacttgctgtggtagaccagaaactaggggccatggtgatggcttctggtttttataagtgctcttacatagtgaagagtggcaatggaaaaagaggggaagagaatgattgtacttttcttaaacttgagtttatggatccagctctctgagttacataaacccaccttcccattctgagcctccagtgtatggaggtcactttctgtttcgcctgattttgaaaaatttaagcaggctga

SEQ ID NO: 641422 - DNA, 550 bp, Homo sapiens
ttgttacacgtacagaatcaaagtctgcacctcaggtgcactgtatttaaatatgtgttttatccaaactcctagatgattgataagcacactgaattttgaggagcactgctgtgggtgaaacgtggcatgccctggaacactgttgtgctctttttgtttacaatggcaaacaaaataaatgtgctcccagcccaatttcttgaatgtattctattcttattctcgcctgctgcttcagcagagatgtctttaaraaacccattcttctgcactccaagaaatccattcttctgtactcctttcctgacttgctgtggtagaccagaaactaggggccatggtgatggcttctggtttttataagtgctcttacatagtgaagagtggcaatggaaaaagaggggaagagaatgattgtacttttcttaaacttgagtttatggatccagctctctgagttacataaacccaccttcccattctgagcctccagtgtatggaggtcactttctgtttcgcctgattttgaaaaatttaagcaggctga

SEQ ID NO: 641423 - DNA, 568 bp, Homo sapiens
acatctctgctcagctggatggggctcctgtgaaagaacaaagcaattacatagaattttacacagaattgtaaaacctgcaaattttttttaacattttctttaccttatctgatagcacagcacatacgttgcaactcttactctgaaaactactatcacttctgaatgtttattaaataacagccataggtgtgcraaggatttacaaatggatagccacatttactgccaatgaaaaacaaagtttatttaacatgtgcagtatctttgtgatatatatattactccttatttggtacagatgaaaacgctgaagctcggaagaatgaaataatgttttccaggaacacagcaagagctaggtttcaattaaaatattattctcgtagctacttctgggttgactctagaaacaccccaagccacatgggtttgttaagatgtttaactgggtaattatttttatgggtaattatgtttcagacagttttacaattttacagatataaaaatatatatgaaaaagatatatatatgttgtaatgcatatatatatattcatatt

SEQ ID NO: 641424 - DNA, 565 bp, Homo sapiens
aatatgaatatatatatatgcattacaacatatatatatctttttcatatatatttttatatctgtaaaattgtaaaactgtctgaaacataattacccataaaaataattacccagttaaacatcttaacaaacccatgtggcttggggtgtttctagagtcaacccagaagtagctacgagaataatattttaattgaaacctagctcttgctgtgttcctggaaaacattatttcattcttcygagcttcagcgttttcatctgtaccaaataaggagtaatatatatatcacaaagatactgcacatgttaaataaactttgtttttcattggcagtaaatgtggctatccatttgtaaatcctttgcacacctatggctgttatttaataaacattcagaagtgatagtagttttcagagtaagagttgcaacgtatgtgctgtgctatcagataaggtaaagaaaatgttaaaaaaaatttgcaggttttacaattctgtgtaaaattctatgtaattgctttgttctttcacaggagccccatccagctgagcagaga

SEQ ID NO: 641425 - DNA, 595 bp, Homo sapiens
  misc_feature 380: n = A,T,C or G
aatgactcaggaagagaaaggaaaggggaataggatgagtgaaatgtatggcccaagagcttttggagtctggaagaacaaaggaggaataaaggatgggtacgtggcaagaggagacccatgttacagagtgtccatgatcatgcagtgaccatccagcttggctctgctgtcgcctgcagagaatacactaatgaaacaagtgagtcttgggtgaggggtggtgtggaatcgtgcttggtggaagcatcttttgaatcacagggtctttcatgctgatccttgaggcrctgaaaacttcacagaacttccatctgggttcaaatggggacatttagaaagttcttcaaattcactcctctcaatgacttttgcccganagactccaagcccacaattactgtaacctgaatgaacagaaagtatcatccatgctgtttaattctcagtggcctcttggactagcctgaaagtcacagctcccccaacccccaaaatataagttaagaaagaagcctgaaggtgatggaataaacactacggcttgtctttcttatttttaggggctctttgagagagggggaatcaggaagtg

SEQ ID NO: 641426 - DNA, 602 bp, Homo sapiens
taaaaaaaaaaaaaaagaaagaaacctcattggtttaatatgaccttkgcccttgcagaatttataatcttgcttgtgagttaacatttacaaaattaccaatcaaatccttttattttagaggtgaagatatggagactctaagggggcaaggagctttgcctttctgtgccttagtctactgtaaattgaaaagttgaattacatatctgtgaagtccagtgttttatgatttatgaattagagaacaatgcttgttaaaatagagttctaactaaaggaccacttgggttaatcccatcctttaagattcaagtgaaattggctcaaaccccgtccttcatacagcccataatttcctctcgtcttgcagggaactgtcgggggcagtgatttgtatttctcctggtgacccctggagtggaccttccactcggtctgtgttccagtgtgtgaatcactcactcctagcatgggctgattcttctctgcagcacatgacccctaaccagacccatcctgatcccttcatttgctaaaattcccctggccctcaaatatataagtagcagcctttgctaaagcctcaagacaacagaagg

SEQ ID NO: 641427 - DNA, 580 bp, Homo sapiens
ctttcttgcctttcccatcagactagctgcaattgcacattgtcccagaaaggacactgtcagcagtcattgcatgcctcagtatctgacagtatgtatgaaaagtagccctctttagacttctggcctttctcatgaattcggatatgctctaccagactgggagctccagaacccatgtttccttcctcctcttaatgcctccttccctccaaaattaagacaggattgagcatagagctaggaaatatcagtcacaaaatccccgagtcccccatctggaaaatgttgtctagtctaagcgatcaactatcttgaggagyctgccttataataccctccagggagcagaatgaaccgaagggagcactgaacaagaactttctaatgttaaaaccacctaatttgcccattctttacaagtgccccttgaaataaaggtccacttgggctaaaagaagagattctgatctccagatctgaaggtcttttggttcaccttgtctccacaaaaatggtggccactgcagaataagaagtgtctttcttttacttaaagcctccctaaatggaagagata

SEQ ID NO: 641428 - DNA, 580 bp, Homo sapiens
ctttcttgcctttcccatcagactagctgcaattgcacattgtcccagaaaggacactgtcagcagtcattgcatgcctcagtatctgacagtatgtatgaaaagtagccctctttagacttctggcctttctcatgaattcggatatgctctaccagactgggagctccagaacccatgtttccttcctcctcttaatgcctccttccctccaaaattaagacaggattgagcatagagctaggaaatatcagtcacaaaatccccgagtcccccatctggaaaatgttgtctagtctaagcgatcaactatcttgaggagcctgccttataataccctccagggagcagaatgaaccgaasggagcactgaacaagaactttctaatgttaaaaccacctaatttgcccattctttacaagtgccccttgaaataaaggtccacttgggctaaaagaagagattctgatctccagatctgaaggtcttttggttcaccttgtctccacaaaaatggtggccactgcagaataagaagtgtctttcttttacttaaagcctccctaaatggaagagata

SEQ ID NO: 641429 - DNA, 598 bp, Homo sapiens
agtgtgccatcatttaatttatgactgaggatttctgatggtctgttaagtccaaataataaatacacacttatgaattattcacagattacagaatttttagattatccaagcctctcttctcatccagtagtatggttacccaaggattggtggtgtgttcctttgccaaagagaagagattctctttggaccttctctgaggcaatcaggctggagcagagattgaaggaggggcatgtgttttggggttcttttcgaggacaaatggagtaaccatggccaaacttctcagatcctctgccccttggactggctyccactgtagaatatagtagataacatttattgagcattttctatgtgccagctgctgttaaacattgtccatgcattatttcatttaatccttctacaagttctttaagataaggcggttaatgaaaactggacacagatggcttaggcatgtggatgagtatatcccatcaatgctgttgatacgtctgcagcagcagcatcagcagcaacaacaacaacaactaatatgattacacacttagagtgtgccaggcttagttctcagtgatttacatgg

SEQ ID NO: 641430 - DNA, 537 bp, Homo sapiens
agtgcctcaacagcaggtttactgccttcctccacaaggtgggtgtcctggatcacacccttcctgaacccccaccatgtgcacaaccaggactgggcactgaggaaagaatcagaggcaggcaagaccctgcgtgcctgaggtcccagtctgatgggagaggcacacagacagacagacagacagacagacagacagacagaggcacccaaggcccagaaatactctgacagttcagatacggagagcttgtggaggaaagatgccaaatttcaaaatttcaatgaatttagtttaaagatcttagttggattttatatgcaattttagaattgggcagcccttagaactgatcagaggaactctggctgcactgcggtcccacaatacttatggacagaaarcagaaagtgacacatggaaaacagaagtaacagctggattgtttgcagctggtgtttgtgaacatttggctgcctgtgattgactgaagctcagttactgtgattggctgagactcagctatttgttacaaag

SEQ ID NO: 641431 - DNA, 539 bp, Homo sapiens
gctagaaaggcctttctcacataaaaaactgactgtggttccccgcagctcatatccttcggtagctccccgttgcctcccagaaatagcccaagctccttaacatggcatacaagccctgtgtgatctgcccgtagacttccaccyccagccatcccctccacacagcccactgcccacctctcatcttttgtctattcatccaacaaacatttgagaagtgcctaccacataccaggcatgatgctgggaaaatggtaattgacaagattcaattccggccctcaaagagcttacagtcctgtctgatagatggacaagtgcacatgtctgatagatggacaagtgcataagcacttgactcaatatgctaagtactatattaaaagcagaactcatgctgtactacccagacaagaggccccgcccagacttggggcaacattaaatgcttcctgaaggatataatgtcccagcagaggtgtgaaggatgatgaattagccatactaagaaggaagaagtgtcccaagcagaggca

SEQ ID NO: 641432 - DNA, 555 bp, Homo sapiens
gagaatcacttgagcacagaagttcgagaccagccttggtaatatcagaagaccctttctctgcaaaaataagaataattataataataaataagttttttaagtcatagatcaaaggaaaatatattaatatctaaataatccaaagaagataaaaaagaatagagaaacatcagaaaggccaaaaagaaaacaaataataaaatcacagaccttaaataaaacaatattaataattacatatagcataartggtcgaaacacactgtcagggagaaaaagctttcctttacccacttagttttagtgcttggagtctgtgaattaagatgaccaaagacagattaacagaaggaaagtttaatgcctactgtcactgtctttggtaatttgtgtcactttcaatcaacctcatttacttgacatttatagagcacaccaccccaaacagaaaagtatacattcttttcaagtgataatagggaacattcaccaagatagaccttgtaaattatgtagccagtcctgcctgaatagctctatatctagtaagtg

SEQ ID NO: 641433 - DNA, 442 bp, Homo sapiens
tgcctgggaagagctgagagcttggcctgggagacaaggaggtgaaaggcccgagactcaggaattgggaggtgggagggagagaaggcactggggagcccctggacttgggtggaagctaaagggtcctggggagcctggagattccaggggaagcaaaggaagggggtgagtcctccaaggacatcctggtgggatgggtgggaaaggccaggggctgggtgaaggggaggaatgaagagggccagcaaggaaggcagtgcgctaccctggaggtgggctgcagccttgcaaggactgttccaggcctgattcctcgagggtggggttagggacttctcaaagtcttccagagctctccagagctttccaagaggaggacaggagagattgggccaagcarcgggcagaggagcctcttagccttggggttgaagctgtg

SEQ ID NO: 641434 - DNA, 564 bp, Homo sapiens
cctggggaggcaccctcaccacttgctggccacagaaggacaactcccacactaaccctaacccatggggaagagttgagtgtgtctgaaggtgagagggttcctccatggtggacacactaaacaagsgaagcaaaatagaaaccagagttcaaagctgatgctctggaggggcctgtctcgtgctggtctctatttgtttctttcagtcaaccagcatttactgagcacccactatatgccaggcacctttagataaactgggaatataccagtaaataaaatagacaaaaacacatatttttgtgggttcacattacagtgggagagacaaattgtaaacttagataaataaattatatgttggatggcgataagtgttacagaaagaagaaagaaaccggctaagggaaatcaggagagctggaagaaagagtgggtacaattttggctgtggttattgtaagctccactgagaaggggacatttggacaaaggttttaagggggtaagggcaagccacatgtgccgaggaaagagcttgtgcaaagacccacagtggga

SEQ ID NO: 641435 - DNA, 564 bp, Homo sapiens
cctggggaggcaccctcaccacttgctggccacagaaggacaactcccacactaaccctaacccatggggaagagttgagtgtgtctgaaggtgagagggttcctccatggtggacacactaaacaagggaagcaaaatagaaaccagagttcaaagctgatgctctggaggggcctgwctcgtgctggtctctatttgtttctttcagtcaaccagcatttactgagcacccactatatgccaggcacctttagataaactgggaatataccagtaaataaaatagacaaaaacacatatttttgtgggttcacattacagtgggagagacaaattgtaaacttagataaataaattatatgttggatggcgataagtgttacagaaagaagaaagaaaccggctaagggaaatcaggagagctggaagaaagagtgggtacaattttggctgtggttattgtaagctccactgagaaggggacatttggacaaaggttttaagggggtaagggcaagccacatgtgccgaggaaagagcttgtgcaaagacccacagtggga

SEQ ID NO: 641436 - DNA, 573 bp, Homo sapiens
actgagacaaatgccaaggcgagtgccccaaatgctcaatgctcatcgtggctttgctgactcgtgcagcctggcacaagtcacctaccctctctggtccccagtgttctcaactgtacaagcaagagttggaccggctgacttcaacatttcctaaggaagccatgcagtctcctttttgttggaaatccttgagagtcaccttggcatttgtcctctttccaggcttaagaaccaagagatcactatctatccaacctcagagcccccgtcttgttccctaagtaccaagatttcttttttgttttgtttgtttrttttgtgcgtgtgcttacattttcaacccagtctgattgaggaataattgtcatacaaaaagctatacacatttaatctatacaacttaatgagtttggagatgtgtacacactagtgaaacagtcaccataatctacgcgataaatctatccatcacctccaaaagtttccttctaccctgtttatttatttattatgtgataagaacacttaacataagatctacctgctgagcaaatttttaagtatacaata

SEQ ID NO: 641437 - DNA, 588 bp, Homo sapiens
ggggcacaatctgggctcactgcaacctccaccttccaggttcaaccagttctcctgtctcagcctcccgtgtagctgggattacaggcacccgccaccatgcctggctaattttkgtatttttagtagacacggggttttcacccatgttggccaggctggtctccaactcctgacatcaggtgatccactcacctcggcctcccaaactacggggattacaggcatgagccaccacgccgggccaagtaatccattttcaatttacgatttacttaatttttgggtggtttggcaatgagtatgtattactttcaccatgaaaacaactttatatatatacacacaggtgtgtttacacataaataaactaaactttcaccatgaaaagaaaactttatatatatgtgtgtgtgtgtgtgtgtgtgtgtacacatgtgtgtttacacataaataaaccatgtgatagacccaggaagacctgagattagaagtgcctgaagcaagcctcaaagaaacttcccctgaaattaatgaatctgtggacatttgctctgaggggctggtggagactggacgttcaggcaa

SEQ ID NO: 641438 - DNA, 588 bp, Homo sapiens
ggggcacaatctgggctcactgcaacctccaccttccaggttcaaccagttctcctgtctcagcctcccgtgtagctgggattacaggcacccgccaccatgcctggctaattttggtatttttagtagacacggggttttcacccatgttggccaggctggtctccaactcctgacatcaggtgatccactcacctcggcctcccaaactackgggattacaggcatgagccaccacgccgggccaagtaatccattttcaatttacgatttacttaatttttgggtggtttggcaatgagtatgtattactttcaccatgaaaacaactttatatatatacacacaggtgtgtttacacataaataaactaaactttcaccatgaaaagaaaactttatatatatgtgtgtgtgtgtgtgtgtgtgtgtacacatgtgtgtttacacataaataaaccatgtgatagacccaggaagacctgagattagaagtgcctgaagcaagcctcaaagaaacttcccctgaaattaatgaatctgtggacatttgctctgaggggctggtggagactggacgttcaggcaa

SEQ ID NO: 641439 - DNA, 588 bp, Homo sapiens
ggggcacaatctgggctcactgcaacctccaccttccaggttcaaccagttctcctgtctcagcctcccgtgtagctgggattacaggcacccgccaccatgcctggctaattttggtatttttagtagacacggggttttcacccatgttggccaggctggtctccaactcctgacatcaggtgatccactcacctcggcctcccaaactacggggattacaggcatgagccaccacgcckggccaagtaatccattttcaatttacgatttacttaatttttgggtggtttggcaatgagtatgtattactttcaccatgaaaacaactttatatatatacacacaggtgtgtttacacataaataaactaaactttcaccatgaaaagaaaactttatatatatgtgtgtgtgtgtgtgtgtgtgtgtacacatgtgtgtttacacataaataaaccatgtgatagacccaggaagacctgagattagaagtgcctgaagcaagcctcaaagaaacttcccctgaaattaatgaatctgtggacatttgctctgaggggctggtggagactggacgttcaggcaa

SEQ ID NO: 641440 - DNA, 588 bp, Homo sapiens
ggggcacaatctgggctcactgcaacctccaccttccaggttcaaccagttctcctgtctcagcctcccgtgtagctgggattacaggcacccgccaccatgcctggctaattttggtatttttagtagacacggggttttcacccatgttggccaggctggtctccaactcctgacatcaggtgatccactcacctcggcctcccaaactacggggattacaggcatgagccaccacgccgggccaagtaatccattttcaatttacgatttacttaatttttkggtggtttggcaatgagtatgtattactttcaccatgaaaacaactttatatatatacacacaggtgtgtttacacataaataaactaaactttcaccatgaaaagaaaactttatatatatgtgtgtgtgtgtgtgtgtgtgtgtacacatgtgtgtttacacataaataaaccatgtgatagacccaggaagacctgagattagaagtgcctgaagcaagcctcaaagaaacttcccctgaaattaatgaatctgtggacatttgctctgaggggctggtggagactggacgttcaggcaa

SEQ ID NO: 641441 - DNA, 604 bp, Homo sapiens
cagtcaacaatatttactgagcacttactatattcccagcacttttctaggtgaacaaaatgaacaaaacagacaaaatctctgcttccatggagtttactttggggtgatgggaaaaacagacaataatccacaaatagaataaataagtaaattctggactgtgttaagtgtgatggaaaaataaataaataagagcaagataagctggatggagagtgccctggggtggagggcaggttgccatttttttaaagggtcagagagatggtataggggcaaagccctgcaggaggcaatgggcaagccacttggatgacaggggagcatttgggtggaagagacagcagggcacaggccctgagtcaggagtgcaccctgtcctggtgctccagtgggaggtcactgtggttgctgaacacagggagaccggtgacaaaggccacaacacagacaggcagtgcagggccttgttggccattgttaggactccaagcaaaatggggarttgggtgtttgagcagggtagagacatgatccaacttatgttttacggggcttactctcctcggctgagaatggagttggagggccaggggcaaac

SEQ ID NO: 641442 - DNA, 614 bp, Homo sapiens
gcatttatgagacagcagggaggagaaatcacagcctcccccgatgagctcacaaagccttcctggaagaggcagctattctgagacattccaggccaaggtgtaacagggagaaggttggtggaaggaagagggatgcaatagggcacaggtgaatgagggcacagtgaatgagggtgagacactgaaaggagatggggctcccagcccccaaaagatcctgactctcagggcaacgacttgggttccactgggcagagtggttgggtgatggctagaggcaggcaggaggctatgtgttctctgtgtcctccctgggtagaaccataagcaaaggcccaggtctttccagggcagctgtgccagatccacctggcctgacttgctccctggccctggaccacctggggccagccccgtaaggaatctgctcccctcaaggctttgccctcagtccagctcctccaatccgaagctccacctggacagcatcctgggaagcccccagccccagccctgggctcagcactgccatcagcagtgatgcaagcttcacccagcaygcacgagcacattcctgtgggcagggtgggcctgtctcacccccgcacacc

SEQ ID NO: 641443 - DNA, 556 bp, Homo sapiens
aatttatagcccccaggttatcccaaggttgagttctccaatccttttgaccgaatggaagaaagtggctagagggagtctccccataatccgcaagtggccattattgtggccactgagagttctgtggtttgcacttttgctgggtgagaagtgaaagctctggaccagcgccttctgggctggaatccagaaggttccaagagatcatctgccccagccttytatcctggcacgggcatggtcaaaatgaccgctctggtcctgaaccaccttccaagcaatgctgcctagatggggtgggattcgcctgacctattggcccctgaaatgcaatgatttacttgagaatgtgtcctctgtggaaccagatagatggatgcaatgatcccccaagtctcacctaacccaggaccctccaacctctcccttgagacaatggctcctgcctgtatcccaaacccagccacccccaggctgttgtggagttcaaatccgtctccaagtgtgggttgaggccatctcacagaaagactgtgagaaaattaattactta

SEQ ID NO: 641444 - DNA, 556 bp, Homo sapiens
aatttatagcccccaggttatcccaaggttgagttctccaatccttttgaccgaatggaagaaagtggctagagggagtctccccataatccgcaagtggccattattgtggccactgagagttctgtggtttgcacttttgctgggtgagaagtgaaagctctggaccagcgccttctgggctggaatccagaaggttccaagagatcatctgccccagccttctatcctggcacgggcatggtcaaaatgaccgctctggtcctgaaccaccttccaagcaatgctgcctagatggggtgggattcgcctgacctattggcccctgaaatgcaatgatttacttgagaatgtgtcctctgtggaaccagatagatgratgcaatgatcccccaagtctcacctaacccaggaccctccaacctctcccttgagacaatggctcctgcctgtatcccaaacccagccacccccaggctgttgtggagttcaaatccgtctccaagtgtgggttgaggccatctcacagaaagactgtgagaaaattaattactta

SEQ ID NO: 641445 - DNA, 453 bp, Homo sapiens
gtcctggataaccaaatgcactattgtattcatgtagtgtaaacaaagctagctgctatttaaaaaaaaatgtgtaatatcccaggtgataaatcatcaaaggggaatggaggatggaagaagtctgctctgatggggaagaatttattaccattgacattgtttagaattgctggtgactggtgataatgaagaccaatatttagtctattttattattgctgttaaattctgtaaaaaaaaaaaaaacttactccttatggtctatacctagggtggaayggtcccactgcccctacatgcagccctatacaccactgaatggctcaaacacaataaaagtttgttctttgctcacttgacactactgagcgtgtacaattgtcagtggggcaactctcttccaaacagtcattcaggaaccaagttctgatattgcgattctttacctca

SEQ ID NO: 641446 - DNA, 453 bp, Homo sapiens
gtcctggataaccaaatgcactattgtattcatgtagtgtaaacaaagctagctgctatttaaaaaaaaatgtgtaatatcccaggtgataaatcatcaaaggggaatggaggatggaagaagtctgctctgatggggaagaatttattaccattgacattgtttagaattgctggtgactggtgataatgaagaccaatatttagtctattttattattgctgttaaattctgtaaaaaaaaaaaaaacttactccttatggtctatacctagggtggaatggtcccactgcccctacatgcagccctatacaccactgaatggctcaaacacaataaaagtttgttctttgctcacttgacactactgagmgtgtacaattgtcagtggggcaactctcttccaaacagtcattcaggaaccaagttctgatattgcgattctttacctca

SEQ ID NO: 641447 - DNA, 507 bp, Homo sapiens
taattctagtattttacagcatggccttgagaatggacacctttgtcttgctctcagtcttcattggcatgtgcctcaagttcatcctttaggtgtgacatcctctaagcttcaaccacggtatccaccgccctgtgaacacgtctgtgctcttcttccattcattgcctggcattgcctccacccttctgacctttccaaacccctctatccttcaaatcycagctcaagtctgacttttcctacaaagcctctgactgctccagcccaaagcaagctcccactccgaggaagaggagtcttgaagaactgcttcatccagaatacaaattgtgcatacttacaaatctgcccaactactttgttggatccttgaggacaggggctgtgtattaaatctctctccctcctcttcggtacagagaacttgcatagtaaatagtagtgagtatgtgaaggtgccacatcttatcagctctggaggtgtgttgtgagttcaaggccaga

SEQ ID NO: 641448 - DNA, 509 bp, Homo sapiens
ttgagaatggacacctttgtcttgctctcagtcttcattggcatgtgcctcaagttcatcctttaggtgtgacatcctctaagcttcaaccacggtatccaccgccctgtgaacacgtctgtgctcttcttccattcattgcctggcattgcctccacccttctgacctttccaaacccctctatccttcaaatcccagctcaagtctgacttttcctacaaagcctctgactgctccagcccaaagcaagctcccactccgaggaagaggagtcttgaagaactgcttcatccagaatacaaattgtgcatacttacaaatctgcccaactactttgttggatccttgaggacrggggctgtgtattaaatctctctccctcctcttcggtacagagaacttgcatagtaaatagtagtgagtatgtgaaggtgccacatcttatcagctctggaggtgtgttgtgagttcaaggccagaaggcaaaactggaggcatcaaagaattc

SEQ ID NO: 641449 - DNA, 553 bp, Homo sapiens
tggctcccccatcccaaggaggtcatgtgtctacacagagcccctcggtggaggggtccaacatgatccaagcctgctggattgagacagatgagccaggtcagaagacagcagcgcagtttccagcatcgtgatggagaaatgcttcacagagggttcactgccctgcagtcctcagcatttcaccaagaaacagatcccccataatcattggatatgtgtggagagcattccaggtgctcactggttccagtgtgggtgggtgaagagcctggtctttcttggctgtctagcagatgtttgacccaaccaagactgaacatgacagcaccagccagcccagcctccctcaaagatgctcccaaaatcccactagccactcagctgcagtcagccacccccaggccccccaggtaccctcaggctgtgcctccctggtgtgtctttcacaccaggatcccctatcacacagcccacacccccagagttccygccccagacacaagactctggaagcctgtccacaggacccaagaagagaggctaggagagt

SEQ ID NO: 641450 - DNA, 650 bp, Homo sapiens
cctcaacaaccgtttcgcatctttcatcaacaaggtaagggggcagtggcccagggccgtgagaggacccactgcagatctggggtctggtcttgttctggtccaagggaaccaggaggagactgacattgaggaggcctcagtttatccagtggcctccctcacattccacgaccaccagcctttgaaagccagttagatcagattctgcactaaacatttctgcttccttgtctttcttaaaatatatcatctttctctgaatattatctgacaaaatcaccaatcaccaaggttgcctgaggtcagactataagaggaacttccaaagcaatactgaaagraatgaccagagaggcagagaaatgcccttcctgatgaggctttaacagtagaaccgccttctgtgtgcctgagctgtgtcacaactcttgagcctgaaggtgaggatggacactgtgacctcagaatttccaatcattttaggcctgggatgagaggaaagtggacagtcagagctagaggcacagggtgacggtcacaaaagtcttacatctgtcatctccagagccactgaaaggctgctaggaaggcatgccttcagaaggtgctgaactgaatctgcacccactgcaggaacagtgcagatt

SEQ ID NO: 641451 - DNA, 584 bp, Homo sapiens
tttcagtgactcagaaaaaaacagctaggccagcagcacagccttcttctacgttcccaagggaggccactaggtgaagtgaacctcctcagcagcaagagagaatgaaggtagccttaaggaggatctcccagggaggactcatcgcgggagaaggttcctgaggaatggggagaagagtaaacttgacaagtggctactcatccatctcaagtgggtggaggagctagagttgccaagacagggctggacctgggcactccccagggcattcagtcagtgacaggcagagttgcccccaaaggcctgatgccaagatctcttccaaaatccacaagcccgactaaagcattttttcctgccttttccatcagatacgaagaggagctctccctgcgtccctgtgttsagaatgagtttgttgccttgaagaaggtaaggaggaagctcagagaggcagagcccctgagctggcctgcgttgccccaggccacctagccctgaactcagtccaaacgtgtctgcagcccacccactctgaaaaagggtttttcgcccctcagactcctgtgccagccccacta

SEQ ID NO: 641452 - DNA, 561 bp, Homo sapiens
ggaacttcctccaagagcagaaatgtgtcaggagcaayctggagccactcttcgagagctacatcaccaacctgcggaggcagttggaggtgctggtcagcgatcaggcccggctccaggctgagaggaaccacctgcaggatgtcctagagggcttcaagaagaagtgagtgacatctgagctgcacagaccagtgacaggccaggcctggccccagaattagctgccaagctcagatgagagcagctggaaggatcagggttgaatgctggttaccacatcaagcctggggaggtgggggtgggtagagatatgtgaacagagaagaggaggccctcctgaggaaaaaggtgcccatgttcagtatctttttcagttgggccctacttgctctatagtcaaatgcaatgatcctacattatttctgtcagaggaacatagcaatagaccaggttttcagatcccaaacccacattaagaaagtggaagggatttggagaaattgagaggcactggcttatgaaaggtcataaagatgagacagaggggatgatgttata

SEQ ID NO: 641453 - DNA, 561 bp, Homo sapiens
ggaacttcctccaagagcagaaatgtgtcaggagcaacctggagccactcttcgagagctacatcaccaacctgcggaggcagttggaggtgctggtcagygatcaggcccggctccaggctgagaggaaccacctgcaggatgtcctagagggcttcaagaagaagtgagtgacatctgagctgcacagaccagtgacaggccaggcctggccccagaattagctgccaagctcagatgagagcagctggaaggatcagggttgaatgctggttaccacatcaagcctggggaggtgggggtgggtagagatatgtgaacagagaagaggaggccctcctgaggaaaaaggtgcccatgttcagtatctttttcagttgggccctacttgctctatagtcaaatgcaatgatcctacattatttctgtcagaggaacatagcaatagaccaggttttcagatcccaaacccacattaagaaagtggaagggatttggagaaattgagaggcactggcttatgaaaggtcataaagatgagacagaggggatgatgttata

SEQ ID NO: 641454 - DNA, 476 bp, Homo sapiens
cattctcagtgcctggatacccccagctccaggaaagcagtgaagatggtggcagcccatggagtgaggaggaccaggacactccagtctcctctccccatttagagagcccaagacctggagatttggcggcggtgcttccaccctctgtgaggcctcagtcccctttcctctgcctcaccgaccccctgaaacagcccctcctggggggtgctttcccccttatggctcycctctcctgagagttgggatgactccccactctccccaaagagcacccatgctgcgccaagccctgcattagaggctggtgctgcagaattgactaagactccctcttaaccttggaaggacgctcagcctcccggagagaagattcataaataatgagggccaaacagcatgggagccccaagaagcagctcacgactgcctggcgagggtcagagacaggatcacagggaagactgtatgga

SEQ ID NO: 641455 - DNA, 628 bp, Homo sapiens
ttgtacatgaattttatagaagctttatttataatagccctaaattggaaacaacccaaatgtgtaccagcagatgaatggataaacaaattgagatatagtcatacaataaaatatmattcagcaacaaaaaataatgaactagattcattcagtggtgattagattggagcatacatctgtcaaaatttgttgaactgtacttttagaatgtgtgcgctttattgagatacaattgtatgcaaattatatgtcaattaagttgataaaataatgatttaaaatgcataagatacttagaaataaatctaacacatatgtgaaagacttacacctagagaaatataagcgttacacaaaatgttataggaaagaaaagataaagaagacataattaaatgaagagctataccatgttcttagataggaagctttactatcatgaatatgttaattatccttagagtgatctacagagttgacgcaactacactcaaattccaaatgaagatttacataattcttgacaagttgattctaaaatttatggggaagaacaaaggtcaagaacagctaaggaatgatgagaaggaagaaataggtactctctctttcagggattataatg

SEQ ID NO: 641456 - DNA, 628 bp, Homo sapiens
ttgtacatgaattttatagaagctttatttataatagccctaaattggaaacaacccaaatgtgtaccagcagatgaatggataaacaaattgagatatagtcatacaataaaatataattcagcaacaaaaaataatgaactagattcattcagtggtgattagattggagcatacatctgtcaaaatttgttgaactgtacttttagaatgtgtgcgctttattgagatacaattgtatgcaaattatatgtcaattaagttgataaaataatgatttaaaatgcataagatacttagaaataaatctaacacatatgtgaaagacttacacctagagaaatataagcgttacacaaaatgttataggaaagaaaagataaagaagacataattaaatgaagagctataccatgttcttagataggaagctttactatcatgaatatgttaattatccttasagtgatctacagagttgacgcaactacactcaaattccaaatgaagatttacataattcttgacaagttgattctaaaatttatggggaagaacaaaggtcaagaacagctaaggaatgatgagaaggaagaaataggtactctctctttcagggattataatg

SEQ ID NO: 641457 - DNA, 587 bp, Homo sapiens
aaggaaatacacatgtaatagacatttaaagagatattaaactttaacagtaatcatgaaaatacaaagcaagaccaaaaatgagattgcattatttaattgttgaaaattaagacacattaaagaggatacgaatctttttcacattgctgagcaaagtgtgaattgttataacaactttggaaaataattttatattatcttataaagttaacacctttataagattctgaccatcctatgagtcagaagttctgtttgtagttgtatacaaatcctcacatatgtgcatcggaggacatgtagaaaaatgttcatggcaccacctttgtaagagaaagaaacaaaacaaaacagtaatagaattacctaaagtgtggtatagttacacaatggaatactataagaatggaatattaatattataatggaggaatactagcaacataatgttgaataaaacaagaccctgtgtgacacrctttttataaaaaaagaacaaaaaaactgaaacaaatatatattgaggcatatgcatgtatttgataaagctaagaaaaaacaaaggaattatatcaactttaggg

SEQ ID NO: 641458 - DNA, 582 bp, Homo sapiens
agatctggcaatgttaaattatgattctcaaatggcaacatttggctagaggagagaggcctctatcatctctctcttcttcacatgcggtataggctgcctggtgtgccgcagtccccaccactcccaatcccatcctttggatgtgaggcagagggtcccytgccatttatcactgtcctggctgcaagttattatccttgtagaagagaaaaggtgctgagtcaatgtcgctagagaaatgcaagtctgaaaatataaaagaggtgctggtgatttcaggaaatgggagagggcagatgtatttgtggaactgggtactcctgatgtatatttagccttcaccttttgatgcttccagctaggcctctgcaagcacttgcatttgtgagccttagaaaggagctagtcctccaggatgttttctttctcccattctctcttagcctcctctcttaacccacccacctcccagccctctcacacccccgctggctcaagtctcactccatggagggaagggcttctgttcccggtcttttcttgctttctgcagatgcaagtgtctcaggcttggaaggg

SEQ ID NO: 641459 - DNA, 560 bp, Homo sapiens
ccatcttcagaaattgcaagatattacctagaaacccagttttctgggttctatttcaaaatgtgaagatctggcaatgttaaattatgattctcaaatggcaacatttggctagaggagagaggcctctatcatctctctcttcttcacatgcggtataggctgcctggtgtgccgcagtccccaccactcccaatcccatcctttggatgtgaggcagagggtcccttgccatttatcactgtcctggctgcaagttattatccttgtagaagagaaaaggtgctgagtcaatgtcgcyagagaaatgcaagtctgaaaatataaaagaggtgctggtgatttcaggaaatgggagagggcagatgtatttgtggaactgggtactcctgatgtatatttagccttcaccttttgatgcttccagctaggcctctgcaagcacttgcatttgtgagccttagaaaggagctagtcctccaggatgttttctttctcccattctctcttagcctcctctcttaacccacccacctcccagccctctcacacccccgctg

SEQ ID NO: 641460 - DNA, 582 bp, Homo sapiens
agatctggcaatgttaaattatgattctcaaatggcaacatttggctagaggagagaggcctctatcatctctctcttcttcacatgcggtataggctgcctggtgtgccgcagtccccaccactcccaatcccatcctttggatgtgaggcagagggtcccttgccatttatcactgtcctggctgcaagttattatccttgtagaagagaaaaggtgctgagtcaatgtcgctagagaaatgcaagtctgaaaatataaaagaggtgctggtgatttcaggaaatgggagagggcagatgtatttgtggaactgggtactcctgatgtatatttagccttcaccttttgatgcttccagctaggcctctgcaagcacttgcatttgtgagccttagaaaggagctagtcctccaggatgttttctttctcccattctctcttagcctcctctcttamcccacccacctcccagccctctcacacccccgctggctcaagtctcactccatggagggaagggcttctgttcccggtcttttcttgctttctgcagatgcaagtgtctcaggcttggaaggg

SEQ ID NO: 641461 - DNA, 489 bp, Homo sapiens
ggcagctgaaatcagcagtgacaaagtcagtggggatggaaacaacagcaatgccctaccccatagtgacatcaaactacaggrtctccagtgcctgggaaagcagccaccatggggtccatccctgccttggccccaggctatgttcccactaagaggggccgtgtttctaacccaacctggggatgccctggcactgccgaagcctacctgcaaactgccttccctgtagcgtgccaagttggaggctgcagtggccgaggccgagcagcagggcgaggcgaccctcagtgacgccaaatgcaagctggcagatctggagtgtgccctgcagcaggccaagcaggacatggcgcggcagctgcgcgagtaccaggagctgatgaatgccaagctgggcctggacatcgagatcgccacctacaggcgcctgctggagggtgaggagagccggtgagtactctcagtccagcaggagagtgaagtcag

SEQ ID NO: 641462 - DNA, 481 bp, Homo sapiens
aaatcagcagtgacaaagtcagtggggatggaaacaacagcaatgccctaccccatagtgacatcaaactacaggatctccagtgcctgggaaagcagccaccatggggtccatccctgccttggccccaggctatgttcccactaagaggggccgtgtttctaacccaacctggggatgccctggcactgccgaagcctacctgcaaactgccttccctgyagcgtgccaagttggaggctgcagtggccgaggccgagcagcagggcgaggcgaccctcagtgacgccaaatgcaagctggcagatctggagtgtgccctgcagcaggccaagcaggacatggcgcggcagctgcgcgagtaccaggagctgatgaatgccaagctgggcctggacatcgagatcgccacctacaggcgcctgctggagggtgaggagagccggtgagtactctcagtccagcaggagagtgaagtcag

SEQ ID NO: 641463 - DNA, 489 bp, Homo sapiens
ggcagctgaaatcagcagtgacaaagtcagtggggatggaaacaacagcaatgccctaccccatagtgacatcaaactacaggatctccagtgcctgggaaagcagccaccatggggtccatccctgccttggccccaggctatgttcccactaagaggggccgtgtttctaacccaacctggggatgccctggcactgccgaagcctacctgcaaactgccttccctgtagcgtgccaagttggaggctgcagtggccgaggccgagcagcagggcgaggcgaccctcagtgaygccaaatgcaagctggcagatctggagtgtgccctgcagcaggccaagcaggacatggcgcggcagctgcgcgagtaccaggagctgatgaatgccaagctgggcctggacatcgagatcgccacctacaggcgcctgctggagggtgaggagagccggtgagtactctcagtccagcaggagagtgaagtcag

SEQ ID NO: 641464 - DNA, 489 bp, Homo sapiens
ggcagctgaaatcagcagtgacaaagtcagtggggatggaaacaacagcaatgccctaccccatagtgacatcaaactacaggatctccagtgcctgggaaagcagccaccatggggtccatccctgccttggccccaggctatgttcccactaagaggggccgtgtttctaacccaacctggggatgccctggcactgccgaagcctacctgcaaactgccttccctgtagcgtgccaagttggaggctgcagtggccgaggccgagcagcagggcgaggcgaccctcagtgacgccaaatgcaagctggcagatctggagtgtgccctgcagcaggccaagcaggacatggcgcggcagctgygcgagtaccaggagctgatgaatgccaagctgggcctggacatcgagatcgccacctacaggcgcctgctggagggtgaggagagccggtgagtactctcagtccagcaggagagtgaagtcag

SEQ ID NO: 641465 - DNA, 468 bp, Homo sapiens
aggacatggcgcggcagctgcgcgagtaccaggagctgatgaatgccaagctgggcctggacatcgagatcgccacctacaggcgcctgctggagggygaggagagccggtgagtactctcagtccagcaggagagtgaagtcagacttaggcatctagaaagactaaggaagagaaggggacagtgaagaactgcagaaatacatagtctttaaagatgacaataccttctctgcaaacattagttgcattgcccttgtcagggaatcagaagaaggctctagacctgtgattctcaaatgcaagtctagataagctgcaccagaatcattagtaattttgctaaaattactactaatgataaacttccttaaatattttaatctaatggttttgggatagggtctaagaacgtgtttttcaacgctccccagatgtgtgtataaccaggggtgagaactactgctc

SEQ ID NO: 641466 - DNA, 457 bp, Homo sapiens
aggacatggcgcggcagctgcgcgagtaccaggagctgatgaatgccaagctgggcctggacatcgagatcgccacctacaggcgcctgctggagggtgaggagagccggtgagtactctcagtccagcaggagagtgaagtcagacttaggcatctagaaagactaaggaagagaaggggacagtgaagaactgcagaaatacatagtctttaaagatgacaataccttctctgcaaacattagttgcattgcccttgtcagggaatcagaagaaggctctagacctgtgattctcaaatgcaagtctagataagctgcaccagaatcattagtaattttgctaaaattactactaatgataaayttccttaaatattttaatctaatggttttgggatagggtctaagaacgtgtttttcaacgctccccagatgtgtgtataaccaggggtgag

SEQ ID NO: 641467 - DNA, 558 bp, Homo sapiens
ataaacttccttaaatattttaatctaatggttttgggatagggtctaagaacgtgtttttcaacgctccccagatgtgtgtataaccaggggtgagaactactgctccacagatctactcraacaagaaagccctttttatggcaaataggttttcaggaaacaatagtgcatgtgaaatgatttgtttctttccctttccaggctctgtgaaggtgttggaccagtaaacatatgtaagaaacttgttttttcctcttcacacatttctctcctcttcaaacttcctttaaactcaggctcacactggggtcaggaggcgtccgacatggccggtctggccacgacagtcaggggagctgggaccatccagccctggatggggagcatcttcttagctgaggtctgagatctccccagagcctgccttccccagagcaaaacattcataaaggttttcaaggcctccaaagtggaggacagccagcttttttgctttgagcggccttgtccttcaagggaacttagaaggacttagaaggaatgggacttagaagg

SEQ ID NO: 641468 - DNA, 466 bp, Homo sapiens
atgggggtccaggcctagctctaccgcctactggctgagtgaatctgggcataccatttcatcttcccaagcctcactgtctctatttacaaaaagaagaggttggattagatcaggggtacacatcaaagttatctctgggaaatgtaaatgcagaaggctggtcccacctcagacctcattagtcatatttacagagattcagattaggatccactggtttggttttaacaacctctggttcttaattctggggcagagacagaagggttagggtctactgaagaaaaggccaagcaggctttgagtgacaaatgaaagagcaaatatttccmaaaaccttcctttggatcatccaaattgccaattgataagcatccacgttctctctggcccttcacataatctatggctcccaagggaccaggtataacaaaaataaccctgatgtggacttcccagacac

SEQ ID NO: 641469 - DNA, 466 bp, Homo sapiens
atgggggtccaggcctagctctaccgcctactggctgagtgaatctgggcataccatttcatcttcccaagcctcactgtctctatttacaaaaagaagaggttggattagatcaggggtacacatcaaagttatctctgggaaatgtaaatgcagaaggctggtcccacctcagacctcattagtcatatttacagagattcagattaggatccactggtttggttttaacaacctctggttcttaattctggggcagagacagaagggttagggtctactgaagaaaaggccaagcaggctttgagtgacaaatgaaagagcaaatatttcccaaaaccttcctttggatcatcmaaattgccaattgataagcatccacgttctctctggcccttcacataatctatggctcccaagggaccaggtataacaaaaataaccctgatgtggacttcccagacac

SEQ ID NO: 641470 - DNA, 640 bp, Homo sapiens
ggaaactgccttggcaaaattatgacagtaagagaaatctgacatggctgactgcatcttgctttctagcctcacaggctggctgtcttcactyattcctgggcatgggccaaggtaacttttggataaatttagcttatactttaaattagaatacgccttcctgaaaactaaaccacccttgtaaaactaatgaaaggccaccaagttaggaggatgagaggggcctgaattctactaagatgtaggcatagttaaaggattaccagccattgttctggaagtcacaagatttgcaactttgccagttactcctgtaattaacatcactatcatggaatgtaagactgatcttttgagctatctcttccaggcttttgcatttgtgactatggaatggccccacactgacgtgtgactccaccagtcctgtgacccctacccagaagcagactcagtgcaggagggccattttccacactactatgatttcattcccaagcaatcagtagcacccatatcctagccgcctgcctaccaaactatctttgaaaaaccccgacctccaagccttcagtgagactgattgagtaataaccctgtctcctgtgtggcatggcaggtcttgtgtcagttaaac

SEQ ID NO: 641471 - DNA, 640 bp, Homo sapiens
ggaaactgccttggcaaaattatgacagtaagagaaatctgacatggctgactgcatcttgctttctagcctcacaggctggctgtcttcactcattcctgggcatgggccaaggtaacttttggataaatttagcttatactttaaattagaatacgccttcctgaaaactaaaccacccttgtaaaactaatgaaaggccaccaagttaggaggatgagaggggcctgaattctactaagatgtaggcatagttaaaggattaccagccattgttctggaagtcacaagatttgcaactttgccagttactcctgtaattaacatcactatcatggaatgtaagactgatcttttgagctatctcttccaggcttttgcatttgtgactatggaatggccccacactgacgtgtgactccaccagtcctgtgacccctacccagaagcagactcagtgcaggagggcmattttccacactactatgatttcattcccaagcaatcagtagcacccatatcctagccgcctgcctaccaaactatctttgaaaaaccccgacctccaagccttcagtgagactgattgagtaataaccctgtctcctgtgtggcatggcaggtcttgtgtcagttaaac

SEQ ID NO: 641472 - DNA, 640 bp, Homo sapiens
ggaaactgccttggcaaaattatgacagtaagagaaatctgacatggctgactgcatcttgctttctagcctcacaggctggctgtcttcactcattcctgggcatgggccaaggtaacttttggataaatttagcttatactttaaattagaatacgccttcctgaaaactaaaccacccttgtaaaactaatgaaaggccaccaagttaggaggatgagaggggcctgaattctactaagatgtaggcatagttaaaggattaccagccattgttctggaagtcacaagatttgcaactttgccagttactcctgtaattaacatcactatcatggaatgtaagactgatcttttgagctatctcttccaggcttttgcatttgtgactatggaatggccccacactgacgtgtgactccaccagtcctgtgacccctacccagaagcagactcagtgcaggagggccattttccacactactrtgatttcattcccaagcaatcagtagcacccatatcctagccgcctgcctaccaaactatctttgaaaaaccccgacctccaagccttcagtgagactgattgagtaataaccctgtctcctgtgtggcatggcaggtcttgtgtcagttaaac

SEQ ID NO: 641473 - DNA, 428 bp, Homo sapiens
atacacctacagttgtaaagaaactaatgacacttgtgccttatatccagatatcatgtccagactactaagaatatattgagaaatcaaccatatgagtaatgggaactataaaacatctgatgtgggactgacactgagcagccaaagactatagaaagcttaaaaattaatcctaccaagattgtgggcctcccattatcaggtcccagggtagagttaaatcactgtttaattactttctttcttagactgagttgataaagactttacctgacttgctaacttgactgttaatttatgactttgttgtgagtccacataaagttacacactttagrtgttttaaaaacagcttctagcacattacacttttcagagaatctttatatacattacctaatttaaaacacctatgcaaagattga

SEQ ID NO: 641474 - DNA, 428 bp, Homo sapiens
ggatgggctgctgctattccactgaggggttcaaatcagctgagtctaggagtcagaaagtggaaatcggggcttctcagctccacatcctgaagcgaaataaatacatttatttattaaataataaaattatatattctacattgctgagaaatgatggagcagaagccagtggatgatgtacttgggatgccaaggaaagactagctggcatttgcaggagggtgctggcatgtgcctcccgatgccattttcaactcaggatttacagtggraactgggatatgttcttggggctgcattcaaacaggagaaagctcgctggaaattgccctggccaggggacagattcacagaggagatgaggttgggacagatttctagctgtcattctgccttattcctgctgacaacaactccaggaagat

SEQ ID NO: 641475 - DNA, 575 bp, Homo sapiens
gactcctggggccttccagaacttgagtccatttagagatctagaagcaacgagatcttctagatcttcttcacctcccaggtggttgaggtgagaaccagtgctcccatacaagacagttacctctggaggggtccttaaaggttcttcaggcaaggtaaattaaacttctcagatagaggagaaaataatatttctttttcattttcttttcattttatttatttatttwttttttttgagacataccaaggctctgtcacccaggctggagtacagtggtgcaatctcaactcactgcaacctctgcctcccaggttcaaatgattctcgtgactgagcttcctgaatagctgggactacaggcatgtgccatcatgcccaggtaatttttatagttttagtagaaacaatgtttcaccatgttgaccaggctggtctcgaactcctggcctcaagtgattcgcccaccttggcctcccaaagtgctgggattacaggcgtgagccaccatgctgggcctagaaaagaatatttctacaagcaaaggatgcttagcagaattttggggctta

SEQ ID NO: 641476 - DNA, 598 bp, Homo sapiens
atctctttgtctgtctgacaacatgtctgactgtgatgaacttctgagaggaatggctgttgcatcactctgacatcccaaatcgcatgcacattgttcttttggtcaactctaaactggaaccacatcaggtagggaattctgggaaatatagttccccacttgaccaagttgacatagtatcatctagagcaaccctcaaggagtgtgcagttggaagcaagtgacattaagtacacacccagagaagaatgtagaaatacacggagagccataggaccttctgagagatgaaaaacaaacacgatgacaattgccttgtggtcagctgttatctgtggatctggtactggtaggtgttaaaagctgggaatttagaagaaaagaatcatcactttgctccctttttactttgacagactattaagttaggtgtttctctactccatattttaaaatttattaatcaaaaaacaaggaaaatggaaagtgacaactcagctawttcccaaagaattttttctcaggggatgtattccctaaacattatcagtctaactttagtgtctataaaatttcgtggttctttttactgtag

SEQ ID NO: 641477 - DNA, 613 bp, Homo sapiens
caaaatgctttcaattcatcatgcatgatgtaacagaaattatgtaactgattatgcttgctgggtcaaatgctttcttttttctcaggggggataatggtttgctctacttcatccacactttgtcacctggtgatttgtataatcaacacccacattttgaaatagtactgaaaagaaaatgtactttggtaacaggaagacctgggtttaaagagtggcactaatcattactagctttgtggctacgggtgaattacttcatctctcatatctaaatgcctccattttaaaaattggaatactttttgccaggttgcaaagttgtaaagattacattatgtaatgcctattattagaatgcttagcatgccagcacataacaggtgctcagccaatgccacayttcatctataaatcctacttacttctaaaggctgagggcagttccatacaatgccctccctaacttctctccttttttccagtttcactctatccaacaccactcagagcctacttagttgttctcaaattgttttatattctggtattttatgttcattcaacaaatatgtagtgaatgcaaactattttttcagaccctgtacta

SEQ ID NO: 641478 - DNA, 609 bp, Homo sapiens
gtaggcctgtctcagcactaaggtaagatgcttatctggccaaggcgccacagcccagagacaacagcttatgccagctcctccccctctttccactctttctaccagcccctccctctcctccaacagaagttcctggtttttcccacaccttttgtgattcttgtccacttctcaatgtcccatttcatttacgagtggcctaatataccgatggcctttgtcttggtacaggtgtctttgctgaatcttttcctgcattgtattcttttactatgrcagctatgacaaatttggtggcttaaaacagaaatttattatttcttagttctaggaaccagaagtccaaaacccatttcactgggttggaatccaggtgttggcacggctgccctcattctagggcaagcttgtccaaactgtggcccttgggccaaatgcagcccagaacatctttgaatgcggcccaacacaaatttgtaaactttcttaaaacataacgagacttttctgcgatttttttttaagcacatcagctatcattaatgttagtgtattttatgtgtggcccaagacaattcttcttccaatgtggcccagggaagccaa

SEQ ID NO: 641479 - DNA, 584 bp, Homo sapiens
cccaacggtttccacctgcagagcgtgtccaagctgctgctggttatcagctgtgtgtaagggattctaggttytcctatcctgccctcaccaccttccctttccagcctggtgccccagccctcgtctcttgaagcatctgagcacccttactgtttgccctggtttttgccttatcctctagtcttctctgtctggattggttgctctgcctgttgcttacctcttcgcttctttttctctgctttgttcagcatttactgtatgctaggccttcagaagaaaatgcttcatgcagcatccatacccttcagggtttcagtttcaagtgggtgagagagacagaacatttgaaattcctgcacagatggttaaatgctaacagagaaatgctagagggcattttaggagttcattccttcattagatgttctgggtgtctgctctgtgccaggcactggaactgtgcactcatggagcccacacgttggcagggtagccagacaaaatcaatgcctacaatacaagaaaagtggatgcttattttaatgtagactatttataataattgctatgacattata

SEQ ID NO: 641480 - DNA, 584 bp, Homo sapiens
cccaacggtttccacctgcagagcgtgtccaagctgctgctggttatcagctgtgtgtaagggattctaggttttcctatcctgccctcaccaccttccctttccagcctggtgccccagccctcgtctcttgaagcatctgagcacccttactgtttgccctggtttttgccttatcctctagtcttctctgtctggattggttgctctgcctgttgcttacctcttcgcttctttttctctgctttgttcagcatttactstatgctaggccttcagaagaaaatgcttcatgcagcatccatacccttcagggtttcagtttcaagtgggtgagagagacagaacatttgaaattcctgcacagatggttaaatgctaacagagaaatgctagagggcattttaggagttcattccttcattagatgttctgggtgtctgctctgtgccaggcactggaactgtgcactcatggagcccacacgttggcagggtagccagacaaaatcaatgcctacaatacaagaaaagtggatgcttattttaatgtagactatttataataattgctatgacattata

SEQ ID NO: 641481 - DNA, 511 bp, Homo sapiens
cctgtgtcaagaagcccaggagaagaataagcaagactgaagacctctgcatgccaaactggctrtgactctttcatgaatctccacaagctctgcctggagctggtgggactcttttggtcattacatgaagaaacagtagttagtgtatgagggatgatgaatgtgcccagagggccccgtgaattcagataaatgcatggtgctagtgggccaatgctgaaaaggccctgaatgtctcactctttgaagctagtgccttctacttcttaatgatcttacacctctgtggggccagagaccagagcaggatttgtactccaacccccgccagaacccccattgccaagtctgagaaactcaggattgggaatggctcccgtagggcatagatttcacttggccttttcctgcccaaacacatgcacctttgccaaatccttccctccagtggctcagatgctttttctatgtgcaaactgtctcagacagtcgtctccactggctaatg

SEQ ID NO: 641482 - DNA, 588 bp, Homo sapiens
gatatccaaatgggttattcaaagataattagatacatgagtcgagctcagaaggtggtctgcagagagacatgcatgtgtgagtcatcagaagttcagtgacaaccaaaacatcamgccatggggattgatgagaccatctaggaaagagtacagaatgcaaggcacagctgtcctgggatggtaccttgaggtggttgggagaagagcaggactccgtaaatgaaatggccgaaagtaggagagaacttgaaagacagtggtgtcaggaaacccaggaaagggctctgagaaggatagagggtaaacaatgccaaaaacatgttgggaggtcacaacaggacagaagagtgtccattagactaaataatgtggggaacatcaataaccttggcaaaagcagcttcaatggaatattgaggaggatgatggaagaggaaggtaaagaagttgatgaagcaagcccaggtaaaccttctaactttggctgcctaggggagcagaagagaggatagcagctgaagaaggagttttgtaaggtgaaaaagactcaggtatgagtttcatgttgatgaaaagaaggtacca

SEQ ID NO: 641483 - DNA, 588 bp, Homo sapiens
gatatccaaatgggttattcaaagataattagatacatgagtcgagctcagaaggtggtctgcagagagacatgcatgtgtgagtcatcagaagttcagtgacaaccaaaacatcacgccatggggattgatgagaccatctaggaaagagtacagaatgcaaggcacagctgtcctgggatggtaccttgaggtggttgggagaagagcaggactccgtaaatgaaatggccgaaagtaggagagaacttgaaagacagtggtgtcaggaaacccaggaaagggctctgagaaggatagagggtaaacaatgccmaaaacatgttgggaggtcacaacaggacagaagagtgtccattagactaaataatgtggggaacatcaataaccttggcaaaagcagcttcaatggaatattgaggaggatgatggaagaggaaggtaaagaagttgatgaagcaagcccaggtaaaccttctaactttggctgcctaggggagcagaagagaggatagcagctgaagaaggagttttgtaaggtgaaaaagactcaggtatgagtttcatgttgatgaaaagaaggtacca

SEQ ID NO: 641484 - DNA, 481 bp, Homo sapiens
aaaccttttattttgaagaataagaaacttggctaagataggttacttacttacctatggccacacagctagcacatgcaaagcctgggattaaaccaggtctatctgacttcaaacttttaatcacgatccaattttttgttgcagaattcctttaagagctctaaattaataagtggtgagatggcatgaaaactctttattcttttccttttccacaagcattttgagaaatcaaaatggtaatgtacattacgatatttggaaarccataaagggctaaacaagagtaggttacatcagtcaatcactactcacccacaataaaggggtggctatgttgtttatacgattttactattaaggcaatgtcttgagtgaatataatttatttctgtttatagaaagcctaacagcctcgaggggaattgcttattgagatgtgagccatggattacttcatgttttgtatagtacagtc

SEQ ID NO: 641485 - DNA, 583 bp, Homo sapiens
ggcatttcaagtcttatcttctagcaattttgaaatatataatacattgttgttcactatagtcaccctactctgctctcagacatgagaacttctttcttctaattgcaagtggaacatgtgagcgggtgtctgctgtgggggtagtggcatttggatgtgcttcatctcaggamcctgggtagagtgttcaggtaccaatagtggtggactgggctgggtggtttccaggcccctggatggaaaacttgaggactggtggggtagatctgggtcaggtgtatctgtcctcagggaccctggtggtgcttgcaggcattggctgtgttaggcagtggcagggtaaccccaggcccaaggcagaatgcttgggtgaaggcagcagttgctgcactgcagccctgctattggagagggcggggttgcttttaatggtagcagatatgtgcagggtgctggggagcatgtacttcacttggtcttcagccccaggctgtggcagcccacagtggcagcagctgtttatggggagtttctcctgggggtgtgtgaaaatacactatggcttcactgttggggccag

SEQ ID NO: 641486 - DNA, 518 bp, Homo sapiens
attctgttatttgtggtgcttgcaagagtctagggtttttcttggctaggatgaaagaattagcggtgagtatgtgcactgcttggggtcattcatttactctttcttcacactggggcctctcctggctcccaacctactgagcaggctgcctcacttcccttttcttcctcgctttagatgtttcctgtcacttctctgttgaattccagtgttctctcttaggtgatccattcaaagtgtgattatctaccccctattttggctctttttttgtataggagatgagtaccagatgcctccagtcaactatcttgaagcccctcaatcagctgtttagttttgacaagagcccagtggtatgctaatcgctgcttctgaaaagaatgtccgtattggagagatgatgagtctgaaacccaaaggggtgcctctgagtagaacctgcctrgtttcctccaaagctgaggcagaacaaatagttcaggtaccacacacagctgaggtttaggagtgta

SEQ ID NO: 641487 - DNA, 571 bp, Homo sapiens
agtgtattgagatgtgcttcctgtcttggtctgtcaaaagacttgaaatcccttcacagtgtgagtcacacatgaagtgagtgcttagtggtgactgtgtttgctgatttgcttatgaaggcaaaatctgatttaagagccaaaattatatatgtatatattctttgaacatccctaatctgaaaatctgaaatgctccaaaatttgaaactttttaaacaccarcaggatgccacatgtggaaaattccacatctgacctcatgtggtgggtcacactcaaaacacaggctcatggcagtttcctcagcacccccagctgttctggcgatgctactgtgcttccttacccttaacgtaatattttttcactgtatgactggtatgtcatttttttttactgtgaaatacttctgtttgtacacatgtcaacaatgattcttggtagcgtatcagttcagtcaggaatgacagtgatgccaaaccaccacagaccgtccacatgcgtggctgagacagggcacctttgctttctgatggttcagtgaacatgaactttgttttgtgcataa

SEQ ID NO: 641488 - DNA, 605 bp, Homo sapiens
atttatttttcaggaggatgtgcatgaggatatgttatgttcactcttattgccaaccaacaccacagctgcagaactattcaagcctttgaatgactgcatgtcaggaaaactgaattggtcattttgggtaggtttatgcatggatgaagcagctgccatgactggatggctttctggtttcactacttgggtcaaagaggttgcttcagagtgtgagtctatgcactgtgtaatccctagagaaatgctgactagccaaaaaacgtcacctgaacttaacaatgttttgcagggtatgattaaaattatcaaccataataatgtacatgcccttaattcacrtttgttcactcagctctgtgaggagatggacacagagcacacacgtcttctcttatacacagaagtgagatggctttctaaaagtagatcactggccagagtttttgagttatgagagccactgcagagatttcttttagaaaaagaatcaccactggcaacacatttcagtgacatagaatgagtcccaaaacttgcttacttttgggacatattcaacctgttcaataaaatcaacatgtcacttcaggggagaatga

SEQ ID NO: 641489 - DNA, 512 bp, Homo sapiens
cttcatgcactttcatcccataatgcctaagggaataatgaacttcaagaacagccagaatcgaattgtagattttcctctagtaataactgtgtaactctagtaataactatgaaaacagaatatatttctgtcatctgtttaaaggtaggaaccatgctgtatgttatcatgtgacacatgagcacgtagtagacattcattggaatgacaagtggtgggtatttacctacgactgtgatttatagtcttatagytcaaaggaagagttcacatttaatggaagctcttcttcaggctcaaggatatgtgcggaagaactggcagacagagggaagtccttccagcagggtcagatttcatccttgttctcttgggggatggtgatgcacatagtttcccctgggattttttgatttcagagttaggacacagaaactgattttcatcaacccatctattatgtactataacagtgtctgctttttgttaaagtctttttcatctatact

SEQ ID NO: 641490 - DNA, 630 bp, Homo sapiens
atagctaccaataatttgttgtacatttaaaaataggtagaagagaagatttgtcatgttctcgacacaaagaaaatataaatggttgaggcgatagatatcccagttaccctgatgtgattattgcacattgtatataggtgttaaaatagcacctgtacccaaaaatatgtacaaccattatgtatcaattttaactttatttaattcagagggaaaactttctcaaaattttagggcaaacaaaatctttaaaaaatttttgtttcctttttkgtttccttggggctctgtaaacttctaggctagggtgaaatctcctctgttctaatagtgttcagtctatttttgcttctctttcttttcttctttcttcctttttgtttttggttaattgatcactatcacttacttatgtatctctctatataaactgtaagattcttagtaacaggaactgggcttgcttcctatttgtaactcttatactacctagcacagtgctgaatttcagtagatacagaaatgtcctataacagaatgtgggtggttacaagaaggcaacaaggagaataatttagcaaatatgaggtagacgactgagtaaagtgaattctggaatacattggt

SEQ ID NO: 641491 - DNA, 427 bp, Homo sapiens
tcttgactttttgataatctccattctggctgcctgcctcagttttcttatctgttaaatgaaaataagagctataccaccagaaagggttatcattaaattagtacctttaaagcacttagtacagcatttgccacacaatagtcatttaaataaatgttagcaacttaagaacaattgtcaatgttactagtgctttgttactatttggtattattcataattattattactaataatttgattttgctgagccatggctatattgtcagaagagactgactgaaatgtacttactgattaatttcgatctagttagtatgttaaagacrtgttcatttaaagagaaagccattttgtgtttttggatgtgattccagaaagcacgtataggaagctgttttagggaaaaaactcggttgtgggc

SEQ ID NO: 641492 - DNA, 598 bp, Homo sapiens
gcaagataagtcagaggtccattgaacaatgtgtgcctatagtcaccaatactgcttgcttaaacatttgctaagatggtagatcttatgttaattgttcttataacaaaaggaaaataataataaaaaaagaagagaacaggagaaaacttttggagtgatggttgtgttatggcatagattgtggtgatggtttcatgtgtgcatacatatctccaaattcgtcataagtatgtacaactttttctacgtcaatctcatctcagtaaagtacccttgaaaattacttacaaaataatgccctttgcaccaatgcagatgccactggaggctattatcctaagccaattaacacaggaacagaaagccmaataccacatgttcttacttataagtgggagcgaaatactggatactcatggacataaaaatagccaccataggcactggggactcctagagtggggagggaaggaaaagggaaatgattgaaaaactactgggtactactctcactatctgggtaatgggatcaattgtatgctcaacctcagcatcacgtgatatacccatataagaaacatcgtgtgtaccgccc

SEQ ID NO: 641493 - DNA, 598 bp, Homo sapiens
gcaagataagtcagaggtccattgaacaatgtgtgcctatagtcaccaatactgcttgcttaaacatttgctaagatggtagatcttatgttaattgttcttataacaaaaggaaaataataataaaaaaagaagagaacaggagaaaacttttggagtgatggttgtgttatggcatagattgtggtgatggtttcatgtgtgcatacatatctccaaattcgtcataagtatgtacaactttttctacgtcaatctcatctcagtaaagtacccttgaaaattacttacaaaataatgccctttgcaccaatgcagatgccactggaggctattatcctaagccaattaacacaggaacagaaagcccaataccacatgttcttacttataagtgggagcgaaatactggatactcatggacataaaaatagccacmataggcactggggactcctagagtggggagggaaggaaaagggaaatgattgaaaaactactgggtactactctcactatctgggtaatgggatcaattgtatgctcaacctcagcatcacgtgatatacccatataagaaacatcgtgtgtaccgccc

SEQ ID NO: 641494 - DNA, 524 bp, Homo sapiens
aatgcatatactgtcagaaatattaccactctccacaaagtataacagcctccaggaggggaagggaacttaattagaaatttccacttcaaatacaatttatagttcactcactctgaaacatgctggagggtatttgaaaaatttaatgcataatgatctgtttgtctcaagttgtcaacaaaatacattttgagcatagaatatatttgtttattaagcattagacggtacctctgtgatttagtatgaggctctctttctagataaagaaactgaggcccagagagatgaaggggcttctcaaagtcaaataagctaacagcatgactggaactcagcactcctgactcctaggattgtgcttttctgtttcagtgccttcaaccctagcacttttccctggtcaaatgagcctgcattgagataattttatactctcccaagtcatcctctttgtgtacgtcaggagagggttcaacaatagmtaataattatatgcccttactagatgccaggcactg

SEQ ID NO: 641495 - DNA, 412 bp, Homo sapiens
attttctttacaaacaggaagaacatttaaaatgctgagaattgatagaaggagaggartggggacacatggtggccctaacatgggtttggggtatatgggccttcattttactattatttttttcaacagcagacatattacatatgtgtacatattacatatgtgtacatatcacatgtagtcttgtttgcatgtatatttcataatgcataataaaaatattaaataccatatgctaatacatttgaaacaaaaccaaaagggtttttggaaaaacatgaaatgacaaaattagcacaaaacacagaaactagaatagacaaattaaagacattgaaatgatacccaaaaagacctccctccctcaagtctccaggctcagatattttccatgtgatttttccacact

SEQ ID NO: 641496 - DNA, 543 bp, Homo sapiens
gagtggcatctgtcaaagtcaaattaaaaatgtagaggtaggccggacacagtggctcatgcctgtaatcccagcactttgggaggccgaggcaggtggatcacttgatgtcaagagttygagaccagcctggctaacatagtgaaaccctgtctctaccgaaaatataaaaattagcagggcatggtggtgcatgtctgtagtctcagctacttgagatgctgaggcaggagaatcagttgagccctgggaggttgcagtgagctgagattgcgccactgcactccagcctgggtgacagagtgagactgtctcattaaaaaaaaaaaaaaaatgtagaagtgaatctctaaatttaacattttatttggggagaaagaattgcagttcaaagaatacacacagaccagatcatctctggtatgtccgaagaacaaagagaaggctggagattaaaaaagagacatgacatgaaatcctcttcgagaaaattcgttggcactgttaaggttctgggaagctggtcagctctgattgacatgt

SEQ ID NO: 641497 - DNA, 543 bp, Homo sapiens
gagtggcatctgtcaaagtcaaattaaaaatgtagaggtaggccggacacagtggctcatgcctgtaatcccagcactttgggaggccgaggcaggtggatcacttgatgtcaagagtttgagaccagcctggctaacatagtgaaaccctgtctctaccgaaaatataaaaattagcagggcatggtggtgcatgtctgtagtctcagctacttgagatgctgaggcaggagaatcagttgarccctgggaggttgcagtgagctgagattgcgccactgcactccagcctgggtgacagagtgagactgtctcattaaaaaaaaaaaaaaaatgtagaagtgaatctctaaatttaacattttatttggggagaaagaattgcagttcaaagaatacacacagaccagatcatctctggtatgtccgaagaacaaagagaaggctggagattaaaaaagagacatgacatgaaatcctcttcgagaaaattcgttggcactgttaaggttctgggaagctggtcagctctgattgacatgt

SEQ ID NO: 641498 - DNA, 542 bp, Homo sapiens
aagtcaaattaaaaatgtagaggtaggccggacacagtggctcatgcctgtaatcccagcactttgggaggccgaggcaggtggatcacttgatgtcaagagtttgagaccagcctggctaacatagtgaaaccctgtctctaccgaaaatataaaaattagcagggcatggtggtgcatgtctgtagtctcagctacttgagatgctgaggcaggagaatcagttgagccctgggaggttgcagtgagctgagattgcgccactgcactccagcctgggtgacagagtgagactgtctcattaaaaaaaaaaaaaaaatgtagaagtgaatctctaaatttaacattttatttggggagaaagaattgcagttcaaagmatacacacagaccagatcatctctggtatgtccgaagaacaaagagaaggctggagattaaaaaagagacatgacatgaaatcctcttcgagaaaattcgttggcactgttaaggttctgggaagctggtcagctctgattgacatgtgaaggtggtaggca

SEQ ID NO: 641499 - DNA, 564 bp, Homo sapiens
tttttttttttacattctgtttkgttcacacttcatgaacaaatctgccttgctattcataaatgacctagacataaatctgaatttttagtttggtctttaaaattttccaaagacttaaaggttgactctttgtcagctatctttatggacttactatgaaatatgttaagttgcatattattggcttatcattttttcacaagtcccacatagagaggctgaaaacatatattaacaagaacaaagaagaaaggagaaaaatggcagtaagggtattcagtagaatttgagagttgattcaaactagtgactagaggcattctttctgagaaaaataactagcctaagagaggaaagaggaagcttgaaatactaatagtcaggtgcattacttttaaataacaacagattggcaaggatcgccagatatttgaggaaaaacctttatgtgaaagataaaagggagaatatggaagaaaaacaaggcatgaagcagaaggaaactaaaaaaaagggaaaagaaaggaaatggaatattttgcaaccgttacactagactag

SEQ ID NO: 641500 - DNA, 593 bp, Homo sapiens
cacagatgcattaccacagagaaatttgtaatttaaatcctattgacaaaagaccatattatataccatttggcccatgcaataaagagaaacaacatctttttatataatcacattattgtaacttatgttatacattgtcatataacactggtaagatgcttcttattacatatagtgacaaggatgctatgagggaattttagtatttctttcctctccctcttctttacccttaaatatatatactcatcttagtgctgtggccacgtaacaattccattagataaaaacaactgtttaattttgctgatacaaagcaaggagcccagacatcttttgtattttttatgcacatgtatgtatgtgtgtgtgtatatgtacatgagtgtgttttatattttatatataggccatttttgggtaatygctgaggatgtggtttaacgaattcagttggtatagatggagcacaccaaaagtctgaaacagaaaaacaaaactagttttataccatttggttttagaatggctagtctagtaagcttcttcccaagggtctttatgtggatatggacctttcaggaccagat

SEQ ID NO: 641501 - DNA, 524 bp, Homo sapiens
gtattcaacattaaaatcttaatcttgactctttggttcatacagaaaaaatagattcttatgtaatatttaattataaacaaaaacctgctaatctacattctcaacccacagcagttaaaccaaactagaaagggaaggagtggctattattgacagatacagtaacagagaaaatgactgtttcaggacctagaatcaaattagtagggcacaaaaatgaaaaacactggcagagaatgattattataaaaaacaatgcaatctgtcattacaatgagcctgattcatcaagaaaatgctaaactacattcagtatttttatttaaataaaatacccattaaaaaatatacatatataatttttgtttgttttttttgttttgttttgagacagagtctcgctctgtcgcccagactggagtgaggtggcacgatctcrgctcactgcaagctccgcttcctgggttcatgccattctcctgcctcagcctcccgcgtagctgggactacaggcgcctgcc

SEQ ID NO: 641502 - DNA, 552 bp, Homo sapiens
ctgaaaacttccagagctacacggaggagttaataggcctggagagtccaaggttacattgaggcacctcccagcagtggaaagagcagtggaccaggagcctgagagcctgaacccctggctcctcaccacatctcactgtggtccccaggcaagccctggcctctctagacctggaaaacattagtgtggaaggcgggtcgcctrggtcgtccgaaggaagcctcactgtggtcttgtgtggtgatgttatcattatttccgttttgtggaagaggaaactgagattcctcaaatgaggtgcaatttgccactgctggtgctggggtcagtactggagcctgactgcatgccaagggctaaaatcacagggctggaccaagggccagccagaatagacgttcccttggtgtccactgggaggcgccctagactgcttctcctagttggcaccagcacctgaatccctcagccagagtggtttcccctgagtgatctctggacaaggtgggactgggggctgccagctcctggggcaaggtcaggaagctt

SEQ ID NO: 641503 - DNA, 580 bp, Homo sapiens
ggtctcaaactcactgacactcacgtcaggctggatctcagctcwctgcaacctctgcctcctgggttcaagagattctcctgcttcagcctcctgagtagctgggactacaggcacacgccaccacatctggctaagttttgtatttttagtagacacagatttcactgtggccaggctggtctcaaactcctgacctcacgtcatccacccgcctcggcttcccaaagtaccgggattacaggcatgagccaccacatccggctcccaatatttctactttctatgacctaccttacggaagaggaattctcatttctatggctgccttgggggagaaaagtggggacaggtcagagagagagagagatactgcttctgaggctgcttctgagaccttccagtctcctttagctcaaagtactcagcatgccacagcaccatactttggaatatcattatctcagccccaatacgggaagatgcttgaaaatgcactgtgtttgttgcagatcacaagcaacatcctatgagaacgtgattcccatgccaggccccccatccagacaggcctggtttt

SEQ ID NO: 641504 - DNA, 607 bp, Homo sapiens
ttgcgctgtagccctgttatggcccggggagaaactatgaaaggaaccagtgaaatcttttgttttgggcactgctaaattgatgatagtactaaccctgtgctagcagccagcyggtgaaataataggtgaataatgttagtacattgtgaatataaaagtttccatttgcaaagtgctactgctgttctaaagaagccacatttctaataaatgattgcttaatcctgtgatgctgccacagccccacagagtttgggaatgtttgggaattctttctgaagtgtgtgccgcattcttttgctttgccttttgggagggtagatgtgactattggaaatggtcaaaataatgcagtagcaaatctgttgactatagtgagtgataagcactgtcggctgctgtgtctgactcggaaggcagattctggaaggggtgtgtggggaaggcttgttggctcagcactggggtgagtgttggcctcacttcttaggtgggaagtggacaaggccaaggggcttttgatttccagctactatggctggactcccagtgaggaaggagtcgctgccatggattgcctgggactgggaagactccttttaac

SEQ ID NO: 641505 - DNA, 531 bp, Homo sapiens
tttgtgagcttctcaacagcatctttttcctgctcttcttcccttcctctttgtttggtttttattcacatgaaaatttaaagacccataaggaaattcaaagtgaaaatctatgcccaaataagtcaggatctcaagatgaaaatataagttctggaaatggaagtttcctctgcccccgtggtggtatcatagccagcagcctcgttctgtgcttttgaaggtttaatggcctgcatgtgaaggtaggggcgcactatatatatagtaccaggcgtgtgggcgcactggcacggatctgaaaaagcgtaagtttggcatttctaggtttattttaaacttacaacctttaacgccagacacagagcttctttcccacttaatgtaactatacattgattgcttttaattagtgttggatcttttttggtgttttgcagcttgggatatataaaaagtctgacttaaattwaaaaaaaaaaaaagctaactcctgacattctcacgagtcttgcaaaaaccagcacggga

SEQ ID NO: 641506 - DNA, 579 bp, Homo sapiens
tcattgaacctttggtttgaggtacgtttgtccatgcactgggctgagatggaaaatgtactacttgctgtgggccacagcctccactctaagataaaccagcaaattaaaaacccaacttatcagaggtatcgtcaaaatcctaacttctgaagaattcctgagggtcactacacactccactcaatcaccgcctaccacagcttcagaacagcatcatcacagtaggtttttggaatctggacaagagtcctcaatcaytgaacatgccacaggtcccctagactctgcccactaaggcaggaaagcacagggctccaaggtgggcagatctgagctagcttgatgactaaaaacgggatgcaggatttaaccctttgctaaccagaccatgtgcctgaacagcagctcatctaaacattgactgtattttaaacccagaaagcaacattcccagatgatcctgagcaataaggcctcctcccaggatttctaacttgaggccccacgtggagaagggtgtctaatctgggcttggaggaacagggctctgggatgatgcatggagtgggggctccc

SEQ ID NO: 641507 - DNA, 377 bp, Homo sapiens
cactccttctaccttttggtttataactagttcatgaaacagaaaagaaagtttagccaaaagctttctagttaatagatttattaataactggattgacaactgtggcttagatctaagggagaatggaagcttctagtcttctcatacttctagatcagcactactcaraagaaatataagcctcaaatctgaaccacctatgtaattttaagtttttcagtaatcaccgttaacaaattcaaaagggtaaagctaatgttcattatatattttatgtaaccaactatgtcttagatattagcctaagttataatcaacactaaaaaattattaatgattttactttttcacattaatttatgaaaatgtagtgt

SEQ ID NO: 641508 - DNA, 600 bp, Homo sapiens
caatctttcctcttttaattctataaaacttactctcctttctgatatctttgcagcttgcagaaacaaataacggcagatggattaccttgccacaagtttacgaataaacagcctttgttaattttgtcttggtctttgatttgtttccgacaaaatttatatagttagccgtacaaatatgcatcctactgaggggggtttgtttcattatatatagcccaccattgctgtccataagaaaccattcaaagagagaagacatgcaccacagggggagaagacattcatccacaattatttttccttctaatctaattgataattttatgtaatgctatttaaatgtttggatgaatttcaagggatagcactttggttagtttcataaaagcctttttcactcaccttggagaatgaaaatgagacaaattaatgtaattaaaccaatttccacttggctactacatgattcacttttgtaagccattacatctgattcctctattggctcaggatrgacactgaattattatactgaaaaataagtaattcttgtcttagccttgctttactctaagcaattatgctaaaatagca

SEQ ID NO: 641509 - DNA, 596 bp, Homo sapiens
tatactgaaaaataagtaattcttgtcttagccttgctttactctaagcaattatgctaaaatagcactcagcatttttatctatgtcccatcccccattcatgaggggccacagtagggaggcttcacttctctcttttttatgtctaatactcttatactggctgtgtcctgtctctgtgctgtgatattgactagcctctcttaaaattcacatagatgctatcttcaaatgataaatcrtagcaggctacccatataattgatctcaaattccccatgaccccaacaacctttagctgtggcattttgaaggacttcgtacctctttgaaaaattaaatgctgatgaaaattctgatggggtatgtctcactctacctatgtttcaaatctcccaaagagtatgaacattgccctctataaccattttgaagatacactttaaaaaaattagacgtgaggtatgaatagcagttcgtggtaagaaactaatactttctcacttcgcagctaaaaaaaagtcacttgacctgtataggcagcataagattacatgcagtataagatggtgtgtaaagttaagaaaaaaatgat

SEQ ID NO: 641510 - DNA, 496 bp, Homo sapiens
gggaaacagcaagtcaagtgcattgcaatgttattgtctgcaggaagcctcaggtgggccaagtgatgggctgaggggatgatgctatggaacaccttaggacaagctcctgctgagtggaagttagaagtaaaccactgtttttcttacacatttrtatctaaggacagttgcattctgattgagtcaactaatttgaggtatgtgaaatatgcatgcatgtttacatccctgcatctgtttttgtgttggaggctaaacctggatgaataagctcttacaaaacaatgcatataaagctttaggttttcaaatttgtccgtaatagagagagagaggaagagacaggagataaaggttttgttagcaggagcaccctatcttttatgtggcagtttttcctttctactctgtcactggggccttatccccagggaaatgttcctaggaatgaagacaagtagatatttttgcactagagtctgctgcttttagc

SEQ ID NO: 641511 - DNA, 496 bp, Homo sapiens
gggaaacagcaagtcaagtgcattgcaatgttattgtctgcaggaagcctcaggtgggccaagtgatgggctgaggggatgatgctatggaacaccttaggacaagctcctgctgagtggaagttagaagtaaaccactgtttttcttacacatttgtatctaaggacagttgcattctgattgagtcaactaatttgaggtatgtgaaatatgcatgcatgtttacatccctgcatctgtttttgtgttggaggctaaacctggatgaataagctcttacaaaacaatgcatrtaaagctttaggttttcaaatttgtccgtaatagagagagagaggaagagacaggagataaaggttttgttagcaggagcaccctatcttttatgtggcagtttttcctttctactctgtcactggggccttatccccagggaaatgttcctaggaatgaagacaagtagatatttttgcactagagtctgctgcttttagc

SEQ ID NO: 641512 - DNA, 538 bp, Homo sapiens
ggtttataaacctagacaggccacatctagagccccagttcttagcaatgtaaactgattaggtacctgacatttgctaatggcttggcaaataatagctactattataatcatttaaaatggaattggtatgtggtagaaggaaagagctgattcaaataattgagatagaaagatgtgggttggtattgtttaaattaaccagatatcagatgtagaaaggaaataccacaattaacctttggatttaggatacatagactgatggtgctgctgctgctatctcttgattatccaattgtatgatttacaatgaaagagtcaaataagcttgatctctkccacatgtcttagacatttttagtaagacatgcccaagaaaaagatgactgggttctgggggcccgtccttaacctttatagtgaaacctgccctctgttaacttagtcctcagaagcaaagtcagtatcagggtcgtgggccagaagtaccaggagtagcacgtgtgttaatttttgtattccaacattaaatgtc

SEQ ID NO: 641513 - DNA, 573 bp, Homo sapiens
cctccactggaatggcttcaacttccttttcctatattttaggaacttctcctacatcatatttcttctttttccctaccccatgagcatatcgtccattttgcttttgcaaaaaaactttatcctaaagatgagagaagctataagggaagaaaaaaacracactgtaacaactagatgattaagaggaaaaacacatcaaagtgtatttcacaaaatttgtctactaataaatacaatgtatgactataaccaaatggtacaataatatttgttggtttccaattcaatgactattgaaaggtggtgagtgctttggatttaagagtttaagtttcctatcaccatgtcagtagtatgggtgagacatggtaagactaaacattaggcatcataaaaaagctaaaggacaagatacagtaactcagtggttcgtctgtatgttacagccattccagagcactgggatcagattctatcaccccaagtcaggctgaaaaagagaatgatgctaaatgtagcatgttatcattggtggggattgtggaacagaataagggcattagtgaaaaa

SEQ ID NO: 641514 - DNA, 491 bp, Homo sapiens
atttgtaccttaaagatgagaaattcatagatttaaacccaacactgtcacacattattccagtggattactattaagttctaaattggaccaattaaggatattttctacctgattaaaattcatcatgaatttgaataacaacaggaaatatttacagtgattaagtatgctttgccagaaatcccttctcatattacttagtatcaagatataacatatgtgcattcacaataaaatcaagctctaacattgactctcgagttagaaaaaaagagagagagcaaacatgaaattgaagaatggttagaattgaaaattcagccatgcagaaaggcccagacaccaaacaaacaagaagatcccatctattggtgttaatgcggttactggctcacaaacccactcagaatgcagaattgaygggaaacagctaagaaaataggatatttcttttggaaatgaaagaaggtcagaattacgctgctact

SEQ ID NO: 641515 - DNA, 611 bp, Homo sapiens
attatgacacaaaaatgactaagaatagtgggtctaaagcagtctcaaaccaggatgaattatcacttcttcctcctccttccctcmttcacaatgtcccatactcccacatgtccttccataactgtagcagtttttcttttttccaccatcctcattgtctgtccctcacttctactgttcaagatagaggatatatttaaccaactaccttatcatttgaaatgaaaaatagtgggctagaccatctgattatttcaattttatatatcaaggtcaatagctcctttttagttattgactatgtacacactcaccactataagtgctactaggtgctatggagaatgggggaaaaagcttaaaatgttagaagacatagttttttgtaagctaccacatatattttgtgggaaatatagaatttagtaagcagggagagtttggtaatgttgccatacatcccagtttgcctgggacagaatcagttacttgtatattagttatctaatagcagtatctctcactttcagcagtgactcagtttggatgaaaaatatatgaccactctacacagtggtgaaggttacatctcttggattaaaatattg

SEQ ID NO: 641516 - DNA, 560 bp, Homo sapiens
gttccctcaggacccataaagagagtaaatataaacaggcaaaatccctcatttagactctgatatttggtctttgttgtgtgtgtgtgctttttttttcatgaagacaaatataatattggattaggattgaaggcatgtcatttatttattaacagtataaacttgggtaaatcgttaattctcttggatcttkggttttatgggaataatagtaatacctagcttcgcggtgactatcatagagtacatgctgaggaaatactggctgtcgacaacagcagcaacattgtcatcttttgtcaaccacgactgaatcagaacaagacaaatgagatggtttgttacagaaacaactggattcagtataaaaagatacaagtttaagtatgtgtgagcctcaattccctcttacaaagatgaaaactaggattgtagaatcaaagctctaactctactacttaacttcctaggtaagcttagggtgagtctcaattctctcttacaaagatgagaaatagcattgcagaatcagagctctaactccactacttaactag

SEQ ID NO: 641517 - DNA, 595 bp, Homo sapiens
gaaaaatgttccataggaaataggcagtcatggtgcaaccgcaagggaaaatgaatgcatattaaattttatatttcacatgtgagtctgaagtgatatattgctctacaactatctatatgtctctatattctcacataccaacatacacacagagatacacacatatatacatgcatactgcatgggtatgtgtgtatgtatatattatgtcatacctgcaatatatgagagaaggtggggaggcagataagatttaggtgttgaaaatcttaaaagtaaattctagtagaattaaagatagattagttttccmaatcaccacatcaggtacaagcaaactaatcgtagtcctcttaataaaacatatagatttttaaaagataacagggcagcctacaatatagaatgtcaaatataaaataataaaatattaactatatggtataattaagtataaatggtttagcttcccacttataaagcaaaaactatgcatttgtattttaaaaatcaacaacattaagttataagactgataactaaaaaaaaaaaatccagaattgggcaaatgtaaagcaattctgaacagaaa

SEQ ID NO: 641518 - DNA, 576 bp, Homo sapiens
agtcaggctaagacaaaaaagaaggaagacaaatcactaatatcagtaatgaaaaagaggatatcactgtagtctcatggacattaaaaggttatacagcaatattatgaacaactctctatgcccaaaatttgataacctatgtaaaatgaaccaatttcttgaaagataattctcacagaagaagacatagattatctgaataggcctatatctattacagaaattgaaccaataattaataacagtttcaaacagaagcaccaggcccagatgggttcactggtgaattctaccaaacatttatgaaagaaattatacaaattctccacaatctcttccagaatacagaagcattgggaatacttccaaattctttgtgaggccaacattactctaatactaaaaccagacaaaaacatcacaagaaaagaaaactatagccyggtatttctcatgaacatagatgcaaaaattctcaacaaaatattagtgaattgactccgacagttatttaaaaaaatacaccataaccaggcggtgtatattatcccaggtaaggcaagactggttcaa

SEQ ID NO: 641519 - DNA, 582 bp, Homo sapiens
gactttgccaaatggatatgaggggtagacttttggggcagaggaatagcatgagtaaagttatggaaatacaatttttcagccttttggagaacaggatatcatgtgatggtgctgagttgcaatgtgagtggacagcagatgaaaagagttccaagaagagtgctgcaatagacagactggggtcggtagccaggaagccttgaatgccctactaagaattttggacctaaatccatctaaaacacaaaagtgacatgctyacactggtgttttacagagaaaaaaaagaagatgcaaaatactaagtcggagtttctctagaccactatagtccatagacctttttcttttttattctgtgttttcaaaaatgactttttttcaagaattagcttgcatagcttttgggaacccagtctttatgactgaagcaattcaccctgttaagcagatttgcatttaagttgaatttaaatagagttgttctaatcatgttttagagtagggtcatatgtgagcaataaatttgagatgtgatttatgtacactcaaaattaccaccaaatattttattaataa

SEQ ID NO: 641520 - DNA, 659 bp, Homo sapiens
ttaatcccttggaaacagttccctatttcctatccctagaggcaaccactttcaatgcttttaacagattcaattggtgttttcgttcagatctttaaatagcacatttctttgctactttgtgatatttttaagttttcatttttttacacacctctccacatatcttctcgttaggttagtatcgtttatgttattacrattgtgcgtgtgctattgataatctaatcatggaatatacttgattttctttcttgcatagctcttcgttcctcttgtcattaagaatcatctaatttattaatcttattatttagtttactatggtattatcataattaatcctcaaactccctctagttgtataaataccctctaagacattaactcttttatgttctggaataaatctcccccacagtttggttgatttccaggttcactgtgtagtgaatgtcctgggaatatatctgtaccatgactctggggtcctttttgcctctctgtcgggtgagagccccgttcctatgtactgtgcttacttttcttagttgaccgctctggcttggttctccattaattacctgagaaagactacatgggagatgaggttttgagaaatttctgctctgataactgtcttatgaagtgagttaata

SEQ ID NO: 641521 - DNA, 568 bp, Homo sapiens
atacactttcactgatttcccrgtattcaatatggaatctgcattcagttgtgtgtggtgttccatagtgcagaaaataaatctcccatctttttctaggctggtggagaggcagtcatctaactgggcagaatgggaagaggaaccaggtgtatacctagtttttaaggagactttcatcctatatttagctgccattgtcagaagtatctggtggtgttaattcctgagcctcttaaatcccatggtgcaaaacaaattgtttcttggcttttctcactgagtgtttgaattcagctttttcagatctgagaaagcagtcatcactccttcatctgcttctaagttttcaaaattttgttgagttacaattctcacagcctttataggtatataatccttaaaaaatggaaaaaaagctcttaaatatataactttaatgaaatttcaagaaggagcagatgaaattatgtgcatttagccaaccatgtttatttggaaacttgtttatagagaatttttttgttttgcctaattaccagcttctctgttagatgtctgaaagtct

SEQ ID NO: 641522 - DNA, 568 bp, Homo sapiens
atacactttcactgatttcccggtattcaatatggaatctgcattcagttgygtgtggtgttccatagtgcagaaaataaatctcccatctttttctaggctggtggagaggcagtcatctaactgggcagaatgggaagaggaaccaggtgtatacctagtttttaaggagactttcatcctatatttagctgccattgtcagaagtatctggtggtgttaattcctgagcctcttaaatcccatggtgcaaaacaaattgtttcttggcttttctcactgagtgtttgaattcagctttttcagatctgagaaagcagtcatcactccttcatctgcttctaagttttcaaaattttgttgagttacaattctcacagcctttataggtatataatccttaaaaaatggaaaaaaagctcttaaatatataactttaatgaaatttcaagaaggagcagatgaaattatgtgcatttagccaaccatgtttatttggaaacttgtttatagagaatttttttgttttgcctaattaccagcttctctgttagatgtctgaaagtct

SEQ ID NO: 641523 - DNA, 568 bp, Homo sapiens
atacactttcactgatttcccggtattcaatatggaatctgcattcagttgtgtgtggtgttccatagtgcagaaaataaatctcccatctttttctaggctggtggagaggcagtcatctaactgggcagaatgggaagaggaaccaggtgtatacctagtttttaaggagactttcatcctatatttagctgccattgtcagaagtatctggtggtgttaattcctgagcctcttaaatcccatggtgcaaaacaaaytgtttcttggcttttctcactgagtgtttgaattcagctttttcagatctgagaaagcagtcatcactccttcatctgcttctaagttttcaaaattttgttgagttacaattctcacagcctttataggtatataatccttaaaaaatggaaaaaaagctcttaaatatataactttaatgaaatttcaagaaggagcagatgaaattatgtgcatttagccaaccatgtttatttggaaacttgtttatagagaatttttttgttttgcctaattaccagcttctctgttagatgtctgaaagtct

SEQ ID NO: 641524 - DNA, 391 bp, Homo sapiens
ttctttggctgtctctattaaacacagttttgaaggtgctggtcattttgaaaacttgggcatgactaaagaaaatgaaatgtggaagttctatggcctttgttctttgggaataggtcatctattctcagtaagtatgtaggagatcccagtaggaattgggggcaaaaatacaggaagacagttcgttgttggcattatgatatcatttccacatttcatggtttagtttcagccacatccaaattaacttgcaactgctcagyagtgacatgtttgttcatctaatgtctacattcacaatctgagtttctctacttaccagttctatgatcttaggaaagttatataaagtactgttgtctaagtttcttcattgtaaaatgagcaa

SEQ ID NO: 641525 - DNA, 540 bp, Homo sapiens
atctgagagaattcacaccaattagtattgtttcagaaactgatgtcttatgtaatgcttataaaaaggcatgttaactrtttacttctaaccagatttagtcaagtctatgaacaataccatgtctgcctagaaaagcttttctatatttaacacttaaaaagacttagttctgctgagagcagtgcctcatgcctggaatcccagccgtttgggaggctgaagcaggcaaatcacttgaggtcaggagttggaaaccagcctggccaacgtggtgaaaccccatctctattaaaaatacaaaaattagctgggcatggtggggcacatctgcaaccccagcttctcagtagctgaggcaggataatcgcttgaagccgggaggcagaggttacaatgagctgagatcaagccactgcactccagtctgggtgacagagcaagaccctgtctcaaaaaaataaaaagtgaaaataaaaaagacttagttcaagttgtctggttattcttgtccaactcccactgtaaatgtttcagtta

SEQ ID NO: 641526 - DNA, 599 bp, Homo sapiens
tatctacctatttttactctctgctatttgttcccwcttgaatataagctccaaaagatatcaggaaccttgcacaggctacagaggttgcacatggcagacatttggctctgcagctcatgcttttaaccagtaatctacgtgggcccatgaagcttatcaatgactccatcattgccatttctaactttacttacctttcaacaggattttgacacgttgaccctttatcctttgaatgttgcacttctcttggcttctgtgacacccttctctctctctttttctacattccagctaattatcttgtcatcttcttttgacagtttaaatattggtggtccccggttttgtcatcatcatttttctgtgctttctctacagtcctcttcctagcctagtcctcttgatcttagtggcatgacacattacaggatcacgatcagttatagcacgtgtcaaaactactcactcataagaattgttataaggatttgtgaaaattttaaatttttaattaattagactcacctcaaatttaccattataagaatgtcacacttatgcatttatttttcaatagtgtgtacctacttgtg

SEQ ID NO: 641527 - DNA, 599 bp, Homo sapiens
tatctacctatttttactctctgctatttgttcccacttgaatataagctccaaaagatatcaggaaccttgcacaggctacagaggttgcacatggcagacatttggctctgcagctcatgcttttaaccagtaatctacgtgggcccatgaagcttatcaatgactccatcattgccatttctaactttacttacctttcaacaggattttgacacgttgaccctttatcctttgaatgttgcacttctcttggcttctgtgacacccttctctctctctttttctacattccagctaattatcttgtcatcttcttttgacagtttaaatattggtggtccccggttttgtcatcatcatttttctgtgctttctctacagtcctcttcctagcctagtcctcttgatcttagtggcatgacacattacaggatcacgatcagttatagcacgtgtcaaaactactcactcataagaattgttataaggatttstgaaaattttaaatttttaattaattagactcacctcaaatttaccattataagaatgtcacacttatgcatttatttttcaatagtgtgtacctacttgtg

SEQ ID NO: 641528 - DNA, 583 bp, Homo sapiens
cttcaggtttagctttggagttgaaagaaaaaggtataggtatgggtcagggacacagttacataacttgatggctctgttcagctttgcctgttggcatgagtttgtgagggaagcttggattgcggatattggcttttctttcctgtgagattttccccaagggcaagtggacactgtttctgtccacacttgaggtatctgcttgggtaggaaacttacagttttagccttgctcagygtctgggagcagtttatcaattcagaggccagcgccctggcttcccttagcatttagaataaaaataaaattcctccttctggcttatgagggcattcagcatctggtccctggctcctcacagctgacacctctctttcctctcaccctgaatccctttacctcagcctactgggtccctgttattccttcagcattgttgttgcctcagccacaatgctcatttctttcatgtctctactcaaatgtctcctcatcacagaaatgttctttgaccaccctatctaaaatagtacgcttagtacttcttagcccacaccaggcttgatttttttcttcaca

SEQ ID NO: 641529 - DNA, 616 bp, Homo sapiens
agttttccatatgcagaatttatgttccaggaccacaatgtggcccctaaggtaatgtaatataacgaattatgttatcactgggcctatcatgcatacaaattttaaaaagaaaacctttctgctacaactcagaaactcaaggtcttctattttggcaatttctcggcagaaagaaaatatctcaagtaaaattctcccggtccccaatccaatttactggctccttacagatgaatcagtgtgaaaggtgtgcaggggggttgtttcctctaattaactttcagtgggtgaaaagtacactaatagcccacagggagaagttgakcccacgctgttcatcagcaactcaaggaactgattgaagtaaggctcataaaccctgttaagtgatatccaccaaaagcagaggcagcttgacttcaaaaataaaaccatcagtctcgtcctttccttccatgaatctatcacctgaaggaacacatgcttttcctgataaaaccctgctattcccattcttctgactgaaataccagtctctcccagtatccaccctccccccggcgacctctcatgatctattaaaatcactgcagggccaggtgaggttgtgcaa

SEQ ID NO: 641530 - DNA, 580 bp, Homo sapiens
tgcttgtagggtaactcagcttctatgtgaagaaaagcagtaagaatccttcatatcctaatgggaaaatcattgtatttttatgagggtgagatatatttggtgtagagattatgcaaatctggtgatcaaggttcttattattaagccaaagggaagacagtgttttagatggaagaataattagtaggtttgactacmaaacctatgcatttttccctcaggcatgaccacattattatccatttcaacagatatattcttgaaagaaggtttttttttcttattcactaaaacagttacttattttttttttcatatttgatagcagctttttttattggttacaaaacctaagcccatatacaaaattaggaacacatttagatgcctcttttgaaagaacattttgtctttttaaactgagtttaaaaaaaataaaaacaatgcaatttttaaacactattttgaaaacttaaaagtgcagcaatatacttagtttcctttatctacgaaatggtgcaattccaattcaaaactggtaaggtcacaaattgaatcaaggaaatgcatacaaatg

SEQ ID NO: 641531 - DNA, 580 bp, Homo sapiens
tgcttgtagggtaactcagcttctatgtgaagaaaagcagtaagaatccttcatatcctaatgggaaaatcattgtatttttatgagggtgagatatatttggtgtagagattatgcaaatctggtgatcaaggttcttattattaagccaaagggaagacagtgttttagatggaagaataattagtaggtttgactaccaaacctatgcatttttccctcaggcatgaccacattattatcmatttcaacagatatattcttgaaagaaggtttttttttcttattcactaaaacagttacttattttttttttcatatttgatagcagctttttttattggttacaaaacctaagcccatatacaaaattaggaacacatttagatgcctcttttgaaagaacattttgtctttttaaactgagtttaaaaaaaataaaaacaatgcaatttttaaacactattttgaaaacttaaaagtgcagcaatatacttagtttcctttatctacgaaatggtgcaattccaattcaaaactggtaaggtcacaaattgaatcaaggaaatgcatacaaatg

SEQ ID NO: 641532 - DNA, 566 bp, Homo sapiens
ttttaattgctcatctctggaccctctccaaggcttgttaagcctttattgagctgtggtaaccagagctgcacagttttgtgtcttgacatagtgcagttggtttcaaggaaaggctaatatgtttggtcttatgtccaatattcttgatcaacattaatgttatttactggaggaaaatcagtytcatttttatatcactggaacatccagcaatgcaagccttgctggcactggggaggtctaaaattttctaaatagagggaaatgaataagtagtggattgtttgataccatgtaggagaaagggaaaaataaacaaaaagctgcatttctacaaaccctcaatctgttctgagtacagaaagtcatttgtttggaatttagatccaggttgatttggttgtcaattctagttttccaaatgtgtgactttggacaagtcactttaatattgctgactgtcatttctgtcattggtgaaatagaaataataatattccgcttgacaggattaagtgtgactcacgtgatttcacttattaaggctttggcggaatatttag

SEQ ID NO: 641533 - DNA, 587 bp, Homo sapiens
atgattataatgttagtgtccttcacattggaagattttccagctatgaaggaaatgacagtgatggaactcatattgacctttagtcgctgttaaaatatctctaaaggacagactcatggattctcataatatcagttaccagatggcatttctagggactctgtctctgccttctggaggcctaccctgtagcctccagactctctagcacccatgctgacatctacctcttcacctccgggttctaacacagccctaaagttggtgcttatccacaatgaatcratcaaggcttggcttctgactggaatgggcttggttgttttttcccaattttatcttttggaacagctagaaaggaggaccgggttgctcagtggtcctcaaccttcatttctttctggaagagatttttaaaatgcatatgtctggacccccccatagagattctgatttagttgatctggtctggtctagggctgggcattggttcattttaaaaaattccccagatgatttaatatgtggccaagaagactggggtgctagtccacactctggattctcaaagtgtggctcctaga

SEQ ID NO: 641534 - DNA, 580 bp, Homo sapiens
gctctgtcccagggagatgggggttttatctttaagcccacgactggggctgctgcctttttttcagagatgccctgccyagagaggaggaatctaaagaggcagtctggctacagtggctttgctgagctgcagagggctccacccagttggaacttccctgcggctttgtttacaccgtgagggtaaaacctaaaaccacctaccaaagcctcagtaatggcagacggcattccccccaccaagcttgagcatcccaggtggacttcagaccgccgtgctggcagcgagaatttcaacccagttgcccttagcttgctgggctctgtgagggtgggatccactgagcacttggctccctggcttcagccccctttctagtggagtcaacagttctgtcttgccggtgttccaggtgccactgggatatgaaaaaagaaactcctgcagcaagctcgctgtctgcccaaatagccgtccagtttatatttttcttaataccattcctcaacaaagtagatggttgtctctgtgctttaaatatggggaaatgggggctcagatgtgagaaatgtactga

SEQ ID NO: 641535 - DNA, 580 bp, Homo sapiens
gctctgtcccagggagatgggggttttatctttaagcccacgactggggctgctgcctttttttcagagatgccctgcctagagaggaggaatctaaagaggcagtctggctacagtggctttgctgagctgcagagggctccacccagttggaacttccctgcggctttgtttacaccgtgagggtaaaacctaaaaccacctaccaaagcctcagtaatggcagacggcattccccccaccaagcttgagcatcccaggtggacttcagaccgccgtgctggcagcgagaatttcaasccagttgcccttagcttgctgggctctgtgagggtgggatccactgagcacttggctccctggcttcagccccctttctagtggagtcaacagttctgtcttgccggtgttccaggtgccactgggatatgaaaaaagaaactcctgcagcaagctcgctgtctgcccaaatagccgtccagtttatatttttcttaataccattcctcaacaaagtagatggttgtctctgtgctttaaatatggggaaatgggggctcagatgtgagaaatgtactga

SEQ ID NO: 641536 - DNA, 455 bp, Homo sapiens
agatctgaggaacaaaagactaagccaactatgccaagtttttactctttagtcatggtatcattgtctgtattttactcacacacaccaactggaccacaaagagtttgccaaacctctcctaagtgacagtgctgggatttgtatctaggtctatctgctgccmaagctttgtcttttccattcagtcttagatacatctggaatccattttctttctttttttaaaaataaattttgttgtgtataagttatacaacatgatgttatgggatacacatagatcataaaaaggttacaatagtgaagcatttaacatgtccatcatctcatatacttacccattcttttttttgttttgtttttgtggcaagaagagctaaaatctatttatttagcaggaatctcaaatacagtacaattttatttgattacctatagtccccctcatgttg

SEQ ID NO: 641537 - DNA, 634 bp, Homo sapiens
agttatagcccgaagaaagatttaagaatctataagctcttaaagtggtttacagccagagtgggggtagttccaccaagggtaatagaattttctgtatacccaaagactcagatctccaatactaaagtttctgcccttggcaaagatctcagcacctgagcttagcagagaatcagcagggcttttgacctccaataactttttgggctagatagtaaccattgtgaagaccagatagccctccccaaaacttttgtctaatacccccagaactgtagtgggatcctactgggcacaaaggagtccaataatgaatgagatttagttatcgattctggcacataaygggtttagatttatatttattttgacttagaaaaatgctgtttgaactcaagaactgtgttgtattataaataacatgtctttcagcctaaagcacagattttcagattttacattctaggaaccatcttgttcctagatatgtgttatacataattacttcttaaccccacattaactataaaataaatggtacatatgtatatattatatatatatatatataaaatacataattacttcttacccccatattactatcaaataaatggtttttttcaattaa

SEQ ID NO: 641538 - DNA, 634 bp, Homo sapiens
agttatagcccgaagaaagatttaagaatctataagctcttaaagtggtttacagccagagtgggggtagttccaccaagggtaatagaattttctgtatacccaaagactcagatctccaatactaaagtttctgcccttggcaaagatctcagcacctgagcttagcagagaatcagcagggcttttgacctccaataactttttgggctagatagtaaccattgtgaagaccagatagccctccccaaaacttttgtctaatacccccagaactgtagtgggatcctactgggcacaaaggagtccaataatgaatgagatttagttatcgattctggcacataacgggtttagatttatatttattttgacttagaaaaatgctgtttgaactcaagaactgtgttgtattataaataacatgtctttcagcctaaagcacagattttcagattttacattctaggaaccatcttgttcctagatatgtgttatacataattacttcttaaccccacattaactataaaataaatggtayatatgtatatattatatatatatatatataaaatacataattacttcttacccccatattactatcaaataaatggtttttttcaattaa

SEQ ID NO: 641539 - DNA, 623 bp, Homo sapiens
ccactttcatgggacagggcagcactagatccaccaggtaggaatatttagggacaaatgatcaggatgtaaggaagctgaagttaccaccaggcagtgctcattctggtgggcaaatccagggtccaagggaatcaataattaatgatcatagtccaggtaaactttggcaatgacatgaggaggttcaaggcgatggaatggatcaccatgaagaagactttggagttggaaatattcaatgaaccaagcagattttggcttyaagatggtctgtaagtgagtagttatgttacatacactaagatgaagttctggaacaacttcaatgatagagcttcagactaccggaaaatcaagggcaagaacagattaatgttcatgaaagaacagggttgtgttcattgaatgcacacaggcacacacagaaattaatggacacatatggagtgtttacacgcaagactgtgtcacatgtttacacacactgctccatttaattcttgctaaatctccaaaggacattcattattctatttatagatgagacaacagagacttagtagctaccaatagtcacacagttagtaaatggcagaaacaagattcgaactcaggtctga

SEQ ID NO: 641540 - DNA, 652 bp, Homo sapiens
agaagcagttggtgctgagattcctctactgaagtaaagtcactggagttcagcagggagctgagccaccacttccatgcagaaacatggagactcaataaggcagtgcaaggcagggctatttggccctcactttctcccaaatccattgttagtgcagcccatcagggaaytggagctctacctccacccagcattgacaaggtggtataaggtggggctaacattatacttcgtggtgaaagactgaatgcttttctcctaaatttggcaacaaagcagtgatgtctgcacttaccactcttgggcaacatagcactggaagttttagccaaaacaataaggcagcaaaaagaaataagcttgcagattggaaaagaacaaatcaagctgtatctatttacagaaggcataattttctatgtagaaaatgtcaagaaattataaaaatgttgtagaactaataaatgagttcatcaaagtctcaagttacaagatcaatacagaaaattaattttattcctatatactagtaactgatgtgtagaaactagaattaagcacctactatcatatataattgctccaaagtaaaatgaaatgcctaagaaaatgaaatatctagttaaaagtctaacaaaacatttatagg

SEQ ID NO: 641541 - DNA, 638 bp, Homo sapiens
agcagttggtgctgagattcctctactgaagtaaagtcactggagttcagcagggagctgagccaccacttccatgcagaaacatggagactcaataaggcagtgcaaggcagggctatttggccctcactttctcccaaatccattgttagtgcagcccatcagggaactggagctctacctccacccagcattgacaaggtggtataaggtggggctaacattatacttcgtggtgaaagactgaatgcttttctcctaaatttggcaacaaagcagtgatgtctgcacttaccactcttgggcaacatagcactggaagttttagccaaaacaataaggcagcaaaaagaaataagcttgcagattggaaaagaacaaatcaagctgtatctatttacagaaggcataattttctatgtagaaaatgtcaagaaattataaaaatgttgtagaactaataaatgagttcatcaaagtctcaagttacaagatcaatacagaaaattaattttattcctatatactagtaactgatgtgtagaaactagaattaagcacctactatcrtatataattgctccaaagtaaaatgaaatgcctaagaaaatgaaatatctagttaaaagtctaacaaa

SEQ ID NO: 641542 - DNA, 541 bp, Homo sapiens
ttgggtggaatttacacatgtgttttttttttaaagcagacttacttagatataatttatataccacaaagttcatccatacagcaactttttttaaaaaaggtttcaggataattctgatgtgcagtcaagcctgagaacccctggagaaagactagcaggaggctcttatatactcccattgggaaacaaagagatctgattttcagtagtgtcaatgaatgaagtctgtacggatgtgtgaggctaagatgtagagagaaattcagagaattctctgaggttgaattaacagattttaaaaattaatttkgcatgggtagagaactaattcaatagtctaggattatgtcagtttcatttgaccgactagatggatagtgacacctgtgggctcacttccctctttcctgtgtagggctcatttttattcagagattagggaaatggcaagaggcataaaatatttagactttcagattatttatgaaattcaacatagccaaattcagcaggagcaacaataggtatactacaccca

SEQ ID NO: 641543 - DNA, 575 bp, Homo sapiens
ttgtctgttgcatacagaaaatttattctattttatgtttaatgcctatagatgctgaaagtcctatagacactaaatatagttataccagaaatgataaaatcctttggcctaatttgagaggcaataattaggctaagtctagcttcctttttgcataatgtctgtttgaaaatcttctttattgaccctttttagactcattcagttattctgcaattataatatgagctaggtttagagctgggaggcactgaacatgctggacggtcaagacaacatgggggacatgacaagttactaaacacacgttaagaaataaaagaaggcctgccagccacctggaagaaacatacttttgcctatagtttgccatttgaagaaaggctartgtaaacaaagttttactacatgacttagggactgcagattggccatttcacatccttcaaatctgtaaaacatctacaggctgatctttactgatatattggccaaatattttattatagctttttaccccttttcctgagatctgttatgatacagccttcagctattaatgtatttcttgt

SEQ ID NO: 641544 - DNA, 545 bp, Homo sapiens
catatattgaagaatgatgttaggactgatgctgaaatcactgagaaggatgaccagagaagagacactttaataaatgagaggtcgtagtggagaggcacaggttgggggatgtggcaaaatgagcttcaaaggagaaaggggctttgctggagraaagggaagtagtcttgaaatgaaaatgggaaacaaaaagtattcaccctctttttctgaggttcaaagaattataaagaaaaatatggcctctgctgagtgggtggcagaagacccaattcttaactaagatggaaaactgaagaggctgttgtaagagttgttgctgatagagaattctattataaccattaggtgcatgggctttggaggaagacacattgggttcaaattttgatatttctgtttactagctatgtgacttcagcaagtgactaaattgttgaaaaattcaattttcttcacctgtgaaaggtgattgtaaaagaacatacctcaacacataagcttatttctctaaaccttagtttctttatctttaaaggaga

SEQ ID NO: 641545 - DNA, 642 bp, Homo sapiens
tgttggaggtatgaggtatcattacttttttctccacttctacacatttgactcagtaggggatagatatgggacagtgtgggaatcacagtcccacatctatctttgttctcttgaatcaagtgaaccaagatagatggttcttggctctctgggaccatcagaccccactgcagggctggcatcttctcacttctcagttgtaggagaaggtggaacaggtgatgcagagacctattgagatatttgctctrctgataatgtagaaatgggaagttttggggatcacatatgagtgtgggaggtccaagaaaaggaatggcttgtgccttgctggagccatggtctctggcaaacatgaaccaatcttcatcatgcttgccacatagacattcctcctcataagggcaaaagctattacttgggtacaaaagcaaagaaattcagagcaatcattcctctaccattccctcctgaagtctggagaagataaatgataaggactttctcccatcctcactattccacccccagaaatgctacgtattttagatgaactgttcatattgtttgtaaaagtagattggcagtactgttaacatgattattaactgcagtgttaggcaatgttaaaataacttc

SEQ ID NO: 641546 - DNA, 610 bp, Homo sapiens
cagtcactttctatcttgtgtctctaacytcttggttttcagaatccttaccactccgtcagaagatgggaaaagaataaaaggtcaaacacgagaggtttttagggaccattatgaaagcagcacctatcacttttgtcttgcattgaattggccagaactcagtccatggccacaccgaacaataaaacagaagctatgtgtgcccaggaagcaggggagaacacagatattgtttggttccagcagcctctgctacactgctgttgtaaataaaatgctacatgaataaaattagctgcattattgtttgtagaaaataaacctcatgtatttctgaaatggattctgcctgatacactgtaaagatctcttgtaggcctacacgtaaaaattactgtgaatatccagagtttaaataactctctgtttgagtaaactcatcccttccaaccgtgtcatcaccacttttctctggcttcaatcaaattaaagacagttgctttttatctaagcctctgatgctgccagttttaaggaaaattgagaaactgctttatgggtcacttgaagtagtacaaggaactcaatcattaaatatcttttgagt

SEQ ID NO: 641547 - DNA, 611 bp, Homo sapiens
tcatctttgtgtcccaaagcttatcatgtatgggttatttagtaaatgttcattgaggaaaacatgcaataaaatagttgtgaggattaagtgaaattacctattttgactgcttggcacatagtaggaactcagtaattacaaaatacctttctcttagacttacctttaggtatttatgttatgaaggggaaggttttaagctgtrctaagaaaattaagagtcaataaataaggatcctgctcaatgcacaggcactttagattcagtctctgtttggatgtgtctttgggcatcagaatagtgacagcaatcatctggtccaccagattcaaattattccatttaatacaaattgtttttttttgactcaaagaatgttgaaataatacagatatagtaaagtatgaccatatacctgcaagcccacccatatgacagtaataacagctaatatatattgagcgtctatatgtcaggcactgggctaagaactttacagcatgtatctcatttaaatcataccagttttctatgaagaaggcagaagtattgtctccatattatatgtgagcaaactgaggtgcagaaaggatgtctgaggcaatca

SEQ ID NO: 641548 - DNA, 608 bp, Homo sapiens
aatctctggccaggcttgtgtttgttagtaagtccttggcggttcaggtggcagatacactggtgaacattgatgaaaagaccaagctgaactgatctagttggtgagctttctatttgctattaagtagagttttgctctctcttcttttcacagtacatttcacagccatttctgaaaaagcccagctgtgccgagatggccactgaggggatacagtgtggttgcatggagttcagagacatttgagagcagctgagcaagccccacagccttcaaacactcattgaattgccttccagaagcatattctttcacctttgtgtgacatgagagggagcagagggaatggtaatgatctgaaatgacagacatgctgggctaggatgagctaatttacagggtagaatgcactctccaaattaacaacaaagagactaggtgtcccatgccctgtcctgaggcctttaatggagccaagtgagaatatccttaaccctgggtggagtggtcttaaaagaactattcgggtgacaacatcttcccccmcggaggttaagctgaggttgacatttatcttgtctgtccacagaagctgaacttctgaa

SEQ ID NO: 641549 - DNA, 437 bp, Homo sapiens
atctatctaatgctgagagtgggttgttcaagccccctatcattattgtattggaatctcttctctctctctctctctttctctttctctcttcagatgtagtaacatttgctttatgaatttgggtcctccagtgctggatgcatgtgtatttacaattgttatatatacttgctgaattgattcccttatcattatataatgagattctttgtctttcttttttcttttttttacttaatatctatttcttctgatataaacatagctacttctgctcacttttgatatctatttgtgtggaatatattttttatccctttacttttagatggtgtgtgtttttacaggcaatattagyttcttatgaacttcaggtagttgggtcttacaaaaaatccattcagcccgtccatatattttaactgggaaatcaa

SEQ ID NO: 641550 - DNA, 409 bp, Homo sapiens
gattttggtattgaagatgctgacagtagccagtggctctgtgaaggcaattttccaacctaccattcttggctactcctgggatattttacttggctgtgagatccccctgagaagcttctctttttctcacacaattcctccatcagcgaagtgtggtgggcagcacacagtgactatgattcctggagatggcactgggactgaacttatgctgcctgtcaagattatgttcagacatstgtgtgtgcctgtggactttgagggaatgtcagtgacctccacctctgcctcacatgaagaggaaattcataatgccatcatggcagttcattgaaaccgtgtggctttgaagagtagcgttaaaactgacgacaccctgccaccatcatacaaatccttcaacaac

SEQ ID NO: 641551 - DNA, 589 bp, Homo sapiens
tgtgcattcatagagtaaaactcttcatggcttatcagagaatacatacagggaaggtgtgagctgaacagaaattgtgggagtggcacagtgctaggctcaaccagagtggagagacttaatttaacacaccaggcataatttatttcatactatagaaagttctaatcttagtagtaatactatactagaaccaaarcaagggctattgtagatacattctaacaaaggctaacatcaggccttaaaagtataaagccaatcttccagtaaattaacaggctgtcagagcaaaattcaacatattctaaaggagtaaaataaaacatcctcttattgtagtactcattatatccagtataaatcttttaaaaaactcactatgctaagaaacaggaaaatgtgactctaacctggtgataaatagtcaacaaaaatagatactgagataacaccaatgttggaattagcagacaagggtgttaaagtatttattatataaattaaagtatctatatattaatacagtcataatgaaagaaaagatgagaaatctcagctgagatgtgaaaactattaaaaaatggaa

SEQ ID NO: 641552 - DNA, 596 bp, Homo sapiens
ctagaacataggaaaataaaggaatctctgcaaaatatttttgataagtaatacaggtgtcctcacttcattcatccactaamattttcacctataatgaacttcctctcagttttactgccagtagaattggcaacagtgacatagagctctctcaaagaattgagtataaatgaaaataaatgtgaatggcttaggctgaggaagccttagaaagattcagagtgtcacaaccttcaacaaggcataggagtagcaaaacaacaacaacaaaaagtatttatggtacccacccagaaatgatggagagagccccctgaaggagccttgaaataatttgtcagatacaaaagaatgtcaggaggaacaggtgtgatccaatgcccaagaatacaaagaaatcttagactaccacggatcttaacaggtgtcaatgtggtaaggacatcaaaggctggtggtttctatcatctaaacacttttgaatgatatgtcagccctgtcctacatccagaatgtagatattgccctgaagtaaaattatttctctcaccttatatgaaataaataattttgccatatattaaattaaattg

SEQ ID NO: 641553 - DNA, 584 bp, Homo sapiens
ttttagggtaggtaccaaaattgaactgaaaaatgaaacaatgtaattgttcagtattggtgcacacagcacagtgaagcaaatcttaataagtaaattgtttgtctgagaagcaagctatttgcccagttgagcaaccattatcctatgagaaacatttgcycagatgagcacactacttattcagatacactgatatgcaggaatatcatgaagcaatcagctaagttgtttattggcttaacattttcttggaatagttaagtcttgttgacacaggtatgctcagctttcaatcctcagcattaagctatatgatgcaggtggtcttacttcctggtaaagatgagctggatttgtctttatggaggaagggtcagtgtttttatggaataaggacattctaagcaagagagagaaaaaaaaccatgaaggtgatgaagaatgtatataaaatattaaaaataaataaattatttgttctttgctggatttgagtgaatagagaattagctaagaaagggagtttaggttacatagcacagaactaggaatcagagctctgttctctcaacaaggaggtg

SEQ ID NO: 641554 - DNA, 584 bp, Homo sapiens
ttttagggtaggtaccaaaattgaactgaaaaatgaaacaatgtaattgttcagtattggtgcacacagcacagtgaagcaaatcttaataagtaaattgtttgtctgagaagcaagctatttgcccagttgagcaaccattatcctatgagaaacatttgctcagatgagcacactacttattcagatacactgatatgcaggaatatcatgaagcaatcagctaagttgtttattggcttaacattttcttggaatagttaagtcttgttgacacaggtatgctcagctttcaatcctcagcattaagctatatgatgcaggtggtcttacttcctggtaaagatgagctggatttgtctttatggaggaagggtcagtgtttttatggaataaggacattytaagcaagagagagaaaaaaaaccatgaaggtgatgaagaatgtatataaaatattaaaaataaataaattatttgttctttgctggatttgagtgaatagagaattagctaagaaagggagtttaggttacatagcacagaactaggaatcagagctctgttctctcaacaaggaggtg

SEQ ID NO: 641555 - DNA, 586 bp, Homo sapiens
ggtgcaagcctcaagtcttggcagcttccacatggtattgggcttgcaggtgcacaaaagtcaagaattgaggattgggaacctccatgtagatttcagaggatgtacagttgttcaggaagaaggttgctacaggagttgggccctcatggagaacctctgctagggcagtgtggaaagaaaatgtggtgttggagtccccacacagagtccccatggggcactgcctaatggggctgtgacaagaaggccactgtcctccagaccccagagtaacagatccaccaacagcttgccccgtgcacctggaaaagccacagacacttaacatcaacaatgaaggcagctgggagaggagctgtacccttcaaagccacagaggcagaatagcccaaggccatgggagaaccacctcttgcaacagcatgccctggatgtcagccatggagtcaaaggagataaytgtggatgtttaaagtttaatagctgccctattggatttcaaatttgcataaagcctgtagccccttcattttggccaatttctcccagttagaatgggtgtatttagccaatgcctgcacat

SEQ ID NO: 641556 - DNA, 593 bp, Homo sapiens
gattaaatatacagtaatgcttcacttaacgatggggatatgctccaagaaatgtgtcattaagaaattttgtcattgtatgaatatcataagagtgtacttacataaacctagatggaatagcctattacacacctaggctatatggtagaccctattgcttytaggttacaaacctgtacaatgttagtgtactgaatactgtaggcaattgtaacacaatggtaagtatttgtctatctaaacatagaaaaggtacagtaaaaatatattataacctacaaagccaccatatatgcagtccatcattgaccaaaatgtcattatgatgtgcatggctgtatacatatttctgaaaccaaaccaaaggtttgcatgagagagtgctgggatccattaactgtgtccataaataatccaggacaggagagagatatcagacaagccatatatttgctatttcttgatcctaggcaacctaatttttaagaaggtaattgaaattgacatggataaaatgtcacttccaagactacatggctagttatcgtgtaacttaattttccctaaatctcaccagcctgtgcattaca

SEQ ID NO: 641557 - DNA, 632 bp, Homo sapiens
ataaatatcacctgagtagtagaggaacgtctcagtagactccaagccaatttcccgctaaatgctcagctgagaccatcttggctatattagcacagataagaaatayagtcatgcctcctgtgcctttacatcatacatttttctataaaaagctctgtgactgagcatgtaactatggatgtcaaaagaaaaaattagcaaaaaaaattaaacatttcttcaaaatggaaacagaaaatggctgaccagtatattggaatactgaatttttggtacccctacattttcagactctctctctctccctctctccttcagaaatctttttgttgagagagaacctgattttcagaattaaatgtcttccccctttttagtatgttatccatgcaattattaaatatttcaacaactagcttaaaatcattttcaaagagatattgactgttgtttgtgcttttgtgttagcttggagagatggcttaccatagagttttataactgagtgcctttttaccaatgacaaagacaaagcaataaaaagtatgtttattatgtttcaaaattattttgctgattcctgactcctctaaagcaacaaggtctaggttttggttatccttgtctga

SEQ ID NO: 641558 - DNA, 528 bp, Homo sapiens
gtgtcccatagctcccttatgctttcttctctcttttcatgctttttttttagttttgctcctctgattggctaatttcaaatgacctgtctttgggttaactgattcgtctgcatgactgactcttctgttgaatctctctgttacattatttagttctattattgtattcttcagctctaggatttctattttagttattttgtatggttcctatatcttcactaaacatgtcatttcattcatacattgtttcctgattttgtttagttgtctaacacattgttttctgattttgtttagttttctgtgttcgcttgcatttcattgagctactttaaaataattttttttattattttgcaggcaatttgtagatctccatttcattgggtttagttactggagctttaccagtttcctctggtagtatcattkgttttgttcttcatgatccatgtattgatgtctgtgcattttaaaaaacaaattccccttacaacctttacagactggatctttatctgc

SEQ ID NO: 641559 - DNA, 599 bp, Homo sapiens
ataacttcattttaaaattgaggaacatcacacactggggcctgtcatggggtsgggggagagaggagggatagcattaggagatatacctaatgtaaatgacgaattaatgggtgcagcgcaccaacatggcacatgtatacatatgtaacaaacctgtacattgtgcacatgtaccctagaacttaaagtaataaaaaccattatttattcctatatatgtttacaatatagtactttaaaaaataaacaatattttcaaccttgacaaaaaatttatccaacggacactatcactgatgccaataaaccagttctctcatctttgcagataaagtgtctagttgggttaatgttcttatttcctcattattgaaagtaacttgtaagaacctcatgaagatctgtgcagatagtacagatgcataacaaagagatgatgatttttgatttcacttttataaggggtttctccttcctactacacacacacacacacacacacacacacacacacactaggacttttagaaaatatctatgaagcaacagccatgccatgattgttggaataataaagaaaaataaatcaatctccc

SEQ ID NO: 641560 - DNA, 599 bp, Homo sapiens
ataacttcattttaaaattgaggaacatcacacactggggcctgtcatggggtggggggagagaggagggatagcattaggagatatacctaatgtaaatgacgarttaatgggtgcagcgcaccaacatggcacatgtatacatatgtaacaaacctgtacattgtgcacatgtaccctagaacttaaagtaataaaaaccattatttattcctatatatgtttacaatatagtactttaaaaaataaacaatattttcaaccttgacaaaaaatttatccaacggacactatcactgatgccaataaaccagttctctcatctttgcagataaagtgtctagttgggttaatgttcttatttcctcattattgaaagtaacttgtaagaacctcatgaagatctgtgcagatagtacagatgcataacaaagagatgatgatttttgatttcacttttataaggggtttctccttcctactacacacacacacacacacacacacacacacacacactaggacttttagaaaatatctatgaagcaacagccatgccatgattgttggaataataaagaaaaataaatcaatctccc

SEQ ID NO: 641561 - DNA, 599 bp, Homo sapiens
ataacttcattttaaaattgaggaacatcacacactggggcctgtcatggggtggggggagagaggagggatagcattaggagatatacctaatgtaaatgacgaattaatgggtgcagcgcaccaayatggcacatgtatacatatgtaacaaacctgtacattgtgcacatgtaccctagaacttaaagtaataaaaaccattatttattcctatatatgtttacaatatagtactttaaaaaataaacaatattttcaaccttgacaaaaaatttatccaacggacactatcactgatgccaataaaccagttctctcatctttgcagataaagtgtctagttgggttaatgttcttatttcctcattattgaaagtaacttgtaagaacctcatgaagatctgtgcagatagtacagatgcataacaaagagatgatgatttttgatttcacttttataaggggtttctccttcctactacacacacacacacacacacacacacacacacacactaggacttttagaaaatatctatgaagcaacagccatgccatgattgttggaataataaagaaaaataaatcaatctccc

SEQ ID NO: 641562 - DNA, 599 bp, Homo sapiens
ataacttcattttaaaattgaggaacatcacacactggggcctgtcatggggtggggggagagaggagggatagcattaggagatatacctaatgtaaatgacgaattaatgggtgcagcgcaccaacatggcacatgtatacatatgtaacaaacctgtacattgtgcacatgtaccctagaacttaaagtaataaaaaccattatttattcctatatatgtttacaatatagtactttaaaaaataracaatattttcaaccttgacaaaaaatttatccaacggacactatcactgatgccaataaaccagttctctcatctttgcagataaagtgtctagttgggttaatgttcttatttcctcattattgaaagtaacttgtaagaacctcatgaagatctgtgcagatagtacagatgcataacaaagagatgatgatttttgatttcacttttataaggggtttctccttcctactacacacacacacacacacacacacacacacacacactaggacttttagaaaatatctatgaagcaacagccatgccatgattgttggaataataaagaaaaataaatcaatctccc

SEQ ID NO: 641563 - DNA, 411 bp, Homo sapiens
acaggttaataaaagaattaacaaactataaagacctttattttctttatattactagggtcataagaggctctaaggatgggagaagaatatcagcactggtaatgtcctcatttgtaattttcaatgctatcacttacaaggtcaaatatagtagttggagtgattccactgaatgatacaattaaaaatgccaacttgttcttcccttcccagccaatttgaacttttcaaaatacaaagttgatcatatcccttttatgtccagcaattaaagtttttgatggtatagtagtctgcatgggctgctataataaaataccatagacctgatggcttaaacaacagacatttatttctyccaattcttgaggctggaaagtccaagatcaacatgccaatcagttcagt

SEQ ID NO: 641564 - DNA, 605 bp, Homo sapiens
gtttttgctgcataggcaagttccacagacgtttattgtgagcaacacattcatggaaaaaactgggcactgaatacctacattagtcatctctttttttcctcattcttaaaattgcctcaatgcagaataatgaagcatgggagccaggcatgacaatgtggccaaaatcatggatattagaattgatttgtctgggttcaaataggagacatggcccctaaaggaacatgggcaattaacattttaatggtaacttagccttcccatctatacattggggataatgtttctatctacctcttaggcttattgtaaattctaaaagatacagtacatggaaaaatattatctcagagcttgaaagtgtaactcctaaaaaaartatatattttttcttttttattgacacataatagttgcacatgtttgtaggagaaacagtaatatttctatacatgcacacaatggataatgataaaatcagggtaattagagtatccatcaactgaaatatttatcatttctttttgtcataaacattcaaaatcctgttttctagctattgaaaatatataataaattattatgaaccatatttactc

SEQ ID NO: 641565 - DNA, 505 bp, Homo sapiens
ctacatacatttttttagctatctatctatccatccatctgcatctgtctacatatgtacacacatamaccaatgcataacattgtactactactaacacacatgtacatacatgttttttaatggtatgcacctaactggattattgaggcagttatcagattaatttaatgaacagtattctaacccaagtctaatgctctataagaacaaattctcctgtacttaaggaataaaaactcatgaaatatgcagatcatataaaatccccaactgttggtatgaggcacagagaaaggtagagagttttcccaaagctacattaaagttcatggaagagcgttaaaattttttccaatgatcctctctagtttgcctctttatatatattaaacatttttgaaaataaatatacacatggagatgagggatcacagaaagtggggcaagctgcatgcccactggggagtgatgtggtatgtatgtgtgtgagggctgaaatgag

SEQ ID NO: 641566 - DNA, 505 bp, Homo sapiens
ctacatacatttttttagctatctatctatccatccatctgcatctgtctacatatgtacacacatacaccaatgcataacattgtactactactaacacacatgtacatacatgttttttaatggtatgcacctaactggattattgaggcagttatcagattaatttaatgaacagtattctaacccaagtctaatgctctataagaacaaattcycctgtacttaaggaataaaaactcatgaaatatgcagatcatataaaatccccaactgttggtatgaggcacagagaaaggtagagagttttcccaaagctacattaaagttcatggaagagcgttaaaattttttccaatgatcctctctagtttgcctctttatatatattaaacatttttgaaaataaatatacacatggagatgagggatcacagaaagtggggcaagctgcatgcccactggggagtgatgtggtatgtatgtgtgtgagggctgaaatgag

SEQ ID NO: 641567 - DNA, 505 bp, Homo sapiens
ctacatacatttttttagctatctatctatccatccatctgcatctgtctacatatgtacacacatacaccaatgcataacattgtactactactaacacacatgtacatacatgttttttaatggtatgcacctaactggattattgaggcagttatcagattaatttaatgaacagtattctaacccaagtctaatgctctataagaacaaattctcctgtacttaaggaataaaaactcatgaaatatgcagatcatataaaatccccaactgttggtatgaggcacagagaaaggtagagagttttcccaaagctacattaaagttcatggaagagcgttaaaattttttccaatgatcctctctagtttgcctctktatatatattaaacatttttgaaaataaatatacacatggagatgagggatcacagaaagtggggcaagctgcatgcccactggggagtgatgtggtatgtatgtgtgtgagggctgaaatgag

SEQ ID NO: 641568 - DNA, 595 bp, Homo sapiens
gttcctaattatttattattttattgtagggwtttaccccctcaatatcaagcttattttgcaatagacctctcattctaactttgagttcattgttgagtgattaaaataaggaacagaggtggtggttaggagacgcagagtcgttaaactaactgatttaactgctatctgtattggactttgcattttccatcctaatttttgcttccaaagacattttcaaaaactgtcatgttgagggaagaggtatggctttacaatacatcatttgttatctatctattttttcttatcaagtcagatgtcacaagtacaagctgtattcttccagtatagcttttagacttagtttgactctatttaatttgcttgcttgccaattattgttacgtggcgccagtaaatacaatcttataactaataatgatccatgttagttatggtaaaattctcagaggttctatagttcacattaggggttgaaagaagaacattttaattatttggaaagcagtcaaacaacaaatcaaacattaacagactaaaagcttctttataaaattataatttagcttctgggctttaataataa

SEQ ID NO: 641569 - DNA, 595 bp, Homo sapiens
gttcctaattatttattattttattgtagggttttaccccctcaatatcaagcttattttgcaatagacctctcattctaactttgagttcattgttgagtgattaaaataaggaacagaggtggtggttaggagacgcagagtcgttaaactaactgatttaactgctatctgtattggactttgcattttccatcctaatttttgcttccaaagacattttcaaaaactgtcatgttgagggaagaggtatggctttacaatacatcatttgttatctatctattttttcttatcaagtcagatgtcacaagtacaagctgtattcttccagtatagcttttagacttagtttgactctatttaatttgcttgcttgccaattattgttaygtggcgccagtaaatacaatcttataactaataatgatccatgttagttatggtaaaattctcagaggttctatagttcacattaggggttgaaagaagaacattttaattatttggaaagcagtcaaacaacaaatcaaacattaacagactaaaagcttctttataaaattataatttagcttctgggctttaataataa

SEQ ID NO: 641570 - DNA, 558 bp, Homo sapiens
agtctaacttggactgatcatcagaggaaaccatgaaaaaagattttgaaagaagaatgtgcaagaacgtaaacattggtagcatcttttgaaatcttaaaaatcatcttttttatttaaatatgtttkctaataaataatgggtttatgacactataataacacgtgtttcaaaagcagagattatctcaaaagtatcataattctagttctaaaaaaggagcacatttaggcatagggcaatcatttactatcttcatttaataaagttatgaaaatagaagttatagtagctcatggatgatgaattgaatggttatgacaaatgatgggttccatagagaggtaagactattgtatggttcacttccttctaaatactaagtcctaattttcagatatatgtcccacaaaaaccattagaggaaaccatctggaaactaaaactctcatttactcttgaaaggtttacagacatatgagacgtttttttaaaaagaggaagaaagtgagagagcgatgatatgtttattgtgcactgagtattagtggaaagga

SEQ ID NO: 641571 - DNA, 636 bp, Homo sapiens
catcatgaagggatgctgaattttatcaaatgatttttcaacattagttgagatgatcctatagattttgttcttcattctgttcagtatgatgtatcacattgatttaactacaaatgttgacttgcatcccaaggataaattccacttggtcagaatgaatgatcttttgtcatgtcgttgaatttggtttgctaatattttcttgaggatttttgcattgatgttcatgagagatattagcctatagttttctttttttggtgggtgtttgtctggttttgacatcaaggtagtactgacctcatagaatgagtgtgaaagttcgcccttctcctctattttttgaaatagcttcagtgggattggtattaattctttaaatgtttagtagaatttagcagtaaagccattggattctgggcttttcttcactttgggactttttattatggcttctatcttgccacttgttattggtctgttcaggtttttaatttcttcatggatcmatcttggtagatagtatgtgtcttggcatttgtttatttctcctagatttttcagtttattgggcatgtggtttctcatagtagtcactaacaatcctttgaatttctgcagtatcagttgtaa

SEQ ID NO: 641572 - DNA, 603 bp, Homo sapiens
catctctgattttctttgtttgggttttatgtctttctttttagttaatgttgctaaagttttgtcaatttcgtttaacttttcaaaaaactgagtttttgtttcctttatcttttgtattgtttccttcatttcaattttatttatttctgttctgatcttgattatttattttctaccagtaatttggagtttggttcactctcgcttttctcattctttaagatgtatcgttagattgtttattgtttttcttcttttttgatgtaggcacttgtatccataaacttccctcttagtactacacttgctgtatcccacaggttttggtatgttgtgtatcatgtgatttgttccaagaaatttttcaatttccttcttaatttctscattgacccagtggtcattcaagagcatatggtttaatttccatatatttgtatcactggtcattcaggagcatatcgtttaatttccatgtatttgtatcatttccaaatttcttcttgttatattgattaatagctttattctgttgtggtcagagaagatgtttaatattatttcaatttttgaatattttaagactttctttgtgaccta

SEQ ID NO: 641573 - DNA, 593 bp, Homo sapiens
tagccattgaataaaatgttctataaatatctatcatatcaatttggtctatagtgcatattaagtcaaatgtttgttgattttctgtctgaaagatctrtccaatgctgaatatgagatgctgaagtcttcagctattattgtactaaggtctgatatggtttgactctgtcctcaaccaaatctcatgttgaattttaatccccagtgttgggttagggacctggtgggaggtgattggatcatggggacagattttacctttgatgttcttgtgatagtgagtgagttcttatgagatctgattgtttgaaagtatgcagcacttccctcatcactctctctctcttctgccaccatgtgaaaacgtacctgcttccccttcaccttctgccatgattgtaattttcctgaggccttcccagccatgcctcctgtacagcctgtgaaacggtggatcaattaaaacttttttcttcataaattacccaatatcaggtagttattcacagcagtgtaagaatggactaatacagggtgcatctctctttttaactctaataatattcgctttatatgtcagagtgttccac

SEQ ID NO: 641574 - DNA, 580 bp, Homo sapiens
aaagaattggtaagagtgggtatccttatatcatttctgaccttaaggaaaagctttcaacttttgagtgttgagaattttcactatggatttgttatatatggcctttattgtgtttagtaacatttcctctgtacctaatctgttgagagttttattgtggaagaatgctgaattttgtcraatgatttttctgtatttactgaaatgatgatatgggttttgtagttcattatgttaatgtgatgtattgtatttattattttgtatattttgaaccacccctgcattcttgggatggattccacttgatcactggtgaatgatatttttaatgtgttgttaaatttggtttgctagtatttagttgaaaaattttgcactgatgttcatcagggtgttgtcttatagttttccttatttatagtatccttttctggctttcacattagggtgagactggtcttataaaatgcccttggaagtattctctctccttcaattttttttgaaataatttgaaaataattagcaaaagttttttttttttttaaatgtttggtagaattcagcagtaacg

SEQ ID NO: 641575 - DNA, 580 bp, Homo sapiens
aaagaattggtaagagtgggtatccttatatcatttctgaccttaaggaaaagctttcaacttttgagtgttgagaattttcactatggatttgttatatatggcctttattgtgtttagtaacatttcctctgtacctaatctgttgagagttttattgtggaagaatgctgaattttgtcgaatgatttttctgtatttactgaaatgatgatatgggttttgtagttcattatgttaatgtgatgtattgtatttattattttgtatattttgaaccacccytgcattcttgggatggattccacttgatcactggtgaatgatatttttaatgtgttgttaaatttggtttgctagtatttagttgaaaaattttgcactgatgttcatcagggtgttgtcttatagttttccttatttatagtatccttttctggctttcacattagggtgagactggtcttataaaatgcccttggaagtattctctctccttcaattttttttgaaataatttgaaaataattagcaaaagttttttttttttttaaatgtttggtagaattcagcagtaacg

SEQ ID NO: 641576 - DNA, 580 bp, Homo sapiens
aaagaattggtaagagtgggtatccttatatcatttctgaccttaaggaaaagctttcaacttttgagtgttgagaattttcactatggatttgttatatatggcctttattgtgtttagtaacatttcctctgtacctaatctgttgagagttttattgtggaagaatgctgaattttgtcgaatgatttttctgtatttactgaaatgatgatatgggttttgtagttcattatgttaatgtgatgtattgtatttattattttgtatattttgaaccacccctgcattcttgggatggattccacttgatcactggtgaatgatatttttaatgtgttgttaaatttggtttgctagtatttagttgaaaaattttgcactgatgttcatcagggtgttgtcttatagttttccttatttatagtatccttttctggctttcacattagggtgagactggtcttataaaatgccyttggaagtattctctctccttcaattttttttgaaataatttgaaaataattagcaaaagttttttttttttttaaatgtttggtagaattcagcagtaacg

SEQ ID NO: 641577 - DNA, 532 bp, Homo sapiens
tttttttttttttaaatgtttggtagaattcagcagtaacgccatcaggttctgggcttttttttaatgagatatattttattaccatttcaatgtacttattcattattgttctktgcagactttctatttcatcataatttaatcttggtaggttgtatatgtcaataaatatatcagtttcttctggattatctgtattgttgctatatacttttttgtaatagtcttttaagatcctctgtatttttgttgtataagttgtaatgtattcttgataatttctgattttttatgtcttctctcctttccttatttagtctagctttcagtttgttgattttatctttttataaaaacaactctctgtatttccattgctattataatctctattttattaatttctgttctaatttttatgatttccttccttccattaagtttgggcttagcttattcttgttctttctagttccttgaggtgcaacattaggttgtttatttgagatgtttcatttttttggatgtg

SEQ ID NO: 641578 - DNA, 593 bp, Homo sapiens
tcttctctcctttccttatttagtctagctttcagtttgttgattttatctttttataaaaacaactctctgtatttccattgctattataatctctattttattaatttctgttctaatttttatgatttccttccttccattaagtttgggcttarcttattcttgttctttctagttccttgaggtgcaacattaggttgtttatttgagatgtttcatttttttggatgtgtttattgctataaagttcctttttagaagattcgtatgtttccattttcatttgcctcaagagttttttaacttcccttttaatctctttattgagtcagtggttgttcagtagtttactgttcattttccatgtatttgtcaaatttctaaagtgtcttttgttattatttctagtttgataccattgtggtcagaaaagatacttgataaaatttcagcctcattaaatttgttaagacttgctttgtggcctaacgtctgatctctcctggagaatgttccatgaagaattgagaagaatgtgtaatctgcagctgctagatggaatgttaggtccattcagtctcgagtgtagt

SEQ ID NO: 641579 - DNA, 583 bp, Homo sapiens
tttatagctgcctagtactttagttcaactttctatttttactttatatttttatttatgtgtatatttaattttcactcttatattaaagcccaaggctccaatttttattttatgcctgtttgtttctcatcaccaaattgcacacaaatgtaaatcaatatataactacagggtgagatttattttgttttcactatatagtttgtagatttattttatgactatatgtgaataaatcaagtttatatgctaaatttatggacttttatttttatccattttaaatcaacttttatgtttcttaaaagaatccatgcrgatagtttaaaaagttaaataaacataagcttataaaaaatatagctgttcctctcattctcctactatcacctttggaaatttacctcccatccatttcttctcttatatacctttaaaattgtgagcgcatgcacacacacacacactcatcttttaaatatttaaatgtattgattgacacagtactatgaaataaaaggtaaaaatcttttacctttcttatacttttcactcttcttctttatccttttcaatatga

SEQ ID NO: 641580 - DNA, 583 bp, Homo sapiens
tttatagctgcctagtactttagttcaactttctatttttactttatatttttatttatgtgtatatttaattttcactcttatattaaagcccaaggctccaatttttattttatgcctgtttgtttctcatcaccaaattgcacacaaatgtaaatcaatatataactacagggtgagatttattttgttttcactatatagtttgtagatttattttatgactatatgtgaataaatcaagtttatatgctaaatttatggacttttatttttatccattttaaatcaacttttatgtttcttaaaagaatccatgcggatagtttaaaaagttaaataaacataagcttataaaaaatatagctgttcctctcattctcctrctatcacctttggaaatttacctcccatccatttcttctcttatatacctttaaaattgtgagcgcatgcacacacacacacactcatcttttaaatatttaaatgtattgattgacacagtactatgaaataaaaggtaaaaatcttttacctttcttatacttttcactcttcttctttatccttttcaatatga

SEQ ID NO: 641581 - DNA, 637 bp, Homo sapiens
tgtactcattaatgaattctatgcattttccttagtcttgtgcggtaattatgctatttctaatggagagaatgatcacttttccctgtcactacccaagagcatctctagccttctaattaccattcaatgtttactcaatggataatcattatcagattaactttcagtgatggaatgtgtaattaaaaatgtagatcaataaaatgctattatggctggatacattaacacttaaaaataatagcaattgaataaaaagaattatttgtttaaatttaacaaacacaactgttagaattttctcctagaaaagatatgagttgaaatgtctgataaatctatgataaaaactcacacaataattacttctgtataaaagaaactatgtataaaataggtcacaaagtttaactaacttccccagaatttgtggtggcttttcattgcaacccatgaccygaaaataggttaggcctcttctaaggctgtttcctgaagggttctttgtttcttctttccttgcaatgtggattctctcaggtcaagaccagaaatttactgaagtagctactcctggactccctgtttctgctcttggccctcttgtcttttatttgctgcacaggaaccagag

SEQ ID NO: 641582 - DNA, 608 bp, Homo sapiens
cataaactgattcaaatcagggatcaccaggttataggcccctatgaagattctaaattcctcagtaattctttaatggattttctctaatatttgaaatatcttttgttatagctctgagtttagtttttgaccaaagagtaaaagtagttacaagagccagatctggctgttctgaagatctagccttataagacattaagctaactgtctttttctcrttattctcggggcaaaaggatagttgagcaaaagagttagtaagttcagggcaagaagatagttgaataaatgggttaaaggttcaaaataacctttagagaaggtagaggaggataaagggagaaaaatgctcatagatacatcagttaccatataattttatttattttcaccctcaatttgttgtttaagttttagatgccttatttccctttagtaaagggtctttttagagagtcaattttgtaatcagtaagtcttttagaagactctatatccattacaaaatgcatcccattgatactggggtgttcaaggttgcttccttgccaatagattcaataaatgaatacttttatctcaaataaaacttctccactgcaact

SEQ ID NO: 641583 - DNA, 568 bp, Homo sapiens
ttgttttaggtcagtaagcctacagtttgtggaaatttgttcaaacagcaattgaaaaataatatgccagatatagcagcctctgatagcatgtgtagggtcagcctcaaagcagtttggtttgatatggtaacagataattgggaaagtagaaagtgaagtcttgctataagggaatagaaaatagagacacattgtgatggatgaacrggaaaataaatagtcttgggtttctttctggagtcaatggctgtctatatttgtgtttctaagtctctgagtctgtatgttgttttgggggagtcatttggaaggtgtgacactacttcagaggcaaacattgctgaaaattaatgggagatagctgagaacacacataacatggttgggactaaggaactgactcaagtgggttaggtagtgagcagttctaatatgcagggcctaaaaggaagtgatgacctctgataaaattcacttaggtggtattgagcaggctgactaagtatatacagcactctgacagaagtctcagctctggtaataccttaagatatgataagataaa

SEQ ID NO: 641584 - DNA, 616 bp, Homo sapiens
cctcagtcgaatgcttcttattctaaactgaaagctttcattagaaatagactacactgttcatggaagatttatgagtatatgactgaatcattaatgacagatatgatgatgatatgtgcagctttccaaaaggtacaagtgaaaagcatcgtttttattttcaatgtgccatgcatatatcatcaatttaattaaaattaaaaaacatgcttgtgaaggaattgctatagtattcaagttgggtgttcctatgaatacttagaggaattaaaagttataaaaaataaagcagtgactgaaaactatttgggttatcatttttaaaaataattaaaataaaataatttttctattaaaaataaatattatttcattgtttaaaatatttagaaaatactgattgacagaaaaagaagaaaatgtctcagctgcttaagattttggtattaaaaacttgtagaactttttaatraatatatatgtaggggccttcacagtttgttttaaattagagtacccacatccatattcatatcagggtggacatttttcatgttttgattgcccagtatcagcacatttttttctatatttgagggattccttaccttgt

SEQ ID NO: 641585 - DNA, 554 bp, Homo sapiens
ttatacatttccctgtaagcatggctactttcactgcatcccattgccttttgattgaagtgtttaattcatttgcatttaggataatttctcataagttagaacatgatcttctcttttggttttattttctattttgttcatgtcttctttgttcttctattccttcttcatggttttcttttaggataagtgaatattttcttgtacaatatttttattccttttataaatttttatttattaaaaatttttagtgtttcctttgggggttaccatatatatcttatcttaccctaatcctctacaaatttttactaatttaattccaatgaaatacaaaacattgttactatataggtctatttcttcttcctcctttatgtaacattattgatatacatgctrcatcagtatgtgttacacatccaacactctgttgtaaaaattattattttatataattttaattttttataaagctgagagaagaaataacatcaagcatataattgtagagtttgtaataataactttcttatttaccatatctg

SEQ ID NO: 641586 - DNA, 566 bp, Homo sapiens
ttttactaatttaattccaatgaaatacaaaacattgttactatataggtctatttcttcttcctcctttatgtaacattattgatatacatgctacatcagtatgtgttacacatccaacactctgttgtaaaaattattattttatataattttaattttttataaagctgagagaagaaataacatcaagcatataattgtagagtttgtaataataactttcttatttaccatatctggttttctttacttgttcctgtgaattctagttactctctggtgtcatttcctttttccaatatagctttgctctcacccacctccttttgcttttattgccaaatattttacatttctatatgtcacaggctcaacagtaaaattatatacacattactttatataaytgataattaaagaaattaagagatgaaaggagatgaaatgtaattacacagtctaattgtctacataattacctttaccagtactcttcattgcatatgtgtgcacacgcatggatttgaacatttctttttaggatcatttgctttctgaagaac

SEQ ID NO: 641587 - DNA, 635 bp, Homo sapiens
tttatatgtatatgtgtgtgtatacatacatatattttaatagtctagattttgtagataatcagtgacaagacaaggactcacatttagtgtgctggattcaaattccaggttctgtaactaaaagtggaatccattataggcatctttaacttatgcaaattcatgtcaaacactcagaaaacccaataaacatacaaataaaacaaacatgaagtgttagaatttcctgatttattctattattcttccaggctttggctcttactgtgtgaggtggagagaggggaagaaactgcagccaaaaygcaataaaaataaaaatactacattttgaggaatatttcaatctttcaaagaattattttgattgtgcaatgatttgacaatatgtatgaatttagaacttaaccttcatgtaatatgatttcattatattaaaaattcttcagactttaggataaacctataaaaactatgaatatctatctttaagatataaaaagtccattaaattgcttgaaaatatagaatacatatgtggtggagcccaactgttgttcaactaaaactacttctgctttctaccgtagagaaaataaatgtacctttaagtgctatttatactgtggtac

SEQ ID NO: 641588 - DNA, 590 bp, Homo sapiens
actggccattttagtcccctgggtttggcatgggagatagtgactacactggagtctgacttttttcctagagatttctccctgaaaaatacaagggctgttggtgagagcagacttgaggtgatgatagttggcctctggtctacaaagattttgtaactcctaggaaagtttctcataatcattcttaacttctcrgtagctagaaatttagagtagttgaaatctgtaggaatgaaatctgtaggaatgagagccaaaaatgtgactgacttgttaatcagttcttaaactgattaacaggctgtaatatagttttgtgaatttattgcaccgatgttgtaccttgtggtatatctgtgactattaaatgagtgttgttttcgcctctttaatattgctgtaaacagtggtgcctattgtagcatatgtttcattttttaaaaaaatatttcataagaaagctaccttaattttaccttactttaattgtaaataagcctgtcttcctatctggatttttttgtgtatacgtgttctactgcatgtatacacatttttttgtgtatacatgttctacataattaact

SEQ ID NO: 641589 - DNA, 590 bp, Homo sapiens
actggccattttagtcccctgggtttggcatgggagatagtgactacactggagtctgacttttttcctagagatttctccctgaaaaatacaagggctgttggtgagagcagacttgaggtgatgatagttggcctctggtctacaaagattttgtaactcctaggaaagtttctcataatcattcttaacttctcagtagctagaaatttagagtagttgaaatctgtaggaatgaaatctgtaggaatgagagccaaaaatgtgactgacttgttaatcagttcttaaactgattaacaggctgtaatatagttttgtgaatttattgcaccgatgttgtaccttgtggtatatctgtgactattaaatgagtgttgttttckcctctttaatattgctgtaaacagtggtgcctattgtagcatatgtttcattttttaaaaaaatatttcataagaaagctaccttaattttaccttactttaattgtaaataagcctgtcttcctatctggatttttttgtgtatacgtgttctactgcatgtatacacatttttttgtgtatacatgttctacataattaact

SEQ ID NO: 641590 - DNA, 602 bp, Homo sapiens
gtttatttttccccttctataacatctcttatttttgctagctataatataaaaaataattggcaggcaaaatcattcattctttgaaagaattatacatttttggatgactccagagatatagcagatacatagatagatagatagatagatagatagatagagcttaaatattttctgaaacaaatagaaataagaatgtttaaaatgtatgtacttaacataatatttatttgaataattgggaaagggaacatggtctaatttttgtatccataatacctaagaaagtgaggagtgtgagaatatagtaaatgaccttgaaacaaaaatataacaacaacaaaacgaaagcaaaatgttgaacaactggtattaaataaatgttacttcccaaatgtattattagtttttgtcttggcaaaatgacatgaacaatatcaaccataaaatattttcatgcmaattataagaacccattattgtaaaagcactttgaaaagtacaaagttgggagcacaggcaatgtattaaaaaaaaaagcaaagggaatcttcatgaggaagttggcttgggttctagttctgccaaaaatgggtagt

SEQ ID NO: 641591 - DNA, 602 bp, Homo sapiens
gtttatttttccccttctataacatctcttatttttgctagctataatataaaaaataattggcaggcaaaatcattcattctttgaaagaattatacatttttggatgactccagagatatagcagatacatagatagatagatagatagatagatagatagagcttaaatattttctgaaacaaatagaaataagaatgtttaaaatgtatgtacttaacataatatttatttgaataattgggaaagggaacatggtctaatttttgtatccataatacctaagaaagtgaggagtgtgagaatatagtaaatgaccttgaaacaaaaatataacaacaacaaaacgaaagcaaaatgttgaacaactggtattaaataaatgttacttcccaaatgtattattagtttttgtcttggcaaaatgacatgaacaatatcaaccataaaatattttcatgccaattataagaaccmattattgtaaaagcactttgaaaagtacaaagttgggagcacaggcaatgtattaaaaaaaaaagcaaagggaatcttcatgaggaagttggcttgggttctagttctgccaaaaatgggtagt

SEQ ID NO: 641592 - DNA, 560 bp, Homo sapiens
gttagtaataatttattgtatatttcaaaacaactagaagagcagatttgaatgtttccagcacaaagaaatgataaatggttgagctgatgcatatcccaattacccagatttgatcattacacattatatacttgtatcaaaatgtcacatttgcccctaaatatgtacaactattatggttctataaaaattaaaaacaaagtaaaggaatatccgatctggttttcttcacaagtctccaccaaatattttgtcagaaaaaaaaaattaaacaaaaaaaggcaactaagaaaattctaattcagattaaacttaattcaatatgctaagttaaacaatgatttcacataattctaaggaatkgtctcttgggaaaaaaaaatctccaattgacttcctctccccctgttttctccctaatacaatattcatatgttcagtttagaaagccttcagctccaactgttcaattatcatgaaattaaataaatattaagcatgaagttaggaggttggcaccttttggcatttcgtaagtcctcaaataacgtcacggt

SEQ ID NO: 641593 - DNA, 519 bp, Homo sapiens
aaaatgtccatttgtgtttcaaatttaaaaaataattcaatatataagaaagttttcaaagaactctatcctatgcaggggcccaggattatatcaaatttaatgaacagttgaaacaaagatggcagcaggggagaaagtttggattatcacaaataaatgaattgtttagtttactcaaagaaaaaggaaaagcaaaagagaggataggtccaaatgttgtcaaattaaacaacgacaaagtgaggttgattccccatgttgtctaaagtaaatgaccatatcaccttgactgcttatttgrgaataacaaaatcacatgctcatgaatgtatttatccatatgaattaagtattgaaaatattaagcttaccacaatatttcatgctaacaaataataggaaaatcagcgtgtttttcttttctctggtttttatgttacctttttgtgtttttatttgcattgacttaagaccttgtggatcccaccaaatgactggattgaaatgctaatggcc

SEQ ID NO: 641594 - DNA, 519 bp, Homo sapiens
aaaatgtccatttgtgtttcaaatttaaaaaataattcaatatataagaaagttttcaaagaactctatcctatgcaggggcccaggattatatcaaatttaatgaacagttgaaacaaagatggcagcaggggagaaagtttggattatcacaaataaatgaattgtttagtttactcaaagaaaaaggaaaagcaaaagagaggataggtccaaatgttgtcaaattaaacaacgacaaagtgaggttgattccccatgttgtctaaagtaaatgaccatatcaccttgactgcttatttgggaataacaaaatcacatgctcatgaatgtatttatccatatgaattaagtattgaaaatattaagcttaccacaatatttcatgctaacaaataataggaaaatcagcgtgtttttcttttctctggtttttaygttacctttttgtgtttttatttgcattgacttaagaccttgtggatcccaccaaatgactggattgaaatgctaatggcc

SEQ ID NO: 641595 - DNA, 426 bp, Homo sapiens
acaggtggtcctgatatggtactgctcacagaggctggatttactgcgcgggagcagagctggccaaaggagaactggcagatcttggcaactcttgagttatggtctggaaagggatgggctaaatctaatcttatgcttttgccttctgtgtaacagagtccttcaaagagaaagaaaaaacaaaacaaaacaaaagataaaggttgccataaaaaaaaaawatatatatatatatatatatacacacacacacacacacacatatgtatctatggttgggtgcaacgtaaacttcagtcgatgaatgtggagcttgaaaaggaactttgtgacaggaaatctaacaggggattgagtgctcaacttactctgaattctataattatgtgttctttataatcctcacaacatactataaaatag

SEQ ID NO: 641596 - DNA, 567 bp, Homo sapiens
atttggcacatacaaaataattttttaaaaaagaaagaacaattctaaaacttgtggaaaaatatttcgatacatatgtatkgacagagttacaatacaaaacttgggaaagtaagaatttaatttaattgtacataagttgaattccccaaataggtaagcctttaatattggcattaataggttgctctggggaaaaggaaaaaggagtaaaggaggaagaacaagcatgagaaacaaatgatactaattcccaagtcatttataatctagcaagggaacaataatactcccctcaataatttaaacatatgtatcacttaaccttttaaaattatcttgtcatgccatgctgccctatcaaaaaccatgagtgacaggccggacactaattatgtttttcccccagtttatgtatgagaaggggatgggaatcttgagagatgttacatgaggggcttaggtcactcagcagaaacacaggacagaacagagacttttcccctctttgcatttcaaaggttataaatggtatagaggaatttaacctatttggaatgttcacac

SEQ ID NO: 641597 - DNA, 596 bp, Homo sapiens
attatgtttttcccccagtttatgtatgagaaggggatgggaatcttgagagatgttacatgaggggcttargtcactcagcagaaacacaggacagaacagagacttttcccctctttgcatttcaaaggttataaatggtatagaggaatttaacctatttggaatgttcacacactcagagccttccctctgtctttgaaatctctcatctgtcctttcttctttctccaagcatgcaggatcttcagaatcttcagagaaacataaagacaactggggcagagtggtaataatttttgttttcgctgatgaaactaatgcaaaaatatttgggaaagcaatgaaagttgagtaaaaggaggaagtttgattattgatcatatccacagcagcagaggtagatctttttagagtctgctttacatcttgcagtaagacaaggatattggcaggtctgctgaggatacacaggatagatggtgttgctcctaaagttcatgtccacccagaacctcataacagggccttacttgaaaataggatgtttgcagatgtaattaggtaagatgaggccatactggttttggatgagg

SEQ ID NO: 641598 - DNA, 507 bp, Homo sapiens
taagttttgttcccttcgtgtatataactctctttaatattattaattcctgaataatacttgaagtaattattttttggggggagtttttaaagtcagtaaaataattgtaaaattgccatctttttgtacccctcatcttgatatgtaaaacaatttcaaaaatcaatatgtaggtatacttgaagtgtggtttggacactagttattgatccctacctgcggtccatgaagctctaacctagaagtgaatgggagactttctgtgctgattcaacaaatttcctgagtacaaaagaagccgttatcttgaaaagcatcctagatttctctcatttgytttccaacaccgatcattcagtcctatggattctactgcctgaatataagtcaagtgtaccagttctgcccatcactctgaaccaatgccattcaagccactgtttctcatttgggccaatgaaacttatctctagacctcctgtttgtcatccaccctacacagtg

SEQ ID NO: 641599 - DNA, 602 bp, Homo sapiens
gaggcaatcattagactgactaattccaaagcatttagtactgaagtttgtttcatggaatgacaacttgaaaatttgaggaggtttttcctggagatcttcaaaggctctttgcttcactaatctgattctttggtcaagtcattaatttttgcccataagaataaggggtgttttagctcataagaaactccacagtcaagaagcagcmacttgatgtgattaaacaagctctttccatgataggctcaactgaagaatttggataaaagctaaatctgtgattttcatatttcagtgattggctctcttatcagttcccattaagctgacttttttttttttttcataaaaatgaaaagaaaatgagggattgcagttcaagtttcctcttaatgtgatggctgccttctgtgagagtcatcaggaagtcagctcactcgaattttcaaaatcgactagaatccataattactggtgttgtctgagctccatagtcttttgaggtcatgaattctccttggcttttactcagtcagtgggattttctacacttcttttcttccttctccaaatactcccaatagactgaatttatggat

SEQ ID NO: 641600 - DNA, 602 bp, Homo sapiens
gaggcaatcattagactgactaattccaaagcatttagtactgaagtttgtttcatggaatgacaacttgaaaatttgaggaggtttttcctggagatcttcaaaggctctttgcttcactaatctgattctttggtcaagtcattaatttttgcccataagaataaggggtgttttagctcataagaaactccacagtcaagaagcagccacttgatgtgattaaacaagctctttccatgataggctcaactgaagaatttggataaawgctaaatctgtgattttcatatttcagtgattggctctcttatcagttcccattaagctgacttttttttttttttcataaaaatgaaaagaaaatgagggattgcagttcaagtttcctcttaatgtgatggctgccttctgtgagagtcatcaggaagtcagctcactcgaattttcaaaatcgactagaatccataattactggtgttgtctgagctccatagtcttttgaggtcatgaattctccttggcttttactcagtcagtgggattttctacacttcttttcttccttctccaaatactcccaatagactgaatttatggat

SEQ ID NO: 641601 - DNA, 602 bp, Homo sapiens
gaggcaatcattagactgactaattccaaagcatttagtactgaagtttgtttcatggaatgacaacttgaaaatttgaggaggtttttcctggagatcttcaaaggctctttgcttcactaatctgattctttggtcaagtcattaatttttgcccataagaataaggggtgttttagctcataagaaactccacagtcaagaagcagccacttgatgtgattaaacaagctctttccatgataggctcaactgaagaatttggataaaagctaawtctgtgattttcatatttcagtgattggctctcttatcagttcccattaagctgacttttttttttttttcataaaaatgaaaagaaaatgagggattgcagttcaagtttcctcttaatgtgatggctgccttctgtgagagtcatcaggaagtcagctcactcgaattttcaaaatcgactagaatccataattactggtgttgtctgagctccatagtcttttgaggtcatgaattctccttggcttttactcagtcagtgggattttctacacttcttttcttccttctccaaatactcccaatagactgaatttatggat

SEQ ID NO: 641602 - DNA, 614 bp, Homo sapiens
taccaattgtttaaaggaagctaaatacacaacatttccaagcttactgarcaatgggaatttagtttgttttaagtttacttttgtttatcatggagcagtgacgaggaattatttggaaattaaattgcagatgataggaagccattgggtgattagaaactagggtagatcatgcacagatttaaattttagcaaaatactcttacttcaatggcagaataattgttataaataagagcagttagagaggagagtagttaaagtatctaaacatcagtccaaacaaagaacaagaaaattctgcactaaggtagtgatagttgaaagaaaagagaatacatagagtgtttattgattttcagaacttctggtaaggttgaactatataggaactaagaggaccagaaagaaaatagaggaaaacaataatgtgtgcacttggacacattaaatttgatgagccttgggtatgaatgttcagcaggacatactggcattctgaagaggtgtaggtagaagtgaaaatgatggtagtagatgttattttctggacttagaaaggcaagagcctaaactactttgtgatttttgcagagtatttaggactctga

SEQ ID NO: 641603 - DNA, 614 bp, Homo sapiens
taccaattgtttaaaggaagctaaatacacaacatttccaagcttactgaacaatgggaatttagtttgttttaagtttacttttgtttatcatggagcagtgacgaggaattatttggaaattaaattrcagatgataggaagccattgggtgattagaaactagggtagatcatgcacagatttaaattttagcaaaatactcttacttcaatggcagaataattgttataaataagagcagttagagaggagagtagttaaagtatctaaacatcagtccaaacaaagaacaagaaaattctgcactaaggtagtgatagttgaaagaaaagagaatacatagagtgtttattgattttcagaacttctggtaaggttgaactatataggaactaagaggaccagaaagaaaatagaggaaaacaataatgtgtgcacttggacacattaaatttgatgagccttgggtatgaatgttcagcaggacatactggcattctgaagaggtgtaggtagaagtgaaaatgatggtagtagatgttattttctggacttagaaaggcaagagcctaaactactttgtgatttttgcagagtatttaggactctga

SEQ ID NO: 641604 - DNA, 614 bp, Homo sapiens
taccaattgtttaaaggaagctaaatacacaacatttccaagcttactgaacaatgggaatttagtttgttttaagtttacttttgtttatcatggagcagtgacgaggaattatttggaaattaaattgcagatgataggaagccattgggtgattagaaactagggtagatcatgcacagatttaaattttagcaaaatactcttacttcaatggcagaataattgttataaataagagcagttagagaggagagtagttaaagtatctaaacatcagtccaaacaaagaacaagaaaattctgcactaaggtagtgayagttgaaagaaaagagaatacatagagtgtttattgattttcagaacttctggtaaggttgaactatataggaactaagaggaccagaaagaaaatagaggaaaacaataatgtgtgcacttggacacattaaatttgatgagccttgggtatgaatgttcagcaggacatactggcattctgaagaggtgtaggtagaagtgaaaatgatggtagtagatgttattttctggacttagaaaggcaagagcctaaactactttgtgatttttgcagagtatttaggactctga

SEQ ID NO: 641605 - DNA, 551 bp, Homo sapiens
gaattcctgagtgacgcagaactgtatcaagtatttagtctaaattcattcactacttaaatatcatctagcaataggtgttgtagacatgttaatgggtattggacccattatagattttgtaagcaagtcttattctgagtttaattccattttattacctaactttctgtgattcatgtatttcttgatcttaattggttgtgagttgtttgaggaaggggtcttttccttcactggtcctgtgtctccaagattaaccagtgtctggcacctggggtggacctaataagtgtcagtggtattcatgcacactaagaatayggtacacatcatctgtatttttacctctttctgtcgtacatagaagtaatttattttcctggtattggtgaccaagaatctgtaagctacaaaaattttccctcaagaaagtgaaaggaagaaaaaaatgctgagcacttactgtctgttagattatgccaggggttatcaaatctatttttatatttaaattatcgcagcaaccttggcagggaggtattatcact

SEQ ID NO: 641606 - DNA, 647 bp, Homo sapiens
taattgagccatttcagtacatgtagtggttcaggattatattcaggatctttaaatgttttctttaatatacctcctttttaaaaaagtatctaagatttagggatttttgaagttctgaacttcattgataaggctattttttcctttccaacttttaagctcagtgggtacacgtgcaggtttgttgcatggaaaaattgtgtgtcatgggggtttggtgtacaaattattttgttatccrggtaataagcatagtacccaataggtgattttttgatcctctccttccctctaacctccactatcaagtaggccttgatgtctattgttcccttctttgtatccatgtatactcaatgtttagttcccacatataagtgagaacatgtggcatttgtttttttgttcttgagttagatcgtttaggataatggcctccacctccgttaatgttgctgcaaaggatgtgacttcattcttttttatggccacatattatttcatggtgtatacatacgacattttgtttattcagttcatcgtcaacattgagcttggttccatgtatttgctattgtgaatagtgctgtgatgaacatatgcatgggtgtgtctttatggtagaacaatttatattctttttg

SEQ ID NO: 641607 - DNA, 600 bp, Homo sapiens
gaatgcatctaaaatatatctgtgctaagtgatggaargtagacatgcaagaccacatactacaagactccgtttatataaaaggatcaaatctataatgattgaaagtaagttagtaatttcctgagactggggatgagaaaagaagtggctgcaaattgcaagagagaattttggatgttaataaaaatatttaaaattacattatgttaatggtggcaaaactgtatttaatatcaaaagataattgaattgtagaattcagttaaaaatgggtaaatattatagaatataaattatttctcaataaactttatatgtatatgtgtgtgtatacatacatatattttaatagtctagattttgtagataatcagtgacaagacaaggactcacatttagtgtgctggattcaaattccaggttctgtaactaaaagtggaatccattataggcatctttaacttatgcaaattcatgtcaaacactcagaaaacccaataaacatacaaataaaacaaacatgaagtgttagaatttcctgatttattctattattcttccaggctttggctcttactgtgtgaggtggagagaggg

SEQ ID NO: 641608 - DNA, 530 bp, Homo sapiens
atcttgttggcagctctaatgaggctggagaatataaggtttccaataaagttaattgttgcctttaatattctcatacatttatacatggtaaatctttaaaggagaaaaaacatttcatttcatccctgttaagcagccggtcctagactggatggagaccaacagtagagaygtgggctgggagcttgactgtcggaaaacttggattatgatctccaaacttcctcctaccaggaagagcatgagttttgagtccgagagctctgggtttccaggttggttttgtcacttcctgactttgaagctagggccaatcacttaacctctctgtctcagtttttcagtctctaagatgggatttatgataaatgtatataaagctcagtatagtgctggcatatatgtgatgttccatacatgtgaactgttatcattattttaagctattaaatagttattattttatccacttgctaggtgtatcattaattgtgaagtaaatcagggtagtgcagtcattgtatttg

SEQ ID NO: 641609 - DNA, 628 bp, Homo sapiens
gtgatcatggaggaatacattctggtgtcctatagcattgtagaatgactataattaacaataatacatagttccaaatagctaggaggaggatattaaatgatcccaacacaaataaatgytaaatgtctgagatgatgatatgctaagtaccctgatctgatcactatacatcatgtgtattgaaacattgttgtgtatcccatgaatatgtacaattattgtcaattaaaaaaacaaaattaaagaaaaaaagctgtaatcatgatataattcagccttctgccatttgtgcacacccaaggctcagattaggcagacaccctggctacatgcaagccccgtaaagtgctacccacttgcatgcccctactccctgtcaagcaccacccctacctcatgactcaccacctcagctcaagcacaccccatgactcacagtgctctctcccttcctggaataatgcccatcgcaggactcgctgccttatgtctgctgtgatgtcttcattttggataatattgtccttgggtgggacttacctgttttatatcattggtgtctcttttgcccattcccacccccagcctagtataggtctgggctcctgacgggtgctgaccgatt

SEQ ID NO: 641610 - DNA, 496 bp, Homo sapiens
cggtctgtagttttcttttttggttatgtcctttcctggttttggtattagggtgatgctggcttcataaaatgaattagggagggtaccttctttctctattttgtggaatagtgtcaaaaggattggtaccaattctttgaatgtctggtagaattctgctgtgaatccatctggttctgtacttgttttggctggtaattttaaaattaccatttcaatctcacatcttgttattkgtctcttcaggatatctaattcttcctgatttaagctaggagggttgtgtttttccaggaatttatccatctcttctagattttctagttcatgtgcataaagatgttcatagtagcagtgaatgatcttttgtattttagtggtgtcagttgtaatacctcctgtttcatttcttagtgaggttacttggattttctctcttcttttcttggttaatcttgctaatagtctatcaaatttatttatcttttcaaag

SEQ ID NO: 641611 - DNA, 553 bp, Homo sapiens
gatcttttgtattttagtggtgtcagttgtaatacctcctgtttcatttcttagtgaggttayttggattttctctcttcttttcttggttaatcttgctaatagtctatcaaatttatttatcttttcaaagaaccagctttttgtttcatttatcttttgtatttttttgtttcaatttcatttagctctgctctgatcttggtaatttcctttcttctgctggggttgggtttggtttgttcttgtttctctagttccttgagttgtgaccctacaatgtcattttgtgctctttcagtctttttggtgtaggtgcttagggctatgaactttcctcttagcactgcctttgctgtatcccagaggctttgataggttgtgtcattattgtcattcagttcgaagaatattttaatttccatcttgatttcacttttgaaccagtgctcattcaggagcatgttatttaatttccatatgtttgcatggttctgaaggttccttttggagttgatttccagttttattccactgtggtctgagacagtgc

SEQ ID NO: 641612 - DNA, 529 bp, Homo sapiens
aattttgtatttttagtagcgacagggtttctccatgatggtcyggctggtcttgaacgcccgacctcaggtgatctgcctgtctcagccttccaaattgctgggattacaggtgtaagtcactgtgctcagccagcagacctaacctaaaacagcgactaaggaagccctctaaacagaaaagaaatgataaaacgaaggaaccttggaatatcaggaaataaaaaaggaactcagtaagcaaaaatatagattaattcaatgggctttccttctcttgtgttctaaattacatttaacagttgaagcaaaaattattatattgcttgatgttctgaataaatgtaggagaactatatgaggtaattattttacaaatagggaaagatgaacaagtgtaaagggagttacgttttctatacttcactgaaactggtagcataatgatacagaacaggggaagggaagtgctgggaagggaagggcatgatcctcttcaatgatacagaagcggggaagggaagtgctg

SEQ ID NO: 641613 - DNA, 576 bp, Homo sapiens
ccttctagctgtgaaagaaaagggattggttcctcccctgcctatggagtctgcacactggattygcaccctcccccaagttctggccagaaggctcctcacccctttcaaattgttgcaaagttcagctagagatgtcctttttcctgtggagtttcaccccctactcctctggtcaccctcccgatggatccctgtggtgccaggtaagaatggcctactaggggatgcagtgagctccaagggcctttctgctgcttcctctacccctgtatttcacttggttctctaaattgactcagctccagctaaagtcagcaacttctcctacaaacagaccttcagcttctacagtgggggtatatgttcaggagaggagggtcttcctttctcatttccacactcacagtatttggggtgtctcctgggtcatgcaggagcagtccgcttcctttagagggtctgtgggtcctctcgggattgctggtttgttcttgcagtcaatttggagctaaaattcacaatgcgagcttctgcaagctgctctgtctggagctgcaatctagtcctgcctcc

SEQ ID NO: 641614 - DNA, 595 bp, Homo sapiens
tcctcccctgcctatggagtctgcacactggatttgcaccctcccccaagttctggccagaaggctcctcacccctttcaaattgttgcaaagttcagctagagatgtcctttttcctgtggagtttcaccccctactcctctggtcaccctcccgatggatccctgtggtgccaggtaagaatggcctactaggggatgcagtgagctccaagggcctttctgctgcttcctctacccctgtatttcacttggttctctaaattgactcagctccagctaaagtcagcaacttctcctacaaacagaccttcagcttctacagtgggggtatatgttcaggagaggagggtcttcctttctcatttccacactcacagtatttggggtgtctcctgggtcatgcaggagcagtccgcttcctttagagggtctgtgggtcctctcgggattgctggtttgttcttgcagtcaatttggagctaaaattcacaatgcgagcttctgcaagctgctctgtctggagctgcaatctagtccygcctcctgtccaccatgatccgtatcatctcttaaaggtttcacctctcaacact

SEQ ID NO: 641615 - DNA, 456 bp, Homo sapiens
aatagaaaaatagagaattgaataataaatcctcaataaatgcccaataggagttccagaagtaaagaactaaaataatgcataaaaggcaaagttgcccagaatkgatagcaaacttaattaatcatgttttaaaagtgcaaagatcttgcagaataaataaaaataaacccataactagtcacatcataatgaaactgccaaatgccaaagacaaaaagaaatttataaaaggaaactgagagtttactatagaaaataatgtaatatcttcaaaatgccaaagaaaaataattgccaacaaaaaattttgtacctatctaaactgtcattcaaaaagtgaaggagaaataaagatatattcagaaaaataagggttaagtgaatctataactcctagaatcctgctgagagaaaaattaaagaaaggaattgaacccagaaggaaagagcaag

SEQ ID NO: 641616 - DNA, 529 bp, Homo sapiens
aattttgtatttttagtagcgacagggtttctccatgatggtctggctggtcttgaacgcccgacctcaggtgatctgcctgtctcagccttccaaattgctgggattacaggtgtaagtcactgtgctcagccagcagacctaacctaaaacagcgactaaggaagccctctaaacagaaaagaaatgataaaacgaaggaaccttggaatatcaggaaataaaaaaggaactcagtaagcaaaaatatagattaattcaatgggctttccttctcttgtgttctaaattacatttaacagttgaagcaaaaattattatattgcttkatgttctgaataaatgtaggagaactatatgaggtaattattttacaaatagggaaagatgaacaagtgtaaagggagttacgttttctatacttcactgaaactggtagcataatgatacagaacaggggaagggaagtgctgggaagggaagggcatgatcctcttcaatgatacagaagcggggaagggaagtgctg

SEQ ID NO: 641617 - DNA, 487 bp, Homo sapiens
tctccctttgttctggggcttctgtgatctgccctgagtgctccatccttttgcaggctctgcctmctttccctccctcctgtgctagactgcccggcctctctcttcctcctcctccttcctctccatctccatcccctctgggccagccatcctcctatttctacagcaatacctccctagagagagatgccccagaccctagaagagctggcctggggggcttgaacttgcttcccagaactgtgcttcggggagtccagtggatgaggaggcatcacgactccactgcctttgaacgggaggggaggagaagggaggcgcacacagactgaaggaaagagcagctattagtcaccaggaggagagaaagaaaaggaattggtccagcagcagggggtccaacaaagctcacacagcccaaatcagccctgaatttaataaggggatgggaattagaagcagacagggaaaggcattgctgctg

SEQ ID NO: 641618 - DNA, 487 bp, Homo sapiens
tctccctttgttctggggcttctgtgatctgccctgagtgctccatccttttgcaggctctgcctactttccctccctcctgtgctagactgcccggcctctctcttcctcctcctccttcctctccatctccatcccctctgggccagccatcctcctatttctacagcaatacctccctagagagagatgccccagaccctagaagagctggcctggggggcttgaacttgcttcccagaactgtgcttcggggagtccagtggatgaggaggcatcacgactccactgcctttgaacgggaggggaggagaagggaggcgcacacagactgaaggaaagagcagctattagtcaccaggaggagagaaagaaaaggaattggtccagcagcagggggtccaacaaagctcacacagcccaaatcagccctgaatttaataaggggaygggaattagaagcagacagggaaaggcattgctgctg

SEQ ID NO: 641619 - DNA, 487 bp, Homo sapiens
tctccctttgttctggggcttctgtgatctgccctgagtgctccatccttttgcaggctctgcctactttccctccctcctgtgctagactgcccggcctctctcttcctcctcctccttcctctccatctccatcccctctgggccagccatcctcctatttctacagcaatacctccctagagagagatgccccagaccctagaagagctggcctggggggcttgaacttgcttcccagaactgtgcttcggggagtccagtggatgaggaggcatcacgactccactgcctttgaacgggaggggaggagaagggaggcgcacacagactgaaggaaagagcagctattagtcaccaggaggagagaaagaaaaggaattggtccagcagcagggggtccaacaaagctcacacagcccaaatcagccctgaatttaataaggggatgggaattagaagcagrcagggaaaggcattgctgctg

SEQ ID NO: 641620 - DNA, 454 bp, Homo sapiens
tccaactcccccgccccaacacacacacgctcctggaatatgttcatttccactcatctataatggcctcaggccagagtttatttgttctcttccacccgccccaccctcattctgtggcagaaatgagaatagagccctgaggaagcccaaggaaaaayagtacaaaaaaccttcagaaggggttttcttataatgagcataatttggaaagcaaattggaaaactgtatcaagagtgtgcttaaaatccctattggctccctactaccttaaaggtagaatgcaaactcatggcacggtccgcaggtgggccacctcctgctcagccttgtctccatcagccttatctcctgtcatcagcctctccagaccctctctgcaggcacgtctatgccctgatacgatcaagccaccagcaattcctggaataccccatattttctactgctgtc

SEQ ID NO: 641621 - DNA, 454 bp, Homo sapiens
tccaactcccccgccccaacacacacacgctcctggaatatgttcatttccactcatctataatggcctcaggccagagtttatttgttctcttccacccgccccaccctcattctgtggcagaaatgagaatagagccctgaggaagcccaaggaaaaatagtacaaaaaaccttcagaaggggttttcttataatgagcataatttggaaagcaaattggaaaactgtatcaagagtgtgcttaaaatccctatyggctccctactaccttaaaggtagaatgcaaactcatggcacggtccgcaggtgggccacctcctgctcagccttgtctccatcagccttatctcctgtcatcagcctctccagaccctctctgcaggcacgtctatgccctgatacgatcaagccaccagcaattcctggaataccccatattttctactgctgtc

SEQ ID NO: 641622 - DNA, 422 bp, Homo sapiens
gccccaacacacacacgctcctggaatatgttcatttccactcatctataatggcctcaggccagagtttatttgttctcttccacccgccccaccctcattctgtggcagaaatgagaatagagccctgaggaagcccaaggaaaaatagtacaaaaaaccttcagaaggggttttcttataatgagcataatttggaaagcaaattggaaaactgtatcaagagtgtgcttaaaatccctattggctccctactaccttaaaggtagaatgcaaactcatrgcacggtccgcaggtgggccacctcctgctcagccttgtctccatcagccttatctcctgtcatcagcctctccagaccctctctgcaggcacgtctatgccctgatacgatcaagccaccagcaattcctggaatacc

SEQ ID NO: 641623 - DNA, 625 bp, Homo sapiens
tctaatacatgaactgttattcaaaacttcgagtttgaagttttcttctacttctgaccttgtctctgctttttccaagttccttttctcctcctattaggttgtatgtcttattggcagaggctttctggaaatgtctggtgatccttagttgtccatagctctggagtaggaagacattctgcactctgcacatagacgtgactagggaccttacctctggccagcagctggtgtgacctgctctactgggagaggaagccgcagcaatcctgcttctccatttttctttgcctaccccttcctcagagaaaaagaggtggggtcacagaggaacacctgagtgactctcatcctctctcaggaggactataaccttggtgctttttgcccttatcgccatgggggtcccaccccctgtaatacggtagctgctgggcaccacttctcagggtcttgcaaaggaaggaaagaactgctgggcagggatgaaggaatgtccaggtcatagcagttactgagaggcctgtgcagagtgaggggtgcctgagcctccatgcttctgctctcccggcatgccctccggattcagggkagtctcctcaggtgtgatttagaaggggct

SEQ ID NO: 641624 - DNA, 553 bp, Homo sapiens
gtggctctgcccatgtgatgatttctgtgcacaagatacacattttcttacataggtgttctatgtcacctgcccctcttggcactgatgtcgggaagcgacagcatggctaccttggccccctgcctaagtctatcccccaacccctaaatgaaggctctcccttcgtttartggccacctagacagccccacagaaactcctcctcctctgttccttgctctttctgatccatgaccttctgggtcttctttggggccctttgagagcagaggaggattaagattcaagggagactgccctatcttcttcccaggctcactattctacagttctttgtggccttggtccaagctgtttcaacaagccactctgcttcttacttcctatcacccctactcccacttcagaaatctccaggaaaaaagcaagcagaagacacagagcaagcgttcccaagagcctgctcgccatcctcaaatccagtcaaagcactgcaatgtctcattttccggggagtgagatgtaaatctctcttcttataggtaccccc

SEQ ID NO: 641625 - DNA, 345 bp, Homo sapiens
gcccatggatatggaactgttagctcaggaggcaacagcctcaccgtgtaaaatcacagtctattctagccaaattaactaggtatactctgcattggtgtaaaattctccatcaaaccatgaagactggcgtttaaaacatttaagacccgagaaggggaggagagggcaagagagaccattgcttttcctggcaagtaatggtgaaggktttcccagcctggctaagcagggaggagccccacctgggattctcaaagccagtgcccgctccatgcccctggctgggcctccttgcccagagctcctcacaaggtctttccattcttggggtcactgacccta

SEQ ID NO: 641626 - DNA, 574 bp, Homo sapiens
gtgcttggaagcttggagaaaacagtggcccacattaaacaaaacagagttgccggaactgccatggccaactgggcagaaagagaccaaaaggctcagagaagtgggcatgctagagtgggcctgttatctaatacgaggaaatccaccctcaaacggtttctcaggaaggcctggagatcactcggtttactagggtgattaggaatgtgtgagtgagggacaccagcgtcagcagagaggtttgggtaggactgaagagatcgtatttcagaactgggctccctagtagaaatggtaaaaatcccagcacagcagaggccaggtggtagcacctaagtgtcagaagcgtggtggatgtaattactgtaagggcagcaaggttgcaacagtggytagaagagcccagactacagagatttctggaaatagtatgtaaatcatggtgttcctagaggtaaaatagatgggcagctagcaaagttatttgtgtgtgtgtgtgtgtgtgtgtgtgtgtgtgtgtgtgtaaatcataagagatcaatagtgagtgaacgtaagaccaccttcactc

SEQ ID NO: 641627 - DNA, 579 bp, Homo sapiens
ccctcctgggcagcgaggggaacagagctgagcaagctctcaattctcagccctgcaggaggccaaaggagaagcagctcccagcatggcggggctgccgggttagtaacaagcccctgacacaaggggtttgcacaggcgcacaaatgaaagaaaatcggaggagatgaaaccatacaaatttcaggtaatagaaagagaggaaagagatgtgcgtgtggcctgggtctcggctcagaaaggtsgattccaagaagaggctgcccaactttatattacttttcagaaagccagtgagctgaaaaataactctcaccttttttttatattattattcgttttttttcagagctgcttcttcacattgttttgtgcatctcagctgttcatttctccctggcctgattttatttggagatttggcctggagcctggaggggaagatggccctttatttcaaattctcagcagcctttgctggatctgctgaatctcaggagctgggggtggaggggagagggccaacccccttctctcattcacaagagtctgtgtgttgttcatggtggacataggtat

SEQ ID NO: 641628 - DNA, 573 bp, Homo sapiens
tgagataccagatctcagagggatgctaattgcaatggccttatgatgcggttcccattgccatcatcatgagtagttttgttctaggctctcttgtaggcatgtgacaatatcatttcattgaattgtcaataataactctgcaaggtgaataagtgacaaatttggaacactgatctttcctatgctgttctgactccatgtccaacgttacaaagtaaaaaggagtaaagagtgttgggcctagcagactcacattcgaatcaagcagggttggtttgttgtgcgtttcgaggcaggggttgggtgggagtgtacaacataaasgtgaccaaaaaataataataatttttaaggctaatgaatggccttatagttggactattaaacatgataaaaatgtttactaaattgttcaactggaccacgtgtagcaagtgaggctttcaagggacgtagtacagcgttgaaaaacaccgctccagcaccaaacacctgggttcaaatcccagccccgttacctataagctgaatgactttgggcacattctttaacccctgcacttcagaagc

SEQ ID NO: 641629 - DNA, 684 bp, Homo sapiens
tttctctgttcccccactagaatttgtgtgtggttctatcacatttcccgacataattattggtataaattattccatcatttttcatggatgtcttctctcgccaagtagattatcagcccggcacgagcagggtccgatagctctcttccctgccaaccctctcctgacaaccccrtccatgggcatcttcctcagccctcactgctcatttggacactaagctagctgtcatgcatatctgtttcccattcattccttcactcattcactcacttattctgtgggggtagcaatgattacagaggacctagacctgcatctcactatcttgagcaagtcataccagactgcagttgcctcatgtgtaggatatagacaagagggacaaatctggcaggaaatgttacagatattaagtaagctaaggtttatgtatgtgtgtacagtcccaggtaccaaagccaattgataagcatccagtgattaaattagtgaatttccctaaccaacattctctgagaatccacacagcccctatggtctaaagggcagcagaaaacttataagccctggtacttaccacaacccaccctcttttcatctctttgccatcccattcccttttccacctgctggacctagcacacttgtgtacagaacaaggttcaatgaacatctttc

SEQ ID NO: 641630 - DNA, 625 bp, Homo sapiens
cagtgggcactctatcaatgtcaaatgttaaaaatgatcagctattgtgatgtaggagattaaatatgaaagcttgatgggtatataaaagtgaaatggcaataataaagggatttttatgttctgctcattgctctctggaatccacctggggaactattagagccaattgtgctgatcagtgacatatcaccatgggttaaaggacaggacaggtgtgtccctccgcaggtgctgtttggcctggcaaaatggaatgagagaactagggtagagaggttgaagttcatatggccgtacctttgggagcttgagtctaattccccaggtgactagaaagaaaaggtacaaggcaaccgagagccaatcagaagtgccagaggtcactatgacccttctctgctgcaatgacggctccatctctaaagctagtggagagaatccatcccctcctgtaaggtaccctgagatgacaatcctattctatacaacaagaccagacctcattggccatcttacatagtcaactttctcaggaattgaggcccagagaagtagagatatgtccaaggccagcagatragtagcagaggtggaccaaaccaaggccaaggcagggcaaccc

SEQ ID NO: 641631 - DNA, 625 bp, Homo sapiens
cagtgggcactctatcaatgtcaaatgttaaaaatgatcagctattgtgatgtaggagattaaatatgaaagcttgatgggtatataaaagtgaaatggcaataataaagggatttttatgttctgctcattgctctctggaatccacctggggaactattagagccaattgtgctgatcagtgacatatcaccatgggttaaaggacaggacaggtgtgtccctccgcaggtgctgtttggcctggcaaaatggaatgagagaactagggtagagaggttgaagttcatatggccgtacctttgggagcttgagtctaattccccaggtgactagaaagaaaaggtacaaggcaaccgagagccaatcagaagtgccagaggtcactatgacccttctctgctgcaatgacggctccatctctaaagctagtggagagaatccatcccctcctgtaaggtaccctgagatgacaatcctattctatacaacaagaccagacctcattggccatcttacatagtcaactttctcaggaattgaggcccagagaagtagagatatgtccaaggccagcagatgagtagcagaggtrgaccaaaccaaggccaaggcagggcaaccc

SEQ ID NO: 641632 - DNA, 611 bp, Homo sapiens
gttgctataacaaattaccataaacttagtagtttaaaacaacataaatttattaccttagggtcttgaagatcagaagtctgaaaccaattttgttgtgctaaaatcaaggcgtgtaatccttctgggagtgctagggaagatttatttccttgccttttccacgttttagaggctgtctgcattccttgtctcatggtcccatcctctatcttcaagccaacagtatagcatctttaaactcccccsctctctgactctgccctttgcttccattgttgcatcacctctacctctgcttcctgcctccctcttataagtacccttgtgattacactgggtccacctggacaatccagaaatgtcaccatctcacgatcttcaattgcatctataaagttccttttgccatgtgaggtagtaaattaatagtttctggggattaggacgtggacgtctattcagacttcactacaaaataagctgcaggagattataataatttatctatcttatttattatggaattctcagtgcataaacactataaaagaacaaaagaatgaagaaagaagagagcaaaatccatttggtaaagaagaaaataatgg

SEQ ID NO: 641633 - DNA, 551 bp, Homo sapiens
aagcttgagggtgacaggtgtggagaggagggggacagcagaagaagtgccagaatacgaggtctgaaaagtcacaaccctgggtacctgtggccgacacagcttgtctgaatttcctygccccatacctacctcctttcttgaccttcaatgtctgggcaggtacagagcccctgcctcaaactccaaccccattccctctgggtctggttacctagaggaggtcctgattcctgaaagcctcccctcttcccccagggcaggagctaggtcgggctgcccacaggctgatctgaggggacacaaacctatgacttccctggcctccaagaagcccaggcccagcccttagattggagaaggatctttaagcagttatttaactctagactcaggttcctcaactgatggggataataatggtacctgactcatgggatgtggtgaggattaaatgagaaaatgcatagaaagccacttatttgcaccttgctggcatgggttgaggccaggtaaaggggctcctccccattgccaatccccctggcata

SEQ ID NO: 641634 - DNA, 519 bp, Homo sapiens
caaaagcatacactaagtggccacatttctgagagctgtctggagccagcgcccagggctgagcgctccacaagcattctctctttggccctcataataacgccttagtgcccccattttacagagcagtaaactaaggctcagagttgggatccaatgacttgttaatatcacccggcaaggggtcagagtcagttgtgattttaacccttatcagtctgaacccaaagcccaccaggcatacagacactcagactcactgagccccacttcacaggccgcttccagtgaggggcagctttgatgcagagagggctttgcctctgctctcctccccgtgtgggctgagctatcctggacatgtcmcagggtggggctggtggtaacaaaaggagaagagctggtgagtggagcaaggacagtgggcatgtggctcagcctccagccccggtttctccctcctccccacctccagagaaccaggctcggagccactgactatgtgggtactgtagccag

SEQ ID NO: 641635 - DNA, 474 bp, Homo sapiens
gtgacctgtcccttccttgcttagatgctggccaacactggtggtctccaatccagagagccayacttgtacaaagacttgtcctggattttttttgtttgattggggtttgtttgtttgtttgttttcagacagagtcttgctctgtctcccaggctggagtgcagtggcacaatcttggctcactgcaacctccacctcccaggttcaagcaattctcctgcctcagcctcctgagtagctgggactacaggcatgtgccaccaaacccagctagtttttgtatttttagtagacacgaggtttcagcatgttggccaggctggtctctatctcctgacgtcgtgatcctcccaccttggcctcccaaagtgctgggattacagatgtgagccctggtctgtttttttttttttaattatttatttattatatttttttgagacggagtctccttctgtcacctaggctgga

SEQ ID NO: 641636 - DNA, 474 bp, Homo sapiens
gtgacctgtcccttccttgcttagatgctggccaacactggtggtctccaatccagagagccatacttgtacaaagacttgtcctggattttttttgtttgwttggggtttgtttgtttgtttgttttcagacagagtcttgctctgtctcccaggctggagtgcagtggcacaatcttggctcactgcaacctccacctcccaggttcaagcaattctcctgcctcagcctcctgagtagctgggactacaggcatgtgccaccaaacccagctagtttttgtatttttagtagacacgaggtttcagcatgttggccaggctggtctctatctcctgacgtcgtgatcctcccaccttggcctcccaaagtgctgggattacagatgtgagccctggtctgtttttttttttttaattatttatttattatatttttttgagacggagtctccttctgtcacctaggctgga

SEQ ID NO: 641637 - DNA, 474 bp, Homo sapiens
gtgacctgtcccttccttgcttagatgctggccaacactggtggtctccaatccagagagccatacttgtacaaagacttgtcctggattttttttgtttgattggggtttgtttgtttgtttgttttcagacagagtcttgctctgtctcccaggctggagtgcagtggcacaatcttggctcactgcaacctccacctcccaggttcaagcaattctcctgcctcagcctcctgagtagctgggactacaggcatgtgccaccaaacccagctagtttttgtatttttagtagacacgaggtttcagcatgttggccaggctggtctctatctcctsacgtcgtgatcctcccaccttggcctcccaaagtgctgggattacagatgtgagccctggtctgtttttttttttttaattatttatttattatatttttttgagacggagtctccttctgtcacctaggctgga

SEQ ID NO: 641638 - DNA, 474 bp, Homo sapiens
gtgacctgtcccttccttgcttagatgctggccaacactggtggtctccaatccagagagccatacttgtacaaagacttgtcctggattttttttgtttgattggggtttgtttgtttgtttgttttcagacagagtcttgctctgtctcccaggctggagtgcagtggcacaatcttggctcactgcaacctccacctcccaggttcaagcaattctcctgcctcagcctcctgagtagctgggactacaggcatgtgccaccaaacccagctagtttttgtatttttagtagacacgaggtttcagcatgttggccaggctggtctctatctcctgacgtcgtgatcctcccaccttggcctcccraagtgctgggattacagatgtgagccctggtctgtttttttttttttaattatttatttattatatttttttgagacggagtctccttctgtcacctaggctgga

SEQ ID NO: 641639 - DNA, 655 bp, Homo sapiens
tttaggttaatgttcactttacaaaggtgatgggggatattttgttaggtgatagcagaagcttttcatttttaaacatagaattaaaattggatttgcttctctttaatacttcaacatattgaatttccctaggaaagtgactagctataatgaaaattcaagcgaaaagggaaaaagattgtaaaygcagatgaaataacttcatttttaagtacaaataatagtaggattggtgtatgtaggtttaaaattatagtgatgactagtcgaacttaatatacaatcagttcttgcaaatactttacacttagctgccattacacaacaaattggaattttccagctgttcaactatcatggactctgtacaggatagatgtgtataatggaaaatatgtactgcttctttctttgattgccactcaagatggaaacaccatgccaaggcattttggttatacacagatcattctaaacctgttattttggagaggtgtattggtttctttctcatttataaggctattgtatttttttttgtatgtgattcaggtgtatttatttgaagactatttgtagttataggaaaaccacacctacctgtattgccaaattctttgtaaactctccgtggcacttgtgctttcctggc

SEQ ID NO: 641640 - DNA, 537 bp, Homo sapiens
atgagatcaggagatcgagaccatcctggctaacatggtgaaaccccgcctctactaaaaatacaaaaaattagccaggcatggttgcgggcacctgtagtcccagctactcgggagtctgaggcaggagaatggcatgcacctgggaggcagagcttgcagtgagccgagatcatgccactgcactccagccggggggacagagcgagactccatctcaaaaaaaaaaaaaaaaatcccagatctgaattttatgcttaaagggtaccccctagagctgtcagactttcatgtgaagaatttctaaggaatgtaacttcactatggatattcagaaaagaagcccaattytctaccaagctggagcttagagaccaaagaactcaggaagagcagttttctccttggatatctagatggttccttctgccactgagcactctcctagacaaagaacagtctcaaaatatccagagacacacagacatttcccgtctctctcagtatctggcagaagcaggagaaccagaaaaaaga

SEQ ID NO: 641641 - DNA, 605 bp, Homo sapiens
ggtgaatttcctgcgttctctaagggtcgcaggagaggctcagaggaaggaagttgtctatcaattgagggaggggcgaaactagatgatccccaagatgccttcacttctaaaattacactttaatgacatcttctccagggcccgcctgtccccacgtagggagtgaagcaccaggcccagcaagccccgtggaggcctccgagatgggcaccaggagacaaggacagcgaggctatcgtcttgacaccacgggacctggtcactgttttgaaagggatttggtttggttttgctgggacgcttcctggaagtcttttcttgaggcagtgtgtttatctggtttcttaggtasagcataaggctgttttctctcagacgtggacttggcaatgcggaactcagttctgggctgtgattcaaagccttgccagcttcgtgaattcaagaaatccttgtttccacccaaagacccaaagagactttgaacagtcatttcaccctccccgcacagctgggccagatggcagcagtggcccagtccctatcctgaaggctccttacctagaggaagtccacctcactggggaccttctcctgccctg

SEQ ID NO: 641642 - DNA, 399 bp, Homo sapiens
aagacccaaagagactttgaacagtcatttcaccctccccgcacagctgggccrgatggcagcagtggcccagtccctatcctgaaggctccttacctagaggaagtccacctcactggggaccttctcctgccctgtagttttagcccatcttatcattattattattattattatttttagagatgaggtctcctgtgttgcccaggctggtctcaaactacggggctcaagcagtcttcctgcctcagcttcccaaggtgctggtattacaggcgtgagctaccacacccggccttagcccatcttgaggtgaaactatgcagttgttctgggaggatctacatgcctgtcctccatgaggatgcagagtcgttgagtttacatggggaatattta

SEQ ID NO: 641643 - DNA, 461 bp, Homo sapiens
gaattcaagaaatccttgtttccacccaaagacccaaagagactttgaacagtcatttcaccctccccgcacagctgggccagatggcagcagtggcccagtccctatcctgaaggctccttacctagaggaagtccacctcactggggaccttctcctgccctgtagttttagcccatcttatcattattattattattattatttttagagatgaggtctcctgtgttgcccaggctggtctcaaactacggggctcaagcrgtcttcctgcctcagcttcccaaggtgctggtattacaggcgtgagctaccacacccggccttagcccatcttgaggtgaaactatgcagttgttctgggaggatctacatgcctgtcctccatgaggatgcagagtcgttgagtttacatggggaatatttagccgtccacgtcatttctgtgggcttccctaggc

SEQ ID NO: 641644 - DNA, 571 bp, Homo sapiens
tatatagtctgaatatcaccttttaattaagctgacttctgagaataatgctctttttaaaaatcttttaagtatatcattagcagttttgggcaaacagcaaacattctcatttcctggcttttctttccctgaagtttgcattttaagagggatggtttcttaggtaagacaagggagagaattgacaggtacagagaaatactgaaagtttttagaggttcagggtaattaataatcaaatttctcttttgagtacaaagtacctttttagctcaaatgagaaggcagaaagcaaaccaataaaacaaaaaaaaaatgtttttaacatgctctgaatataaaccaaaawtttaatccaaaggtatattcaacaagtgactcaagactcaactaataagcccctttatggctttaaccaaggtggcctttccaagatccagaccactctcacaggacaaccaaggaaaggaaagcttagctagccacaaatggatgtaaacccacattttagttcacccatattcttgaggcgctcaactttttgtttggctgcctgcagcaaagaaat

SEQ ID NO: 641645 - DNA, 571 bp, Homo sapiens
tatatagtctgaatatcaccttttaattaagctgacttctgagaataatgctctttttaaaaatcttttaagtatatcattagcagttttgggcaaacagcaaacattctcatttcctggcttttctttccctgaagtttgcattttaagagggatggtttcttaggtaagacaagggagagaattgacaggtacagagaaatactgaaagtttttagaggttcagggtaattaataatcaaatttctcttttgagtacaaagtacctttttagctcaaatgagaaggcagaaagcaaaccaataaaacaaaaaaaaaatgtttttaacatgctctgaatataaaccaaaattttaatccaaaggyatattcaacaagtgactcaagactcaactaataagcccctttatggctttaaccaaggtggcctttccaagatccagaccactctcacaggacaaccaaggaaaggaaagcttagctagccacaaatggatgtaaacccacattttagttcacccatattcttgaggcgctcaactttttgtttggctgcctgcagcaaagaaat

SEQ ID NO: 641646 - DNA, 566 bp, Homo sapiens
aagctttctgacagctaggattatacactaggtaacaatggcaagtaaatatctttgcattctctagaaatatatagcgggaaaaaaaaaacttgtggacaggaaatggctttccckgtctataaactgcctttgttgttccctgctcttagttcctcctctttgcttgtcgtaagagtggagagggtagacagcaaacaggtgtgaagctagatcagtgattctattccagcagccagaccagtgtgtccctcacagagggttacaatctggtgctgcccccatcctggggtgctcctgggcctcagcagataaaactaggaagcgttggggtgaggggcccattgtggacctcactgatcccttgaaggtccctccagctgtaggagcctgtgactattcctgctgtcttcctgcgaggcctccctttgctccaggtcccaaagggccggctgggatcctaggagccaggcttcccaggggtgggggcgctgccgctcaccataaagaactggcagagtgtgatgtgggggaagatgttgtgtgccttgttcttcccgcagatc

SEQ ID NO: 641647 - DNA, 653 bp, Homo sapiens
agtcataccccctttttgtccaatcatgcctctrcattcatcatcaaacctaagcataaaaatacagtttctcctgggtctttgggtcttcatttttgaagacttgtgtcacataaaacatgaattacatacgtttgttatgcttctctgttgttaatctgtctttggttataaaggtatcagccatcaaccttgtgatggataaagcaagatattattttttctcctctatactttctttcttttttcctttcttcccttttctttctctcccttcctcccttcctcttccttcctcctcttttccaactttctcccttttcctttcttccctttaatttatatttactaaatgcctccattctcaaggagagagcaacaaacaaatacaaatttcgtcaattaaaataagttaatttttaaaaatgaaacattaaaataacaacacaaggctatgccgttaaatgaacaaataaaaaggaataaactttgtatgcatttgcagagcactatataaaactatgatattattgttatgggagaatgaaattcctagagagaccagatgatgtagagattaaaaacttgggctttgagattactagagaaacttgagtttcaactctactagctgagtgacgatgggcacatta

SEQ ID NO: 641648 - DNA, 410 bp, Homo sapiens
tagtacccattagttatttttcctgatccacactccaataggcccctgtgtgtttgttcccctttttttagttatttttcctgatccacattccaataggcccctgtgtgttttgttcccctttgtgtgtccatgagttctcatcatttatctccctcttataagtgagaacatgtggtatttggttttctgttcgtgcattagtttgctaagaataatggcttatagctccatctgtgtttctgaaaatatcatgatcttgttcttttttgtggctgcatagtgttccatggtgtatacgtaccacrttttctttatccagtctactgtcaatggtaacttaggttgattccatgtctttgctattgtgagtagttccgcaacaaacatatgcatgcatatgtctttat

SEQ ID NO: 641649 - DNA, 611 bp, Homo sapiens
tgatatgaatattattcatattcatttcaaggtatgaaatgaaatgaatggatattaaggtataagggaaagaacacagagttggatcaggctgaatttattgacttgggcccactaagtagggactctgcatttaatgttgcagcttggggagttaaaaaaggttctaatagtttgtttgcttggttagccgaaacaaagattataagatggcccactgtgagtgagctggaaatgcctgatctcccttggtttaatgcagaggaaaggatccaaaggcttagggagattgggatagtggagtggattagtcactttagacctactcatcccagagggttcagaagatatacccttgaccaatgccttgcgaaatagatttgtgagggcagtacctgcatctttgaagagctctgtaattgctcttctctgtatgtcacatctaawggtgagaaatgcagccactcaactacaaaatttaaatacaatgggaataattggatcccaagtggcagcacttaactatcaaagtcaaggtgggcatgactaccataatggacagcagaggcagcagcaatcagaatagtctgactcatgtagagctctggcat

SEQ ID NO: 641650 - DNA, 484 bp, Homo sapiens
ccagctatttatctttgtttttattgcatttgcttttgggttcttggtcatgaaatccttgcctaagtcaatgtctagaagggtttttcaaatgttatcttctagaatttttatagtttcaggtcttaggtttaagtccttaatccatcttgagctgacttttgtataaagtgagagatgaggatccagtttcattcttctacatgtggcttgccaattatctcagtaccatctttgaaaagggtgtcctttccccattttatgtttttctttgctttgtcaaaaatcagttggatgtaagtatttgggcttatttctggcttctctattctgttccatgggtctatgtgcctatttttataccagtaccatgcygttttggtgactataaccttacaggatagtttgaaattgggtagtatgatgtctccagatttgttctttttgcttagtcttgctttggctatgtggactctttttttgg

SEQ ID NO: 641651 - DNA, 484 bp, Homo sapiens
ccagctatttatctttgtttttattgcatttgcttttgggttcttggtcatgaaatccttgcctaagtcaatgtctagaagggtttttcaaatgttatcttctagaatttttatagtttcaggtcttaggtttaagtccttaatccatcttgagctgacttttgtataaagtgagagatgaggatccagtttcattcttctacatgtggcttgccaattatctcagtaccatctttgaaaagggtgtcctttccccattttatgtttttctttgctttgtcaaaaatcagttggatgtaagtatttgggcttatttctggcttctctrttctgttccatgggtctatgtgcctatttttataccagtaccatgctgttttggtgactataaccttacaggatagtttgaaattgggtagtatgatgtctccagatttgttctttttgcttagtcttgctttggctatgtggactctttttttgg

SEQ ID NO: 641652 - DNA, 484 bp, Homo sapiens
ccagctatttatctttgtttttattgcatttgcttttgggttcttggtcatgaaatccttgcctaagtcaatgtctagaagggtttttcaaatgttatcttctagaatttttatagtttcaggtcttaggtttaagtccttaatccatcttgagctgacttttgtataaagtgagagatgaggatccagtttcattcttctacatgtggcttgccaattatctcagtaccatctttgaaaagggtgtcctttccccattttatgtttttctttgctttgtcaaaaatcagttggatgtaagtatttgggcttatttctggsttctctattctgttccatgggtctatgtgcctatttttataccagtaccatgctgttttggtgactataaccttacaggatagtttgaaattgggtagtatgatgtctccagatttgttctttttgcttagtcttgctttggctatgtggactctttttttgg

SEQ ID NO: 641653 - DNA, 596 bp, Homo sapiens
gttcagagagtttaagtaatttacttaaggtcacacagcttgtgagtagcagggctggaatttaaacccaaccattctgctcccagaagctatgctcttcaccatcatgctatgctaaattgcgttaaacaaattatccataaatagtattgcctttcctctcaagaacacgtgagctacattaattttttaaaagtaggtagattataaatattcaaaccagaggtgaacaaacaacagtccatagtccccagatctggccwaccgcctgttttattgtatgacctgcaagctaggaatggttttcacattttttaatgatttagaaaaattaaaaaataatattttgagacgcatgaaaattatagtgaaattcaaattttagtgtccataaataaagttttattgaaacacatttttttttacatattatttatgccatttttgccacagaagagcaaaactgaatacttgtcaggggaactacaaagtctaaaatatttaatatctggccctttacagaaaaactttgccaacctcctgatataaccaaaaactttctttggctaacggaagagaagcgatttaagggcttg

SEQ ID NO: 641654 - DNA, 631 bp, Homo sapiens
catcattaatcaatcatcttatttatcactgagttaattcaacacaattaataatttggaagctcartatgcctgttatacttctgggcactatcattacaattacacatttttgtcttgatgttttttttttcttgcctgatacagatccacttgtttctctagttcccaagtacagagtctagagtttattcttaaccaattagcctatttgggagtcctcattgcactggaagttctttgagaacctggacatttagttccaaccccactcctgctgccttgatgatccccagggaacctctgtcttaggagcacagattgcttttctttgaatgtcactgagcagtatcttccgcccccaccagattatggatgaggatagaaaaatccattcagggactgtggatgtgccaagatcccacagcttctgctttgactttactaggaccctgaacaacctggaggagaatgagttatgctttaatggcagtggccatgacattcagctttcttgttcttttcccaacaatagcaaagagcaatgtccggctgctgcctgcctgggcagattgcactacaggaagacagctcagatgtggggaacagagggagtgagtgaatgccactt

SEQ ID NO: 641655 - DNA, 431 bp, Homo sapiens
atttttttttaaagaagtttgaagggtgactgtgaaacaaggtggcaaagctcagaggctgagttkgtggaaaaggatgtttcctaattaatcgcggacagtaaaggcaggtagaggcagggttggcatctgctggcaaaccagcagaatacaggacattggcatctggggccgaggagattgctctgagtatgggaaagcatctgcaaagctgaagtttgaagccccatgcctggaatagaagtgtcttggagaagctgaacagatgcaaagaaatgaagaaatgcagaagtaactcattcttggggcaaagattataaaggaggtttaggccaggcctaagaatctcacatcttagcaattctttcaagctgtatcactctcagctctcatgcagtataagcagccaagtcaattaacagagagctcaa

SEQ ID NO: 641656 - DNA, 556 bp, Homo sapiens
agaattcctctggggactcagccacaccccaaatcttagcctaaatcactgagtttgacacagattcataagaatttggcaagcagctcacccacattttctatcaaattgaatccaaatgttgcctaggttggatgagagttcggtcaagagaaggaggcccaggccaatggactgctaaatggtgatattcgaaacccaaatgagtttggcttggctttaagactaggaggaaagctttgaaccatagcatatgatataagccccggtccaactcaaaaccagttttactttttttggttgttatttcagaaatgcactgaccctgcactctacaggacactatgctcattccgaatgctaaggtcagtcctaggaaactgcaggygcctgtagggtcaaagtagagtggggaagctggttcttaacacctgttcctttacttccttctggaacagagcaaaccttgacaagatggggtggggtagtagtgtttgaaaggactggaagaactactaattcaggctcctgtgaagaacccaatcagcagtgggct

SEQ ID NO: 641657 - DNA, 538 bp, Homo sapiens
tgagcagtgtacactgcacccaatgtgtagttctctattcctcatcgcctcccaccctttccccccattcccccagagtccgttacatcattcttatgcctttgcattctcataatttagctcccagttataagtgagaccatatgatgtttggctttccattcctgagttacttcacttggaataatggtctccaactccatccaggttgctgtgaatgccattcttccattmttttttatggctgagtagtattccatggtgtataaatacataccacattttctttatacacttggttgatgggcatttggtctagttccatatccttgcaattgtgaattgtgctgctatagaaaacatgtgcaagtgtctttttcatataatgacttcttttcctctgggtagatactgagtagtgggattgctgtatcaaatggtagttctatgtttagttctttaaggaatctccatactgtttttcgtagtggttatactagtttaccttcccaccagcagtgtaaaagtgttccctttt

SEQ ID NO: 641658 - DNA, 538 bp, Homo sapiens
tgagcagtgtacactgcacccaatgtgtagttctctattcctcatcgcctcccaccctttccccccattcccccagagtccgttacatcattcttatgcctttgcattctcataatttagctcccagttataagtgagaccatatgatgtttggctttccattcctgagttacttcacttggaataatggtctccaactccatccaggttgctgtgaatgccattcttccattcttttttatggctgagtagtattccatggtgtataaatacataccacattttctttatacacttggttgatgggcatttggtctagttccatatccttgcaattgtgaattgtgctgctatagaaaacatgtgcaagtgtctttttcatataatgacttcttttcctctgggtagatactgagtagtgggattgctgtatcaaatggtagttctatgtttagttctttaaggaatctccatactgtttttcgtagtggttatastagtttaccttcccaccagcagtgtaaaagtgttccctttt

SEQ ID NO: 641659 - DNA, 571 bp, Homo sapiens
cttactgcagactcctgagagcaagacatatggttgatyccccttgaagtccagtggctaacacaatgtctagcacgtagctgtactaaaataaggacattaaatgaataggccacctctggaagcatttataaatagtggaaattgtttctcccagatggcatatttatattggaacagtgtcctttttagatcatgcctctgctagagaagagaccataatggaaatatcaggtgcaggaagatgttttggtgtcactcaaatagctccatgtaggtggcctcttgctctctccaaacatccagctggctctgggcccgtgcacctgaagggagatatctgagactcagaacacttcctgcttcatttcagtgacaccaacttggctccgttttcacctccaagctgggatcaaatgttccccaagtgcagagagttaaggagagatgtctcattctctcccttgacctcctctcttattcccctcttattatgtttttcataaaactttaaacgagattcccagagaaaagccctgtcctttggtcaggccagcagcctccccaactg

SEQ ID NO: 641660 - DNA, 599 bp, Homo sapiens
ttctgtgttcatttttatcaagccagctcagtttacaaacagaaactcatttctccaacccagctctgtaaataataaaggtgatatcatcacctttacatttgctttttggtttcattcctcaccttgttcagagcatatttatcaaacgcccctcaaacatttttggttgtcacaagatgaagggaggaacaatgtggtcctattacttggtgagtcgagaccatgaatgtttaaacatcctacaatgcacaggacagccctatatgacaaagaatgatctggcccaaaatgtcaatagtggtgakgttgagaaattctgccccaactttacacaattaagttgatgaagtgtcttcaggagcaaaattgtattattttaatcctgttttccattcctcccccctcaacctctcccccaaaatagtttaaaatatcgaggaaagataagagtaaaaatcagtaacatggccagttgaatataaaaacaaacatccagaagtctacgatacttgcttttcatattatcattctcttctaaagcacagagtatattacaaaatttaattatttacttcaaaaatcacttttgacactat

SEQ ID NO: 641661 - DNA, 599 bp, Homo sapiens
ttctgtgttcatttttatcaagccagctcagtttacaaacagaaactcatttctccaacccagctctgtaaataataaaggtgatatcatcacctttacatttgctttttggtttcattcctcaccttgttcagagcatatttatcaaacgcccctcaaacatttttggttgtcacaagatgaagggaggaacaatgtggtcctattacttggtgagtcgagaccatgaatgtttaaacatcctacaatgcacaggacagccctatatgacaaagaatgatctggcccaaaatgtcaatagtggtgaggttgagaaattctgccccaactttacacaattaagttgatgaagtgtcttcaggagcaaaattgtattattttaatcctgttttccattcctcccccctcaacctctcccccaaaatagtttaaaatatcgaggaaagataagagtaaaaatcagtaacatggccagttgaatataaaaacaaacatccagaagtctacratacttgcttttcatattatcattctcttctaaagcacagagtatattacaaaatttaattatttacttcaaaaatcacttttgacactat

SEQ ID NO: 641662 - DNA, 582 bp, Homo sapiens
ttacagtaacactgtcgattaatcatattatactcactgccagatgagaaagctggcttagataagctaaataagttatcgaagtttgcaccactgcacagtggcatcctgggtttcaagcccagagtcttaaccacatcactaagctttctccgtttagggctctaccacctactatgcgcagataatgtactgggtgttgggaagtctacaactagtcatgaaaattgtccccatccccaagaatctcatagtggaatagcagagagaaaggcatataaaaccaagcataataaaatgtgataaatgctactgcagtagcacgaacacagtgttgaaagaacaaagaggagaaaatgattaactatgcccggtggactgatgcaaagctgcgcaaaacagctagcatttgagatgggcctggaagaatgaatgggctttttgccaggtgaagtacaggaaaagagacatttcaggtcaaagttttgtcctgaggaaaggyacttaatagaagaaaatgaaaaggtgtttataactcacactgaggtgagaggctgaatatttaaaaagaatgcagtaagc

SEQ ID NO: 641663 - DNA, 260 bp, Homo sapiens
aactgtaaaactataatttgacatccagtgagaatatattttcataagaaatgtgtaataaagacctttgcaagcaaacaaaagctaagaaaattagtcatcaacacacttaaagaacactgaaagtttatggaagttcttcacacagaataaatttggatctacracaaaaagattaaagagttctagaaatagtaaatatgtgagtaaatacaaaacacactgttatggactaaatatctgtgttctcccaaattcat

SEQ ID NO: 641664 - DNA, 412 bp, Homo sapiens
atgttgctcttggcatgacacttactgcttcatatgtgtgtrtatatatatatatatatatatatacacacacacacacacattaaacagaaatcagaatgaaatgctttgtatttgaactcttctttttttagttttactgtctgtttttcactgctgtactcagttggccctttaaaaattctaattactgaagttattatattaaagaagtattggaagaacaacttaaattctagaaatcacaggaaataaaagttattccctttgagaatcttattgagatgctgagagaataatgcttaaataaagagatacctgggttgaatttgagaccaattttgcatgtgaaatctcagcaaatattatgctcagttaaacaatatgtgaccatttgaacagatgatgttgt

SEQ ID NO: 641665 - DNA, 676 bp, Homo sapiens
gactattcaaaatattttattagcaataatagaggtagaagtgagtcatactgtatgcagttccacccttcctttcctgtctgtccagattcggctttcttccaaattcatcatatacatttcaaatgaacgtggtgatgtttcaggaagaaatctgtatgtacaataactttgtgcaacagtatattttctatttttaaattgtactttcaaagttgttaagatttctaagacatgattccatcatttctaattttcatccagattgcaattagtatcatcatatggcgtatcaattatacaacgttatacctcagcagcataaatcacaactctagctgcagctataaatatcagtcttcaaactgtgtgtacattttcaaaatacactacagcagcctgattctagaaggctttccttttaaattgttttgttgtctgttttccgctgtttaagactttgcagaaaatttattgaaaatcccccacacatatttccagagtgattacaatgamattataataaaaaagagaatgacacagatggctcagttctttctgagttttgctatcagattaaaagagtttatttggaaggatgaattttattttgtaaaaatgaatgaacaataataaaatgacaataaatttctacttttctactaatctttcagaa

SEQ ID NO: 641666 - DNA, 614 bp, Homo sapiens
caaaggaactttataatattagacatatggatggcaaataagcatatggaagaatgtcaaacattattggccattagaaaagtgtagatttcagccacaaacaaaaratgagatcttactaggtatctcttagaacagctaaaattacaaagactgactgtaccccaggttgacatagataaggaggaaatggaactcatacactgctggtgggaatgcaaatagtgtaatcaatttcgaaaacagtttggaagctcctttaaaagttaaatattcacctgccatatacatgatgtagccatttcactactgggtacccaagagagggaataaaagcacatgtcaatataaacagttattaatactcgtagcagatttattagtaatggacaaaaactggaaacaacaaatgtctatttagaggtgaatattttgacaaattgatatagccatacaatggaatactatttggtattaaaaagtaataagctatcgatagaagcaaaacatatacaatctagaataattattctaaatgaaaaatgtctgataaaataggagtatactttgtaagattccatttatataatactataaaatagtgtagtgagaaa

SEQ ID NO: 641667 - DNA, 487 bp, Homo sapiens
tgatggtttcatgggtgcatacccacataaaaacttatcaaattgtaaacctgaaatgggtacagtttttctatgtcagttagacctaaccaaagtgctaaaaatattatatatgtacaccacatgtgtgtttacttaggtgaactttgtacctgtatttaatctatattatgcagcacttaataattaaaaattaattttattaatgagaaactcttaagatataattttaacgtagttagcaagttgaaaatatacagaatcactgggtagaacaaaatgtgaakaaaacacaaagaaaatatgaggaaaagcaatcagcagtagcataaaaaaattttaatatcagtaagatatcaggagagggttgcagtaagatggctgaatagaagtctccactgatagtcctccccacaggaacaccaaatttgacaactacccacacacaaaaaaacacctgcataagaaccaaaaagcaagtgagaaa

SEQ ID NO: 641668 - DNA, 442 bp, Homo sapiens
ctggcattattcatcacctgctgatttaagagcccatggccctgaataatcagcagaagtaaccaggtagtacatgctatgggccttgagtgagattctgagacatgctggcttcaggtatgactcagcacatacacagctatagtggctacagagagaaaccctttctgcttgagaaaaggtgagggaagaataaaggggactttgtcctgaagcttaggaaaaagctcagccacagtggaaaagagcaaaaggggctctagggttccccaattccagtccttggctctgggatgacatttccggacattccctgggccagaggggagcccactgctctgaagggtgartcccaggcatagcagtattcaccataagctgactgaagagcccttgggtcttaagtgagcatcagcagtactcagccaatactacttgtggg

SEQ ID NO: 641669 - DNA, 467 bp, Homo sapiens
atgatgtctctgacccacgaattatttctaccctccttcctgctggcaccctgcttttccctttcccgcttttcattcttttctttctttcctttctttctttctttctttctttctttctttctttctttctttctttctttctttctttctttccttctttctttcttgctttccttctttctttctttctttctttcttttctttctttctttctttctttctttctttctttctttctttctttctttctttctttctttcagtgctggtctttcttcacctttttgtatttcttttgcrtttagccactatttaacaaattatacatctatcctatagaatacttgcatgaccctaagggtgaatgcatcctaaactgtgtgccctaggtgcttttcttgccctagtcctgctattctgtgacaggttgtttctaagttgagcaatatgtaagagtcaaaca

SEQ ID NO: 641670 - DNA, 582 bp, Homo sapiens
ttctgaatcacaatcttaggcaactgaaaaaaagcttcttatagtagatttacctaaactaacacctgaggaatgaataggcactaactgagtaaagaaggtgattgggtcaatgctctaagttattttaaacatcagcctactttctgtctttattgtagtaagtaaacaaaagtaagttttttttttttgatgacttaggrtcagagcaaataactcaaaggtggacttacatcatagcaacctaaaggtatttttattttagttagttaattaaagtatttatctgcatttaaaagtatttatttaggtgatgataaaagtaacacagcaatattttctgggtaaatttatattccgtgaagtcaggctcttgtcaattaaattttcactatatccaagaaagaaacaatgtcaaaataaatttagtgcaggcttatcaatcagtttagccaaggcattaatataacatcatagtgaagatgtactacctactgaaggagcgttgttagtgtctggaaaaaatgggtatgaaaacatttattaattcactggtgagatgtcttggaagctgaagaattc

SEQ ID NO: 641671 - DNA, 527 bp, Homo sapiens
ctgagaaaagtctgcaacttttatttattgcttatagaccagaattatattaaagacttttacctctaacaactacatttacctgagtatgttattgaatatctgtaaaacgtatgaaaagaaagaaatgtaggtgttatttatatttagttcacaattctacagagcctgctgtgtttttgcaaatgtttgaaactcctttattattaaacctctttaatcttacctcctrcatctcaactactgggatcatttctgacaccaacacagaactggggctattctccagaacacaatttgattctccattccaaactttggctgtctttatttcttctatctcaaatgtcctccttgttttgcctttttaaaaagtgtcaacctttgacatcatttctatttataatattttttcaggataattctgaacagccatatattctttactctgaggctgtgacgtgtgtgtgtgtgtgtgtgtgtgtgtgtgtgtgtgtgtgtgtgtgtgtgtgttctatgatatggta

SEQ ID NO: 641672 - DNA, 562 bp, Homo sapiens
  misc_feature 1, 2, 3, 4, 5, 6, 7, 8, 9, 10, 11, 12, 13, 14, 15, 16, 17,18, 19, 20, 21, 22, 23, 24, 25, 26, 27, 28, 29, 30, 31,32, 33, 34, 35, 36, 37, 38, 39, 40, 41, 42, 43, 44: n = A,T,C or G
nnnnnnnnnnnnnnnnnnnnnnnnnnnnnnnnnnnnnnnnnnnngaattcagtccctgaagaacagcaaatatacttttagatttaaataaggagtctagagctgagaaacacagattgagtggtcccacaatcatctgcatattctttgaccctgattgatgaggcagcctgaggtgaggctatagttcaatatggtcgaatattaatttgcacaaataaattcatttaaattgaaaccatcagatggccaactctccaaacaccaccagatactttaaactagatctaagacagctcacctctctaattttacaaagtgctggaggtgggagccaacaatcacccagacaaragaacagattttcctcttttggcatattgctaatctagtctcaccactggatagagacaccataactcagaagacagaggagaggctcctggatccagtctctgtggtaaaatttaggtatttttgataggttttagagaatgattcagcaaatttattcttaatgaatatttcaaggaacctattttgaaactacgatgctttcctg

SEQ ID NO: 641673 - DNA, 450 bp, Homo sapiens
tcattcattttttcacagatgtttagatagctcatcttactatctgaccatatatataacatcaaagtcctcaatctcttccaggacaacagattgtatcaactttccaattcagtccttctcactatgcccctgacccagcaagtactgcagttcctccctctattcttttttttatcctttacttcacctccctataaaacaaaaacccaatgttccatattaaacttagatccattcagcttcatttattgccaacatcttcaaagttttcaaatcctacttttttttttttggctagtgaacacacggtaatttttctttaatgtaaccctctctctttttttctcctgaaccatggcaggttacttcatttatagcacatggtttggtgaactggtggmcctacaagtaagtaatgttattaagaccctcagtaccattaaacca

SEQ ID NO: 641674 - DNA, 495 bp, Homo sapiens
actgggctccagtgccagcggctgtgtgcagcatgaaagcagctattaatcagacacgctcgcttaagaggaccctgggttttgactttgaaggcagccaaagaaaggtcgaatatatgcttttgaattctacagcaagcagagctcttttgaattctttattttctaaaaatgataattaataattctaatgcttacttccttggttgagctcttcaaacatggaattaaaagtagtaaattttcaacaaaatacatatgacagactgttaaccccataaattagggtttcatttgccttaatttctcacatcagtgtatttttcccaagatggctttccccacatgtatgtgtctaataaaccaatgatgtcaacaataattagtacctttgaagcagctgaaacttaacgctggacstgtggttacattattcctcacaacaactatataaagaaggtgctgttttaacattttattttgtcaaaaagaaga

SEQ ID NO: 641675 - DNA, 551 bp, Homo sapiens
ctatccagagaaaatagcctagagaaaaaaaatacagtgcatggaaactggaaaagcagaattccctctttactgatgacataatcttatacatagaaaaccccacaaacccacaaaaaaaccctcttagaagtaatcaacaaattcggtaaagttacagagtagaaaatcaacccacaaatcttagtagtatttatatacaccaataattaactaggtaaaagcataattttaaaaaattccatacaaaaatatacagctacaaaaattaaaataactaagaayaaatgtaaccaaggaagtaaaagacttctgcaataaaaactacaaaatgttgatgaaataaattgaagaggacacaaaaaaatggaataggacagttaatattattaaaataaccatatttcagaaagcaatctacaaattcaatgcaatacccatcaaaataccaataacattctttatgaaagcagaaaaaaaatcttaaaattcatatgggaccaaaaaacatttggtttcttgacaatagtcaaagcaatgctgagcaaaaa

SEQ ID NO: 641676 - DNA, 597 bp, Homo sapiens
attgggtaaagggcaccctgttcaataaatgcagctaggaaaactgaatatccacatcaagaacaatgaaactagagccccatatctcaccatatgcaaaaatcaactaaaaatgaattaaagacttaaatgtaaaacctgaaactataaaacctactagaagaattataaggaaatgcttcagaacattggtcttggtacagattttatgggtaagattttagaagtacaggcaacaaaaacaaaaataggcaaatggggctatatcaatcaaaaaaatctcctgtatagcaaaggaacaatcaccagagtgaagacacaacctgtagaataaaagaaaatatttgaaaacttaacctgacaagagattaatatccagaatatacaaggaccacaaacgtctcaacagcaaagaccatataatcccattaaaaaatgggcaaatgatttgagtaaacatgtttcaaaataagacatacaaatggcctgctgggcgtggtggctcacaactgtaatcycagcactttgggaggccgaggcgggcaggtcacctgaggccgggagttcgagaccagcctgatcaacatggagaaaccc

SEQ ID NO: 641677 - DNA, 624 bp, Homo sapiens
agtcaattaaacttctttccactataaattacccagtcttgagtatgcytttattagcagtgtgagaatggactaaaacactatagatgtgaaaaggtgattatagtgaagcaaattaacatattcatcatctcatatagttaaatattgtaatagcaactagaatctactcacttagcatgaattctatatacagtataaattatccttctttttaaacccactttttaaagtatacatataagcctttttaaagtacactgtatactttggcattaggtaaatgcttttttgtgtaatgttttaattactttaatgatccttttttactagatgtcttgggtaatttttgtaaatcattcctctagggcttaccatatgtacctaatgagaatctatgtcagattaatagtaatttaataccagtgatctatagagatgttattctcacatagttctgttttctcttcttctttgtgccactgttgttatactgtacatgttacatctatatgttataaacccaataatgaattacaataattatttctatatatagcttaatgtcttttaaagtagctgagagaagaaaataaattatatgtttgtaaattttgtcatagt

SEQ ID NO: 641678 - DNA, 533 bp, Homo sapiens
taattattatgtgtgaactaaacaaatattaagatacttcataaatttatcccttcctcataaaattaccaaattcagaatagatctctatttccttccaatctccccaggtcacttaacacaagatccaatcccgtgacaatccataccccaaaactttcttatcaaagtacctactattatcaaaaatgtacaatatccctttttgcaggaagtaataaactcaactttatttgactrtaagtgtatcctggggtcctttagctagtgagcattaacatttgttaggatttcagtcaaattttgtgaggtttagggtggagaatcaataaattaatggcttgaagacccaataatgacaagcattttcactacaggtttcacaaagaaaagctagtataataagaactaatattatcttagtatgtgatattcattttgctttttattttcatagctatctttagggacatcataaaaaccttgtcttcactgtcattaaaacaaaccaaacagctgaaaagtcaaaaaat

SEQ ID NO: 641679 - DNA, 403 bp, Homo sapiens
ttcattttaatcttgagagtttgctatatgctatacactgttataattgcctcatataagatcttattcattcatacatttctacacagaagaagcaagattatcccaattttctagctgagtacattgagttgcagagcagtaaggaaaatagccctgaatcacacatccagctagtaaagatgagttcaacataaaaactcaagtagtttgaattcagagcgcacatacatgcttaactttactcctgttgagaaacagctaacagcacaaggcacaacagagttgagcataaaaaaaagcgtagaagcaggttaagcaaaatggyaaaggcagaaaggagaaagagcaaaacagtcgtggccactcaaggaatgggatgaaccactggggccaacacaaa

SEQ ID NO: 641680 - DNA, 619 bp, Homo sapiens
ttaatgatccttttttactagatgtcttgggtaatttttgtaaatcattcctctagggcttaccatatgtacctaatgagaatctatgtcagattaatagtaatttaataccagtgatctatagagatgttattctcacatagttctgttttctcttcttctttgtgccactgttgttatactgtacatgttacatctatatgttataaacccaataatgaattacaataattatttctatatatagcttaatgtcttttaaagtagctgagagaagaaaataaattatatgtttgtaaattttgtcatagtaaacttcttatttaccattgttggttctcttccttttttcctgtggatctcggtaaccaattaatatattctccctacttcaatatagctttgctcctaactaccttctttgtgtggcaagtataaatatttacatatgttgttaagtatagatatttacatatgttataggcttaacaawacaaatgcatacacatcatattatgcaattccatttaaaacatgttaagagaaaaaaggaaaatatgcatttatactgtctttaaaaattgcttaattacctttacttgtgcttctcctccctcac

SEQ ID NO: 641681 - DNA, 619 bp, Homo sapiens
ttaatgatccttttttactagatgtcttgggtaatttttgtaaatcattcctctagggcttaccatatgtacctaatgagaatctatgtcagattaatagtaatttaataccagtgatctatagagatgttattctcacatagttctgttttctcttcttctttgtgccactgttgttatactgtacatgttacatctatatgttataaacccaataatgaattacaataattatttctatatatagcttaatgtcttttaaagtagctgagagaagaaaataaattatatgtttgtaaattttgtcatagtaaacttcttatttaccattgttggttctcttccttttttcctgtggatctcggtaaccaattaatatattctccctacttcaatatagctttgctcctaactaccttctttgtgtggcaagtataaatatttacatatgttgttaagtatagatatttacatatgttataggcttaacaatacaaatgcatacacatcatattatgcaattccatttwaaacatgttaagagaaaaaaggaaaatatgcatttatactgtctttaaaaattgcttaattacctttacttgtgcttctcctccctcac

SEQ ID NO: 641682 - DNA, 573 bp, Homo sapiens
tatttttgctaaggaaggtaatatagtcacaggtttgaggacatttggggaagaacattagcctccaaccattttcataactgattgatacctacctaggtatggaactgtatttttttttggctattcacagtaccttgaaattctrtatgaattttaggataggcttttctttctgcaacaaaagactttgggaatttgttgagtcattgggattgctttgaatctgtagattgggattttattgagtcattgagtttgctttgaatccgtagattgctttgggtagtatgcttgtattccaggaataaatcccacttggtcatgttatataatccttttaataggcttttgaattaattttgctagtatttttttgaggatgtttgcattaacattcataagtgatactggtttgtagttgtcttgtaatggcttggtctggctttggtatcaaagtactcctggcctcatagaacaagttaagaagttatcccttcttttcaattttttggaaaagcttgattttgtcatgttatttctgtaaatgtttggtagaattcatcagagaag

SEQ ID NO: 641683 - DNA, 570 bp, Homo sapiens
tatgttataaacccaataatgaattacaataattatttctatatatagcttaatgtcttttaaagtagctgagagaagaaaataaattatatgtttgtaaattttgtcatagtaaacttcttatttaccattgttggttctcttccttttttcctgtggatctcggtaaccaattaatatattctccctacttcaatatagctttgctcctaactaccttctttgtgtggcaagtataaatatttacatatgttgttaagtatagatatttacatatgttataggcttaacaatacaaatgcatacacatcatattatgcaattccatttaaaacatgttaagagaaaaaaggaaaatatgcatttatactgtctttaaaaattgcttaattacctttacttgtgcttctcctccctcacaccatgtggaatagaattccatttgggggtcagttggttttagactgaagaaattcttttaatagttrttgcaagtgcctttactagcaacaaattctgtcaattttgttcctctgaaaatggctctttttttcttcatttttgaaagat

SEQ ID NO: 641684 - DNA, 591 bp, Homo sapiens
gtggaatatctttttccatattttcacttttaacctatctttggatctataatgagtctcttgtagacagtgcatagctggatcatgttttgtttaaaaaacccattctgcccatctctatctcttgattggagagattaatctagttacattcaaygtaattactgctaagaagggacttatttctttcattctcttatttgtttcctatatgactttaattttttttgtccctgatattctatattactgtgttttgttttagttactctttttgtagtttagggtattaattcccttcttatttctttttgtgtatatgctacaacaactttgtggttactataagtattacatttaacatcctaaacttttagcactctgagttaaatttacaccagcttcactccaataacataaaaaaacttttttatttacagcttcctcctcacttttttcaattacatctttgtgcattgtgttaataaatatactaataattgttcttgttaaattcattagtctcttaaattgtgtaaaataaaattatgtattatgtctaaaaccaaagttataatactaccttttagc

SEQ ID NO: 641685 - DNA, 569 bp, Homo sapiens
ggatatagttttattcatgtcttttatcaaacttggggagtttttggccattattgctttaaataatctctctgctcctttttctctctcgtctgcttgtgggactcccacaatgtgaaagctggctctttaaatctcctggaagttgttttagtgggagaaggagtagcttacartaatgctgtggggtggggacgtgagggggtggtggagaagggcttacaacaatggcttcctgcctttgtatctctacctgcaaaatcagaagcagcgatagtaatctgaacacaaatctctgatatctggaggacaggatctttattgcccagcatggctcctgcaagcttcatccaatatgctccaggaacacatgcatgtgccacagagttgaggtgggtaggggatgggttgctacctccagataagagctgaaattggctaaaattaagggtggtttattgttcaaggcttcccctggacactgcaagccttggaatagactccagagtttcaaaatagttacgtcagaaagatttggccagtgtaatcattgtttaggtgaagaggca

SEQ ID NO: 641686 - DNA, 569 bp, Homo sapiens
ggatatagttttattcatgtcttttatcaaacttggggagtttttggccattattgctttaaataatctctctgctcctttttctctctcgtctgcttgtgggactcccacaatgtgaaagctggctctttaaatctcctggaagttgttttagtgggagaaggagtagcttacagtaatgctgtggggtggggacgtgagggggtggtggagaagggcttacaacaatggcttcctgcctttgtatctctmcctgcaaaatcagaagcagcgatagtaatctgaacacaaatctctgatatctggaggacaggatctttattgcccagcatggctcctgcaagcttcatccaatatgctccaggaacacatgcatgtgccacagagttgaggtgggtaggggatgggttgctacctccagataagagctgaaattggctaaaattaagggtggtttattgttcaaggcttcccctggacactgcaagccttggaatagactccagagtttcaaaatagttacgtcagaaagatttggccagtgtaatcattgtttaggtgaagaggca

SEQ ID NO: 641687 - DNA, 569 bp, Homo sapiens
ggatatagttttattcatgtcttttatcaaacttggggagtttttggccattattgctttaaataatctctctgctcctttttctctctcgtctgcttgtgggactcccacaatgtgaaagctggctctttaaatctcctggaagttgttttagtgggagaaggagtagcttacagtaatgctgtggggtggggacgtgagggggtggtggagaagggcttacaacaatggcttcctgcctttgtatctctacctgcaaaatcagaagcagcgatagtaatctgaacacaaatctctgatatctggaggacasgatctttattgcccagcatggctcctgcaagcttcatccaatatgctccaggaacacatgcatgtgccacagagttgaggtgggtaggggatgggttgctacctccagataagagctgaaattggctaaaattaagggtggtttattgttcaaggcttcccctggacactgcaagccttggaatagactccagagtttcaaaatagttacgtcagaaagatttggccagtgtaatcattgtttaggtgaagaggca

SEQ ID NO: 641688 - DNA, 611 bp, Homo sapiens
ttttctgttgttcagattgcataatctttattcgtctgtctccaggttagctgattcttctacccactcaaatcagtttttgagaccctctagtacatttttcatttcagttatattagtttcctactrcagaatttccattagattcttgtaaaaataattcttattttttatttgatgagatattgccctcatatcttccttaacctctctaagcatatttttctttagtactttgaacatatttattgtagttgctttagagtctttgtcatgttcatatctagtccttctcatggcacctcttgttgtctgctttttatttttatttttctgtgcatgagttatactttcctgtttatttgcatgtttcccttttttttagaacagtaggcattttagataatataatgtagcagtgtccccttccctaaaactgctttttcttatcttttatttatttgcatgcttatttgtttagtgacttggctgaataaatttagtgacactggcagtgtaaagcagtgtaaagcctctgatgttgttcctcagaggatgcaggctttggcatgctcacagtcactctgggagacagtagttttctcagaact

SEQ ID NO: 641689 - DNA, 597 bp, Homo sapiens
tttcctgactcaactaaatattgaaggaaaacaaaggacctagaatttttccatatgtgtcactgcaaatgaagatgggtcaagctgcccataagttgcttctagtgccattccctgttagaataacctgtcaccagctccatcatattagatgtatgattctgaagacccaattgctgttacatgtgttttttgcatgtgttttagcagtggttggaaatcctttaaaaatcaccmtattaacatcttccagattaaaagtaaagaggaagtagtgaaaatagagaatctatttatctgtcatctcaactttcttcaaagaattctagtcttgttttatagaatttggaaaagatatttgcaaccgaaggccaacatttccccatttctttctcctcattttccttagttgatgactaattaatgcaggaagcacaggttcaggagctaaatgtctttgaaggggaaatgaatgcccttacaggctaccatttatgaagccagtctcctcactaattattaaggaggcagcctcacccaaggttacagcattaaattatcccatccaaggtagtatttaatttagcacatcaccct

SEQ ID NO: 641690 - DNA, 681 bp, Homo sapiens
tcacacaaacacccactaaatatttttactcctccagcctttcattagagtgtattatttattattattgccattattgttattgatagacacacattaatatagaggtgtgaycacttaagccattgcatgaaaacaaacactcctccaggttgtagtttcaacacaggatttccagagaactgtacaacaaagtaaaacccacaggcatgtttgcagagccccagtgaaaccacaaagtggtgttttctctcattctctttctatatatggcaggattccaacacttcctttttcttgaatgcctactctatgatggacattacactagagaactttataagtatctcacttaattctcccaaccttgaaaattagatactacttctttacttccagatgaggaaaatgaggagtcaaaagtgctatatctcccttgaggttatgattcaaaattgtgtggttaccagtatttgaacttgtggaatctgactcccaaattggtgctacttctatcacatctggtatattaagggaaacaaactggccaggctatattctcttcagaagatatcaccatatgaaccatctgttgggggtgggggaagaaattctgagtttatattaagctaattcccttcacacctaaattgccatttatcagccaccagccatagcgtc

SEQ ID NO: 641691 - DNA, 592 bp, Homo sapiens
ggaaaacactgcaatgcagaaaatagttaagaacattgaaaaggcaagattgttttgtttttcaaatattcttctgaaatgtgtgattattgtgaaaattatttttaatataaataaaatcttaatgaaacaatatcctaaattaaaaaaatttaaactcatttttgtattgtttctctttcttcctgyctttccttaattatttcttgcattctttcattttttgttttctcatcgtcatgcatatgtttgtgtgtgagagagtggcaaacaatatagtattccaaatgtcaagctatgatctgtaagaaggcgacagattgcatctagaccagtgtctgctcacctaaggtaaaatctgaccagtttatatggggaataaatgtgatgtcaatgtaatagccttataatttcgagacggaaaatctatactcacgttaaaacaggtgtgatagcctgaattttaggttctttaacagggtaattgcaatttttattttttaatttttatttattttttattttattattattatactttaagttttagggtacatgtgcacaatatgcaggatagttacatatgtataca

SEQ ID NO: 641692 - DNA, 592 bp, Homo sapiens
ggaaaacactgcaatgcagaaaatagttaagaacattgaaaaggcaagattgttttgtttttcaaatattcttctgaaatgtgtgattattgtgaaaattatttttaatataaataaaatcttaatgaaacaatatcctaaattaaaaaaatttaaactcatttttgtattgtttctctttcttcctgtctttcmttaattatttcttgcattctttcattttttgttttctcatcgtcatgcatatgtttgtgtgtgagagagtggcaaacaatatagtattccaaatgtcaagctatgatctgtaagaaggcgacagattgcatctagaccagtgtctgctcacctaaggtaaaatctgaccagtttatatggggaataaatgtgatgtcaatgtaatagccttataatttcgagacggaaaatctatactcacgttaaaacaggtgtgatagcctgaattttaggttctttaacagggtaattgcaatttttattttttaatttttatttattttttattttattattattatactttaagttttagggtacatgtgcacaatatgcaggatagttacatatgtataca

SEQ ID NO: 641693 - DNA, 512 bp, Homo sapiens
ttaatgatccagtatctatatgtctgtaagtagagcttctaggaaaactatagcaaaagaactcaaagccctaaagcaattggcctccttttctttgtagtctgaagcagtgccctggcctaagaaaatggagaatcaggagacaggaagatctcagcaaaaactctggaactstctctacagctgtaatggaagagttatgctgagtcccaggcaaggtatctggtaggaagagtgggagtagttagaagctcctatgagatgggagctactataatgagaatgccagttgaatttcattttgcatggtaactccaatcacttgggagtggcttccttgacttcatgttaagtgaggaagcattctgggcaagtacctggggtctcaagaaagagagctatgatcaactcatgctgctctccatgagcacaataatcatatacacaccaagcacttgccacccctctatgtgcaactgacaaatctccatatcacaataaaagaaagggaa

SEQ ID NO: 641694 - DNA, 504 bp, Homo sapiens
ataagaagcatattataggggttccaaggagaaagagatgccattcagctggaagaatcagcaaatactttatggagtatgagagtatttgaaatggaccatagagagttgataggatctcagttggcaaagaaaaggaaaattttttttagataaaggatactgtagaaacaaaaccatagaagcagcaatgtttgaggactattcgaagaaataattagtaactttgtttcatcagagggcaagggaagtgggtgagagggatgagagatgaggtaaaaaaaaaaaaaaggtaatttggagagatactagataaggtattgacggctggtataaaaacatattactggtcttggtaggtaatagagagacattgaataattataaggagtagagktaagtaactagagttgggctgtggaataaacttggtaaataattcatatactaaatttgaaggagttgtgtttacaggcaatagggagactggccaaatgactataa

SEQ ID NO: 641695 - DNA, 630 bp, Homo sapiens
gtgtcaaagctaagaggaaagaatgaagccaaggagcaacaaaacctagtgcatcaaagtggcttatgtgattgaaaaagagcttggtgggcccaggtggtctacaagtggaaccacccagccatcggaagccataaccaaaagtgcccttagagatcataaagctaggaatcttcatagaattttaaccccaaacctttcttcaaacacaggcttacttgccttgcctttattacagatatgaaaagacagagcagctatgctgaagtgggagtggaggacctagaataggtaatctgtcctagtatctcaccctaagtgaatagtaaggggacttctctgagaagcagaawttaaaaacactgagagtctgatctccttgggaccactgaggaaagcccccagggctgatattcaggagacctaggtacagatcctagcagtaatgctgagcttcagataaccagcttcaatttgttgtacaagtaaaacaaattttaatcccagttctggaccatattagttacatgttgagtgcctaaaatttctaattttcatgattattatttctatgttacatgggattattatgatgattcagtagcaaaaagtatcattttacagtgccta

SEQ ID NO: 641696 - DNA, 630 bp, Homo sapiens
gtgtcaaagctaagaggaaagaatgaagccaaggagcaacaaaacctagtgcatcaaagtggcttatgtgattgaaaaagagcttggtgggcccaggtggtctacaagtggaaccacccagccatcggaagccataaccaaaagtgcccttagagatcataaagctaggaatcttcatagaattttaaccccaaacctttcttcaaacacaggcttacttgccttgcctttattacagatatgaaaagacagagcagctatgctgaagtgggagtggaggacctagaataggtaatctgtcctagtatctcaccctaagtgaatagtaaggggacttctctgagaagcagaaattaaaaacactgagagtctgatcyccttgggaccactgaggaaagcccccagggctgatattcaggagacctaggtacagatcctagcagtaatgctgagcttcagataaccagcttcaatttgttgtacaagtaaaacaaattttaatcccagttctggaccatattagttacatgttgagtgcctaaaatttctaattttcatgattattatttctatgttacatgggattattatgatgattcagtagcaaaaagtatcattttacagtgccta

SEQ ID NO: 641697 - DNA, 386 bp, Homo sapiens
acaaaaggtgaattttgtttaaaaaaaaaaaaaaagaaaaggatctagatttctaccaagcattagttagaatactccacagttctaattttctttcttaactctgcttttctttccttatgatcatacttggcaatctggttatggagtgatgatgaatggccattttataaaaacatctggctactcaagcaatggctgacacagcataaatttgtgaaactgcytgaaatttcaccattggaaaaccagcatttcatgccaaaattgtcatctctaaatttcctctgtaaaacgcaaatattatgggtgggtctcttgctttaaatcttcaatgttttcctacagatgataatttcaggttactttctttcccaagttgagaa

SEQ ID NO: 641698 - DNA, 430 bp, Homo sapiens
aagagatcaaagtagaatcattctagagtgtaattgtcaaacttcatctggataaaaattgtaaaatgggtkgacgccaggaaagttagatgcgaaaccaggagttacaatggctgcttcttgacaactgcaaggacggactagaaggcaagctgaattacctaagtgtgcatctgttccttgagactccagctataaatatttcatgctgatatccagatttgaagacttttctaagatttaaatgaaagcggcttttcctgtttttaataaattaaatcaaaggagaggggtggaaactgtatttaaaaatattctctgttcaagcacagttctatatctacattgttgcatttactcctcactacaattttgtaaagtagaggttattatctcatttcataccttaggctcagaaaaatcacatgag

SEQ ID NO: 641699 - DNA, 603 bp, Homo sapiens
gtatcccttctatgtgtcattatatcctttgctactccttgtttgatgtctgaaaacagttgttttatatattttatacaattatgattgcttatggtagaaggtatagtctcatacaaactaaatcttcatgggaagaagtggaagtcctktctttgatttttgtggctttgtgtttttcttatttgaccaagctccttaaaaattcaaaattttgatttttgtctgttgtattagctaacaatattttcctttgtgtcattcacttttaaattattttacagttttatgatttccatattttaatttttatataactgaaattatttttttaataatttcttccaactagagaacaaacattttcctagaatttctttcatgggtgtttgaggggcttcactttttataattaatattcagtctactgagattatttttggtataagttataagatggttttgtgtgtcttttattctaaatttctttaaacaacttgtagaaaatgatgtggtataaataaatcaataagtgcatatcacaggaaagtggttgaatgtcatttttcattattttagaattcatgtatatcaattttgttc

SEQ ID NO: 641700 - DNA, 430 bp, Homo sapiens
aagagatcaaagtagaatcattctagagtgtaattgtcaaacttcatctggataaaaattgtaaaatgggttgacgccaggaaagttagatgcgaaaccaggagttacaatggctgcttcttgacaactgcaaggacggactagaaggcaagytgaattacctaagtgtgcatctgttccttgagactccagctataaatatttcatgctgatatccagatttgaagacttttctaagatttaaatgaaagcggcttttcctgtttttaataaattaaatcaaaggagaggggtggaaactgtatttaaaaatattctctgttcaagcacagttctatatctacattgttgcatttactcctcactacaattttgtaaagtagaggttattatctcatttcataccttaggctcagaaaaatcacatgag

SEQ ID NO: 641701 - DNA, 567 bp, Homo sapiens
gcttctgtgacagttaattcttttcatagaatgcaaacaacaacaacagactagaatgaattgataagaaaacaagcttttgaggagagtggggatggggtaggaaacgcatcagagaggatctaatattcatcttcaattctgagattctgggaaggattctgtgacacaaactatggttttgtgayggttgactttcttgaagagtgaaaattaagggaaaaacagaattaaaagttattttaaagtggtatacaatcatagagtagttcaccaataatgcatagtatacagaaataatcttttatatttgcatacacatcccatctatagatcctaaactagttagtaatgctacattaaagtagctaggaggaaaaatcgactttcccaggtcagggtgtcagtaatgttattttcttgagttaacatcagcgttcttatcaacttccattatcaacatcatcattatcttccatcagcagcatcgccgttattttccaacatcggtatcatagctttcacaaatgagagatgtattgcacagtaaaagacagtagagtacag

SEQ ID NO: 641702 - DNA, 589 bp, Homo sapiens
tccctactcatcagtcacaaagttgaatctacttgtagatatacaactgaccttaaattgatattttatattccattaccatattccattaccacccttgtaatgctttattttccttggccctttgcagctaaacgtcaagagaagtgtttggagatacagtgggttacatctgctgagctcgtctaatattttttttttctttcttcagaagagacatggctgttcttaccaccaaaagacaaatctgaatattgtaacaaccattctgagtactgtcactaactgccactgaataactggattacctgggaattgttagtttcaattagttctatgaaaatcattgactggctttaarttcacttaaaagtgtaaagaactggaagcaaagagaaatagggaaatggccacatgaggcaggaatggaatagaaataaccttttaaatcaggaagatattaatatgaagtaaaaacaaaagtagatttttaagcattatacaaaggaacttaaaattcaattctgttcagaggccatttactgagcatctgccagacattgtaaagaccagctgatcattggtagga

SEQ ID NO: 641703 - DNA, 551 bp, Homo sapiens
cagtaatataatcctcattaaattgttatgagattttttaaaaagataatatagtgcctggaaaaatgcactagacactttaaagatctgcactaatataaaatattactattatagcaatcccttacaaggaagagtgtattaacctaagaatgatgaagaaagtctctcagaatatcratgtggtgtagatggtatatagggttactatagtaacacactcagaattcagagttcaattgagaaaaaacacagaagatatgagctcttgcagttgtcaaaacttttgttgtattcagccttgcttttgtgagaagagtggtaaaggaagtttttaaaagcctgagctttgaggcacaaagagctgttcaaatcacagctctgacacctcctaatcctataatcttgtccgtactaccttaccagtacataatctcagtttacccaataaattagaataatcattgattcattcattcaataaatatttcttgagtgcaaactgagttccagggactgttccaagagctgggctgtagcagcaaacactg

SEQ ID NO: 641704 - DNA, 590 bp, Homo sapiens
attgattgaatggaaaagtgagggagaaggagacatcaaggataactctggctacatatgatccaaaaatatcaggaatgcaggcatgtgattgacgacaatatttttttatccttcccaagacgtatcataacagtattgtggctttagagactaatacgaaactaaaagagcttcttcttgttaaattgtctgctttttcagtaaatgtttcacacagttcctatgtgctaggtactaccctggtctccggaaatataatggcaaagacagaacccctgcccttctggagtttatwttctggctgggcagtgaagccatacgaaaagtactattgtgtcagagagtgataaaggctccgaagaacaataacacagcaatgggaaggaggaaatgtattattttagataggggtcagggcctgtctgaggaggtaatgcttgtgcagaaacgtttttcataggagggaggcgacagtgaaaatatctgagggaagaacattccaagcaaacaaagcagtaaggaaaatatgatgtgagttagttgaaagtaaatacattaaaaaattgtaataaaataatttttaaaaa

SEQ ID NO: 641705 - DNA, 582 bp, Homo sapiens
cactgggagatatacctaatgctagatgacgagttagtgggtgcagcgcaccagcatggcacatgtatacctatgtaactaacctgcacattktgcacatgtaccctaaaacttaaagtataataataaataaataaatgtaaaaaaaaaagaaaatcaagaagacaattatggccagaaaaaggggataaaaagtgagggagagcacagtgaatggtgaggacaaacaaatttaataggcaggtgggcccagagtaactagggccttataggccattgtaataattttgacttttacgcagtgaaaatggggagctataaagaatgtgaagcagaggaatgacaagatataacttaggtttcaataatgtccccttggctactatgttaaaaagagactacaggtgcataacagtggaaggaggatgagttagaggttttatgccatcatctagattagagatgatgatgttgtcatgtaaaagggtgatagcagtggagatcatatgaagttgggatttaagatatattttaaaagttaagccaaagaatttgaatgtgcagtgcaaaataaagaaatca

SEQ ID NO: 641706 - DNA, 582 bp, Homo sapiens
cactgggagatatacctaatgctagatgacgagttagtgggtgcagcgcaccagcatggcacatgtatacctatgtaactaacctgcacattttgcacatgtaccctaaaacttaaagtataataataaataaataaatgtaaaaaaaaaagaaaatcaagaagacaattatggccagaaaaaggggataaaaagtgagggagagcacastgaatggtgaggacaaacaaatttaataggcaggtgggcccagagtaactagggccttataggccattgtaataattttgacttttacgcagtgaaaatggggagctataaagaatgtgaagcagaggaatgacaagatataacttaggtttcaataatgtccccttggctactatgttaaaaagagactacaggtgcataacagtggaaggaggatgagttagaggttttatgccatcatctagattagagatgatgatgttgtcatgtaaaagggtgatagcagtggagatcatatgaagttgggatttaagatatattttaaaagttaagccaaagaatttgaatgtgcagtgcaaaataaagaaatca

SEQ ID NO: 641707 - DNA, 582 bp, Homo sapiens
cactgggagatatacctaatgctagatgacgagttagtgggtgcagcgcaccagcatggcacatgtatacctatgtaactaacctgcacattttgcacatgtaccctaaaacttaaagtataataataaataaataaatgtaaaaaaaaaagaaaatcaagaagacaattatggccagaaaaaggggataaaaagtgagggagagcacagtgaatggtgaggacaaacaaatttaataggyaggtgggcccagagtaactagggccttataggccattgtaataattttgacttttacgcagtgaaaatggggagctataaagaatgtgaagcagaggaatgacaagatataacttaggtttcaataatgtccccttggctactatgttaaaaagagactacaggtgcataacagtggaaggaggatgagttagaggttttatgccatcatctagattagagatgatgatgttgtcatgtaaaagggtgatagcagtggagatcatatgaagttgggatttaagatatattttaaaagttaagccaaagaatttgaatgtgcagtgcaaaataaagaaatca

SEQ ID NO: 641708 - DNA, 582 bp, Homo sapiens
cactgggagatatacctaatgctagatgacgagttagtgggtgcagcgcaccagcatggcacatgtatacctatgtaactaacctgcacattttgcacatgtaccctaaaacttaaagtataataataaataaataaatgtaaaaaaaaaagaaaatcaagaagacaattatggccagaaaaaggggataaaaagtgagggagagcacagtgaatggtgaggacaaacaaatttaataggcaggtgggcccagagtaactagggccttataggccattgtaataattttgacttttacgcagtgaaaatggggagctataaagaatgtgaagcagaggaatgacaagatataacttaggtttcaataatgtccccttggctactatgttaaaaagagactacaggtgcataacagtggaaggaggatgagttagaggttttatgccatcatctagattagagatgatgatgttgtcatgtaaaagggtgatagcagtggagaycatatgaagttgggatttaagatatattttaaaagttaagccaaagaatttgaatgtgcagtgcaaaataaagaaatca

SEQ ID NO: 641709 - DNA, 624 bp, Homo sapiens
tggaggccaggagtctaaaactattttggtaaagagaaagacagtaatattttaggctttttgagccaataggcaaaatggaacaattcttcttaccaaaatgccttgttggtaagttttaaaaatattttatatctaaaaaaaattaagtcacaaagcccttacgaaaacaggccacaggctacagtttgtctgattagacaaacattatattcataatagagtatgytaagataatacccccacctaaagaatttctgtggtcactattctcctaaaggactgtgtaagagacctgtctctgtctctctgttttcccctatttctaagtccctctctctttctttctatttctattatatctttgtagaattcaaaaatatgtatggaatacataccctcacgcctacaattttctggtatcttaatttggctgcctatttgtgtcttctgagaattttaaccattttattagttttcatacaatgttctggtgactgtgtcgttgagtaactgcaattgtgtagatgctttaccaggagctgggttaatccatcaatatattgtatgtcaatatgctgtatctgctgaggcagctggagaaggagattgagagcaggtact

SEQ ID NO: 641710 - DNA, 537 bp, Homo sapiens
aatgcatagaccttgctgtttgattaatcaattcatcatactttgtatctaagtgaatattttcaggaactactttttctgatcattcagtsagtcctactaggagcaaatgatgcaaatcataagagttacattccttctgagttaggctattggcttcaattagcctttttccacatgatttacagtgcagtgcatattcttggatacaaagacttatggctagttactagggaaagtttgtaacttctgggctccagttgctcacggtttcacagaaagctagattttcttcctatttatcctttgtgtttaaagttacagtggtgtttgtatttcccaggatataggattaaaaatgaggatatgaaccaaactcttgactttcacagttcagtagtgtgtgcttgcttggtgagaagcaggatctgcttgtcatttagtcaagaattattttctgcattactaaataggcaaggtaatctctaacagcttttatttatttgacagagaatgccaatctatttaaaagactag

SEQ ID NO: 641711 - DNA, 547 bp, Homo sapiens
gcttttgataaaatccaatatctcttcatgatgaaaactctcaacagactagccattgtaggaacacacctcaaaataataggagccatctatgacaaatccacagccaacatcwtactgaatgggcaaaaactggaagcattccccttgagaactggaacaagacaaagatattcactctcaccactcctattcaacatagtattggaggtgctaaccagagcaatatggcaagaggaagaaataaaaggcaacctattaggaaaagaagaagtcaaactgtctctctccatgcacaatacaatcctatatctagaaagtcctaaagactaccaaaaggcttctggagttgataaatgacttcagtaaagtttcaggatagaaaatcaatgtataaaaattagtatcatttctatacaccaataacgttcaaactgacagccaaatcaagaacacaattccatttacaatagccacacaaaaatatacctcgaaatacatctaaccaaggaggtgaaatacttctacaaggagaactacaaagcac

SEQ ID NO: 641712 - DNA, 547 bp, Homo sapiens
gcttttgataaaatccaatatctcttcatgatgaaaactctcaacagactagccattgtaggaacacacctcaaaataataggagccatctatgacaaatccacagccaacatcatactgaatgggcaaaaactggaagcattccccttgagaactggaacaagacaaagatattcactctcaccactcctattcaacatagtattggaggtgctaaccagagcaatatggcaagaggaagaaataaaaggcaacctattaggaaaagaagaagtcaaactgtctctctccatgcacaatacaatcctatatctagaaagtcctaaagactaccaaaaggcttctggarttgataaatgacttcagtaaagtttcaggatagaaaatcaatgtataaaaattagtatcatttctatacaccaataacgttcaaactgacagccaaatcaagaacacaattccatttacaatagccacacaaaaatatacctcgaaatacatctaaccaaggaggtgaaatacttctacaaggagaactacaaagcac

SEQ ID NO: 641713 - DNA, 616 bp, Homo sapiens
taatttatttagatcccttgcacacaactgactgaaaactatgtactctattcattccatgaaaaatctgatagaatttgagtattggccaatattaagtggaatgactttgctacagatgaagtatagcattaaatgcagagaaatcttgttttattgtattttttccctttatgatgactgtgcaagagttcaagaatatgcaattctccatgtcaactttaatatttacatagggacccatgcttgcctatctctgtctaactttttccctggtcttgattttctcctttatatttttctgacttcacattacaaaccagactgtaagcactgatgcaatcacccacttactcagcagagaaaaggacaaaggacaaatcaagaaggcatgagacaccataatcaattcctcctggtctgctactgatcacaggccctggtctaaggtaatgtttccctccagttatttctaatgtaaaaaaataagaatgttacagyagttgctatggttaaatatcctgaggtgcttggtgaaaatgcagattcgtgaaaccaccccctgatattccatctagtttggagaggtggcccaagaatatgtattttaataaaa

SEQ ID NO: 641714 - DNA, 629 bp, Homo sapiens
cttgctggataaccaagaatttagagtactaaacgtgcaaaatttctcattaatgaagatattgcaactgttaaccctgagtttattttattcacaagaaagataggtgagcaaatgttttaaattttaattgtagtttgaaaaagtcaccctagaaaaatgtcatggttatattttgccatgctcactcaaaattaatatgagtgtaacttcaaaagccacatgatgtgttcagaaagctgaacactattccaaatacgtagaacccctcacaatattgttgttttccacattatttaatatcccttgaatgatttaacatttcatagcttcagcaattaatttcaacttcctctgcctctgccaaaggatagtgtgtaccttagaattcaaacatcatctcctgtttctagcatcttagaacacttcgcctatgcaaaaaaaaaaaaaaaaaaaatagtacckaccatggtaagttcatcacagaaaacgaaatatataaaatacacatgtagagatggaggtaaaatctcttgtcccaaaaattataccttgtgggctgtggtgactgacatttcaaagaacagtaaagtgtttttgcaagctaaaaataacagatggaaagccag

SEQ ID NO: 641715 - DNA, 551 bp, Homo sapiens
gggctacaggccctatgcaagtcataaatccagcagggcagtcaaatcttaaagtttcaaaatgacctcctttgactccatgtcttacatcctggtcacgctgatgcaagatgtaggtacccatggttttgggcagctctgtccctgtgcctttgcagggtacagcctccctcccagctgctttcatgggctggcwttgtgtctgtggcttctgcaggtgcacagtgcaagctgtcagtggatctaccattctggggtctggaggatggtggccttgtcttccaggacaggtgtgtcccatttcctctgcatgattgtaggaagcactccttacaattttccctttctaagcatttattccatgacttaacccaccaccactacaactgccatcactcagatataccaaaacttgggtaaataattatctttcttgtttatattgatcttttccaagctcacatttatttccatttctactattggaagtgatttggggctgggcacagtggctcacgcatccatctgtggtaggggaccatctcaggtgg

SEQ ID NO: 641716 - DNA, 597 bp, Homo sapiens
agtttcttcacatccttgccagcacttgttgttttttgctcttgggtaatagccatcccaatggatgtgaggcatttgaaacctatgtcttttgacagcaaggtcagtgtggatcataccacaacacagaaactacactgcatcgcaccaaccacagatgcctgcagaaaacacaggagaagctctctcagaaatatgcagtcctgaatctaatgggccctgctgccctgatcaggatggcttatacaggaacagagagcacttctagtgcagtgctgtattggatggaattgcgtcccctcaaaattatacgttgaaaccctaacccccaatatgagggtatttggagatggggcatgtgggtgataattaggttatgaggtcatgagggtagagcctcctgggagaattagcgccctcataagaagagacaccagacagtttccaatctgtctccctgcttgcaaggaaagaagaggtcacgttagcacacagcaagaaggtaaccatctgcaacccaaggagaaagccytcaccagaaacccaccatgccacccaccttgatcttggacttctagcctccagaacagtgagaaa

SEQ ID NO: 641717 - DNA, 387 bp, Homo sapiens
ctatttgcctgggtatcactagcggaggctgcagaacagcaaagattgctacctacttctgcccctggaagctttgtcccagaggcacctgccagatgcgagcctgagctctcctgtatgaggtgtctgtcgacccatgttgggaggtatctcccagtcaggaggcacaggggtcagggacccacttaaggaggcagtctgtcccttagcagagctcgagcactgtgcttggagaaccctctttgtcaggatccactgctctcttcagagccrgcaggcagaaatgtttaagtctggtgaagttgcgcccacagccaccccttcccccaggtactctgtcccagggagatgggagttttatctataagctcctgactggggctgctg

SEQ ID NO: 641718 - DNA, 644 bp, Homo sapiens
gccagtggttcttagcttgctgggctccgtgggggtgggacccgccaaacgagaccagttggctccctggcttcagccccctttccaggggagtgaatggttctgtcttgctggggttccaggcaccactggggtatgaaaaagaaaactgcagccagctcggtgtctgcctgaacagccgcccasttttgtgcttgaaactcagggccctggtggtataggcacacaagggaatctcctggtctgcagattgcagatatcatgggagaagcatagtatctggctggataacacagtccctcacaacttcccttggctgggaaagggagtcccccatccttgccctttccgggtgaggcaatgccccaccctgcttctgctcgccctctgtgggctgcacccactgcctaaccagtcccaatgagatgaactgggtacctcagttggaaatgcagaaatcacctgccttctgtgttggtcttgctgggagctgcagaccagagctgttcctattcagccatcttgccagatcccccaaagacataatttataatttgattttggaaggtttgtcaaatctcaaatgtttaaatgctttatattttaaagtagaatttcaggttaccgtaagtcattcatttagc

SEQ ID NO: 641719 - DNA, 644 bp, Homo sapiens
gccagtggttcttagcttgctgggctccgtgggggtgggacccgccaaacgagaccagttggctccctggcttcagccccctttccaggggagtgaatggttctgtcttgctggggttccaggcaccactggggtatgaaaaagaaaactgcagccagctcggtgtctgcctgaacagccgcccagttttgtgcttgaaactcagggccctggtggtataggcacacaagggaatctcctggtctgcagattgcagatatcatgggagaagcatagtatctggctggataacacagtccctcacaacttcccttggctgggaaagggagtcccccatccttgccctttccgggtgaggcaatgccccaccctgcttctgctygccctctgtgggctgcacccactgcctaaccagtcccaatgagatgaactgggtacctcagttggaaatgcagaaatcacctgccttctgtgttggtcttgctgggagctgcagaccagagctgttcctattcagccatcttgccagatcccccaaagacataatttataatttgattttggaaggtttgtcaaatctcaaatgtttaaatgctttatattttaaagtagaatttcaggttaccgtaagtcattcatttagc

SEQ ID NO: 641720 - DNA, 644 bp, Homo sapiens
gccagtggttcttagcttgctgggctccgtgggggtgggacccgccaaacgagaccagttggctccctggcttcagccccctttccaggggagtgaatggttctgtcttgctggggttccaggcaccactggggtatgaaaaagaaaactgcagccagctcggtgtctgcctgaacagccgcccagttttgtgcttgaaactcagggccctggtggtataggcacacaagggaatctcctggtctgcagattgcagatatcatgggagaagcatagtatctggctggataacacagtccctcacaacttcccttggctgggaaagggagtcccccatccttgccctttccgggtgaggcaatgccccaccctgcttctgctcgccctctgtgggctgcacccactgcctaaccagtcccaatgagatgaactgggtacctcagttggaaatgcagaaatcaccygccttctgtgttggtcttgctgggagctgcagaccagagctgttcctattcagccatcttgccagatcccccaaagacataatttataatttgattttggaaggtttgtcaaatctcaaatgtttaaatgctttatattttaaagtagaatttcaggttaccgtaagtcattcatttagc

SEQ ID NO: 641721 - DNA, 668 bp, Homo sapiens
cttgctgggagctgcagaccagagctgttcctattcagccatcttgccagatcccccaaagacataatttataatttgattttggaargtttgtcaaatctcaaatgtttaaatgctttatattttaaagtagaatttcaggttaccgtaagtcattcatttagccaaaacgataacttaaaattttttcaaaggcaaaaaactttagtcattaatagagggaagacagctttcaagttttatgtctcttttctttcccttcttttttctacagtttattcaaaaggcaaacaaaaatcttccttttttttttgatattacatgaaaatcttgttcaagagagaaagccaaatctcatccttgcattagtgtgctattgatttcaaaaccagttcttaataaaaccttatagacaaatctatccaatcttaatcggtttgaccataaggtaagacaccataaaccttttgtaccccttttcaaatttttgtgaaagagaagatcagtgctctatgaaaaacccattgtgcttttattccaatgttcaatttatggaaaagctgaataatacccctttaacttcagcctgtatgttcacacacagaatttattttacaagattaatttttcgcaaaccttccacaatgtgctcaaaccttcagctttat

SEQ ID NO: 641722 - DNA, 619 bp, Homo sapiens
ttctccatctccatctccagtggagagagtggtaattttccaaagccaaactgtttctcagttgcagaagaagaaatggatactgagcagtcaaaaaggacagatgtcccctgattttaaggcagtttacatagaagaggcttaggggttttagtttttgcaggtgttcaaaaaatgggtgtgatttggtttgcattaattaaattcacctgggtttcaagcaagcaaaaggtgataaacccatagttccctaaagtggtgagaatagaattgagaatttaagtttagtaattttgagaaagacattggtaaattgaaatatatcaagggcaatcaggtaatcagaaggatctggaaaactttatctatgaagagtaaagaaactgctttaaatactttggagcctctgaaagaaatattagctgtctcactattgtcatgtattctaaataagttaaatagtaagcttcattccctctttaaatttaatttattatagaattttattatgtcaaagacttcattgtagaaattactttaaaataggtatttcaaactgaaartttgttatttctgaatttttgtttatgcttctgtaaaatgaatttgaaccagatcg

SEQ ID NO: 641723 - DNA, 627 bp, Homo sapiens
aacaattagaatttggaatttaattaggaaaacacaattaaagggatgcagtgtctattctcctgctgaatattaaagttcaacacaaaggcaacccttacgtgaaatgtagttgtggctaattagctgcggtaatgggctggaacaagtgacttgttcacagatagacaatgaactcttcagcggccagagatcaaygatcatttaggaagcaaatgcttagaatcacatggcttagaatatgcttgtctggtgcaatgtttcacaatacatagtacactccctatgttttctctccatattcgatatgcaactgctaagaaacattatatgcttggccttattaataaagaattattgatatgctaaccctgaactgaaaccaaagcaaagcggactgatctctggaaacaagctgagtaaactcccaaggtcctgggccactaagtagaattgctagagacagtaggtctcttctgctgcctcctgaccttgaatataaaactacaagctcaggttgcagaccacatgttcagaaaagaatgatctctgaaaacagcacaggataaaactcaaaagagccttgggtcttgtagttttggctctgccactatgagctgtgtgacg

SEQ ID NO: 641724 - DNA, 408 bp, Homo sapiens
agatctttacttctctgggctttctgtattttacctgtaaatggcatgattaagtcactctctaagggtgttataaaaatatcacagcttaggagatgggaaatataaagatactatgtgaagctggcattctttattagggcaaatctgcaaacaagtaaagagttctttcctrtaccagccactcagtgacttacttacttaagtcctgcttggtagcaaccctgtcctggttcttccttggtctcattagtaggcaccttgccatcagccagtaggttatcaagacatttattctcacttcaacatttgagtgtttacacacactagcagtggttctaggagctgcagatagtcatgaacaaaaaaactccccgacaaatcctgctcccatggacagtctattat

SEQ ID NO: 641725 - DNA, 400 bp, Homo sapiens
tattttacctgtaaatggcatgattaagtcactctctaagggtgttataaaaatatcacagcttaggagatgggaaatataaagatactatgtgaagctggcattctttattagggcaaatctgcaaacaagtaaagagttctttcctataccagccactcagtgacttacttacttaagtcctgcttggtagcaaccctgtcctggttcttccttggtctcattagtaggcaccttgccatcagccagtaggttatcaagacatttattctcacttcaacatttgagtgtttacacacactagcagtggttctaggagctgcagatagtcatgaacaaaaaaactccccsacaaatcctgctcccatggacagtctattattattagtagtagtatttt

SEQ ID NO: 641726 - DNA, 433 bp, Homo sapiens
tcacagactgtgcaatggcccaatgtcagaaccatgaggtgatgaaatttgtagctttctaaggtttttcttattcccacaatcctgttcaaatagcaacaatttcatttaggccaaaccaatkgctaattttgggtcctgggaaaggataactaataaacctcacatcattccagtgaacccagattgcattcctttctgatggcttatcacattgcactctgggttaaatgccatagttatagctccatttacatatttgggtaatccattttctaagtgttctcttaaagaaaacctagaaaacgtttctatttctttattccctttggaaaatatttccttgcaggaatctaaggctagaattgaatctgtaaaaggactcttgtaattctatactttttaaaaccactgtttgaattttgttgaattc

SEQ ID NO: 641727 - DNA, 436 bp, Homo sapiens
gaattcatttgcttttactgctacttttcacagactgtgcaatggcccaatgtcagaaccatgaggtgatgaaatttgtagctttctaaggtttttcttattcccacaatcctgttcaaatagcaacaatttcatttaggccaaaccaatggctaattttkggtcctgggaaaggataactaataaacctcacatcattccagtgaacccagattgcattcctttctgatggcttatcacattgcactctgggttaaatgccatagttatagctccatttacatatttgggtaatccattttctaagtgttctcttaaagaaaacctagaaaacgtttctatttctttattccctttggaaaatatttccttgcaggaatctaaggctagaattgaatctgtaaaaggactcttgtaattctatactttttaaaac

SEQ ID NO: 641728 - DNA, 647 bp, Homo sapiens
gagatactactacatattcactacagcggctaaagtttaaaaagtgtgacaataccaagagctgatgacaccgttaagcaagtggaaattcgcgcatacacttacatatgatgcagtagctctctcctatgtcatttgccccaagacaaatgaaaacccatgtccatacaaaggcttgtctataaatgtttatagatgcttcatctataatagccccaaactggaaatgacccaaataaccttcaatagatgaataaacaaaatataaatatccatacagtgaatactactgagccataaaaaaaaacmaattactcacatattcaacaacatgaagagttttaaaaacattacaccaagccaaagaaacccaataccaaacaattacatactgtatgattctatgtacatgaaatcttgaaaaaaaaaaacccacaaactaatctacagtgtgagaaatgagatgaggggttgcctggggcttggggcaggagacacagggattaaaaagtgacaggagagaacgttctgggatgatggacatattttttattttgattatgttggttatacagttatatacatttgtcaaaatatatgaatatactgtgttatgtaaattatacctcaataaagttcaaaagatt

SEQ ID NO: 641729 - DNA, 647 bp, Homo sapiens
gagatactactacatattcactacagcggctaaagtttaaaaagtgtgacaataccaagagctgatgacaccgttaagcaagtggaaattcgcgcatacacttacatatgatgcagtagctctctcctatgtcatttgccccaagacaaatgaaaacccatgtccatacaaaggcttgtctataaatgtttatagatgcttcatctataatagccccaaactggaaatgacccaaataaccttcaatagatgaataaacaaaatataaatatccatacagtgaatactactgagccataaaaaaaaaccaattactcacatattcaacaacatgaagagttttaaaaacattacacmaagccaaagaaacccaataccaaacaattacatactgtatgattctatgtacatgaaatcttgaaaaaaaaaaacccacaaactaatctacagtgtgagaaatgagatgaggggttgcctggggcttggggcaggagacacagggattaaaaagtgacaggagagaacgttctgggatgatggacatattttttattttgattatgttggttatacagttatatacatttgtcaaaatatatgaatatactgtgttatgtaaattatacctcaataaagttcaaaagatt

SEQ ID NO: 641730 - DNA, 647 bp, Homo sapiens
gagatactactacatattcactacagcggctaaagtttaaaaagtgtgacaataccaagagctgatgacaccgttaagcaagtggaaattcgcgcatacacttacatatgatgcagtagctctctcctatgtcatttgccccaagacaaatgaaaacccatgtccatacaaaggcttgtctataaatgtttatagatgcttcatctataatagccccaaactggaaatgacccaaataaccttcaatagatgaataaacaaaatataaatatccatacagtgaatactactgagccataaaaaaaaaccaattactcacatattcaacaacatgaagagttttaaaaacattacaccaagcmaaagaaacccaataccaaacaattacatactgtatgattctatgtacatgaaatcttgaaaaaaaaaaacccacaaactaatctacagtgtgagaaatgagatgaggggttgcctggggcttggggcaggagacacagggattaaaaagtgacaggagagaacgttctgggatgatggacatattttttattttgattatgttggttatacagttatatacatttgtcaaaatatatgaatatactgtgttatgtaaattatacctcaataaagttcaaaagatt

SEQ ID NO: 641731 - DNA, 647 bp, Homo sapiens
gagatactactacatattcactacagcggctaaagtttaaaaagtgtgacaataccaagagctgatgacaccgttaagcaagtggaaattcgcgcatacacttacatatgatgcagtagctctctcctatgtcatttgccccaagacaaatgaaaacccatgtccatacaaaggcttgtctataaatgtttatagatgcttcatctataatagccccaaactggaaatgacccaaataaccttcaatagatgaataaacaaaatataaatatccatacagtgaatactactgagccataaaaaaaaaccaattactcacatattcaacaacatgaagagttttaaaaacattacaccaagccaaagaaaccmaataccaaacaattacatactgtatgattctatgtacatgaaatcttgaaaaaaaaaaacccacaaactaatctacagtgtgagaaatgagatgaggggttgcctggggcttggggcaggagacacagggattaaaaagtgacaggagagaacgttctgggatgatggacatattttttattttgattatgttggttatacagttatatacatttgtcaaaatatatgaatatactgtgttatgtaaattatacctcaataaagttcaaaagatt

SEQ ID NO: 641732 - DNA, 559 bp, Homo sapiens
aatttttaaaactagccaggcgaggtagcaagtgactgtagtccctgctactcaggagagtgaggcaagaggattgcttgagcccaggagtttgaggatgcagtgagctatgatcataccactgcactccagcctggatgacagaatgagatcctgtatcaaaaaaataaatacaaagtaaaaacataaaagccaagggaaaaaggaagaagccattattagtgtcaaatactacagggagatgaagtaaagtgaaggtaaaaatgtccacattgttcaggagcagtttcattggtgtcatgggagacagaaacagtgggttaaataaatagcagggaaaggagtatagaaagcaaatgtagacaacttttcaagaagcaaaagcacactcaatgagagacaagttactataaaggaatttgaaattgatacaatttttttttgttttaaaagacaacagyggttcaaatgctactgctgagacagagcaagcagagagaggttaaagatatcagcttgagaaggcatcattgataaagggattttcctgaagtaatgt

SEQ ID NO: 641733 - DNA, 353 bp, Homo sapiens
acaacttttcaagaagcaaaagcacactcaatgagagacaagttactataaaggaatttgaaattgatacaatttttttttgttttaaaagacaacagtggttcaaatgctactgctgagacagagcaagcagagagrggttaaagatatcagcttgagaaggcatcattgataaagggattttcctgaagtaatgtaacaggatagaatccaaagcacaggtaggagggtggtcttacataattggaaggacattttccaagtacttattccttagcaacaggtatattcaactatataccaattgtatacttgacacctccacttggatattcttagagggatctcaaatt

SEQ ID NO: 641734 - DNA, 353 bp, Homo sapiens
acaacttttcaagaagcaaaagcacactcaatgagagacaagttactataaaggaatttgaaattgatacaatttttttttgttttaaaagacaacagtggttcaaatgctactgctgagacagagcaagcagagagaggttaaagatatcagcttgagaaggcatcattgataaagggattttcctgaagtaatgtaacaggatagaatccaaagcacaggtaggagggtggtcttacataattggaaggacattttccaagtacttattccttagcaacaggtatattcaactatatacmaattgtatacttgacacctccacttggatattcttagagggatctcaaatt

SEQ ID NO: 641735 - DNA, 580 bp, Homo sapiens
tatagggatgtttattcatgcccatttcaaagatggtgacaccatgycccaaagatgctaagtcactgtaaaatgaggataataatgcccaccttgcagggctgctataaggatcacaggttatatattgaaaggccctgagaggcaacatagcacaatgattaaaagtacaagatctgtacccagattatctggattcaactcctggctccctgatttgctcactgtgtgaccttgagtgatgtacttaacttctctaagacttagtttatcaactacagatatcagttgtttctcctgcttctctccacctgcaatcacagaaacatgatatttattataaaatatgtatttgtaaatatttttaaaaattggaattatgtcctctataaaattttacattctattttttcatttaagattatggtatatttctctatataatatgttttcatctttttcattttctgtgttaaagtctgtattccaaactgttacacgctctttgctagaaaagaatccaaacgtacataaaggaaaacagcagccatttttgagcacattcctgagtgccaggcac

SEQ ID NO: 641736 - DNA, 629 bp, Homo sapiens
aggattttgtgatcttctctatgaaggatactatataaaaataaattatactgcattgtgctgaaagtacttaccagtcttatcaagatccaataaggcttttttacacgtgactcttaagtgcatatgggacgagacggtaattcttgttagaaggaatgactcatctctctctgcaccaccttcccctggtccccacctggcttctttcctttttaaagcactcagcaggtaatcactgtgtttccttggggctgctagctttgctgcctcaaactgagtctgtctcacattaggaagaataarcagactctcatggcatagtacttgcagggtgtagttcacgcagcctggaaaatcatctctgccttctacttatgaacaatttctcaagcctcaggactcgggtgtagtgtcaccctcatttgggaatcctttcctgaaattcatcccttctactctcagactgctcttcccttctactctgatagaagctccctgtatttaactgtgttatagcgtatttcacttactatcgtactgctttgcagttgtctatttacttgtctgtctctgagaccagactcagcgctcccaggattgggtcttgcctagcacaggaccaatcc

SEQ ID NO: 641737 - DNA, 569 bp, Homo sapiens
ggccaagttagtttcccaggggagtgccaaattatcaggactgcagatctccttgacactttccttgttaattattccaggacagaaatgatggccaaaagcatgggatagatcgtgggcaggcttttagactatctccacaatgtttatcatgggcactggcagtgtctaaatatcaggcaccattagggtcctctgtggaaaaaagtggcctggcctcctcagtccctccccttggggtcttggctgattctgcctgtgctgttagaaagtagcaacagagcagtcgtcaggctccccatttacaggccagagagacatcacactagcatgaagataaacttcaaagatgcacggccagggacgatcattgctataagaggaaatcaackttttaaaagaacccccactgccactccacctgccccagcaacagacactgacttcactgtggccaccccacagtgaattcaccctcccttcctgacctccccgatcatccacatgtggataacagcagctgacaaggttatggctctgcctgcacacctccctccaagggcttctgg

SEQ ID NO: 641738 - DNA, 401 bp, Homo sapiens
cctagctctgtggtctacatctgtgtgactctgggcaaacccttcattgcagccttgaatgacatttggagtctcatctgcagaaaggagataatgatggtgatctcacagttgttgcaaagtttaaaggagagcatatctgccaagtgccagatagcatagagagttagtcatgttagtgctattytggaaggagaccatatgtatatggtggtgtacaaggaaaagggggagggagtaatattttggaaagatgcaatgttttttttgatagaaaagtacatttcctattgcaccatgttttttttcagctacagtaacctgccaagacatctcacaggaaactcattggagagtgaggcagggggtgtgcttaatgcagacagatgtaatggaaatgt

SEQ ID NO: 641739 - DNA, 584 bp, Homo sapiens
ttagtgctacatgccagcttctaggaattatgaggcctgagaacaagtaaagtgacaccatgaagaactagccgctaaatccaggttgtgagatatcctggagtacaaataacctttttctttaataaataaatagcattaaaaagaagggaaaactattatagaatggagagacttcagaaacacaacacataaaggggggataagtaatagtactcacgagattcttaagattcaattagaagagcaatgtgaagtgcttttcacagtgcctggcaaatggtcaatggaaatgattactaccttgtgccacctctcagagtctcagtctccttttgtttgtaacacactaggagatgacagcctccccctgtcttaacagttaaggaattcagccaccttagtcctccatccctctgcacctggtcaagaaggtggccttggcagtatctgctgcagtgtgcacagttggccggtagatggcagctcaggccagtttatctggagccttggacccaggaagagctagttcygtttttgctgcaagaggctaggtcctgcttgaccacccatcagacagtatt

SEQ ID NO: 641740 - DNA, 581 bp, Homo sapiens
tcttaacaggttgcaacaacttccttctgttccttctctgctctgtgcctctctctttagtttctttttgggcctgggtttgtctcctcccaaaggagctggtccaagttccttggctctcgccttctcactcatgcctctgagctgtgtgctctcccttgcttacctccctgctccccatggggcagcrgagtagagaggaagctctgagaatgaaagccagtgacacctgcgcaaatgtgtctgtaaaatagatgccagtattggagagtttggttaaagaaaatcccatgctgacattcagacaaaggtagtgagggcctttagagatttcagtccaggatttctgaatctaagtgtgggttttagcatttttttccccctccgccatatgccagttgtcttccaagcctttgatccggctgcttggcagtacctctatctaaagttaaacaattttccgatgtgtggactgaaaattttcggcaccctgtgctggctggttgagggcccattttgagaattgaaaatacttgtatgcacatccttaggccatggcttcctgacgggtaattcaagct

SEQ ID NO: 641741 - DNA, 616 bp, Homo sapiens
ccactaaacctggattcataacttctgggggtttttaagcactagagatacagtggtaaggaggatctttttcaatattaacactgtgaattatttaaattcacctatttctgaagctctgtaattataataattagttcccctttttggtaaccatttttcttttctttctttttctttctttttttttttttttaaaaaaagagtctcgttctggtcacccaggctgtagtgcagkggcgcgatctcggctcactgcaaacctctgcctcccaggttcaagcaattcttctgccttagcctcccagttagctggggccacaggcatgggccaccatgcctgggtaatttttttttttttttttttagtagagatgagatttcaccatgttggtcttgaactactgacctcaggtgatccacccgccttggcctcccaaagtgctaggattacaggcgtgagccaccatgcccggcccgtccttcatgcttttctattcttattattttagtctcactgatcattacaaaactacggaatctgaatagaatcctatggatttgtgtagagaatattgttgaattgaatttctaaaggcagcacactgaggagagg

SEQ ID NO: 641742 - DNA, 616 bp, Homo sapiens
ccactaaacctggattcataacttctgggggtttttaagcactagagatacagtggtaaggaggatctttttcaatattaacactgtgaattatttaaattcacctatttctgaagctctgtaattataataattagttcccctttttggtaaccatttttcttttctttctttttctttctttttttttttttttaaaaaaagagtctcgttctggtcacccaggctgtagtgcaggggcgcgatctcggctcactgcaaacctctgcctcccaggttcaagcaattcttctgccttagcctcccagttagctgggrccacaggcatgggccaccatgcctgggtaatttttttttttttttttttagtagagatgagatttcaccatgttggtcttgaactactgacctcaggtgatccacccgccttggcctcccaaagtgctaggattacaggcgtgagccaccatgcccggcccgtccttcatgcttttctattcttattattttagtctcactgatcattacaaaactacggaatctgaatagaatcctatggatttgtgtagagaatattgttgaattgaatttctaaaggcagcacactgaggagagg

SEQ ID NO: 641743 - DNA, 616 bp, Homo sapiens
ccactaaacctggattcataacttctgggggtttttaagcactagagatacagtggtaaggaggatctttttcaatattaacactgtgaattatttaaattcacctatttctgaagctctgtaattataataattagttcccctttttggtaaccatttttcttttctttctttttctttctttttttttttttttaaaaaaagagtctcgttctggtcacccaggctgtagtgcaggggcgcgatctcggctcactgcaaacctctgcctcccaggttcaagcaattcttctgccttagcctcccagttagctggggccacaggcatgggccaccatgcctggstaatttttttttttttttttttagtagagatgagatttcaccatgttggtcttgaactactgacctcaggtgatccacccgccttggcctcccaaagtgctaggattacaggcgtgagccaccatgcccggcccgtccttcatgcttttctattcttattattttagtctcactgatcattacaaaactacggaatctgaatagaatcctatggatttgtgtagagaatattgttgaattgaatttctaaaggcagcacactgaggagagg

SEQ ID NO: 641744 - DNA, 458 bp, Homo sapiens
acagtggctacttcatagaggattcaatgatgcattccttgtaatatatttagcagaatgcctggcactcaataaatgtggcaattcatcatcatcatcgccaycactgtaatatagatattaataagaacagctatcattcctggctaaccttcccccaggactagagagcagacatcccttctcacaggaagcagctctttccaggtgccacagagctgaatgtttataaaagggtaaaacacaggcttccagggactgctttggtggtaaacaagaccaggaaagagctaataaaatttcaaattagccatgacttttcacggcccttcaattgtgctagctgatttaatggtcaatgtccctgctcactgggattgaataatggagcatttctgcagagttatggatgcaacagctgaatctgtcatgctaacatcaatagcagaatgcaaata

SEQ ID NO: 641745 - DNA, 602 bp, Homo sapiens
gattagaagtaatatattaagcatcttagagtctggctcatagcaagtggtcaataatagctactcttattgttattgttatgatttattaccattattgctattactattgctagcatgtcccaaaattcagctcagctacttagaacctaagctacattctccaaaatgacctcacccgagccatcactgctggggctggcatcatggtctgacattcagagtgcttttgaatatgtggatgccctgagccagctccttgtctgcctcacatcctgtgtttctgtagagtacagcctctgccagggcctgagtgcccagcttctttttcctccaccttgagaaaggcaggtgatgaacagagggaaagttaatgaactagccatggctttcagcacagcaccttgcacaccatgggtgctcaggagatacctgctgagatgaaacaaactacagaactgagctacatgttcctaacattccagaagcatcctcatagcaacacagctcagactctcttaagtcccctgcccttcagcaaagaaagttcactgaarcccctcttttacacatgagacaatcgagatccagagagggtaaac

SEQ ID NO: 641746 - DNA, 614 bp, Homo sapiens
ggggaactgaggccagagagtttaagtaacttgcccaaagtcacacactagtaagtttcagtgccaggatttgaccccagacagtctatctctggaatccatactctttatcactatctgccttcaaggagactataagcttctgggcaccatgcagaaatgggagagaaacagaaaggctttttgttactaatttattaaggaaaaaactaggttttaggacartcaagtagcttacctgaggccacaccactagcaaggaggatcggggacaccaagtctaaccaatgcatttgcagtactttggtgggcagcttctgtattgtaaactccatggagaaaactagagaagtaggtatatcactgttactcccacattatttatgaaatgtggctcagagagactaagtacaggaacttgtccagggtcactgttgggggccatacttggtcttgaactttagtctctgaacatcatggtcctcctaccatagcacactgcttacctcaatgggatgaagttacagttttctggcttttatggactggcatttgtcacaacccctgcttcactatttaattcattcaattcccattcatttatttgtatagca

SEQ ID NO: 641747 - DNA, 546 bp, Homo sapiens
ctaagtacaggaacttgtccagggtcactgttgggggccatacttggtcttgaactttagtctctgaacatcatggtcctcctaccatagcacactgcttacctcaatgggatgaagttacagttttctggcttttatggactggcatttgtcacaacccctgcttcactatttaattcattcaattcccattcatttatttgtatagcagttatgttttaagcacttccmctaagtgctggaacacagaacagatctgtgcgctcccacggtggtgaggaagtttcccaaagtcacacagctgagacgcagcagagccagaatttgaacccaggcaggaatacatgtcgttagactgttgtctgccgacaaagcacatagactgtacccctgggcttttcctgtccaccactttggacactacctgcttatctctttgttatgtattttaagctggtctattaatattaggtgcctgtaaaagtactttgatataatgaggccaaaaatctgtgatctggtggactttctttgtactttgggaag

SEQ ID NO: 641748 - DNA, 628 bp, Homo sapiens
tcaggcgggcagatcacttgagcccgggagttcgagaccagcctggtcaacatggcaaaaccccatctctccaaaaaaacaaaacaaaaattagttgggtgtggtggcaggtacctatactcccagctactcaggaggctgaggtgggaggatcacttgagcccagaaggttgaggctgcagtgagccaagaccgtcccactgcactccagcctgggtgacagagcaagaccccatctcagggagaaaaaaaaaccttgctcaaggggaatatgtaatgagaaaagagcagggactgaagaagaagccatggggwgcctccctgtgaggcagctgctgtcatccccagagggtgacaagggaagccaaagagaagtcctcactgctggaacatgacggagcgggatgcagacatgcaggtctgtcagactcgggaaggagcccctgcactttccaccaccctagcccatccttgcaaggagtcgtgacgagatgagaaaggtgagatgaaggaagcccagcaagtgcgtggcagaattcaaacctccacctttctagaggtgaagctacttgatggtccgaaccctccaacttacccccggagtactgagaagctgagaggttaagta

SEQ ID NO: 641749 - DNA, 566 bp, Homo sapiens
aagctacttgatggtccgaaccctccaacttacccccggagtactgagaagctgagaggttaagtaactttcccaaattcacaaggctagtcaagtggcagagccggagtgaggagaaaacctattcatttatcttggccagaaatgctgcttctgtctctgggtgggaagcttcctgctattttcttcagttgtgtgattttgtatgtatgcttgtaggccttcccacagtgtgagtttttttaatccactagagatatagctaatattcctaccaaggaaattgtcacttgctcagtcattctttacggggcccattattggatccaattagggccatggcttgttggctgcctatggctgttctgcttactggatgcccttgccatgccagcctgatcaatgccagcagggacacgtcycctgtatgtcctcctggtcacttcctgagcctgctgcttaagcgccatgagccactgtgggacctgcacacaggtctcggtattgttgctccagcaagtctgactggcctcaaggagccagccaagtatggagtttgagaagcc

SEQ ID NO: 641750 - DNA, 566 bp, Homo sapiens
aagctacttgatggtccgaaccctccaacttacccccggagtactgagaagctgagaggttaagtaactttcccaaattcacaaggctagtcaagtggcagagccggagtgaggagaaaacctattcatttatcttggccagaaatgctgcttctgtctctgggtgggaagcttcctgctattttcttcagttgtgtgattttgtatgtatgcttgtaggccttcccacagtgtgagtttttttaatccactagagatatagctaatattcctaccaaggaaattgtcacttgctcagtcattctttacggggcccattattggatccaattagggccatggcttgttggctgcctatggctgttctgcttactggatgcccttgccatgccagcctgatcaatgccagcagggacacgtctcctgtrtgtcctcctggtcacttcctgagcctgctgcttaagcgccatgagccactgtgggacctgcacacaggtctcggtattgttgctccagcaagtctgactggcctcaaggagccagccaagtatggagtttgagaagcc

SEQ ID NO: 641751 - DNA, 590 bp, Homo sapiens
aaggaattggcacagagtgaaccacagtgaatgatagaataaatcaatgaattagccagtccctgctgagtgcctgaagagaagtagagacaaaagtgctctgtgagctcaaaggcaagaccatcactctcactgcacgtctgccccctgagcctacaccatgagagctgcctctcctacagctttgcttctccagcatgtaacacagggcgggcttagagtagacaatattaaaagtttgctgttgaaaacaaatgaacaaatgaagacttctggcaggagatggccttcagcctgagacaaaaatttcagtcrggagacttggccattagagcatcatttatcaaattgcaggtcacaacaaacccattagtaccttatgaaatcaattcagcaggtcgaaactattcttttcaaaaagagaagtaaatttaactggaatggagtagaaggaaatagaaaatatcagtgcatcactgtaaaaagaatatgtatttcatgaaacttatttcagttacatgtgtatgtgtatgcatgaactactggataagctgtattgcttactgtgggtttcagttgaacaggattgt

SEQ ID NO: 641752 - DNA, 554 bp, Homo sapiens
ggaaaagagaaatgaccatgtatgcaatgtgattttttatcagcccactgtgaacctaaagccatatgcaagcgtcagtggcatagcagtttcagaagagcatttgctccccaccccacacctccacccaggctttagacagccttcaggaagccctcaagagggcgagcagcagagatcatctaatggacttcaaataaacaccaacttcctgacagctggcctctgagcaaatttattattgaattatactcctgcattttcagaacaagctgagctgacagggtaccccatcagtttaaaaaaaaaaaaaarggaaagaaagacaatgataaattacctgatggaagatagaagaaggcaaagatcctgcttcctccaaaatgtcagccattatatattattcatgttggttttttaaaaatccctccccgcgttgaaatgaatgtttatgatgataaagcaactaggtgattcaattcaggatgcaggcaacgacttctcacatcatcctgatgagcagctaacaactcctcctctgccacttgatcatc

SEQ ID NO: 641753 - DNA, 669 bp, Homo sapiens
cgccctcaccttaagttacagaagcacataagctctttattcattgcataaataatttatcaagaacttactctgtgccctgcattcgaattccagagcaaacacctgttttggaggaggttttcttttccccactcagaaatgaccatcaaccgtgatcaatgctgggaatatagcagtaagggacatgtggttggtccctgtcttcatggagctcatgttctgctggggaaaagattgtcctggcagagcaacagcactcagagttcatgaggagtagcccagaaggagcaggagtggtgtatactgcttggtgaatgccctaggagaggtggaagtttccagatagagggaacaatttagtgataagtataagtattgcatgagctccattaagattctgaagccacgtgcagtagggctgctttagctggaytgggtagtatgagattaaaacagttataaattcttaaacatatgttgaattctattttataccaggttgggaaaaacttcagcctgcatttgacagatgagagaatggaggttcagagaggtcagatgactccaaaatcatacagttagttcccagagtcagaactgggaactatgactcccagcctagtgctcttgccaccacagccctacaacttttccctgagcaacagt

SEQ ID NO: 641754 - DNA, 421 bp, Homo sapiens
gtcagtagctcttccctaggccagaagaaaaagccttctcacctgaggtgaatagagaaggttatgtggtgcgcagcacctgcgtttttgactcagctgtctttcagcgagggctttctccccaatgtgcrgatccttgaggacattgcaccagccagtgccttcatttccacccacggccagtggcaagtgactggttagagtgggacctggagtggtgaggcccaggttcaagtcctgcctctatcacctgctttctatggagcttcgggcacataatataacctctctggaaaccagtttcctcttccatacaatgagaaagttccactaacttagggatcttccaactgacttctgcagacacggaaactccacagagttgccttcaaaatcaccccaagggagaggaggcctccat

SEQ ID NO: 641755 - DNA, 603 bp, Homo sapiens
ccaggggcagggaggctgtcatgtttagccttcatcccagtgaccttctaaggggtcctggatttatgaaacaaaagctttgaaacctcaaagtaacttccagctttttaaaagtaatccaactaagttccttttctatatattcaytgtaaatgactttaaacatttttcctaatttaaaaaacaccatagtcgttaataaaaatttgaaaaatggacaaaaatagaaaaaagtcatatgtgattctgtaaacaaatacaactagttttcttttttcatacataatttcttttttttttttttgaggcggagtctcgctctgtcgtcaggatggaatgcagtggctcactgcaacctctgcctcctgggttcaagctattctcctgcctcagcctcccgagtagctgggactacaggcgcccaccaccacacccggctaatttttgtatttttagtagagacgaggtttcaccatgttagccaggatggtctccatctcctgacctcgtgatccgcccgcctcggcctcccaaagtgctgggattacaggcgtgagccaccgcgcccaacccgtaatttcttttaatgcaaattaccatata

SEQ ID NO: 641756 - DNA, 559 bp, Homo sapiens
atccatggggcatcttcctctacagactccttcaggaaataagcatctttgcctcgtcccagagctcttccccagggtcatggaagatgctttgaagccttttcttcagaagtacatttgaactccagtgtccatcaaacccagatacacatattatattaactcagagcccttaaytgtcccgggaaataggttgagcaggacaaaataaagtctgacatacttagtgtttccactgtgcaccaaatcttctagtagtttctaaaggaaccagctttgcttaaaagctgccatttattgggtattttattttttagtggaacaggcactatgctcagaggtttatattcttcatgcaattttgtcctcaaaataatcctttgaaataggtgtgactatccccatttctcagcttcagaaaactgaggctatagaagtgatgtgaccagggtcacttagccaagtggatggtagaactggtatttgaacccttgactgtgtggctccaacactcaacctcttcccactggttctgagaaccagggaatcaaattctgcc

SEQ ID NO: 641757 - DNA, 477 bp, Homo sapiens
tcttcgtctatacccttggtaatgtcctttatgatcaactggtaaatgtaagtatttctctagtcctgtgagctgttccagtaaattaactgaacccaaagaagcagtcatgaaaatctcaactagaagccagtcagatagaagttccagaggcccagacttgtgactggtgtctgaagtatgatagatggggtggggttgggggggcagttttggggactgagccctcaacckgtgggatttgaggccatctccaggtagatagtgttggaattgagttgaaggacacccagctggtgtccactgcagagttgattgcttgcttcatggtggggagaaccccacctctgcctatatttggtcacagaagtcttctgttgatgactattgtgtgagaacagacgaaacactgagttttcctcaaaaaccacggttaaaggtgcttggtgaagaaggaattccagcgtgtggtttctc

SEQ ID NO: 641758 - DNA, 601 bp, Homo sapiens
gatgtggtggcagagtcagaactagaacttgggcttctgactcttaccctgaggctcctttcactgcttcgtgtgaaagcctttggaggtacaaagagccatccagcgggcaggaaagaatcaggcagagctttccctggtgatggcttytttcttttcaagtttactaaatcccacaaagctgcaagcccacctgggtcaccacatcccatgagaacaattgaggcagataattaacagcaagatttcatcattgtgaaatctttttacttgaagctaaaagaccaacccgtaacaggatgatttgacaaatgcaaagaagggtctcttttctatgaaatcctagaagaggcacaaaccttctcacctgggcttcaggaaggacttctccataatcaaatccctttcataattatgcgtaattatttttgtcctttgtcctcacctacaccagtgtgagtgtgtctgttaatctgggagtcattaggatggcagaatagcgaggtcacctggattagcagctaatgaattccctaccctttgttctgataacaggataggacaataaaatattattcttaagcttctgagagggaattta

SEQ ID NO: 641759 - DNA, 619 bp, Homo sapiens
ccaaggggtggcactgagtagtagaaatataatggtgctctagctggaacttggtgcattctacctcatgccatggttttgctgtgctctgcttttctttctggctggatacattcccatgtctcccacatatcttgcacaggacctggtacatagatttcaggatgtgactccacctgctgatatccagctgcaggaaaataactgacctctctgagtctcccttccctaacccagtggggatgataacactgacctgcctactgcccaggagtacagctataaactagaattcaattgtgagggggagmgatgatggtggccataatgagacagctgacccagaatcttagaactgggagactccccagaaatgatgtagtcaagcttgatgcctgaataccctctgcaaaacccgcaagaactggttatacaggtttttcctgaaaaacactagaaatgggagctattacccaggggtttcctaggtttctacacatcctgggaaaaggggattctgaattcaaaccaggacttagctagataaatggtgtcttgcctcttgcaaccccttccatctagattttacatctggcactaagcatttttgtaactgcaa

SEQ ID NO: 641760 - DNA, 616 bp, Homo sapiens
gccatggttttgctgtgctctgcttttctttctggctggatacattcccatgtctcccacatatcttgcacaggacctggtacatagatttcaggatgtgactccacctgctgatatccagctgcaggaaaataactgacctctctgagtctcccttccctaacccagtggggatgataacactgacctgcctactgcccaggagtacagctataaactagaattcaattgtgagggggagagatgatggtggccataatgagacagctgacccagaatcttagaactgggagactccccagaaatgatgtagtcaagcttgatgcctgaataccctctgcaaaacccgcaagaactggttatacaggtttttcctgaaaaacactagaaatgggagctattacccaggggtttcctaggtttctacacatcctgggaaaaggggattctgaattcaaaccaggacttagctagataaatggtgtcttgcctcttgcaaccccttccatctagattttacatstggcactaagcatttttgtaactgcaactcttagaacccccacagctttgctcaggtatggtctttctaaagcatcataattgaatcttaatt

SEQ ID NO: 641761 - DNA, 643 bp, Homo sapiens
ggagacaccatgattcattcacacattccctcctacaggacttggcacaagctggacacacagtaggtacatgataaacacttgctgaatgccaaaatatggaaaaaacaactcttactaaataacactttggcaatctccctaggtatctcactagagttttagtcttgaagacagaaagaggctttgtataaaggcagacaattgcaattattattgaaggtagcttgtaaggcataattamattgatcctaaagaagatacaatgaaaaggccccataccttcaagatctggttttcattttatatgagagggtcaaaaaaacagtaatttccactcttcacattttccattagaaggactgaatgtcttaatgaaatgaacatcatatagagcaaccaatttataaaattttcttgtctcctattcattcattgtagtaccttccagagcttgggaaatgacctggatctctttgctgcttgattgatacctgtaattatcccaccagaactgctccttctgactgtggatgggaagaagtagggttgccagtcctctgggccccgcacacctttgccctgtgagccacctctacagaaccctttcttctccaccacagagctgccacaacaaagagca

SEQ ID NO: 641762 - DNA, 596 bp, Homo sapiens
tctgctgtaattcttaccttgttccctcttataaaatgctttttttttttttcctggctgcttttaaggttttctgtctctcctttttaattcagccatttgaatatatggctagaaatgtgtgtgtgtgtgtgtgtatgtacttattctgcttggtgttttctgagctttttggatctgtggtttggtgtccattattaattatgggtaattctctgccattatttcctcaaatatttcttctgccctatttttyccctcttctcctggaattccaattacatgtatatcagactattggatgttgtcccacagatcttgaatgccatgttctgcatttcccactcttttttttcctctctgtattttagtttgggtaatttctattaaccatcttctttcctcagctgtgtcatgctgtgtcctccagagagagcagcccatcaaaggcatttctcatccttataaccgtggttttcatttctaacaattccatttgattctttcttatcgtttctgtctctctgctaaaattatccatctgatcttgcacattgttcgccttttccattagagcctttaaaataattatagtt

SEQ ID NO: 641763 - DNA, 596 bp, Homo sapiens
tctgctgtaattcttaccttgttccctcttataaaatgctttttttttttttcctggctgcttttaaggttttctgtctctcctttttaattcagccatttgaatatatggctagaaatgtgtgtgtgtgtgtgtgtatgtacttattctgcttggtgttttctgagctttttggatctgtggtttggtgtccattattaattatgggtaattctctgccattatttcctcaaatatttcttctgccctatttttcccctcttctcctggaattccaattacatgtatatcagactattggatgttgtcccacagatcttgaatgccatgttctgcatttyccactcttttttttcctctctgtattttagtttgggtaatttctattaaccatcttctttcctcagctgtgtcatgctgtgtcctccagagagagcagcccatcaaaggcatttctcatccttataaccgtggttttcatttctaacaattccatttgattctttcttatcgtttctgtctctctgctaaaattatccatctgatcttgcacattgttcgccttttccattagagcctttaaaataattatagtt

SEQ ID NO: 641764 - DNA, 556 bp, Homo sapiens
tttaaattcccttagcaattccctgtgtttaggatgtgaaactggtttgccagagggtttttttccctcaaggtccmcagttcagcccttgggtcctccctttgtgctgactcagagagggtctctttccatgttcctgccgttctctaactccctcccagcagtcttctgcccttcactgatgcttttagccttccagctaactatggtggtggcaaagcctttgctagggttctgactctcaggtatgtgggatttttttttttccatttcttttcttccctcattcagctgaaaggattttccccagtgcctaggcaggacagtgttcgctgcccttctcttcacagatgaagggtgttgttcctgatggaagatgaggtgagcagggtctgggtagagtggtcaggggtgtatgctcctccctcagcagctgctgtgaccttcccccaggtcgaccacaaaggacactttcttcttaaatctttcctcactcttttctgtgggaaaactcctggtgggatttgtagagaaaaaagtccctaagaagacatgg

SEQ ID NO: 641765 - DNA, 556 bp, Homo sapiens
tttaaattcccttagcaattccctgtgtttaggatgtgaaactggtttgccagagggtttttttccctcaaggtccacagttcagcccttgggtcctccctttgtgctgactsagagagggtctctttccatgttcctgccgttctctaactccctcccagcagtcttctgcccttcactgatgcttttagccttccagctaactatggtggtggcaaagcctttgctagggttctgactctcaggtatgtgggatttttttttttccatttcttttcttccctcattcagctgaaaggattttccccagtgcctaggcaggacagtgttcgctgcccttctcttcacagatgaagggtgttgttcctgatggaagatgaggtgagcagggtctgggtagagtggtcaggggtgtatgctcctccctcagcagctgctgtgaccttcccccaggtcgaccacaaaggacactttcttcttaaatctttcctcactcttttctgtgggaaaactcctggtgggatttgtagagaaaaaagtccctaagaagacatgg

SEQ ID NO: 641766 - DNA, 594 bp, Homo sapiens
ttgcaaaacacatatctcataaagtatttagagtgtataaagcactcttacaactcaataataagataaacaatttgattaaaaatgggcagatctaaatggaaattttaccctagacaaatgatgacaaataagtaaaaagatgacaagtgaaaagatgctgaatattattcatcattaaggaaatgcaaattaaaactacaatgagttatyagtgtactttcactggaaaagccaaaattaaagtgattgacaataccaggtgctagtgaggacgtggagctatgtgcttgtgtactgctgctgggaacataaaatagtatagctactctggaaaagtgttggagtttcttacaaagttaaacatatactttgtatatgacccagtaatctcacgtattattactgataataaccccaaactgaaaacaatccaaatgaccatcaatagatgaatggataaatgtatgcggtaaatccatacagtgaaatattactcagcaataaaaagtaatgaactattgacacatacaagaacatgaatgaatctcaaaagcactatgctaagtgaaataagccagccacaaaagacta

SEQ ID NO: 641767 - DNA, 544 bp, Homo sapiens
ttccctaggaagtcctggtatgcactgaaattgaatatgatcattccctggacaaccagaaatgtttaatacagagcctggaatcagaaaattcccagctttcactcagaacagtttcctcaaagcacctgtatttcttcctatgtaaaaaattgttaactcatacatttaaacatagagttgrcccttgaacaatatgggtttaccttttgcagattttcttctgcctccatcacccctgagacggcaagaccaacccctcctattcctccgcctactcagtgtcaagatgacaaggatgaaggtgtttatgatgacccacttctacttaatatagtgaatatattttctcttccttatgactttaacattttcttttctctcactttattgtaagaataaatcatataatacatataacatacaaaatatgtgttaatcgaccttatgtcatcagtaagtattctggtcaacagtaggatattaaattttggggtagccaaaacttacatatgatttttttaccacactggtcgggggtggg

SEQ ID NO: 641768 - DNA, 544 bp, Homo sapiens
ttccctaggaagtcctggtatgcactgaaattgaatatgatcattccctggacaaccagaaatgtttaatacagagcctggaatcagaaaattcccagctttcactcagaacagtttcctcaaagcacctgtatttcttcctatgtaaaaaattgttaactcatacatttaaacatagagttgacccttgaacaatatgggtttaccttttgcagattttcttctgcctccrtcacccctgagacggcaagaccaacccctcctattcctccgcctactcagtgtcaagatgacaaggatgaaggtgtttatgatgacccacttctacttaatatagtgaatatattttctcttccttatgactttaacattttcttttctctcactttattgtaagaataaatcatataatacatataacatacaaaatatgtgttaatcgaccttatgtcatcagtaagtattctggtcaacagtaggatattaaattttggggtagccaaaacttacatatgatttttttaccacactggtcgggggtggg

SEQ ID NO: 641769 - DNA, 544 bp, Homo sapiens
ttccctaggaagtcctggtatgcactgaaattgaatatgatcattccctggacaaccagaaatgtttaatacagagcctggaatcagaaaattcccagctttcactcagaacagtttcctcaaagcacctgtatttcttcctatgtaaaaaattgttaactcatacatttaaacatagagttgacccttgaacaatatgggtttaccttttgcagattttcttctgcctccatcacccctgagacggcaagaccaacccctcctattcctccgcctactcagtgtcaagatgacaaggatgaaggtgtttatgatgacccacttctacttaatatagtgaatatattttctcttccttatgactttaacattttcttttctctcactttattgtaagaataaatcatataatacatataacatacaaaatatgtgttaatcgaccttatgtyatcagtaagtattctggtcaacagtaggatattaaattttggggtagccaaaacttacatatgatttttttaccacactggtcgggggtggg

SEQ ID NO: 641770 - DNA, 625 bp, Homo sapiens
gcaaacaatagcatggtttattgaatcttgcaaaactggattggtttatgtgtttaccagctaaaatgatcatgttgtaaaagtgtaaacmaagattacaatattcactctgcctatcagctttaaaattacatgactcttgataatttgttttaacttggtggattaacatctcttttttttttttgagatgaagtctggttctattgcccagactggagtacagcggtgtgatctccgctcactgcaatctccacctcttgggtttaagtgattctcatgcctcagcctcccaagtagccaggactacaggcacgtgctaacacgcccagctaattttttgtatttttagtagagacagtgtttcaccatgttggccaggttggtctcgaactcctgacctcaagtcatcagctcacctcgtcctcccaaagtgctgggactacaggtgtgagccaccacacccagcccagattaacatcattttaatctttatgcaaagtaagcttttactggtacttttacatggatgtttttgagtttacatattccaaacttgcagaaacagattattttcacttctaacctagtgtgtcctcctcttgatggattaaagccaaccatc

SEQ ID NO: 641771 - DNA, 644 bp, Homo sapiens
acaaacaagcaaataaataaataaataaaaataaagacattttcattggatatagaattataagatggtgttttttgtttgtttttagtactttaaatatgttgctttattcactgctttctccttttttttcttggcttcttgtaagattttttctttatcattgagcagtttgactatgacagtcctggctgtagggtttttttttggtgtgtgtgtttctttggtttgaratttgtcgactatcttaaatcttggggttgatagtattcattaaattttgaaaaatttgggccattatttcatcaaaaatttttagacctccttcttcaaagactccaattatacgtatattatgcctcttgaggttgtcccacagctcactgatgctcttggacctgcatcactcaagagcaatgatgctcttgagtctgcatcattgttgggttcagcctggttgggttcagccaatggaaagtacgagcaacagaaggaggatgggagagaacccttgatgcaatgctggccactcatctcccttggctgcattgcttaccaggctcaggtaatgcagttccctttactgttggatataatgagcttcctactgttagtctctgggtggatcagcattgtcaattccc

SEQ ID NO: 641772 - DNA, 644 bp, Homo sapiens
acaaacaagcaaataaataaataaataaaaataaagacattttcattggatatagaattataagatggtgttttttgtttgtttttagtactttaaatatgttgctttattcactgctttctccttttttttcttggcttcttgtaagattttttctttatcattgagcagtttgactatgacagtcctggctgtagggtttttttttggtgtgtgtgtttctttggtttgaaatttgtcgactatcttaaatcttkgggttgatagtattcattaaattttgaaaaatttgggccattatttcatcaaaaatttttagacctccttcttcaaagactccaattatacgtatattatgcctcttgaggttgtcccacagctcactgatgctcttggacctgcatcactcaagagcaatgatgctcttgagtctgcatcattgttgggttcagcctggttgggttcagccaatggaaagtacgagcaacagaaggaggatgggagagaacccttgatgcaatgctggccactcatctcccttggctgcattgcttaccaggctcaggtaatgcagttccctttactgttggatataatgagcttcctactgttagtctctgggtggatcagcattgtcaattccc

SEQ ID NO: 641773 - DNA, 436 bp, Homo sapiens
aagctttcttgatgggaggactgagggagaagataaccctacagtgaagggtgcttggagacacaaatagctaaaacacaccagaggaggcaattgattttatccaagaatytacctgaatttaccaaggattacttctgggtatcttggaggatttgtatcttaaaggatccaagttataaaattctagagtcattcatggagatgaaagtaaaacagtgcttattaggggctgggggagtggggaatagagagttagtgtttagtgggttcagagtttcagctggggatggtaacaaagctctggcaatgggtggtggtgatggttgcatgactatgtgaatgtacttaatgctactggagtatgcacctaaaatgattaaaatagtaaattttatgttatatgcattttaccataacaaaaaaaattctagag

SEQ ID NO: 641774 - DNA, 615 bp, Homo sapiens
attttttcgtgtttaaaaattgtggtaaatatacataacataaaatttactaacttaatcataagtatatagttcagaagtgttaagcactttcacactgttgagcagccatcattgccaaactatttcatctttcccaattgaaactcactatctatgaaacagtccttatttccacctttcttcagtccttggcattctagtttctgtctctatgaagctggctacttcaagtatcccatrtaagtggaaacatacaatgtttgcctttttgtgtctagtttgtttcacatagaataatgtcctcaagcctcatccatgttgtagcatgtgtccacatttccttccttttatagtctactcccattgtatgtacacatttttgtttattcattcatcagtggatggaaataattttttaaaaaggtaccgggctgagttaatataagttgagttcagtaaagagatgaatttacatctagatgtttaaatttcttctaaagtagcatttgaaagaaaatttggcaccactacatacaatgatttttcaataaaaaagaaggtaaacaaaattgatcataaagtgaagaaacaatgtaagaaatagaccagaac

SEQ ID NO: 641775 - DNA, 530 bp, Homo sapiens
ctgtgctcatttttgttctcccagtgttcttgctttccttggaacaggattctgttactcatagtcttctccttgaaactctgctttcataaatactgtatcattttccatttcctgctaccttcataactgctttctgattcatttgttagagtcattagttttttttttcaacagatagtgaaatgcttattacatgtgtctgggacagtgtgcttcaggcatgaaggcaaagaggccacagtcccgaccctcaagaagctcacattcttggccaggcatggtggctcatacctgtaaccccagcattttgggaggccaggggagaagattgcttgagctcaggagttcaagaccaacttgggcaacacagtaagaccccatctctacaaaaaaaaaaaaaaaaagaaragaaaagaaaaaagaaaaaaaaacaaaaaacaaacacacaaacaaacacacatgcctatagtcctagactcaggaggctgaggctggaggattgcttgagcctgggaggttgaggctgc

SEQ ID NO: 641776 - DNA, 530 bp, Homo sapiens
ctgtgctcatttttgttctcccagtgttcttgctttccttggaacaggattctgttactcatagtcttctccttgaaactctgctttcataaatactgtatcattttccatttcctgctaccttcataactgctttctgattcatttgttagagtcattagttttttttttcaacagatagtgaaatgcttattacatgtgtctgggacagtgtgcttcaggcatgaaggcaaagaggccacagtcccgaccctcaagaagctcacattcttggccaggcatggtggctcatacctgtaaccccagcattttgggaggccaggggagaagattgcttgagctcaggagttcaagaccaacttgggcaacacagtaagaccccatctctacaaaaaaaaaaaaaaaaagaagagaaaagaaaaaagaaaaaraaacaaaaaacaaacacacaaacaaacacacatgcctatagtcctagactcaggaggctgaggctggaggattgcttgagcctgggaggttgaggctgc

SEQ ID NO: 641777 - DNA, 652 bp, Homo sapiens
gctaatttttgtatttttagtagaaacagggtttcgtcatgttggccaggctggccttgaactcctggcctcaagtgatccacttgygttggcctcccaaagtgctgggattacaggcatgagccactgagccttgctgggctacggtttttaaggggattctggagggcaagggactagagaattggggttgttgattgtttggggtaaggggaatgaaattaacaggatatggaaactgcattctttggtgagtcagtttctcgtggggtccttcaggccaactgatagagtagcttcggtgatatgcaggacatgaaggaatatctcaaagggaaaaattaatgttttgtaatgttcaagttgttatctataagcaattaaggggaactataatcttgtgacagggtctatgtgattctaggacaatgggcaccacacagctatgaggaagcaggtcagagagttagctgacttagtgatcaatgctgaatgtgctgcaagcttggcatactttcatttcttcccctcccttctttcctgaatagtttcataaagttttcagggatggctttgcaagtcatgttttgagaccatgtaaatctcccattccaacaacttttctttcaatggttttaacatgcatcgataa

SEQ ID NO: 641778 - DNA, 652 bp, Homo sapiens
gctaatttttgtatttttagtagaaacagggtttcgtcatgttggccaggctggccttgaactcctggcctcaagtgatccacttgcgttggcctcccaaagtgctgggattacaggcatgagccactgagccttgctgggctacggtttttaaggggattctggagggcaagggactagagaattggggttgttgattgtttggggtaaggggaatgaaattaacaggatatggaaactgcattctttggtgagtcagtttctcgtggggtccttcaggccaactgatagagtagcttcggtgatatgcaggacatgaaggaatatctcaaagggaaaaattaatgttttgtaatgttcaagttgttatctataagcaattaaggggaactataatcttgtgacagggtctatgtgattctaggacaatgggcaccacacagctatgaggaagcaggtcagagagttagctgacttagtgatcaatgctgaatgtgctgcaagcttggcatactttcatttcttcccctcccttctttcctgawtagtttcataaagttttcagggatggctttgcaagtcatgttttgagaccatgtaaatctcccattccaacaacttttctttcaatggttttaacatgcatcgataa

SEQ ID NO: 641779 - DNA, 586 bp, Homo sapiens
tgaagggctttgtgaaggaagaatatgtgttagatattgggagcccgtagacacataaagagctaaaggatcagggcattgcatttttctgtgatagtttaaatgttgataatgacctttctaggcatatgaacaagatcacatccttttggtttttgtctttttagagacagggtcttgctctgtcacccaggctggagtacagccgygcagtcatggctcactgcagccttaaccacctgggctcaagtgatccccttgcctcagcctcccgagtagctgggactacaggcgtgcaccaccatgcctggctgatttttatactttttgtagagacagggtttcatcatgttgcccaggctcgtcatgaagttccgaactccagggatcctccctccctgacctcccagaatgctggtattagagcattttgagccaccatgcccagtctatgcttttttgctccatgctgatttttaaacttaaatttaagctcaaaatatttagataatatcaagaatggcagtcagcagagggagtgagtctcttctattcttgataggccatcactgatcctcctacctag

SEQ ID NO: 641780 - DNA, 586 bp, Homo sapiens
tgaagggctttgtgaaggaagaatatgtgttagatattgggagcccgtagacacataaagagctaaaggatcagggcattgcatttttctgtgatagtttaaatgttgataatgacctttctaggcatatgaacaagatcacatccttttggtttttgtctttttagagacagggtcttgctctgtcacccaggctggagtacagccgcgcagtcatggctcactgcagccttaaccacctgggctcaagtgatccccttgcctcagcctcccgagtagctgggactacaggcgtgcaccaccatgcctggctgatttttatactttttgtagagacagggtttcatcatgttgcccagrctcgtcatgaagttccgaactccagggatcctccctccctgacctcccagaatgctggtattagagcattttgagccaccatgcccagtctatgcttttttgctccatgctgatttttaaacttaaatttaagctcaaaatatttagataatatcaagaatggcagtcagcagagggagtgagtctcttctattcttgataggccatcactgatcctcctacctag

SEQ ID NO: 641781 - DNA, 586 bp, Homo sapiens
tgaagggctttgtgaaggaagaatatgtgttagatattgggagcccgtagacacataaagagctaaaggatcagggcattgcatttttctgtgatagtttaaatgttgataatgacctttctaggcatatgaacaagatcacatccttttggtttttgtctttttagagacagggtcttgctctgtcacccaggctggagtacagccgcgcagtcatggctcactgcagccttaaccacctgggctcaagtgatccccttgcctcagcctcccgagtagctgggactacaggcgtgcaccaccatgcctggctgatttttatactttttgtagagacagggtttcatcatgttgcccaggctmgtcatgaagttccgaactccagggatcctccctccctgacctcccagaatgctggtattagagcattttgagccaccatgcccagtctatgcttttttgctccatgctgatttttaaacttaaatttaagctcaaaatatttagataatatcaagaatggcagtcagcagagggagtgagtctcttctattcttgataggccatcactgatcctcctacctag

SEQ ID NO: 641782 - DNA, 526 bp, Homo sapiens
cttccaaactctctgactctgacctcctgcttcctcttacaaggactctcatgattacctagggtccacccagatgatccagggcartctcctcatctcaagatctgtaacttaaccacaactataaagtctcttttgccatggaagctcacatatacacatatacacattaggatgtggtgtgaggacagggaccattatttagccaactttagtagccaaggagtggaataatcttactggccagcatgggtcctgtgagcccttagggcccacctcatccaaatcttaagactggagcaggattagagtggaaagagaggcagaggctctaggaggctgctgggccagcttccagaagccctaactaggtcaagagaccatgacctctgctaggcacctcacagtggcctcatgcagaagcaatgacacagaggggccctgcctggactacgggtgggctccacctcttacctctctgcacctgtttgtcaccagttctctccctggtattagttatgtcccc

SEQ ID NO: 641783 - DNA, 526 bp, Homo sapiens
cttccaaactctctgactctgacctcctgcttcctcttacaaggactctcatgattacctagggtccacccagatgatccagggcagtctcctcatctcaagatctrtaacttaaccacaactataaagtctcttttgccatggaagctcacatatacacatatacacattaggatgtggtgtgaggacagggaccattatttagccaactttagtagccaaggagtggaataatcttactggccagcatgggtcctgtgagcccttagggcccacctcatccaaatcttaagactggagcaggattagagtggaaagagaggcagaggctctaggaggctgctgggccagcttccagaagccctaactaggtcaagagaccatgacctctgctaggcacctcacagtggcctcatgcagaagcaatgacacagaggggccctgcctggactacgggtgggctccacctcttacctctctgcacctgtttgtcaccagttctctccctggtattagttatgtcccc

SEQ ID NO: 641784 - DNA, 526 bp, Homo sapiens
cttccaaactctctgactctgacctcctgcttcctcttacaaggactctcatgattacctagggtccacccagatgatccagggcagtctcctcatctcaagatctgtaacttaaccacaactataaagtctcttttgccatggaagctcacatatacacatatacacattaggatgtggtgtgaggacagggaccattatttagccaactttagtagccaaggagtggaataatcttactggccagcatgggtcctgtgagcccttagggcccacctcatccaaatcttaagactggagcaggattagagtggaaagagaggcagaggctctaggaggctgctgggccagcttccagaagcccyaactaggtcaagagaccatgacctctgctaggcacctcacagtggcctcatgcagaagcaatgacacagaggggccctgcctggactacgggtgggctccacctcttacctctctgcacctgtttgtcaccagttctctccctggtattagttatgtcccc

SEQ ID NO: 641785 - DNA, 442 bp, Homo sapiens
gacgctgctccctaccacggacgattggaacttccrgaggatgagctccatgatccagagcatgagctgggaacgcagttgcactggggggtcttgcccccaccactttgtcaccatgtggattcgagaagtcacctctcggagcaggtggttcctcttccgggagaagaggcatctctgtccctacctggcatgcagccaggctcagacccactcgcccagtttcagttatgacgcgactgtgttgtccgggggagggggatgagcagttggtttttaatggggccagagcttccgtttgggaggatgagaacgttctggagatagatggtggtgaatgttcttgatgccactgaactgtgcagttaacacagctttacactgtgtatactttaccacaatagaaacacctgtgtttctaaattcccttgaaacacaggaa

SEQ ID NO: 641786 - DNA, 335 bp, Homo sapiens
aaaatcacactgtaatggtctgaaccagaggctggcaaacaaaagcccagaggctaattctggcccactgattgtctttgtaaattaagttttattggaactcagtcacactcatttgcaccctgtctctagctgctcttgggctactamggcagagttgagtagttgagaacatgtggcccactgtactagtccgttctcgcactgctgtaaagaaatgcctaagactgggtaatttataaagaaaagaggtttcgggccgggcgcagtggctcacgcctgtaatcccagcactttgggaggctgaggcgggcggatcacgaagtcaggagatt

SEQ ID NO: 641787 - DNA, 335 bp, Homo sapiens
aaaatcacactgtaatggtctgaaccagaggctggcaaacaaaagcccagaggctaattctggcccactgattgtctttgtaaattaagttttattggaactcagtcacactcatttgcaccctgtctctagctgctcttgggctactaaggcagagttgagtagttgagaacatgtggcccactgtactagtccgttctcgcactgctgtaaagaaatgcctaagactgggtaatttataaagaaaagaggtttcgggccgggmgcagtggctcacgcctgtaatcccagcactttgggaggctgaggcgggcggatcacgaagtcaggagatt

SEQ ID NO: 641788 - DNA, 613 bp, Homo sapiens
cagcagacttagaatgaaattttaattaaaaatatggaagacttgctgtattttggaaaccacaattatttctgagagaaattaaagaagagctaaataaataaatgggtgtgccacgtttacatattggtgatgtgtttacatactggttacatatcggactggtgatacagcaccatttcaaccaagtgagaaatgaagaatcttttcaatgaaaaaattagcagttaaaaaaacaataagaacttttgagtcatatagatacccaaacagagaaaaatgaattttgactccaactcgcatcatttacaaaactgaaatgtattattaacctacatggaaaaagcaaaccaataaagtctttaaaaaatatatacgaaaatgatcttggttaggcaaagatttttaaacaggatgataaaaggcactaaccacaaaaaaaaaaarggaaaaaagggggacattgatgaaatggaacttctcttcatcaaaagaaaatgctacaagaatgaaaaggcaattcaccaagaggggaaagttatttgcaatgacactttcatcctctggaggactcaagtccacattatattatgatggtacaaaagcaattgtg

SEQ ID NO: 641789 - DNA, 613 bp, Homo sapiens
cagcagacttagaatgaaattttaattaaaaatatggaagacttgctgtattttggaaaccacaattatttctgagagaaattaaagaagagctaaataaataaatgggtgtgccacgtttacatattggtgatgtgtttacatactggttacatatcggactggtgatacagcaccatttcaaccaagtgagaaatgaagaatcttttcaatgaaaaaattagcagttaaaaaaacaataagaacttttgagtcatatagatacccaaacagagaaaaatgaattttgactccaactcgcatcatttacaaaactgaaatgtattattaacctacatggaaaaagcaaaccaataaagtctttaaaaaatatatacgaaaatgatcttggttaggcaaagatttttaaacaggatgataaaaggcactaaccacaaaaaaaaaaagggaaaaaagggggacattgatgaaatkgaacttctcttcatcaaaagaaaatgctacaagaatgaaaaggcaattcaccaagaggggaaagttatttgcaatgacactttcatcctctggaggactcaagtccacattatattatgatggtacaaaagcaattgtg

SEQ ID NO: 641790 - DNA, 636 bp, Homo sapiens
tatcaatagatgctgaaacagtcaacatcatgtttcatagaataaaaacattcaacaaaatctaacactcattcatgataaaaactctcaaaacactaggactagagcaacttccttactctaaaaaagaaatgttatgattcacatcagacttaacggtgcaagactgaatgtttttcccctgwcattgggaagaaggcaaggaggttcccattcccattcaacatcatacaggaagttctgcctaacagaataaatttagaaaacgaaataggtattcagatgggaaagaaaaagaaactcaatttttttgcagatgacataattggctatgggaaaaactccaaagaatctacaaaaacaactcctggaactaaaaagcaagtatagcaaagtctcaggatacaaggtcaatatacaaatgtcaattgatttccaataaaccaacaatgaacaattagaatttcaaattgaaaaaaatactatttatagtagcaccaaaagaatcaagcactttataaatctaacaaaatacatccaggattttatgcagaaaattacaggacattgatgaaagtagtcaaataagatctaaataaatggagagaacttctgggtcatacgaagacttaatat

SEQ ID NO: 641791 - DNA, 651 bp, Homo sapiens
gtatttaaccctaattacttccataagggtcttatctccaaatacatccacattggggttggggcttcaacataggaatttcgggggatcacaaacattcagtccataacaaagtataggaaaagatgctcaatataaaatgctattagggaaatgcaaattaaaataaggaaataccacttcacacctatgaaagtgactaaaatccttaacaccaacagcaccaaatgctggtgaggatgtgggtcgacaggagctctcatcccagcactgggaatgcaaacggggcaacaggagctctcatcccagcactgggaatgcaaacggrgcaacaggagctctcagagaaggaaccaacccttgactgtggactgctggcctccagaatggtaaaagggtacatttccattgttttaagtcactcagtttgtgtcagaaagccccagaaaactaatactactgtcttggccttttggtttcagatccaagaaattttgacccaggattccaggtcccaaatcacagagcctttctggctgctttctggcagtatgagtgcagcagctggaagaaattaggggtctccaggtgcaccaagaagggggatcgatgttcaacatcagcatgcagaagactttcctgtggagctga

SEQ ID NO: 641792 - DNA, 580 bp, Homo sapiens
aaaactgatgaatcaagagattgcaacaaaagcaacatattgtttaataatacagataaaagaaatacttaaatacttaaaagaattaaagaagctgggtggggtgcatgtgggggctgctgtttatccttacaatccctttggcactatgtggcatgcactcacacacacacacagagacacacacacatacgccctactttgatttacaaaaggaggataaggaagaagaaaaagaacaagcccttgcctcctacaaggacagacagtgatgatgtctaagaaagtgtgatggggagcccggcgtggtggctcacacctgtaatcccagcactttgggaggccaaggtgggcagatcacctgaggtcaggagttcaagatcagcctggccaacatgatgaaaccccagctctactaaaaatataaaaatataaaaattagctggctatggtggcacacgcctataatcccagctactygggagtctaaggcaggagaatcacttgaacccaggaggcagagtttgcagtgaaccgagatggtgccattgcactccagcctgggtgacagagtgagact

SEQ ID NO: 641793 - DNA, 424 bp, Homo sapiens
cgtttctacaaaaaataaaaaagtcggctgggctggtggtgcgygcttgtagccctagcttcctgtgaggctgaggtgtgaggatcccttgagcccaggaggtcgaggctgcattgaaccatgattgcaccactgcactccagcccaggtgacacagagatttctgtctcaaaaaacaaataaataatcaaaacaaaggtccggtctccaaatacagtcacatgctgaggtgctggggttaggatatcaacataggaattgtggggagacacatctcagcccacggggatcagtcgcagcttgaacttgagctctgacgtggctgtggtcggaggactctgcattcctctggctctgagatgtgacgtaatcacattacccaacccacttctcacgttctccactgggaagcctcacaagcacc

SEQ ID NO: 641794 - DNA, 424 bp, Homo sapiens
cgtttctacaaaaaataaaaaagtcggctgggctggtggtgcgtgcttgtagccctagcttcctgtgaggctgaggtgtgaggatcccttgagcccaggaggtcgaggctgcattgaaccatgattgcaccactgcactccagcccaggtkacacagagatttctgtctcaaaaaacaaataaataatcaaaacaaaggtccggtctccaaatacagtcacatgctgaggtgctggggttaggatatcaacataggaattgtggggagacacatctcagcccacggggatcagtcgcagcttgaacttgagctctgacgtggctgtggtcggaggactctgcattcctctggctctgagatgtgacgtaatcacattacccaacccacttctcacgttctccactgggaagcctcacaagcacc

SEQ ID NO: 641795 - DNA, 614 bp, Homo sapiens
gacaaggtttgctctgtctataaacaggcctgggatccaggctctgaatctcgccatgactctatccccacaccaggggcctctcataagccatggcctgcagctttcaaaggactggctcctcaccctgccccttgatcagcccaaggacccttcacgtttaaggagggtggagaagattcgggaaccatttatatttttccctgatctctggaccctctttcactcacttmcaaaaggctggggaggaatcagaaaggcctctcagactgtggaagcctgaggtcttgtcccctcaagtgaatatggtgttggtaacatgagaactgcttgagagccaaggtcactttattgtttaaattaaatcataatcctcccctggctactctaaactatggggatcaaaaaaactaataacaatgccttaaaagcatgatctgaatttacatttgctgctacttttattagaagcagcagcagtgtgtagctagtgtgagcaccaggctggaagtcagagattctggatttaaaccccagctgtgtgacctgccagtgtagactttaggtttctcatcttaaagaaggggaggctagaaatagctgcttccgtttcc

SEQ ID NO: 641796 - DNA, 582 bp, Homo sapiens
cctgccagtgtagactttaggtttctcatcttaaagaaggggaggctagaaatagctgcttcygtttccattcagtcatcatctcactcatttaacaagcatatgtggctcattgactctttaccaggtgccattccagacactagggttcggcattaagcattcagacactgcccctgaccatgtgactctcaggtcccaatagcaagaaggcagacaataaacagacaggcacttacataaataagataattttatcttacttgcatttgtggtgatgctagtataaacaaacctactgtgctgccagtcctataaaagtctagcacatacagttatacacagtgcataatatttgctaatggtactaaataactatgttattggtttatgcgtttagtatcttatactttttattattcttttagaatgtactccttctacttatatatttaaaaagctaactataaaacagtctcaggcaggtccttcaggaggtatttcagaagagggcattgttattaaaaaaaaatagggaaaaaacttcaggacattggtctgggaaaagattttatgaataag

SEQ ID NO: 641797 - DNA, 568 bp, Homo sapiens
ctagtataaacaaacctactgtgctgccagtcctataaaagtctagcacatacagttatacacagtgcataatatttgctaatggtactaaataactatgttattggtttatgcgtttagtatcttatactttttattattcttttagaatgtactccttctacttatatatttaaaaagctaactataaaacagtctcaggcaggtccttcaggaggtatttcagaagagggcattgttattaaaaaaaaatagggaaaaaacttcaggacattggtctgggaaaagattttatgaataagacctcaaaagcrcaaacaataaaaccaaaaataagcaaatgggattatatcaccctaaaaagcttctgcacagtaaaggaaacaatcatcagagtgaaaagacaacttacagaatgagagaaaatatttgcaaactaatatactatatttttatggttattttagagtgtattccttctgaagcaggaaattttacctgaccccttcgcaggtgggaactagagtgcacaggtgtgttggtgccagcagggatggactccattcac

SEQ ID NO: 641798 - DNA, 568 bp, Homo sapiens
ctagtataaacaaacctactgtgctgccagtcctataaaagtctagcacatacagttatacacagtgcataatatttgctaatggtactaaataactatgttattggtttatgcgtttagtatcttatactttttattattcttttagaatgtactccttctacttatatatttaaaaagctaactataaaacagtctcaggcaggtccttcaggaggtatttcagaagagggcattgttattaaaaaaaaatagggaaaaaacttcaggacattggtctgggaaaagattttatgaataagacctcaaaagcacaaacaataaaaccaaaaataagcaaatgggattatatcaccctaaaaagcttctgcacagyaaaggaaacaatcatcagagtgaaaagacaacttacagaatgagagaaaatatttgcaaactaatatactatatttttatggttattttagagtgtattccttctgaagcaggaaattttacctgaccccttcgcaggtgggaactagagtgcacaggtgtgttggtgccagcagggatggactccattcac

SEQ ID NO: 641799 - DNA, 617 bp, Homo sapiens
ttaatttattattaaattattattaaaataataataattattattaaaattcacaagaacaacttccagtcccacaagctccattcagggtaggtgccctatacaggtgcaccatttttaatcttttaccatatttctattgtacctcttctgtgtttagatacacaaatgcctaccattgtgttccacttgcatatagtattyggtagagtaacacgttgtataggtgtgtagcctaggagcaataggccataccacatagcccaggtgtgtagtaggctatgccatctgggtttgtgtaagtatactctcatgttcacacggtgatgaagtcacctaacaacacatctctcagaatgcatccccatcattcagtgactcatgactatatgaatttagggggacatcaggtctgaggacacagatgtcatagtcatcagatgtatggtctttaaagccatgacacttgatggacacatccagataatcagtgggggttagggaagggaagaggcagggaagatacagccctgagtggccccacagagagaggactggccaggaagggggagccaatacaagaggaggtaaaggaggtggccatggggtagaccagg

SEQ ID NO: 641800 - DNA, 583 bp, Homo sapiens
tcttccccaggcagctaacggacagccttctagcacatgttcttgtcagatttgtcacctctcctaataaggtttcctcccacctggcccccatagaatttctcacttagtcactgaaggaaatacaaagaaccagatgggaagcactttgagtatatgtcaggtgggcaacacaatctcactgctgctgagcaggctaagaaattgcccaygttgtgtattgactgctagctataaacagaaggtcttgggctcccccatttggttctctgataatctcatcttttctgatttcagctcttgaaatatactttcagcttgcaatgagaagtggtcaaaataaatagaccagtctgtttcctcatatagttgtagctgagaacacagaatgtcttcaggaaagatggtccatggagaaatctctctgatcatcatcctaggtattgctgcttgttgtaattgttgcttgtttagttacttttctggcacagtctttgttcagccactgtagtctttactcagttttgttgttagctagtgattgtacagatcgttacttaagcttgagaccaattaacatgtc

SEQ ID NO: 641801 - DNA, 568 bp, Homo sapiens
ccaacatgtttaatgatggtggatggagacagactaaaatttatcatggccccattcactggaggatttgacatttattgaaactgagaagtcgctaacagaaaaaacagagatgatcttggaaaggaggaaccatgagggmcagctttattcccttatagatggccaatgatctctctgctttagtcacaaatcaatattccagtggcaccccaaatgagttcctcatcatttcatcatctccaatccttgggacccagacacatgtcactttctctcccactgcctacaatgctgtgccagcttcatttcagttttcacatcagcacttactttaggggatgacaatggatgagttctgtacattcatggtgatcaataaataaataatgggattagtttagagagagtaattacagtgattgggaagatggagtcagtcctaaatttaatacatagaatttgtttaatacgtattgaaggactggcaaaggaaaaaagaaacattgaaatagcaaaaaataatctcaagtttcttctctctattagaaacaaagctactgtaaga

SEQ ID NO: 641802 - DNA, 568 bp, Homo sapiens
ccaacatgtttaatgatggtggatggagacagactaaaatttatcatggccccattcactggaggatttgacatttattgaaactgagaagtcgctaacagaaaaaacagagatgatcttggaaaggaggaaccatgagggacagctttattcccttatagatggccaatgatctctctgctttagtcacraatcaatattccagtggcaccccaaatgagttcctcatcatttcatcatctccaatccttgggacccagacacatgtcactttctctcccactgcctacaatgctgtgccagcttcatttcagttttcacatcagcacttactttaggggatgacaatggatgagttctgtacattcatggtgatcaataaataaataatgggattagtttagagagagtaattacagtgattgggaagatggagtcagtcctaaatttaatacatagaatttgtttaatacgtattgaaggactggcaaaggaaaaaagaaacattgaaatagcaaaaaataatctcaagtttcttctctctattagaaacaaagctactgtaaga

SEQ ID NO: 641803 - DNA, 583 bp, Homo sapiens
gagtctgaaatcagtcaggttcatatgtaggtttttgttcatattttaattattttcacaacaaaaccatctccaggcccacacatctcctaagtctaatgagattttattcagttctatctaaaaaggaacttggcctcagtgttgttcttttgctgcctgtacttatawcacataatcttgcaataatttcaggaaagtattaatactggaataatattcattactattttaaagcctcagctcctgttaatcaattctcatttcagttttaaatcccttcaaacaatagatgctgccactaattttggccaaaattttcctttcttgatgatagaaacagccctcacctaaaacactaaaacatggggcttacccaagaaacctgatttgagacattgggctaaacttttaaagattaccctttcatagacatcaattctttggtctttagagatggctgttgtaatcatattttgttcaccaattactttgggtttataaacccctgcttcacagaaaatttgtgttctctgcctgtgattttgtagtttgtgtagtgcacaaagattcaagacagagg

SEQ ID NO: 641804 - DNA, 583 bp, Homo sapiens
gagtctgaaatcagtcaggttcatatgtaggtttttgttcatattttaattattttcacaacaaaaccatctccaggcccacacatctcctaagtctaatgagattttattcagttctatctaaaaaggaacttggcctcagtgttgttcttttgctgcctgtacttatatcacataatcttgcaataatttcaggaaagtattaatactggaataatattcattactattttaaagcctcagctcctgttaatcaattctcatttcagttttaaatcccttcaaacaatagatgctgccactaattttggccaaaattttcctttcttgrtgatagaaacagccctcacctaaaacactaaaacatggggcttacccaagaaacctgatttgagacattgggctaaacttttaaagattaccctttcatagacatcaattctttggtctttagagatggctgttgtaatcatattttgttcaccaattactttgggtttataaacccctgcttcacagaaaatttgtgttctctgcctgtgattttgtagtttgtgtagtgcacaaagattcaagacagagg

SEQ ID NO: 641805 - DNA, 567 bp, Homo sapiens
ataaatttacttagtgttatggagggcacttggtaaggaagcaggcacgtaatacaattataaaacacaaagctccttgtccaagagttttcttttatagacaaatgggctttaaaaatatcttgtggtrgctcacgccattgtaattccagtactttgggaggtggaggcgggaggatcatctgaggttgggagttcgagatcagcctgaccaacatggagaaaccctgtctctactaaaaatacaaaaactagccaggcatggtagtgggcacctgtaattccagctactcaggaggttgaggcaggagaatcacttgaaccctggaggcggaggttgcggtgagccaagatcattccattgcactccagcctgggcaacaagagcgaaactctgtctcaaaaaaaaaaaatctatctctctctctctatatatatatgtatgtacatatatgtgtgtgtatgtgtgtgtgtgtgtatatatatattttgccaacaacttgcatttgaattcctgaagtcacaatggaagactgacttgactactttttgtaatgtgcataaatt

SEQ ID NO: 641806 - DNA, 567 bp, Homo sapiens
ataaatttacttagtgttatggagggcacttggtaaggaagcaggcacgtaatacaattataaaacacaaagctccttgtccaagagttttcttttatagacaaatgggctttaaaaatatcttgtggtggctcacgccattgtaattccagtactttgggaggtggaggcgggaggatcatctgaggttgggagttcgagatcagcctgaccaacatggagaaaccctgtctctactaaaaatacaaaaactagccaggcatggtagtgggcacctgtaattccagctactcagraggttgaggcaggagaatcacttgaaccctggaggcggaggttgcggtgagccaagatcattccattgcactccagcctgggcaacaagagcgaaactctgtctcaaaaaaaaaaaatctatctctctctctctatatatatatgtatgtacatatatgtgtgtgtatgtgtgtgtgtgtgtatatatatattttgccaacaacttgcatttgaattcctgaagtcacaatggaagactgacttgactactttttgtaatgtgcataaatt

SEQ ID NO: 641807 - DNA, 567 bp, Homo sapiens
ataaatttacttagtgttatggagggcacttggtaaggaagcaggcacgtaatacaattataaaacacaaagctccttgtccaagagttttcttttatagacaaatgggctttaaaaatatcttgtggtggctcacgccattgtaattccagtactttgggaggtggaggcgggaggatcatctgaggttgggagttcgagatcagcctgaccaacatggagaaaccctgtctctactaaaaatacaaaaactagccaggcatggtagtgggcacctgtaattccagctactcaggaggttgaggcaggagaatcacttgaaccctggaggcggaggttgcggtgagccaagatcattccattgcactccagcctgggcaacaagagcgaaactctgtctcaaaaaaaaaaaatctatctctctctctctmtatatatatgtatgtacatatatgtgtgtgtatgtgtgtgtgtgtgtatatatatattttgccaacaacttgcatttgaattcctgaagtcacaatggaagactgacttgactactttttgtaatgtgcataaatt

SEQ ID NO: 641808 - DNA, 567 bp, Homo sapiens
ataaatttacttagtgttatggagggcacttggtaaggaagcaggcacgtaatacaattataaaacacaaagctccttgtccaagagttttcttttatagacaaatgggctttaaaaatatcttgtggtggctcacgccattgtaattccagtactttgggaggtggaggcgggaggatcatctgaggttgggagttcgagatcagcctgaccaacatggagaaaccctgtctctactaaaaatacaaaaactagccaggcatggtagtgggcacctgtaattccagctactcaggaggttgaggcaggagaatcacttgaaccctggaggcggaggttgcggtgagccaagatcattccattgcactccagcctgggcaacaagagcgaaactctgtctcaaaaaaaaaaaatctatctctctctctctatatatatatgtatgtacatatatgtgtgtgtatgtstgtgtgtgtgtatatatatattttgccaacaacttgcatttgaattcctgaagtcacaatggaagactgacttgactactttttgtaatgtgcataaatt

SEQ ID NO: 641809 - DNA, 597 bp, Homo sapiens
ggcctatcttttactaagaggaaaagaatgtgcagtcccacccacagctctacaaggcactcccccagtgaggttttgcgaaggtcaattttactaagttactggtttgaatcattttgtataaatctgtcatcagaatgatccatacccagtagggctcttttagacaaacaagagtggagtctgctgttgttattctagaaagatttttaaattatggttcacagataatgactgttgtgtttttggttcaggagagaatctaatgcatatcctgacactttagtcyaaataaagagctgcattcagttataaccttcccaaggacagcaagtggagcttggtttctatgcaatccctcagaatagccaatcctaggtgagcaccagtaaatgttaactaagggcaaaaatgggaataaataagatcatcattaaaatacatatttcagtgcttcatgattcacatgcttagaagagccacttgaataatatttatttttggttttatttttactatataatatcaacaagaccttgattggagtcagaagccactgagtatctaaggagctattattgctatatcctgttctct

SEQ ID NO: 641810 - DNA, 613 bp, Homo sapiens
ttggcattaataatatcccattgtggtccaagtccagtttacaaaaataagttgataagatatatactgatacaatatagaataacactaagaaagaaagtatcaatacaaagcctaattaacgttatttgtttctgaaagagggtttaatgaaaccccctggtgttcaattctttatttcataactattattgaacccctaccatgagtgccaggtatttctgctaggtatgtgtgctgggtgctgaatatacaccattgagtaaggcaggcacaatctttgcctgagaggcatttacagtctcatgtagctgcagcatttaagtttacacagattgaaaaaaaacattcgagaaaatcatctagacttgttccaaaagtcacttaggtaagacagctagagattagcttcctcagaaaaaaaagatacccagwtacatatacccaatcgcaacgacttcccacaccagccagagtgggtaaagacccagttacattctcaaaaccataaaaaaagctataatttgccccctcaaacacaatccccaaaaagcaaagcacaaaagatatacatgacaaacagagcatccctctcatttgtaaagtgatacct

SEQ ID NO: 641811 - DNA, 631 bp, Homo sapiens
cggtattcctgatgtgatggggcagtgcatggcaccagcttcacagtataggtccctgagtagtcacgtacctttgaggagaagatattgatatattacatttaaaaatctgaggtgtaatcagatggcagcagcagaagaaaattaattaagagtcttagtcacttacggcaaagtcagagacaaagctccactgctgtactggctggttataggttggttcactccttatgaggcggagggaaaatgtcaggcctggatgatcagctgacatgatcactgagcttgtaaaggatgctaggaaagtgccagtaatkataataatgatatagtggttcaattaaaagagtgcataacagtttagagttttcaaaataaatgatcatacattatttgcttctgtttttataagaaggctgcaaagcagtcatggttagtataattatcctcctctggcagatgaagaaactgggctgtgagtgactgtgtgactttccaaagatcacacagctaggatgtgactttctgattcctacttcagtactgtttctgctctatagttttgtcaaaagataattgtacagaaatgctcaaattgttcagagctactttctggggagtcacagcagca

SEQ ID NO: 641812 - DNA, 567 bp, Homo sapiens
tcgtcctactaatggattagattgatgcttgtggactttgaactatgagtctaacatggagattgaaaccaagttttgcaaatgctcgcgaactcgaactagtggcattcacaatcmgagttcgcagacattcaactaaagtaccccagagtaatagaattttacatcagaaagagatattagaagttgtgtctatcattcagaaaaagttaagtcccagaaaggttaagcaatatgcttgagatctcacagctagttagttgtagagtcatgactagaattcaggccataatttgtatttaatttaaatgcacctctttttttcagaaataaaaatgtgtaactttttcccttggtcatttcttgctttcgttggagcttcctctatccattttctagaattcagaaaaatatatatgttgtgttatgtaacacataaataattaatcacctaaaatagatcgcaaggataaaatatccatgaaatatataaagtcatatttaataatcacatattgcacaaaatttaaagccctaatatggtttaaagagttttttgatgaaaaa

SEQ ID NO: 641813 - DNA, 519 bp, Homo sapiens
ccatgttttttttctattctgtcttacttcatcgtattccaaacaaagatgaaggcagtcctaaggtcatctaacaaaggctatcatatttcattctcaaaatagctctgcacaatagtaggacaaatacaactagcctcttctacacaagaggaaaggacttaggtcagatcacactccatagaagtttgagtcaggytgtctgattatggtctagttctccttccacacagctcacaacaagaatcacaggcatgagttagcaaataatttaaatcatgagaactataatttagaacattcttatgaagttaaaagtaaactgctcatgtcacaaaaatgatgacctgaatccctaataaaaatatatagaaaagaaccatcaaccaaaccagttatttcattcttagctgtatagtatagtagttagcattccctcttacctgctagcctggccagcaggagaggtgctttgcattaaaagtcctttgagacagtagtttctatgggcggctgtta

SEQ ID NO: 641814 - DNA, 537 bp, Homo sapiens
ttgcttttagttcaaatactcataacaattttaaatcatgccctacatattttaggttctctattgtaacccacaagaagatcttgcttccttatcattttaacaactttgttgctgatgatggggtgggggtgaggattgtgtgtgtgtatgtgtattttatgtgtgaatgtgtagtatgaagaagaatcagtaactgtagagtgcaaataacaataagttttaataaaaacacttctgactatgttaatgatagataaatgaatcaaaaagcgaagaagaggagaaaaacagaaagaaaargaaggagagtaaaacaggaggctaaaagcagagaaagttttgtaaaatgtaggggaagaagaaagtcagaaaagagggagaaaaattaggctgactcccaggattgtaaaacctcactttaggtggctcatgatacaacatcacaggcatctacacataaacacaaaaacaacatagtgtatactttgaagagaagtcagtatttggatttttataatatcagagtagattttg

SEQ ID NO: 641815 - DNA, 572 bp, Homo sapiens
acttgaccaaagatgtaaaatctctttgttccccatacctcagcctgacacaatatacccatgtaacaaagctacacatgtactccctggaactaaagctgaatttttaaaaaagtatgatgtaaatttwatcacaatgaaacaccagaaacacccaattgacgaacattctacattactggactttactctttgaaagattcaaggttataaggtcaagggaaaacaggagctgctccagacagagtctaagagacacaagaactaaatgcaatccatggtgggtctgaatggattatataatttttcttaaaatcggcacatattctcacgatgcttttcaaactagatcttgatttagatgtaactcatcagtagattctacatagaagactcagattcaaattcagcagcacctggaaagaaaatgaaagaatgatgctccttacctaaaatatttcatagttaactaagtgtaagtcagtaaaagagagttgagaactttatctgttttaataagaaggaaaaatatgtacgtatgaccatgatacaaaattactgtttaatattaa

SEQ ID NO: 641816 - DNA, 526 bp, Homo sapiens
actaaatgcccagaaaaggttctaaaattctttactaaacataatatttttggtgacaatgacaatatgatatacaatgcctttacaagttttttgaccaatagcttttgcaatattttaagagatagttttccataatctttctgtgatcataacattatagacaggccttataaaactagtgacatgacaatagaattatgagaaaaattttataaaagtgataactcaatatcagataaagggagaaggctttattgaaagaaatttactttatcattaatgaacactatgtaaaatgtacatttttacgtgacttgaattaaaaaactcttaaagtaacattgttatctttyccccaaaagttcttcttatacttcctatctgtaatagattgtattaatttctttataccccattcacaaatacattcatagtacataaattttactagataaaaatgaagtacctttctcatcagcttgcttgtttttatgctaaagaaataactctctagataaagaat

SEQ ID NO: 641817 - DNA, 409 bp, Homo sapiens
ttgttgcccaggctagagggcaatggtgcaatctcggctcactgcaacctctgcctcctgggttcaagcaattctcctgcctcagcctcccgagtagctaggattacaggtgctcgccactgcgaccagctaatttttgtatttttagcagggacggggtttgtccacgttggccaagctggtctcaaactcctgacctcagttgatccrtcctcctcggcctcctaaagtgctgggattacaggcgtgagccaccacacccggcctaaatgactttttaaaattcccttttattttattcttgctttcccattaaatcacacattttcctcacatttctatgaatagaaattcagaacttttatccctggaatttttactgagtgacttaatacagtacctggcacag

SEQ ID NO: 641818 - DNA, 647 bp, Homo sapiens
gagtcatgcacaacagaatttggggtttctgattttacgggtgttcaattgaaaggtggaatcatcattagatattctgaaaaaggaggggatatcagggacctctgctaaccaccccctttctcccttgtttgggtttcctcagaagagtcatggacatgccaccttgaccgggattttggccattttctctctcttagttttattgccctaaattctagccataccaatggctttcagtgctccaaatacatccctccatgcctgggtactttagccatgctttccccagtcagtgatggtgggctaggcacyttccaaggcaaatgctcacatactctcaggacctacctctaacacttccagggccatgactcagaggttcctccagaagccatgtagattactccccaattccccttactccatgcatctcgtacatctctattcaatgccataccatactgaattagaattgcctgttttaagagtgtttcacaggcactcttgtagatgcatttcaaaactctgaaaagtgactgatacggagctggtcttgactcaataaatccctcaatcttttctcccggtcccatcaccttgcctacgtttttctcttgcctgagccttaacaggtagcactcact

SEQ ID NO: 641819 - DNA, 600 bp, Homo sapiens
tttgcacctattctcctgggaccattgctgaactgcatgggtggaatggagatcaatcttgggatgaaaagtaatggtgaaaggaaagaaagtcccgggaccctggacatgagtgcccagcagacccactgccagttgcagctcttarttttaaatttgccatggggtgtgcacatttcaggtctgccaccactgttcttgtttctgaaacaggaggaaaatctgaacaaccttcttccacttctaccaagggaaccagtaaagccaagcaaatactgtaattacagtataccagttcagggcacaaatttaggagtcgaacagatctagctacttagtgatgtaacactcaacaaatgatatgtagttatatttatcctgtggataactatggaataaacaagctagatatagatgcttatggcagtctttggtgcttcctgcctctccccacacccccatactagcccctatcccatagagccggtatttgcagctatctgattcttcctgactctttcaatgattctctcatttgatttacatttctttttcttttctgaacaagaaactaaaatgccacctagctcatcttttcta

SEQ ID NO: 641820 - DNA, 605 bp, Homo sapiens
tgaaattcattaaaactgactttcactaaacttctttaaccttcaacataaactacaccttcaatatatttgaacagtggatatcaaagtgaagatatttctcttgggctgctatgttctgaatttagggatttctagtgtgttcttcccaacatgctcctgtgtgctgagccagggtggtagggcagcctttgccttttgctgaaggcaatggtrtatcaccgtctctgccttgacttcaggccctcgtgtcaataatcagaaaagaaagttcaggagcagagccctgtgagccacgggggccacagacgtaaaaagagaaagagcgtcagtgtaccatttatgaggaagctttgctttcctcttttcttttcgtggggagagagttgagaaaaagaaagctgctggttgagtcactgccagagatgactattgctgaaaccataaaatggactcctttaattcattaagacagaaactacagcaaaatcaactctaaaagtgttatttctggagagagaataaaaagctatgagatgagaaaataaatatgaaagagctttgcacacattctttctttaagcatcgagtgtctttattgggaa

SEQ ID NO: 641821 - DNA, 542 bp, Homo sapiens
tttttcctgagtgcagtggaaagcctttaagcaggggtgacatgatgtgactgccatcataagtgatggcgggctgccctgctggtcagagaccrgcttggggtgggggctgagggtgaccagtggcagcagggaaatgtggaaagcttctatagagatccaggtgagagatgagggtggtttgaatgagggtaagggcagtggatcaagtaggtctaacacaaatcctatcatgatttcagctagcaacagcacactggcttttctgtgatctttggagtgaagatttttaaaccacaggtaatcagaatcataccaacttgccctccagcaacctcgttgccctatccagcttccaagctcgccacacacaccatttcatttaataaatctgctaaggctttcagaaaccagttcaatatcaatctctctctccctttgtcctctctctctttttctctctcttatgcacactgtctcactctcactccctaaaattgtacaattttggccacattttttcttctatatgacattgctgc

SEQ ID NO: 641822 - DNA, 621 bp, Homo sapiens
acctggcatgcaagatattcactctctgcctcctgcctgctttgctagtcttgttaactcctttttcasatttgtacatgtcttgaatgtcatcttcaccctatttatccaacagtttccaactcgtccttcaaaactctgctgaaagatcttcccctctgcagtcttcccagatgtttccagacaggtactcacagtgtgctctgacctcaggtggtatcttcatgtggatacctgtcaaccctccggtcactgtattttaattatctttacctctctcttcccctcactagactgtaaactggtaacacaaacctgtcctcatgaaaacgaaggcaattttactttgggaggaatttcagatacagcttaattttggggggttgaaaggtctctcccagtcagctgtcacataactgaacttcactgtgcttatttccaagccctctgtttgcaagtagaagcttctcatgacttcagcatagcccagtggctgagaccaggtgtcagtcagcctggagcaatccctgctctactgcatactagctccgtgatcttatgttacttaacctctttgtgccttcatttccttctcagtaaaatgaagataacaagcgtacc

SEQ ID NO: 641823 - DNA, 621 bp, Homo sapiens
acctggcatgcaagatattcactctctgcctcctgcctgctttgctagtcttgttaactcctttttcagatttgtacatgtcttgaatgtcatcttcaccctatttatccaacagtttccaactcrtccttcaaaactctgctgaaagatcttcccctctgcagtcttcccagatgtttccagacaggtactcacagtgtgctctgacctcaggtggtatcttcatgtggatacctgtcaaccctccggtcactgtattttaattatctttacctctctcttcccctcactagactgtaaactggtaacacaaacctgtcctcatgaaaacgaaggcaattttactttgggaggaatttcagatacagcttaattttggggggttgaaaggtctctcccagtcagctgtcacataactgaacttcactgtgcttatttccaagccctctgtttgcaagtagaagcttctcatgacttcagcatagcccagtggctgagaccaggtgtcagtcagcctggagcaatccctgctctactgcatactagctccgtgatcttatgttacttaacctctttgtgccttcatttccttctcagtaaaatgaagataacaagcgtacc

SEQ ID NO: 641824 - DNA, 621 bp, Homo sapiens
acctggcatgcaagatattcactctctgcctcctgcctgctttgctagtcttgttaactcctttttcagatttgtacatgtcttgaatgtcatcttcaccctatttatccaacagtttccaactcgtccttcaaaactctgctgaaagatcttcccctctgcagtcttcccagatgtttccagacaggtactcacagtgtgctctgacctcaggtggtatcttcatgtggatacctgtcaaccctcmggtcactgtattttaattatctttacctctctcttcccctcactagactgtaaactggtaacacaaacctgtcctcatgaaaacgaaggcaattttactttgggaggaatttcagatacagcttaattttggggggttgaaaggtctctcccagtcagctgtcacataactgaacttcactgtgcttatttccaagccctctgtttgcaagtagaagcttctcatgacttcagcatagcccagtggctgagaccaggtgtcagtcagcctggagcaatccctgctctactgcatactagctccgtgatcttatgttacttaacctctttgtgccttcatttccttctcagtaaaatgaagataacaagcgtacc

SEQ ID NO: 641825 - DNA, 621 bp, Homo sapiens
acctggcatgcaagatattcactctctgcctcctgcctgctttgctagtcttgttaactcctttttcagatttgtacatgtcttgaatgtcatcttcaccctatttatccaacagtttccaactcgtccttcaaaactctgctgaaagatcttcccctctgcagtcttcccagatgtttccagacaggtactcacagtgtgctctgacctcaggtggtatcttcatgtggatacctgtcaaccctccggtcactgtattttaattatctttacctctctcttcccctcactagactgtaaactggtaacacaaacctgtcctcatgaaaacgaaggcaattttactttgggaggaatttcagatacagcttaattttggggggttgaaaggtctctcccagtcagctgtcacataactgaacttcactgtgcttatttccaagccctctgtttgcaagtagaagcttctcatgacttcagyatagcccagtggctgagaccaggtgtcagtcagcctggagcaatccctgctctactgcatactagctccgtgatcttatgttacttaacctctttgtgccttcatttccttctcagtaaaatgaagataacaagcgtacc

SEQ ID NO: 641826 - DNA, 464 bp, Homo sapiens
cacataactgaacttcactgtgcttatttccaagccctctgtttgcaagtagaagcttctcatgacttcagcatagcccagtggctgagaccaggtgtcagtcagcctggagcaatccctgctctactgcatactagctccgtgatcttatgttacttaacctctttgtgccttcatttccttctcagtaaaatgaagataacaagcrtacctattttatagcattgctgtgaggtgggaatgatgtggaagtgcatgcaaagccctcagaatattcagtaaatgctagctactgttgttaaaatgcatagtctatgcaatcacacataagtatgcctagccttcagccaaagtataaatgacatatcaggcttttgtttgttttgaggaagcctgatgagggggacagagggaaggaatgttaactcagaaagaaaagtaacgaaagttgagaacaaggcctc

SEQ ID NO: 641827 - DNA, 464 bp, Homo sapiens
cacataactgaacttcactgtgcttatttccaagccctctgtttgcaagtagaagcttctcatgacttcagcatagcccagtggctgagaccaggtgtcagtcagcctggagcaatccctgctctactgcatactagctccgtgatcttatgttacttaacctctttgtgccttcatttccttctcagtaaaatgaagataacaagcgtacctattttatagcattgctgtgaggtgggaatgatgtggaagtgcatgcaaagccctcagaayattcagtaaatgctagctactgttgttaaaatgcatagtctatgcaatcacacataagtatgcctagccttcagccaaagtataaatgacatatcaggcttttgtttgttttgaggaagcctgatgagggggacagagggaaggaatgttaactcagaaagaaaagtaacgaaagttgagaacaaggcctc

SEQ ID NO: 641828 - DNA, 612 bp, Homo sapiens
tttacttagcatgttttcaagggtcattaatattgcagagtgtattggtatttcattctttcatattgtagaataatattcsatggtatagatataccatgttttatttattaattcatcagttaatggatattgggactgtttccatgtttttttggctatgataaataatactgctatgaacattcatgtacaagtttttgtgtgaatacatattttcatttgtcttaggaatatacataggtatggaattgctaggtcatatagttatactatattaacattctaagtaactgccagactattttgcaaaggtgctggaccttcttgcatttcctgagcaatgtacgagggttccatttcccaacatttttatcaacacttgtcattatctgtttattttgattctagccatcctactatgttcaatgtgttcttattttggttttgattttgatttctcacatggctaatggtgttgtgtatcttttcatgtgctattcacatcctttgcccactttttgattaggttgtttgtcattttattattaagatatagccgctcatttggtattctggatagaaattcttcatatgatttatgatttccaa

SEQ ID NO: 641829 - DNA, 622 bp, Homo sapiens
tatgcctagccttcagccaaagtataaatgacatatcaggcttttgtttgttttgaggaagcctgatgagggggacagagggaaggaatgttaactcagaaagaaaagtaacgaaagttgagaacaaggcctcaaaaacactattgcctcagttttcccaagagaaatcggtgagtttggtagatttccagttgtactggtgggaaattgagcagaaacactggcactcatgtaatttttgttcttgttctttctattgttgttttctccaagagaaattgttaactttgctatatatcccaccgtattcatgagaaatgtagtgggaaccccactgcattaatgtcccccctttacttgtatcattttgcatatttagtagagctaagatgcttgctgccttcattaggagcttgctgtatgcagtgggaattgcaagcctccaccatctcagtgrctcatctcagtaattggttggaaaagtgatttccaacagctcatgctctctggagctatgactttgagcacttcatctcaccacaggcctccttgtcagcctgtgatatgttatggctctcttttgtctgaccgtatgtattctttcattgtctctgacagcagg

SEQ ID NO: 641830 - DNA, 595 bp, Homo sapiens
gggtgaggtagggtgggcagatgtcagcccccaaatcaggraaccaagtatctgtccttcaacttttttttttttgaacaggatagtcaatattggccaagtgctaagacacacttagctaaccccaggcctgagatttctctcatttgtcactttgaaacactgggtcctattgaaggcaaagatgaattgtgacccagagaggagaatcacattggacagggtgacttcctgggtttaattaaagtactgaaattaatgagtattgtaagtgacttgccaaattgcctgacaaaattatttccacagataactccttgttttcagaaaaatgcaagagagtagccagaactttgaagtgaaccaaacaaatgacatcctaatggaggattagctggaggatgcctcaggtttggaacgtgaccaagtattactctggaaaactccctttattgcagcccctggagcagccccaaagcctgagtgaatttatctaaggttgtttttctcctcagtttaagaaaggcactggaattatatttgtctaaattattattgttgaaagttaattttaaagaaagataattgagataat

SEQ ID NO: 641831 - DNA, 598 bp, Homo sapiens
aagctctatacagcatttttcatgcctcagattgaaaaaggcaccatccctatctgtttgcacactgttttgaccacaaagaaccagtcgttttcagggtttctcaagattctcattgcttagtagcttgtggaactaaactatgagcaagatatgatttcagtgtcaaagtgtggaagcttgctcatttgttccttcgttccttcattcagtaaacatgtgtaagaacatgtctccccatggaattgctgtggggatgaaatgcctgtcatctaatgagtggtcagtaaaagttattaccattttatgattattctgtaccaaagaccgtgctgggtcctaagattaaaaatcaaaaacaaacaaacaaaaatttaaaatccaaaccttttcttagtctttttctaaaactctttgtctagaaatatgatcattttagasatcctaaagagagcctaaatatgaagaatgaattaggaggaaagaggtaaggaataggagcctagaaaagggaactggatggacaagatacatatggttagagtgaggctctggtgggattcctttccctgcttcttaaggatggcatgtactctcc

SEQ ID NO: 641832 - DNA, 531 bp, Homo sapiens
cctaaatatgaagaatgaattaggaggaaagaggtaaggaataggagcctagaaaagggaactggatggacaagatacatatggttagagtgaggctctggtgggattcctttccctgcttcttaaggatggcatgtactctcccaagcccatactattccatgctggggcacaggcagctaggggtgagggaagggtgggcaaaggatgcctgctggcctcagaattagtgacaagcagcagctatcaccgcaggacctgcacctcacacccaacagtcatcaggatcctaactgccctagtggagcacagttcagcctgttagccccaactggaaaggtcactttttcatagtgtgactttcaccaccatccattagcacctcacttstctttgcagtttttactatgacttagtatacattttgtgaaacatcatctttggcctaaaatttgggtatgtgattccgttgaatactcacttacgtgtcttttgcataggtctggtaagactcgcatagccactcacatt

SEQ ID NO: 641833 - DNA, 562 bp, Homo sapiens
ctttcagaaaggttgagaggtactcattggactgggtgatagggtgaccatttgcgtattaaatttaagctacattaagtaatgtggagagcagacaggcatgtatatgcaagtatgtatctaaccctgaactcatacgtcttttcataatctattgaacgtgatcttgaaccaaatgcagtaaagcagtcagaggccttttaggacctttgtgtcttgggcattctttactcttgtttccacatgagtttgccttagctaagatctccagtgtattccactgtgattgtcgatttttatagcatctctcttattctttatttacctgtaagtgaattaaaataagctgtattgtgaatttggacttttggagcccagatttcataaatggggaaagcattgcttggagttgtatttaaatctaaatgaatacgagttctgaaatgtggttcccctactttttgctacacatctggacccactgaattttacaattgaattggacacttgaagcacgtctcataggaartgtcagcaccaataattttcagaagtcatgaag

SEQ ID NO: 641834 - DNA, 425 bp, Homo sapiens
atttgctttacaaaatgatccctgagcctgcaaaaaggagcatggcttgtggatagaggaagatcggataaaaggagaccagtcaggaggctatagaccaggtctagataagaatgaatggggatctgaactaaggtaggggatggagaagagaggatagattttagatagttctaggtggtagaattaatagaacttggtggytaattaaatgtgataataaacaggcaaagaggattctagaacacctccctgcaggaactcccggtaaagtttgagcatgtcatgtctgacttagggcatgcatatctgaaaccaccttgtgctgaatgacaagcctgatttttccagcaccaatgctcttcttgattgtttgcttgacactttgggaagtagcattaacactctcaggtcactagggggct

SEQ ID NO: 641835 - DNA, 524 bp, Homo sapiens
gaaggccatgtgaagatagaggcagaggttagagctatgcagccccaagccacagaattccaagggtagccagcagctgccagaaggtaggagagagtcatgggacagattctccytcagagcctccagagtgaaccaaacctgccaacaccttggttttgggcttctggcctccagaactgtgagaaaaaaaatgtatgttgttttaagccacttggtttgtggtaatttgtaatggcagccccaggaaactaatacattggtcaatttaaaaaaatgaataaagaaaattgaaatcacctaaatgaaggtttgccattcagccacaacttgtaactggcgtgttcctctgaaggcaaattgaataaaagagcaaacacatattttgtcaaggctgacatgcatcgaaatatcacaagggcctcaagagggaagagaaatttgatttatgtcttcatgctagttgaaaatagtgtagccatggatgaagctggttgtcacagtcagccccacacatctgttta

SEQ ID NO: 641836 - DNA, 524 bp, Homo sapiens
gaaggccatgtgaagatagaggcagaggttagagctatgcagccccaagccacagaattccaagggtagccagcagctgccagaaggtaggagagagtcatgggacagattctccctcagagcctccagagtgaaccaaacctgccaacaccttggttttgggcttctggcctccagaactgtgagaaaaaaaatgtatgttgttttaagccacttggtttgtggtaatttgtaatggcagccccaggaaactaatacattggtcaatttwaaaaaatgaataaagaaaattgaaatcacctaaatgaaggtttgccattcagccacaacttgtaactggcgtgttcctctgaaggcaaattgaataaaagagcaaacacatattttgtcaaggctgacatgcatcgaaatatcacaagggcctcaagagggaagagaaatttgatttatgtcttcatgctagttgaaaatagtgtagccatggatgaagctggttgtcacagtcagccccacacatctgttta

SEQ ID NO: 641837 - DNA, 524 bp, Homo sapiens
gaaggccatgtgaagatagaggcagaggttagagctatgcagccccaagccacagaattccaagggtagccagcagctgccagaaggtaggagagagtcatgggacagattctccctcagagcctccagagtgaaccaaacctgccaacaccttggttttgggcttctggcctccagaactgtgagaaaaaaaatgtatgttgttttaagccacttggtttgtggtaatttgtaatggcagccccaggaaactaatacattggtcaatttaaaaaaatgaataaagaaaattgaaatcacctaaatgaaggttygccattcagccacaacttgtaactggcgtgttcctctgaaggcaaattgaataaaagagcaaacacatattttgtcaaggctgacatgcatcgaaatatcacaagggcctcaagagggaagagaaatttgatttatgtcttcatgctagttgaaaatagtgtagccatggatgaagctggttgtcacagtcagccccacacatctgttta

SEQ ID NO: 641838 - DNA, 524 bp, Homo sapiens
gaaggccatgtgaagatagaggcagaggttagagctatgcagccccaagccacagaattccaagggtagccagcagctgccagaaggtaggagagagtcatgggacagattctccctcagagcctccagagtgaaccaaacctgccaacaccttggttttgggcttctggcctccagaactgtgagaaaaaaaatgtatgttgttttaagccacttggtttgtggtaatttgtaatggcagccccaggaaactaatacattggtcaatttaaaaaaatgaataaagaaaattgaaatcacctaaatgaaggtttgccattcagccacaacttrtaactggcgtgttcctctgaaggcaaattgaataaaagagcaaacacatattttgtcaaggctgacatgcatcgaaatatcacaagggcctcaagagggaagagaaatttgatttatgtcttcatgctagttgaaaatagtgtagccatggatgaagctggttgtcacagtcagccccacacatctgttta

SEQ ID NO: 641839 - DNA, 604 bp, Homo sapiens
cccaccttaaactccccaaccccacaccaaacatacaagagactgaaatgtgtccatggtgcctgccagagatgacagaagtatcttctcccatgaatccaccccctccaaatctttctgtggctccaaatgccttaacctggcagcagactctagtggagggagccctgtgtcttgygtggcctctgctgtgtgcctctgaacctggggcttaaccttgcaggacttccatttcttcattgataaaatgggaaataatatgaatcactatgggaaatgtactcaccagtccccataacagggggaggaagcagctttatttctcttccgtggttgctttgttttcttctgatacaacctgtcaattaggaaacatcgttttggctcttaccttaatgggtttgaggtcaagccaaatcatggtgagcttctagtaaacattctggacctttgacactcatcttcatggactatgtattgattgctatttttagtattgatggctaatatttgtggagcattcctgcactgcaggcactgtaccaagtatgtaatatatatttttggctgcataccttatagcaaccctgtgatgggggtagtg

SEQ ID NO: 641840 - DNA, 604 bp, Homo sapiens
cccaccttaaactccccaaccccacaccaaacatacaagagactgaaatgtgtccatggtgcctgccagagatgacagaagtatcttctcccatgaatccaccccctccaaatctttctgtggctccaaatgccttaacctggcagcagactctagtggagggagccctgtgtcttgtgtggcctctgctgtgtgcctctgaacctggggcttaaccttgcaggacttccatttcttcattgataaaatgggraataatatgaatcactatgggaaatgtactcaccagtccccataacagggggaggaagcagctttatttctcttccgtggttgctttgttttcttctgatacaacctgtcaattaggaaacatcgttttggctcttaccttaatgggtttgaggtcaagccaaatcatggtgagcttctagtaaacattctggacctttgacactcatcttcatggactatgtattgattgctatttttagtattgatggctaatatttgtggagcattcctgcactgcaggcactgtaccaagtatgtaatatatatttttggctgcataccttatagcaaccctgtgatgggggtagtg

SEQ ID NO: 641841 - DNA, 604 bp, Homo sapiens
cccaccttaaactccccaaccccacaccaaacatacaagagactgaaatgtgtccatggtgcctgccagagatgacagaagtatcttctcccatgaatccaccccctccaaatctttctgtggctccaaatgccttaacctggcagcagactctagtggagggagccctgtgtcttgtgtggcctctgctgtgtgcctctgaacctggggcttaaccttgcaggacttccatttcttcattgataaaatgggaaataatatgaatcactatgggaaatgtactcaccagtccccataacakggggaggaagcagctttatttctcttccgtggttgctttgttttcttctgatacaacctgtcaattaggaaacatcgttttggctcttaccttaatgggtttgaggtcaagccaaatcatggtgagcttctagtaaacattctggacctttgacactcatcttcatggactatgtattgattgctatttttagtattgatggctaatatttgtggagcattcctgcactgcaggcactgtaccaagtatgtaatatatatttttggctgcataccttatagcaaccctgtgatgggggtagtg

SEQ ID NO: 641842 - DNA, 547 bp, Homo sapiens
aggatttttagagggtattaatatcagtgaaaagtctttggtgcatagtaacactgagccagaatgattttctggcttctggcagtgatttaaagaaatcctttggaacgctgttacatgctaggtgtcctgctaagttccttctatacatcttacttaattgtcacaacaaccaataaggttgctattactattctccatttaagaggtgaggaaattgagatttatgataatatagtatttaaaacatgctttttgttatttgtgtgtgcrtgtatttttttggtaacagtttaattagatgtcattcacataccatacaattcacctattcagattgttcagttcaatggtttttagatatattcagttgtgcaaccttcaccacaatgtattttagaacacttatatcacctcaaaaagaaccttataccctttagctctcttatgccctgagccccaagcaacaactaacctactttctctttatatatatttcttatgctgggtgattgtttacttattttcctttttttttttttttttt

SEQ ID NO: 641843 - DNA, 600 bp, Homo sapiens
gtttggaaacactagtgtactccctacttgaccctgtgggtcatgtattgttatcctgatcattttaccaaacaaaaacatagrgaacataagtaatctactggaagtcacacatctaagaagtggtaacctgtgtcttcagactgtgtaccacgtgggcattccactgtgccttgttgcccacaacacagatctgccaaaaagatctcccttttgataatggactgcaaatttgaaagaattattaaacagtgctatcttccagctgcattaggcagcgaagagcgtggaaaaagcatcccattgctagtccctgaatcacctgaatcatataatcttcctaggcctcactctccctgtttataaaataaggggtaataaaaccttccatctctcacagatgagtgttttagggacacattagatcacttatgagagaagctttatggtctttgcaagaaaagtacatggcaaaataacattttcccccatgatcgtctaatatatcataaaaaaaatgctggaaaggtaattaagtatgtggctttgacagacgtgttgaaaggaatgaaaaactgatgaaaataaaggcagttgtta

SEQ ID NO: 641844 - DNA, 600 bp, Homo sapiens
gtttggaaacactagtgtactccctacttgaccctgtgggtcatgtattgttatcctgatcattttaccaaacaaaaacatagggaacataagtaatctactggaagtcacacatctaagaagtggtaacctgtgtcttcagactgtgtaccacgtgggcattccactgtgccttgttgcccacaacacagatctgccaaaaagatytcccttttgataatggactgcaaatttgaaagaattattaaacagtgctatcttccagctgcattaggcagcgaagagcgtggaaaaagcatcccattgctagtccctgaatcacctgaatcatataatcttcctaggcctcactctccctgtttataaaataaggggtaataaaaccttccatctctcacagatgagtgttttagggacacattagatcacttatgagagaagctttatggtctttgcaagaaaagtacatggcaaaataacattttcccccatgatcgtctaatatatcataaaaaaaatgctggaaaggtaattaagtatgtggctttgacagacgtgttgaaaggaatgaaaaactgatgaaaataaaggcagttgtta

SEQ ID NO: 641845 - DNA, 600 bp, Homo sapiens
gtttggaaacactagtgtactccctacttgaccctgtgggtcatgtattgttatcctgatcattttaccaaacaaaaacatagggaacataagtaatctactggaagtcacacatctaagaagtggtaacctgtgtcttcagactgtgtaccacgtgggcattccactgtgccttgttgcccacaacacagatctgccaaaaagatctcccttttgataatggactgcaaatttgaaagaattattaaacagtgctatcttccagctgcattaggcagcgaagagcgtggaaaaagcatcccattgctagtccctgaatcacctgaatcatataatcttyctaggcctcactctccctgtttataaaataaggggtaataaaaccttccatctctcacagatgagtgttttagggacacattagatcacttatgagagaagctttatggtctttgcaagaaaagtacatggcaaaataacattttcccccatgatcgtctaatatatcataaaaaaaatgctggaaaggtaattaagtatgtggctttgacagacgtgttgaaaggaatgaaaaactgatgaaaataaaggcagttgtta

SEQ ID NO: 641846 - DNA, 600 bp, Homo sapiens
gtttggaaacactagtgtactccctacttgaccctgtgggtcatgtattgttatcctgatcattttaccaaacaaaaacatagggaacataagtaatctactggaagtcacacatctaagaagtggtaacctgtgtcttcagactgtgtaccacgtgggcattccactgtgccttgttgcccacaacacagatctgccaaaaagatctcccttttgataatggactgcaaatttgaaagaattattaaacagtgctatcttccagctgcattaggcagcgaagagcgtggaaaaagcatcccattgctagtccctgaatcacctgaatcatataatcttcctaggcctcactctccctgtttataaaataaggggtaataaaaccttccatctctcacagatgagtgttttagggacacattagatcacttatgagagaagctttatggtctttgcaagaaaagtacatggcaaaataacattttcccccatgatcgtctaatatatcataaaaaaaatgctggaaaggtaattaagtatgtggctttgacagaygtgttgaaaggaatgaaaaactgatgaaaataaaggcagttgtta

SEQ ID NO: 641847 - DNA, 525 bp, Homo sapiens
cttccatctctcacagatgagtgttttagggacacattagatcacttatgagagaagctttatggtctttgcaagaaaagtacatggcaaaataacattttcccccatgatcgtctaatatatcataaaaaaaatgctggaaaggtaattaagtatgtggctttgacagacgtgttgaaaggaatgaaaaactgatgaaaataaagrcagttgttatcttggtgactggaatggtattacttataaggacatttctaagtttcactaagacagttcattatgaaaaacaagatgggtatctatagttccattaattgtgttgtaagctaaaatccagattaatctaaaagtaaaatttgtaccataaaagatcagtggttggttcttattaaactgctacatcaggatcctacaacaaatgaaatatttgggaaagtccaggaatggaccagtgaaaatgattcaagaattaggaagcagaatctgttaaggaaaggttgaagggacaaaataaagtagaagata

SEQ ID NO: 641848 - DNA, 525 bp, Homo sapiens
cttccatctctcacagatgagtgttttagggacacattagatcacttatgagagaagctttatggtctttgcaagaaaagtacatggcaaaataacattttcccccatgatcgtctaatatatcataaaaaaaatgctggaaaggtaattaagtatgtggctttgacagacgtgttgaaaggaatgaaaaactgatgaaaataaaggcagttgttatcttggtgactggaatggtattacttataaggacatttctaagtttcactaagacagttcattatgaaaaacaagatgggtatctatagttccattaattgtgttktaagctaaaatccagattaatctaaaagtaaaatttgtaccataaaagatcagtggttggttcttattaaactgctacatcaggatcctacaacaaatgaaatatttgggaaagtccaggaatggaccagtgaaaatgattcaagaattaggaagcagaatctgttaaggaaaggttgaagggacaaaataaagtagaagata

SEQ ID NO: 641849 - DNA, 547 bp, Homo sapiens
aggatttttagagggtattaatatcagtgaaaagtctttggtgcatagtaacactgagccagaatgattttctggcttctggcagtgatttaaagaaatcctttggaacgctgttacatgctaggtgtcctgctaagttccttctatacatcttacttaattgtcacaacaaccaataaggttgctattactattctccatttaagaggtgaggaaattgagatttatgataatatagtatttaaaacatgctttttgttatttgtgtgtgcatgtatttttttggtaacagtttaattagatgtcattcacataccatacaattcacctattcagattgttcagttcaatggtttttmgatatattcagttgtgcaaccttcaccacaatgtattttagaacacttatatcacctcaaaaagaaccttataccctttagctctcttatgccctgagccccaagcaacaactaacctactttctctttatatatatttcttatgctgggtgattgtttacttattttcctttttttttttttttttt

SEQ ID NO: 641850 - DNA, 578 bp, Homo sapiens
catatctcttactgaagttcttactcttcattttaaccccagttttgcttctctagtcaactccagagcatccttacttagatgcctcaatatatcctggacccaatgtgatacccaatgtcccactttgtctagtgatgctaccatgattttttgacattaygtatgtttgaaatgttcttcccctaacactagctgtgcctgtcaaaagtcttacccatatttaagctccaattcagaaaatctttctccaatcctttcctcacccacaatttggtaagatagtttcccacctgagccacacccatgtcagcttgctagtgccctcttgttgtcacttatcagaatctggctgatgttttggttctctgtcttatctttaatccttctccttttgatcagaagcactttgaagatgttgatgtcttattcttgtcttctctgcaaaccctagttatcttgcttatgttgggtgcttactaaatatctattaagttggcgtcgcctcctgcctcagttttatccatgtcgttggagtcctgtttcatgtattcaaactgaatgtttctggctatccc

SEQ ID NO: 641851 - DNA, 578 bp, Homo sapiens
catatctcttactgaagttcttactcttcattttaaccccagttttgcttctctagtcaactccagagcatccttacttagatgcctcaatatatcctggacccaatgtgatacccaatgtcccactttgtctagtgatgctaccatgattttttgacattatgtatgtttgaaatgttcttcccctaacactagctgtgcctgtcaaaagtcttacccatatttaagctccaattcagaaaatctttctccaatccyttcctcacccacaatttggtaagatagtttcccacctgagccacacccatgtcagcttgctagtgccctcttgttgtcacttatcagaatctggctgatgttttggttctctgtcttatctttaatccttctccttttgatcagaagcactttgaagatgttgatgtcttattcttgtcttctctgcaaaccctagttatcttgcttatgttgggtgcttactaaatatctattaagttggcgtcgcctcctgcctcagttttatccatgtcgttggagtcctgtttcatgtattcaaactgaatgtttctggctatccc

SEQ ID NO: 641852 - DNA, 578 bp, Homo sapiens
catatctcttactgaagttcttactcttcattttaaccccagttttgcttctctagtcaactccagagcatccttacttagatgcctcaatatatcctggacccaatgtgatacccaatgtcccactttgtctagtgatgctaccatgattttttgacattatgtatgtttgaaatgttcttcccctaacactagctgtgcctgtcaaaagtcttacccatatttaagctccaattcagaaaatctttctccaatcctttcctcacccacaatttggtaagatagtttcccacctgagccacacccatgtcagcttgctagtgccctcttgttgtcacttatcagaatctggctgatgttttggttctctgtcttatctttaatccttctccttttgatcagaagcactttgaagatgttgatgtcttattcttgtcttctctgcaaascctagttatcttgcttatgttgggtgcttactaaatatctattaagttggcgtcgcctcctgcctcagttttatccatgtcgttggagtcctgtttcatgtattcaaactgaatgtttctggctatccc

SEQ ID NO: 641853 - DNA, 583 bp, Homo sapiens
attcatttacctattaatgaagaagaacaggacgaaagtctagggagctttacaagatagctttctccttcttttgtctttccctcctttctgttgggttaaggcagggatttggtggaaagcttkgcatcatgttggtctgtggaaaccagatctaatgggagaaaatggatctgtagcctcttaaagtgagatacctatatattatctcagatataagcaacctaagataacattcctgacataatctgtctccaggaaccttagcaaaaccgcaaagtataaatgatgtggttttttggcctccttgccccccattctgagccttgccccctattctgctgttctctttgccaatagttctcttgatgaattttcatcacgaaagtgtcccgctttacccagccctgcctctaaagctccaaaaggagctcttatacccttcaaccgcaggacacacccccattgtcactatagttgatgttggtggagctgatgttctgtttgtttaaaatttgacttcctcccagacaacagatgcattgttcgttcattttaattggaaaagattttagggatgagg

SEQ ID NO: 641854 - DNA, 583 bp, Homo sapiens
attcatttacctattaatgaagaagaacaggacgaaagtctagggagctttacaagatagctttctccttcttttgtctttccctcctttctgttgggttaaggcagggatttggtggaaagcttggcatcatgttggtctgtggaaaccagatctaatgggagaaaatggatctgtagcctcttaaagtgagatacctatatattatctcagatataagcaacctaagataacattcctgacataatctgtctccaggaaccttagcaaaaccgcaaagtataaatgatgtggttttttggcctccttgccccccattctgagccttgccccctattctgctgttctctttgccaatagttctcttgatgaattttcatcacgaaagtktcccgctttacccagccctgcctctaaagctccaaaaggagctcttatacccttcaaccgcaggacacacccccattgtcactatagttgatgttggtggagctgatgttctgtttgtttaaaatttgacttcctcccagacaacagatgcattgttcgttcattttaattggaaaagattttagggatgagg

SEQ ID NO: 641855 - DNA, 448 bp, Homo sapiens
cttacaaatatatcaaggaacagaattgttggagcatatggttactactccgtgtttaattttttgaggaacctccctactggtttccaaagtggctgcaccattatacatcccactatcagtctatgagcatttcagtttttccacacactccttaaaactcatctgactttttgtwtttagccatcatactggatgttaagtggtatcttattgtgatttcgatttacatttgcctaatggccaatgatgttgaacatttcatgttcttcttaggtcattggtatgtcttctttggagaaatgtctgtttaagtacttcaaaattgagctatttttcttcttattagtgagttgtaatagttatttatatgtactagatagaagacccgtgtcagatatatgatttacaaatatttggcttgtcttttactttcttgataggggca

SEQ ID NO: 641856 - DNA, 603 bp, Homo sapiens
gagccaacacagacccattttcaccactggacagacaattcaaacacaagcctgatcagtctgacctctgtgtgtgttctcagtcaaataaaaaatagggcaaactaatggcctggagggtttatgatggggtctcaaaaatgctagctcaaataaaggactctttgaaataattctatttccaagccaaatataaatttacctgccttaggaacaaagcaataaaacccatttaaagtacttaagatggccctctggctttgaaaatgtggctttgrtgacctcatctcctcttaggctgaagtttaatatccctcttctctgaagtaagaccaggatagctgatggttcttaatgggtccctgcatctgccacaaatgagctttctgcattggattggtttcctcggtacagtccttacttatatgtagcactgtgagaaaagaacactgagggagagatgattttggaagtatttaggaacactgtgggatgtatttatatatttctgttaatccaaagagtatattagtttaacataaacaaccacatcactcacagcagaaccatagcaaataggacacttagtgtgttaattactaa

SEQ ID NO: 641857 - DNA, 534 bp, Homo sapiens
tagtgagttgtaatagttatttatatgtactagatagaagacccgtgtcagatatatgatttacaaatatttggcttgtcttttactttcttgataggggcatttgaagaacaatgggttttcattttaattttaataaagtctagkttttttttttatttgtattgcttgtgattttgcttttgcgtctaacagcccattgccaaatccaaggtcacaaaaatttacccctgtgttttccttcttacttttgttgttctaagatatatttttctttatatgggcatattctctggttgtagaatcttggaatttgatcacatggctatttaaaacaataaaaagaaaaagactctgtttatgctgtgtatgatcacaaaaacttgtgtcattcagttttagtgttgggctttctaaatacctcattctgctcatcagacatcatttttgttcactgtaggtgctggcagatctctggttggaactttgttgttattcattggtcagtttatgaatgagtcagatatttcagct

SEQ ID NO: 641858 - DNA, 619 bp, Homo sapiens
ggaagtgcttgcttccatggctgtcagcactttcctctaacagagtgagccattttttccaaaaagtgtttttttgataatcttcctgcattttatwtacttcagtccatgttaagaagttttctgagtagatggcaaagaacaattcttaaaatgtgcgaataccaaatgtaagataaaaaacataattgcagtttagacttcagatttatttgaaaaggggataatgatagtaattacccagtttgagttttgtagaaggctaattagatccccaaagcatttgtatgcacaaggaaaaccataaatacaaaagaccatctggtccttatcagcttacaacactaatactgtctgtaattattttttctatactgttttgatgttgacattttatggagcaatacattctacgctggttagggaataacctacatttctgaaaagctgggggtttgcccccttttttcctaataaaagttttaggactccaaaggcaaagaagacactgcttttcagaaaaaaaaaaaaaaaacaggtaaacatcttttcattatacccatttgtactagaaatgtgttgtttataaacctctctggcttatctgacttgtcttgtt

SEQ ID NO: 641859 - DNA, 550 bp, Homo sapiens
ttccacagctctgtgttgaagtgaatgggtaaatgaagtaaaatacatgatttagatttacatcatgtattctacttcatttatccaatcgcttcaacaaatagcctctggatgcttatgactgatttgctatcaattgttacataacaaataatcccaagatttaatgtcttacaacaatcaacatttcattcgatttcaagattctataggaattcaggcaggaattggatgagaattctttagttccggatggcattgatggaggtcacttggtggtggtcagctggttgatggactgtctagagagcccaggacagcttcagcataggcctagttcataaaatagatggatggaaggctaggctcagttgcgactgttaacaaaagtacctgcatgtggctttttctcatggcttagaatttctacracatggcacatcagggttctaagaagtccagagagaatgtgctagttgtctgagaagataagcctgaattgccatgacattacttctaccatattctattggtcaagcaagtcaccaag

SEQ ID NO: 641860 - DNA, 449 bp, Homo sapiens
gtttctgtgtaaaaaatacttagcattaatggcattctttggatttttaagagtgagttactttcattaattagccagttaatatagcatatctgggtagaggactttatcagcttggatttcattktattgatggaagaactaaagcagattgatgcagactcgacccttggaactcttcataaaatgtcttttaccatttatttctttaccactttctcctctgcttattttaccacatcttcccaccccctaaacacctggcttacagactggagtatgtgtgttaggggagggggtgcaggggtaaggtggggtggggagaaacagctgtggcacaaaagaaaatgtaccagtaccagggagtaagctagagaagaccctgttctagaggaagagtgttggttgaagcaggggtttatatttccacaggaaagtcacattggtaa

SEQ ID NO: 641861 - DNA, 613 bp, Homo sapiens
aataagaacgtctcctgctcatgaagtaggagtatttgtgtctacatttattcattaaagtgggtaattaaattccctgcctagggtcattgttactttctacctctttgctgttttctggatggtttcacctccccacaggcagtattcactaatccctttcctgactttccttaactctgattatcacttttaagcccttcagtaacaaacattcagtttttacatatatgaatcagtacttgggtgtttatattcatatgcaatttatatttatattcatatacaatacctcctatttgtatcatatacaatacttcctaccatatagaatgggaaattccttatggaagctatcctatcttctctctctctttctctacattctgtttctcacgtattttcccttgcatatagaaggccaagataaatacgtacrgattttatttcatgttctcccagttactctgatgtaaatttcttaaccttgctgagcctcagtcttcttacctgtaaagtggatatactatctcacaatgtgtataggtcagggttctccagagaaacagaatgaatagtatatatatgaggagatttattatgggaattggct

SEQ ID NO: 641862 - DNA, 610 bp, Homo sapiens
tcaactttgcatgtcccatctttgccctccaaggcctaagaacctcttctcattaggtgagaaagtcagaaaggctgcagtcaaatttaaagcaatattacagccttgttggcagggagacataaccgcagcagacagactcttgaggtatgcaggaattagagatgcgcttgtttggtatcagccagaacagaatgggattttttatttagcattttttacaacagaaggtgttgttctgtctctatcagcagtagccagggcatgcttgcttcatctctgaatgaagaattacaaatatctctgcgcaaggccgtgacagacccatgatgtgtgctttgatacatgcacaaaaccatttaccygtcttcaaaaatgatgcttccagaagcaattcatttaaaagttcctgtcatgccacaaggacatcaacatgtaaggaagagtgaactcagtttctcatggtgtaaagcaagtacacacctaggtgaaagggagaaaaagcctattccaaaactcctcttttagaaattacatagtgcctatggtaggatttttaaaaatacaattatttccgattatagaaatatgagaatcatgtaactatgat

SEQ ID NO: 641863 - DNA, 518 bp, Homo sapiens
agaaatatgagaatcatgtaactatgatcatatatgatacatgttcattgtaagaaaatttaacaaaaacagagaagacaaagataaatgaataaaaacatttaataatattcatagtttttccataaattgatgattgtgttttaaattttggtaaataatctttcaraactttcttttacatttatgtatatatgtatacacatatatttcatataatcctacataaaatttgtgaagaaatctaataaatactttatatagtttcatatccttgcttatttgttatggacatttttctatattaatatatttacattcaatatgttacttttttccattgcatgggatctcattaaatagcaatctagggtagagttgccaatgaccttaagtaggaaccatctatcactttttctagaatattgcatgaatatagcccagccccccaggaggccctagtgatacttctgtagtgttggtttggtgcccagtttcaagccatttactagccttca

SEQ ID NO: 641864 - DNA, 637 bp, Homo sapiens
aaagagggatgcatatggcacccttgggagactatgacaggagtagcctacctgccagtggaagtaggaattggagagcagtagaggagggaaattgaagtagtttcgactagatacttgatgaaatacagaaccataaaaggtttttgagcaggatggtggcatgatcaacgtcatatacaaagacagtttatctgggaaaagaggactttggagttagaaggagtctgggatcagaccagctggttaagaggaggcagatcgaggtgtgaggggattgctatccaactgcaggtagtggtagcagtaagataaaagatacctggataaatgggcaaaactcrgtgattgaataggaaggagtgaaggaaggaacaaggatagttcttcctcacggatgtcagaagctggtgttcagtagcaggcatgtatagacatcataagtttggttggcttcatttgtgtttcttccctttaaatgaagtgaggtggtcatcctgctagcaactgactgcctaattagctctttctcattcgccatcagtatatgagctgaggactgatctactcttgacttgtgctttgagtttccagtgcagaaaaaaaaaggcttccataagagttttctggaaaaaaa

SEQ ID NO: 641865 - DNA, 637 bp, Homo sapiens
aaagagggatgcatatggcacccttgggagactatgacaggagtagcctacctgccagtggaagtaggaattggagagcagtagaggagggaaattgaagtagtttcgactagatacttgatgaaatacagaaccataaaaggtttttgagcaggatggtggcatgatcaacgtcatatacaaagacagtttatctgggaaaagaggactttggagttagaaggagtctgggatcagaccagctggttaagaggaggcagatcgaggtgtgaggggattgctatccaactgcaggtagtggtagcagtaagataaaagatacctggataaatgggcaaaactcggtgattgaataggaaggagtgaaggaaggaacaaggatagttcttcctcayggatgtcagaagctggtgttcagtagcaggcatgtatagacatcataagtttggttggcttcatttgtgtttcttccctttaaatgaagtgaggtggtcatcctgctagcaactgactgcctaattagctctttctcattcgccatcagtatatgagctgaggactgatctactcttgacttgtgctttgagtttccagtgcagaaaaaaaaaggcttccataagagttttctggaaaaaaa

SEQ ID NO: 641866 - DNA, 507 bp, Homo sapiens
taataatcttaaattttaatgacctgctctgcatctcctaacagttgatacctctaaagaaacgggtaagaaatgttagcctttggttcttctctatgctttgagctatgtccttgtatcaagtcccatcaccagaacaccatgtacctggattaggtttctccagctttccatggaaatatttttacagtattaggttcctgatatttattgaagctatagtacacagccatatacacctatctctgaatattttataaaggtactgctcagcacatggctatctattttagtcactgtttcctaggacagacccatgcagcaggcatctcagagtttagagctgggccagttagcatttcctcctctattagatgaggagttcagccaacttawagaaggaaactgttgtgttaaactgtaggaggttcccttaccctagattttctcacattattatctaccagttcttgtctttttatctttcttttaattttatatgtatag

SEQ ID NO: 641867 - DNA, 550 bp, Homo sapiens
gtaaatgatatttgaactcagtgttttttatccctttaggatttttgtgtgatagtccaggattccaaatgttatagcattcatttcttttgtttttcaacttttatttaagttcagtggtacatgtgcaggatgttacataggtaaacatgtgccatggtggtttattgcacacatcatcccatcacccaggtattaagcccagcagccatcagatattcttcttgatgttctccctcccccaatccctacaacaggtgcccagtgtgtattgtcccccaataccatgtgtccaatagcatgtttgtttagyaacaatgtacactgcctgtgttgcaatatggcaaatcaggataatgcaagaaataggttattataaaattaaatgaaaggttaaagggccttattagctattagtaatagaaaaaatgaagtgaaaatctgtgtcctctgaggatattgaaaatattctaaaatttgattatcatggtgtgagtgcccaactctgtaaatatataaaaacaatttaattgtacacattaaacaggtg

SEQ ID NO: 641868 - DNA, 528 bp, Homo sapiens
cctacctatctattggcgaactcaataataataagcaacccaagtaaaaaatagccaaaatttaaacatttcatccagaaaagatatggagatggatcatccagaaaagatatgagcatataaaaagatgctcagcataatctgtcattagggaaataaaaatamaatcacagtgagacactactacacacctattagaaggtcaactttggcacattgctgatggggtgcaaaaatggtgcagacacttcaaaacagtttgacagtttcttataatgttaaaacagacttaccacacagcaatgccacaccagagaaatgaaaacttacgttcacacaaaagtttatacgtgattatttatagaggttttattcacaattgccaaaactggaaaataattcaaatgtccttcgactaattaaacaagctgggatatatccatactgctgaatgctgtaattcagtggcaatgagatacacaagtactataatatgaatctcaaatgcagtatgccaagaaaaagaac

SEQ ID NO: 641869 - DNA, 524 bp, Homo sapiens
actagattgctcaagacattaggggcatcacggagctttctctgctgtaccactgcacagtcttcatattgccctctccatatacactgaccaaatatttgaaaactggcacagaataatttctctgcccaggtcccaccatgccagaagcacatataaatatctctgagatccagataattaagacagagatgagtaagggaggatacaggaaacatacccacctatattcccgagcayttttatttcatgcctcatccctcctcccctcttcctggggtaattaatgtgcagaaaatggagtgatctccatggagcatcagaatcccttttttcatgacatgcagaagaggcagaaagacctagtttctttggatccagagtaggtgaagggagaaacaagctgccaggtaatcaggctgctgatgaaacttccataaagattatgagtttcctatcttggtagctgcttccctgttcttccaacggcaccattggtaaaaacccagccaggtgataggttt

SEQ ID NO: 641870 - DNA, 524 bp, Homo sapiens
actagattgctcaagacattaggggcatcacggagctttctctgctgtaccactgcacagtcttcatattgccctctccatatacactgaccaaatatttgaaaactggcacagaataatttctctgcccaggtcccaccatgccagaagcacatataaatatctctgagatccagataattaagacagagatgagtaagggaggatacaggaaacatacccacctatattcccgagcatttttatttcatgcytcatccctcctcccctcttcctggggtaattaatgtgcagaaaatggagtgatctccatggagcatcagaatcccttttttcatgacatgcagaagaggcagaaagacctagtttctttggatccagagtaggtgaagggagaaacaagctgccaggtaatcaggctgctgatgaaacttccataaagattatgagtttcctatcttggtagctgcttccctgttcttccaacggcaccattggtaaaaacccagccaggtgataggttt

SEQ ID NO: 641871 - DNA, 288 bp, Homo sapiens
taatccaggcattgcagaaggcctccaggtccttgctccgacactaaggccagtttctattcccattggtcaacagcatatgtaccagttataccccctggagctctcactccctggcattgccatacccaccaccagcccaagggcctgccyaccctccacacacagccctgaggacctctgagtgggaccttctctaacacagccttctggaaagcttctctggtgtccactgtgctcctggaatgccagccagtccaccatggctctcatgacccaaccttagat

SEQ ID NO: 641872 - DNA, 519 bp, Homo sapiens
tttctgctttaattttccctaatggcacttagcagctaaaaatttgtctgtccagcccattaaaaatgagggtaggtaggttttgtcacttttgtttactgatatatcactgaactaatatatctgtgtatagatatattcagtgtctaaaggaatactaggacacattaggaactcamtaaatgtctgttgaattagtgtaaaatacatctcataaataataacatggtggaatgagactcaccactggaatcaaccaacgaatggtgtattgtagaagtagtacaaccgtttgccaatattttgttctctcctttttggcacatagaagctgcacgttctgctcctttgcagttggctgggaccacatagctaattctggccattgaaatgtgaccataagtaatgtatatcaagtttgatatgaggcaataaaaagcccatgcatgcttcttcggtctctatcccctgctgaagcaactagggagtggtcatttcagatagtatagatacagaatg

SEQ ID NO: 641873 - DNA, 437 bp, Homo sapiens
gcatatgtgagttatgtaatcaagtgacatgtatcacttctgtgtaggcagtgaaaagtccaaatactcttctccaatatctgtttccctgctgtggtgattgaagaagtcatgtattccgggttgctatagctatgagatggcaggttctctatcggcctgggtcctgagtgttaccagggagtcagacacctaattgaacataaaaattaagtaagcagatttaaaaacccctttttaaaattgagccactaagtttgtggttgttcattacwgtagtataatctatcctatagagacactcaattcaaagaaaggaatctggatagagggaaggtagaagacatgagtatctgattagagatcaaagaagaggtctaagagtgacattttgtgacacactactacaaattagccaaagagataggggacatgga

SEQ ID NO: 641874 - DNA, 567 bp, Homo sapiens
gaaaaataacctggcatctcctctgctttcttgcttttcaatctggccatgtgatctgcataagcaagctcccttttgccttccaccctgagtggaaggagtctgaaaccctcccccaaaatagacgctggtgccatgcttcttgtacagcctgcagaactgtgasccaaataaacctcatttctttataaattacccagcctcaggtattcctttatagcaacacaaacaaactaagacagatcttaaagcttattttctctaatatacatcaaacaattttacaaatattagaactatggcataataatgtttttattattcttgtttgcattttttaaattctcatgaatatttatttgctgagaaagaataacttcctgaagttatccaactaacacagtttctgttaatgttttgtattaactgctaatgtatattcttatttattaactatttttaaattcttaattattttatacacaaaatgaacagctttcatagtaattgttctgttttataattgtaatgataaacatgccttcgtacttataatattgtgagatt

SEQ ID NO: 641875 - DNA, 368 bp, Homo sapiens
ttctctaatatacatcaaacaattttacaaatattagaactatggcataataatgtttttattattctygtttgcattttttaaattctcatgaatatttatttgctgagaaagaataacttcctgaagttatccaactaacacagtttctgttaatgttttgtattaactgctaatgtatattcttatttattaactatttttaaattcttaattattttatacacaaaatgaacagctttcatagtaattgttctgttttataattgtaatgataaacatgccttcgtacttataatattgtgagatttgtttttctttctttttttctgagacaggatctcactttgtcacccaagctggagtgc

SEQ ID NO: 641876 - DNA, 588 bp, Homo sapiens
gttattgactacaagttcaaaggtgtcagaggttatgtttaaggatgtatctacgccactctgaccttcaaaggctaagattgaaatattcacatctgagtaacagacgttttggccaaattctcagggtgaagccacattttggtgtatctctaatttgcacaaaagacactttgaagaaaaagtctctgatacctggaattgagaagaaagtgaataccaaagaccacattcacaccaggaacaatttaataaggaaagacatcctactctcttgagtaaatcagctcgtgtatatgggattgagctgggttaacaaaggaccccaagagcaatgagagagcagaatccatagacacaaagaaagaatagagaaacacaccttttcctagctttggtaaaaaatatacatatatatgcatatataaatatacacttatatatacatatatgtgtaaatatacatatatgtgtgtatatatacacatgtacacatatatatacttatatatacacacatatgtatatatacacatatatctatatatatacacasacatacacacacacacatatacataatatata

SEQ ID NO: 641877 - DNA, 392 bp, Homo sapiens
acttccacactatcctgcatcttatgagaatccttccagtattcaggttcatttggccctagtgcacattttcccagacttctgatgactctccacatctttagacagccatgccatcctttccactgaccttctccttctctctctaaggctctcacattttccccattttgcttttttgaaagctatatacctttgctaccgtatagcagattcattcctctttaaaccattatcttcctgggctcacagcagcattttcatttttacgacatttcttgctagcctgaggccagttccagggcctyctttaaagtaaagtaaaagtcccacagatccataattaccccaatttggggatgaaagattttttttcccctaaagggaaattg

SEQ ID NO: 641878 - DNA, 499 bp, Homo sapiens
cttacatactgttggtgggactgtaaattagttcaggcattgtgaaaagcagtttgaagatttctcaaataactaaaaatataattgccattcaacccagcaatcccattactgggtatatacccaatggaaaataaattgttctaccaaaaagacatttgttcttgtgtgtttattgtagtgctattcacaatagcaaagtcatggaatcaacccaggtgcccaacaatggtggattgaataaagaaaatatggtacatatacaccatggaatactacactgccaaaacaaagcacaaaatcatgtcctttgtagcaacatggatgcagctgggggacattaccctaaatgaattaacacagaaacagaaaaccaaataccacatgttctcacttataagtgagagctaaacgttggatayacatggacccaaagatgagaacaataaacactggggattccaaaagcagggagggaggatggcaaggattgaaaaac

SEQ ID NO: 641879 - DNA, 595 bp, Homo sapiens
aactagcaaaatattgcaaccagcatattgaaactgatatagtcaagatacagaacatttcctttccttcatgttgccgttttttaaccaagcttacttttccctcaccctctcccattccttagttaacctctggcaaacatgtatctgttatttatttctatkattttgtcatgtcaagaatattatgtagtagaattatgcaacatacgagacacaaatgtgagcaaggaaaaacaaaaagttttgtgctagacccttaaaattaggcatagaaggaggaaagtctctttaaaatagtagtagcagggacaagatcagcatttaatgctcaatttcatgtgaggcccagttgtctcattatttaataacctgttaaacacacacacacatacacacactagaattgccatagactaaatgcttgcatctccccaaaattcatgttgtaacctaatctccaatgttgctatagatagaatatttgtggttctcccaaatttgtatgttacaacttaactttcaatgtgatggtattaagagatgggacttctagggaggtgattagatcatgggaatggagccctcattaata

SEQ ID NO: 641880 - DNA, 595 bp, Homo sapiens
aactagcaaaatattgcaaccagcatattgaaactgatatagtcaagatacagaacatttcctttccttcatgttgccgttttttaaccaagcttacttttccctcaccctctcccattccttagttaacctctggcaaacatgtatctgttatttatttctatgattttgtcatgtcaagaatattatgtagtagaattatgcaacatacgagacacaaatgtgagcaaggaaaaacaaaaagttttgtgctagacccttaaaattaggcayagaaggaggaaagtctctttaaaatagtagtagcagggacaagatcagcatttaatgctcaatttcatgtgaggcccagttgtctcattatttaataacctgttaaacacacacacacatacacacactagaattgccatagactaaatgcttgcatctccccaaaattcatgttgtaacctaatctccaatgttgctatagatagaatatttgtggttctcccaaatttgtatgttacaacttaactttcaatgtgatggtattaagagatgggacttctagggaggtgattagatcatgggaatggagccctcattaata

SEQ ID NO: 641881 - DNA, 624 bp, Homo sapiens
tgtcagtcaagaatatcttacctgaagggtaagatatcccttttcattccttccagttgtgtgttgcagaggttctattctacccaagaatggcttagaagtcctggactctctttctctacccagcccctacttatagagcagaagcacttttctaggtttgatggactgagaatacsaagctccaattattctcacttcagctcactggctgagtgtcaccctgagaaatgggccactgtcactgacttcagttctggagcaatggcagaagttttgcccaggaagagaggcaggtcatagcaacagaatgctccacatattttttccaagggcactgactttatttggagcagtctgaagggaatttcagtcctaaaaaaaactcttccaaagataatggagatattggttgtaggcaattatgcctagtgttccattattggaacactaagcatgtgggagttatttatatcctactgcttgcagtcatcctgaaggtctgattgcaaaaattcaaaacattgcaacctcagggataaatgggttaagagcaagctggcagctccttgacagtaacaagcaaaaccataaaccaactaatttaccagaggaaactgcaca

SEQ ID NO: 641882 - DNA, 556 bp, Homo sapiens
cgcccggccgccaagcctctttatgctaaactattcacttatttaactgaaaactgatttattaagtttttacatgtgctgagctttggggaatggtaatgcataagataaggcccgtgccttcaaggtacttaagatctcatgtgtgaagactaacgtgtaaactcagaagtaaatggacattccagagggggaaatacctgctcagagggcatggtagcataaaggatggagtagccaggtctgtttgggggctctggagggaaagggcttatagaagaggtgactcttgaggaagatgagcaggtgctttccaggtggatggggaggaggttgcatgagatgggcctgggttgggaagtggcatggggtacctatgcatgcttgtcccggrgcttgtcagtgtaatgtgtgatgtgagtgtgtatgtgtgtgtgggagtgtgcatgcgcaggttagaacatgttgtgtctttcacagcctgatatttaggaacatccgtgcacatatccgagacagtctgtgaggcaatgaggcttatttaacattcactgtg

SEQ ID NO: 641883 - DNA, 556 bp, Homo sapiens
cgcccggccgccaagcctctttatgctaaactattcacttatttaactgaaaactgatttattaagtttttacatgtgctgagctttggggaatggtaatgcataagataaggcccgtgccttcaaggtacttaagatctcatgtgtgaagactaacgtgtaaactcagaagtaaatggacattccagagggggaaatacctgctcagagggcatggtagcataaaggatggagtagccaggtctgtttgggggctctggagggaaagggcttatagaagaggtgactcttgaggaagatgagcaggtgctttccaggtggatggggaggaggttgcatgagatgggcctgggttgggaagtggcatggggtacctatgcatgcttgtcccggggcttgtcagtgtaatgtgtgatgtgagtgtgtatgtgtgtgtgggagtgtgcatgcgcaggttagaacatgttgtgtctttcacagcctgatatttaggaacatccgtgcacatatcygagacagtctgtgaggcaatgaggcttatttaacattcactgtg

SEQ ID NO: 641884 - DNA, 459 bp, Homo sapiens
aggcatagtggtgcacacctgtggtcctagctacttaggaggctgaggcaggaggatcacttgaacccaggagttcaaagttacagtgagatatgactgtaccactgcactctagcctgggcaacagagtgagactgtgtctctataaataaataaataaaagtaaaacaagcaaacaacaacaacatcaagttccatagagtggagatcagtatataaatttgctataatattttatctgaaatattcagttttcaacaaaaattataagacatgcaaagaaacaggagagaatgacycacgaacaggagaaaacgcaggcaatggaaaccgcctctgagagggccaagttgtcaaaccaagtcagacaaagactgcaagatagccaatataaatatgttcaaggaattaaaggaagccctgcttaaaaaaagaaaggaaattattatggcaataccc

SEQ ID NO: 641885 - DNA, 439 bp, Homo sapiens
aaatgaaagtcaaagtcaaattagaaatctggaaagcagcaagaggaaaataatttataacataccaggtaaccacaataagaytaacaactgacttttctttagaaacagtggcaccagaaggcagtaggatgacatattcaaagtgctgagagaaaaaaatagaataagcctgtcaacagagtgttttatctagcaaaactgtctttaaaagtgaagaggaaaaagagaaattctcagataaacaaaactgagagcattcatagccaacagatctgttttacaagaaatagcaaggagaattcctcagtttgaaaacaagtgaccacggacagtaatttgaatacacaaacagacacacacactatattagtctgttctcacactgctataaagacatacctgagactgggtaatttataagtaaaagaggtttaat

SEQ ID NO: 641886 - DNA, 455 bp, Homo sapiens
aaatttaagcacagcagttgaaatgtaatagaggaattaggagaggatagggagaaaggaccagaaaacaatggaagaaataatggctgaaaattcctcaaatttaatgaagaacattaatctatatatccaagatacttaataaagtacaagtacaatagtgtaaggaaatccacacccagacacatcatagtaaaaatgaaagtcaaagtcaaattagaaatctggaaagcagcaagaggaaaataatttataacataccaggtaaccacaataagactaacaactgacttttctttagaaacagtggcaccagaaggcagtaggatgacatattcaaagtgctgagagaaaaaaataraataagcctgtcaacagagtgttttatctagcaaaactgtctttaaaagtgaagaggaaaaagagaaattctcagataaacaaaactgagagca

SEQ ID NO: 641887 - DNA, 439 bp, Homo sapiens
aaatgaaagtcaaagtcaaattagaaatctggaaagcagcaagaggaaaataatttataacataccaggtaaccacaataagactaacaactgacttttctttagaaacagtggcaccagaaggcagtaggatgacatattcaaagtgctgagagaaaaaaatagaataagcctgtcaacagagtgttttatctagcaaaactgtctttaaaagtgaagaggaaaaagagaaattctcagataaacaaaactgagagcattcatagccaacagatctgttttacaagaaatagcaaggagaattcctcagtttgaaaacaagtgaccacrgacagtaatttgaatacacaaacagacacacacactatattagtctgttctcacactgctataaagacatacctgagactgggtaatttataagtaaaagaggtttaat

SEQ ID NO: 641888 - DNA, 483 bp, Homo sapiens
tgattttggaaagtttgtcaaatatcaaaggtttaaaacacttgatattacaaaataggatcacaggtcattgtaaaataaatcattcatttaaccaaagtgataactcaaggattttcttaaaaaggcaaaaccttcattctatgagagaggagacttaattttccaaacaataagccctaataaaaacaacargaagcctattaaatttattttccaaaattgtataaacaatctataacattttcatcctgatcataagatataacttctgtaagtctttataacctttatgaaggagtaggttaatgcttcaagaaaaccttgttaatctgacataggggcccacatgctggtctcgcatcagtgtgcttttgacattaatgattaatttataaagaaagtgaacttactttatcttttaaagttggcccttacaatctcatatgcccacctcttccaagatagtccctgggccttgag

SEQ ID NO: 641889 - DNA, 483 bp, Homo sapiens
tgattttggaaagtttgtcaaatatcaaaggtttaaaacacttgatattacaaaataggatcacaggtcattgtaaaataaatcattcatttaaccaaagtgataactcaaggattttcttaaaaaggcaaaaccttcattctatgagagaggagacttaattttccaaacaataagccctaataaaaacaacaagaagcctattaaatttattttccaaaattgtataaacaatctataacattttcatcctgatcataagatataacttctgtaagtctttataacctttatkaaggagtaggttaatgcttcaagaaaaccttgttaatctgacataggggcccacatgctggtctcgcatcagtgtgcttttgacattaatgattaatttataaagaaagtgaacttactttatcttttaaagttggcccttacaatctcatatgcccacctcttccaagatagtccctgggccttgag

SEQ ID NO: 641890 - DNA, 600 bp, Homo sapiens
taattgataattgatatgtaaggttttgttcctgccacagtgttgttggctagttgctttgtagtttcaattgaggggttactttatgggatctgtgggttatggacgtgtgtgtgcttttgtggtagcaagtaacattcttttatttccatatttagaactcytgaaggagatgcttctcttgtagggctggtctggtggtgattaattcccttagcaaatacttgtctggaaaatacttcatttctccttcatttatgaagcttagtttggtgagatatgaaattcttggctagcatttcttttctttaagaatgctaaaaatggaacctctgtctcttctggcttgtaaggtttcagctgagaagtctgctgttagtctgatgggcttccctttatagataatatgacctttttctctagctgcctttaagatttttacttttttgttagtcttggatacactgatgactgtgtgccttggggatgggttgccttgtatagtatctcatcaaagttctctgggtttcgtatctgcatgtcaacctttctagcaagattggggacattttcctatattcaaatatactttccaagttg

SEQ ID NO: 641891 - DNA, 592 bp, Homo sapiens
ggttcattggttacagataggttgcggtggctttctcagatattgctttttgtagcaatgtggttttgtttgatggtgtaattcaagctgcagtctagtgtgtggtatttaagagtaatagctggcagctaggggcaggggcagagaaaaattgggaagtgtgaatcgtgccctctcccagcacacatttaccttcagtggtggtggagacactggagaagctgtctctttcaacccatgctccccatgccctgataggaagagctgctgctaagtctgcaacactacactgagaagaaaggtgggggtgagagatgacctcctctccacgtccattcctgggctttggtgatgccaccttcagtagttggtgccatgcttgcattttctttgacccaaggggggctttggtgagctgtgctcccccttcccttaggggcagatagtgctgagggttagatctccarggaaagtggggtctgcctccattctacttcttggagctgatggggcactgttccccaaatggccaagggagcaggctgggacaccaggattgacacccacagactagttccagtttgcaaagctg

SEQ ID NO: 641892 - DNA, 525 bp, Homo sapiens
taattccagtgcctactgctggggaactctctgcattcaccactcaattctgactgtgggtgcccttctgcctttccagagcaaatgctgcaaactctggcctgagcctaaaatgtctgctgtggtcaccactgccaagtggccaaacaatgtctttaaatgctcaaaatggtgtcatttgtgggtttgtggctgaagaggatggggtccctctcaggcaagtagcatgggcaagaagctgtggagagtgcagtccatttacatctcagyctcacagcattctgttgcagggtagcaagtaccctcccagggctgtgtgggtgcacccattctcccccttcatccttggaactgtgcagcagctacagccatgtctacagatccccagtatctagtctctcaaagtggctcccacctgagtctgctccaggcttggatgcctgtggaattctgtgtgggttccctttctggagcaatgtttctgtgtgatcttcaggcagctctatgtcagacatgaggcccaaa

SEQ ID NO: 641893 - DNA, 460 bp, Homo sapiens
gatgtagttggtaaactggaactgagataggcctttagtgtgagcttttatatttatatgtttaggagttagactgtgtttactgtttactgtagatattgtgtcagaggctacaatttcctccagtgtccatgtttatgtgtctcctagagacttcatccttgggtgtttctagggactcctttttaagtagggtctgaggcttgcagtgctttttgctataatcctatttctatacagaattcctattgagttggttgtaagatgtgcaggaggggaagcattctgtagtactgtgattyagtcccagtattttagtgagcttgtgcccttaaatcgtgaccttcacaagtgcttgtcagcttcctgttttcctatacccacgtctatccttaggtgaaataagaaggccagatggaggctgggtttgggtattttccttacccccgattgatcaggt

SEQ ID NO: 641894 - DNA, 564 bp, Homo sapiens
ctgaaagatgtaaaataagccataataatttatattgaaaagcaagccctattgctttgctgatgatattttcttttccctttcaatatttcagttctcgttcaacttggaaaaccatattatcctgaaccaagggaacatcttcaaaaaatattcacactctgaaacaccactgtgtccagcagtttcaccaaaagagactgaacttagaataaaggacattatggagaaactagaccagcagatcccacccagacctttcacccatgtgaataccaccaccagtgccacacacagcacagccaccatcctcaaccctcaagatacgtactgcaggggggatcagctggacatccttctggaggtgagggaccacttgggrcacaggaagcaatatggtggggatttcctgagggccaggatgtactccacagcactaatggcaggtgcttcaggaaaggtgactgacttcaacaacggcacctacctggtcagcttcactctgttctgggagggccaggtttccctgtctctgctgctcatccaccccagtgaaggggtatc

SEQ ID NO: 641895 - DNA, 576 bp, Homo sapiens
cattggtgtaatatttggcagggccactgtgccctgctatttcacggccacacatttcctcctgactctggctggctgttccacagcagcgtggctctggggacaaggtggagcccagggacacattgcaaatgcacaagagtcaacagatccccactccaagaaaaactattcaagaaaagctatttaattcacccttttaacatgatcttattaaataaatatttgtggaagagaggarggcaaaatagagctgaagagaaagggggaggaaaaagaggaaaaggaaggcaaaaatgagaaacatttttccaaaataatttgtggtaataaaaattacttaatctggaaatttgtattgccagagagcgagaacataaaaaagaactgccagattggaatgaagactcctttccccagtggttatactttgaaaaaaatgtggattacagcattttgtaaacagatcaagttcaatgaaacaaaaaatataaatgactgcttggaaagaaaacttatttatctcatgggagattcaacactgcatcagtggatttactacttacaaaaagctgt

SEQ ID NO: 641896 - DNA, 588 bp, Homo sapiens
gcccttcttctaagaacactaaagtgttatgctactggcagaagggcagcaaactctgtgacttcaagacacatatgaagatccctgtggttgggaaaatggaaaaataataarctgtgaacttcttgaggaagggcagaaaaccgtcctggggagagacaggaaactgtcctgggcccagaccattagagattttctaatgctgtggagaagaggacaggatcactgagaaggcctttccctaaccctacaaaataacacgaacagaagacctacctaggattgaggctgatcaccaacaaaagagaatctcactcattctcccagtaggctaggcagcaccaggtagaaagcaacagcaatctaccatggaagaagggacaagggcatgaagagaggctctttctgggacattgacacacaaggaaggacaaagctaagggtgaaataggaacactgagaaaaaccctttgtcaaaacaatactcaccttaagcaccaagtaaccagaaaaatttgcaacagaaacctcaagcacagctggactgactagattgagtcaatgctcctccctacctcatggctcagg

SEQ ID NO: 641897 - DNA, 588 bp, Homo sapiens
gcccttcttctaagaacactaaagtgttatgctactggcagaagggcagcaaactctgtgacttcaagacacatatgaagatccctgtggttgggaaaatggaaaaataataagctgtgaacttcttgaggaagggcagaaaaccgtcctggggagagacaggaaactgtcctgggcccagaccattagagattttctaatgctgtggagaagaggacaggatcactgagaaggcctttccctaaccctacaaaataacaygaacagaagacctacctaggattgaggctgatcaccaacaaaagagaatctcactcattctcccagtaggctaggcagcaccaggtagaaagcaacagcaatctaccatggaagaagggacaagggcatgaagagaggctctttctgggacattgacacacaaggaaggacaaagctaagggtgaaataggaacactgagaaaaaccctttgtcaaaacaatactcaccttaagcaccaagtaaccagaaaaatttgcaacagaaacctcaagcacagctggactgactagattgagtcaatgctcctccctacctcatggctcagg

SEQ ID NO: 641898 - DNA, 572 bp, Homo sapiens
tagcatagcatagtagttagaagccagggctcatgagtctagccaatctgtttgaaccttggccctgcctctgactagctgtgtgaccttgaggctactttgtagggtttatgcttacaaagcaatyagaacatgcctggcacacttaatcatagctccctctccttttacaaggaggcatttaacaactagctagataaagatcaaacagttagtagctaataaagtttagtctaaaacccagttctcccacctcccagcagagcattctttccactacaccagcatctccaaattcacctgattataagaatcacttggttgagcaactcttgaatggagtcaggaatctgagtactaaccaaatactccatgtgcaaaagatgaatttgagaaagaccctcacaacaccacagtgcctaagatgaaatttctcaaagaaaggagctcataaattcattacgcatctcctctatacacacagaagatggaaaaacaaaccattaatctcaaggagtaaagaggaccccagaaagaaaatctaaacagtctttcttgctaattgtctttga

SEQ ID NO: 641899 - DNA, 570 bp, Homo sapiens
tgttaaacaacttatttacttacctgttcttccaggtggagtttggtgccttttccaagaagatttcctgatgaagccatgccttggagtaagttcccagtattcacagcacatctaaaasccaatcctgcctctcagctgggcagcacagattcattgccaagacagaaagagcacaggttatcactcaggccttgggcctagctgccttgcggaatagatacacggtcagctctctgtacctgtgggtttggtatccatggattcaaccaattgcagatcaaaaatattttttaaaatgtgtctatactgaacctgtacagactttttcttgccattattcccaaaacattagaggataacagctatttacatagcatttacattgtattaggtattagaagtaatctagagatgatttaaagtgtacaagaagaacataaacatccatggattttgatatctgtgggaggtcctggaaccaatccaccacggataccgagggacgactgcacatatgtcatttctactgttcagttcagcagggccacttgccctggtcagagcacc

SEQ ID NO: 641900 - DNA, 558 bp, Homo sapiens
ttcagtttccttgtctgtaaagtgggcataacaaaatctctcctggagtcttcataagtgttctgtgaacattaaatggtatgtggatggcttttataaaagcataaggcacaaaatggttgttaaacaacttatttacttacctgttcttccaggtggagtttggtgccttttccaagaagatttcctgatgaagccatgccttggagtaagttcccagtattcacagcacatctaaaagccaatcctgcctctcagctgggcagcacagattcattgccaagacagaaagagcacaggttatcactcaggccttgggcctagctgccttgcrgaatagatacacggtcagctctctgtacctgtgggtttggtatccatggattcaaccaattgcagatcaaaaatattttttaaaatgtgtctatactgaacctgtacagactttttcttgccattattcccaaaacattagaggataacagctatttacatagcatttacattgtattaggtattagaagtaatctagagatgatttaaagtgtacaagaagaa

SEQ ID NO: 641901 - DNA, 532 bp, Homo sapiens
tgccactcctcagcacctttcttctgtggctccttctgtctggaacttcttcttttgccatctttccacctgcccaaatgtaatccaggcagctgaaatcatacctccataaggtttttatcagatcgccctgagtcagaatcaagtttgccttcctgagcctcttacagcatgttgtttttttcttctcttacatttacaggatgcaaccaccttctactagagttaccagtacagagggccacttccctgctgggctggaactctgccttcatcctgccaccttgtttaatgcctggcattcaggaatcactgaaccaatatggagcagaattaaagttactaaaggaagctgcaggacatcaggaaaaccccacgaccttcctaactcttctaccacatcctccccttcctgtgcctctcctcaacccagcatcagcacccatttcctgcaggcacagctcctcctctttgtcctcatcctcgtggtgtttgcaggccacacaggcagcygaggcctcctgttggggac

SEQ ID NO: 641902 - DNA, 481 bp, Homo sapiens
atggagacatggctcatctttcccctaaatccaaagccctgcatttggtgataaacagcattaatgtgatgttaactctatttatgcggctttctgccccaggagatgaatttacrtatgtgctaaatgcgcttcagcagtacccaacagtgatgctttattttactgcctctggacacctggtagcagctcagtccattaaggaaggaagcatcatgcacactcacgcaatcatgtgtgtgcacacacacatagccacacacatactgcattgcatccactctggaaagacagtgcagcaagaggtagatggggagggggtaggaaggccccattatccaaagataaatggcaactaaccccttgttccaaatctgtgtaagattcaaagaaaaccaccagactgacctcaacccaccatttctcagaattattcagaggaaagtagagtttaggggtaacatgactggatcactgtcta

SEQ ID NO: 641903 - DNA, 483 bp, Homo sapiens
aaaaataattaataaattataatatgaactgctcagcacaagctaattaagaggttgcaaccaccattggtaaatggtcttcctgtggcacctgagaagctattcagtgccatctgctggtrtggtgcatcactgcaggctgagagcttgctttgcacctttatgaaacactttaaacttgcctgcttaaattatcttggaattatagagttgttattgtttctaagtcatttgtcttctactttcattttcttgttactgcattgtcattcttgtgtcagtagtaagttgtaatgtcttaatgtttagaaattcaggaatttttaataaaatagtaaagcacaacttgaatgaagacagcaaaaaataacaatcataaaatattccactccataatgggcatgtgtagggactatcccaaatatgaaaaaaaaacatcctgaaggcttcttctaatataagcataaggtggggggcatgagg

SEQ ID NO: 641904 - DNA, 483 bp, Homo sapiens
aaaaataattaataaattataatatgaactgctcagcacaagctaattaagaggttgcaaccaccattggtaaatggtcttcctgtggcacctgagaagctattcagtgccatctgctggtgtggtgcatcactgcaggctgagagcttgctttgcacctttatgaaacactttaaacttgccwgcttaaattatcttggaattatagagttgttattgtttctaagtcatttgtcttctactttcattttcttgttactgcattgtcattcttgtgtcagtagtaagttgtaatgtcttaatgtttagaaattcaggaatttttaataaaatagtaaagcacaacttgaatgaagacagcaaaaaataacaatcataaaatattccactccataatgggcatgtgtagggactatcccaaatatgaaaaaaaaacatcctgaaggcttcttctaatataagcataaggtggggggcatgagg

SEQ ID NO: 641905 - DNA, 449 bp, Homo sapiens
caccacaaacaggcactgttgcgggaagtcagggaccccaaatggagggaccggctgaagccatggcacaagaatgtggattgtgaagatytcatggacatttattagttccccaaattaatacttttataatttcttatgcctgtctttactgcaatctctaaacataaattgtgaagatttcatggacacttatcacttccccaatcaatacccttgtgatttcctatgcctgtctttactttagtctcttaatcctgtcatcttgtaagctgaggaggatgtatgtcacctcaggaccctgtgatgattacattaactgcacaaattgtagagcatgcgtgtttgaacaatatgaaatctgggcaccttgaaaaaagaacaggataacagcaatgttcagggaacaagagagataaccttaaactctgactgccagtgagccaggt

SEQ ID NO: 641906 - DNA, 449 bp, Homo sapiens
caccacaaacaggcactgttgcgggaagtcagggaccccaaatggagggaccggctgaagccatggcacaagaatgtggattgtgaagatttcatggacatttattagttccccaaattaatacttttataatttyttatgcctgtctttactgcaatctctaaacataaattgtgaagatttcatggacacttatcacttccccaatcaatacccttgtgatttcctatgcctgtctttactttagtctcttaatcctgtcatcttgtaagctgaggaggatgtatgtcacctcaggaccctgtgatgattacattaactgcacaaattgtagagcatgcgtgtttgaacaatatgaaatctgggcaccttgaaaaaagaacaggataacagcaatgttcagggaacaagagagataaccttaaactctgactgccagtgagccaggt

SEQ ID NO: 641907 - DNA, 449 bp, Homo sapiens
caccacaaacaggcactgttgcgggaagtcagggaccccaaatggagggaccggctgaagccatggcacaagaatgtggattgtgaagatttcatggacatttattagttccccaaattaatacttttataatttcttatgcctgtctttactgcaatctctraacataaattgtgaagatttcatggacacttatcacttccccaatcaatacccttgtgatttcctatgcctgtctttactttagtctcttaatcctgtcatcttgtaagctgaggaggatgtatgtcacctcaggaccctgtgatgattacattaactgcacaaattgtagagcatgcgtgtttgaacaatatgaaatctgggcaccttgaaaaaagaacaggataacagcaatgttcagggaacaagagagataaccttaaactctgactgccagtgagccaggt

SEQ ID NO: 641908 - DNA, 449 bp, Homo sapiens
caccacaaacaggcactgttgcgggaagtcagggaccccaaatggagggaccggctgaagccatggcacaagaatgtggattgtgaagatttcatggacatttattagttccccaaattaatacttttataatttcttatgcctgtctttactgcaatctctaaacataaattgtgaagatttcatggacacttatcacttccccaatcaatacccttgtgatttcctatgcctgtctttactttagtctcttaatcctgtcatcttgtaagctgaggaggatgtatgtcrcctcaggaccctgtgatgattacattaactgcacaaattgtagagcatgcgtgtttgaacaatatgaaatctgggcaccttgaaaaaagaacaggataacagcaatgttcagggaacaagagagataaccttaaactctgactgccagtgagccaggt

SEQ ID NO: 641909 - DNA, 579 bp, Homo sapiens
agacatttcctctttatctcaggattttgcattatctgtatattcttcccaagaaacgcaagcaagagggagaagaactgcattggccaaggccactggtgacttgtccttttacaaacacatagtagttcaattcaaaacttgctaggaagctatagtaattaagacagtatggtgtcagtgaaaagatagacacagaggttgacagaaaaaaaattaagattctctgtatatacccacatgtatatggtcaatgggtttttgatgaaggtgcaaaggcaattcaatgaagaaattttgtcttttcaagaaattatcctggtaaaaggacctgtaggaggtggggtaagatggcagaatagaaggctccaccaatcaccaccctctccacctaccccccgcaaggacaccaatttaacaactatcgacacaaaagaagcacttttataagaaccaaaartcagtacctcattttaactccatatcactgaaagaggcactgaagaagtaggaaaaagcaatcttgaattgccaacacaaccccaccatcaacccccagcattggtgacatagtgtgga

SEQ ID NO: 641910 - DNA, 582 bp, Homo sapiens
attataaaaagcactgtgctcacacactgtagagaaaataagaataataatctttaccctaaaagttgctcattacacacaaaaaawgtatttgtaaaatatattttctaagacatatagcaaatagcagagcttttaaattataagaatttactatgccaaatttatatcagattaaagtatctaaataaaaggaatggattttttttagcaaaatacaactgatcaaagttaccaagatatagaaaacctagaaagaccatatttatggaagaaatgctatcagtagtcaaaatttacacctaattgaagcccagaggattttttaaaagataagttctattgaaacttaaaataataattctggtgctatttaaactattccaaacacttttttaagagttgaagaatgaactgaatacaaattcctgctgccatttactgattcaactccttagaaaagacattgtttgaaggaataaattcataaaagacctgtaacacaaaaaggtacaccagtgatcatgaaggagtccatgaaagaaaatatacacatgggactgggttaacagaagaaactat

SEQ ID NO: 641911 - DNA, 481 bp, Homo sapiens
caactactataaagacccaattgatgggccagatagcccatcaatttgaatcactaaattaatctgaagacctagctgaggacttctctcagaatgcagtgcaaaggtacaattagagagtatgaaaggagaattaacagaaagggaatattaatgcagrtattttgaaatccattcaataggagaaaacagagagaatttttaagaaaaatttaaaggaaatagataatttaaaaaaaaattgtttaaagtccaaggactgaacaatgacaagtcttttcagattgaataggcatagtgaacactgatcaagataaataaagataccatgcctaggtacctaaaagtaaaattgtcaaaaaccagtgtcacaggttgggtttccaaggcagcaaattcagaatctgagatgtgcaagtaggaggttttctggagattgctctcagggacacttgtgagaaagcaaaggaagcaggactaa

SEQ ID NO: 641912 - DNA, 604 bp, Homo sapiens
ttagagagtatgaaaggagaattaacagaaagggaatattaatgcaggtattttgaaatccattcaataggagaaaacagagagaatttttaagaaaaatttaaaggaaatagataatttaaaaaaaaattgtttaaagtccaaggactgaacaatgacaagtcttttcagattgaataggcatagtgaacactgatcaagataaataaagataccatgcctaggtacctaaaagtaaaattgtcaaaaaccagtgtcacaggttgggtttccaaggcagcaaattcagaatctgagatgtgcaagtaggaggttttctggagattgctctcagggacacttgtgagaaagcaaaggaagcaggactaagcagagggagaagttgaacagaaatgcagttgcaraagtggcctcagcagatctcacagggagctctgaaggtaataggaggtccttcagaaatacaattacattttaacaaattattggaaagacaaaactataatgtcagagagcagattatttgttgcaagggagggaactgactacaatggagataagggaacattttagggattatgggaattgtcctatattagaatta

SEQ ID NO: 641913 - DNA, 581 bp, Homo sapiens
atggcacgtgtatacctatgtaacaaaccttcatgttctgcamatgtaccccagaacttaaagtataataatcaaaacaattaaaataaataaatattgtagaagacattggcttggggcctacattgttcattcaagaaaacagtaaatttcagctcaaggctagagataattaacaaaaacaacaagagaaaactctgtcatttcagttcagtgatgggcaatttgtgatttccaaggtttgatcagtttcatccaagttttcaaacgtactttttattcttttttattcttgtcaccttttagatctgggccacggcccatagtaatatcacctatttcaatcctgatattggtaaattgtatcttctctctttttcttttaccagtcttgctagaggtttgccaattttattgatattttcaaattaacagcttctcatttcacttattttctctatgtttttgttttaaatttcattgaattctgctcttattattctttttttctgtctgcccgctttaggtttatttgttctttatttccaggttctataggtagaaattcggattattcgttt

SEQ ID NO: 641914 - DNA, 456 bp, Homo sapiens
tttctacatcaataaaactgtttataacataattttaataggtacataatattttaatgtacaagtacattaatttttatattctaytattagtatagtttgttatgagatttgtctattgtttataatactataataaacattcttataactatatatttttccccaatttgggaatactttatgataatcatttggaagtggaattactgggtcaaagagtaggaattttgtcatgatttttcatgtttgccaaattatatttcataaacattccaccattttatagtctcacaaatagcatctgacagcatgttttaagctatattttttttttaccagaaatgaatgttgtcatttttttaaaaaaaatagctaatttgttaggcaaaaagcaaatgtttcttatctatgtggcatttattaaatcaaaagcaagattgtgagagtgggaga

SEQ ID NO: 641915 - DNA, 491 bp, Homo sapiens
actaattccaaaggaaacacataacactattatgaaaactgtggattatcttctgatgagggtagataagacatactcaaagtctcaatcatcccatctcatgtccagtgccacagttggttacattctctacatttttgcaaaatctcaggagttcccattggactattaggaatagacttgattaccsgagtactgcttacacctcctcttccccaatagctgggctactagagtgtgattacttaatctctctgggtctacaagaatagagttaaaattaataatgtgttatcaaaaagtcatcagctatttgcaaattcagtaagacctacttagaaggcaggcagaacagtcaagggcagtggccttcaaatttttgtctatgacttatagtaagaaagttatcttaaatccataggcacacataattataatgctagtagtagtagtagcagaaaaaatgaaaaatagcaatgataatggtaact

SEQ ID NO: 641916 - DNA, 639 bp, Homo sapiens
aactgtggattatcttctgatgagggtagataagacatactcaaagtctcaatcatcccatctcatgtccagtgccacagttggttacattctctacatttttgcaaaatctcaggagttcccattggactattaggaatagacttgattaccggagtactgcttacacctcctcttccccaatagctgggctactagagtgtgattacttaatctctctgggtctacaagaatagagttaaaattaataatgtgttatcaaaaagtcatcagctatttgcaaattcagtaagacctacttagaaggcaggcagaacagtcaagggcagtggccttcaaatttttgtctatgacttatagtaagaaagttatcttaaatccataggcacacataattataatgctagtagtagtagtagcagaaaaaatgaaaaatagcaatgataayggtaacttatatgtagaaaaacgtatgagtatttatgtgtcaggcaccatactaagtgctttgtatacattaactccttaaattttctcgataacttcatgtggtttgtcactattattaactctaatttacagataatgaacaggtttgagccacggagaagtaaagtaagttacaaaagcacaagcaga

SEQ ID NO: 641917 - DNA, 539 bp, Homo sapiens
agtgagaatacttgaactttaaacctaccaatgatctcatttgacagaagagtctctttttcataaatactctatcaatgacaaaatttttctcaaatgagctcttccccacccttactctctctgacatcttgagatatttcttgagaaattctattattattgttgcgtttttctaaagccagaagatgatggcagtctttgtccattctctcttctaggataagcactccttggatgctccaccatctctccttcatggcccacctcccctcaggattcactggcaattcagacccttgamgtttgccagtgactctcatttggtttctaacttgaagggcacaactggtagctctcagcattggctcatttcactctcactgtggccaccaagaaggaaggttgtcccacccaggccctcagctgtctttgacttccaccatgaggcgtacaggaatgttgaaatcacatctatgtgggctatggcttgaatgattgtgtcccttccaaaatccatgatgaaacttaatccctaa

SEQ ID NO: 641918 - DNA, 539 bp, Homo sapiens
agtgagaatacttgaactttaaacctaccaatgatctcatttgacagaagagtctctttttcataaatactctatcaatgacaaaatttttctcaaatgagctcttccccacccttactctctctgacatcttgagatatttcttgagaaattctattattattgttgcgtttttctaaagccagaagatgatggcagtctttgtccattctctcttctaggataagcactccttggatgctccaccatctctccttcatggcccacctcccctcaggattcactggcaattcagacccttgaagtttgccagtgactctcatttggtttctaacttgaagggcacaactggtagctctcagcattggctcatttcactctcactgtggccaccaagaaggaaggttgtcccacccaggccctcagctgtctttgacttccaccatgaggcgtacrggaatgttgaaatcacatctatgtgggctatggcttgaatgattgtgtcccttccaaaatccatgatgaaacttaatccctaa

SEQ ID NO: 641919 - DNA, 539 bp, Homo sapiens
agtgagaatacttgaactttaaacctaccaatgatctcatttgacagaagagtctctttttcataaatactctatcaatgacaaaatttttctcaaatgagctcttccccacccttactctctctgacatcttgagatatttcttgagaaattctattattattgttgcgtttttctaaagccagaagatgatggcagtctttgtccattctctcttctaggataagcactccttggatgctccaccatctctccttcatggcccacctcccctcaggattcactggcaattcagacccttgaagtttgccagtgactctcatttggtttctaacttgaagggcacaactggtagctctcagcattggctcatttcactctcactgtggccaccaagaaggaaggttgtcccacccaggccctcagctgtctttgacttccaccatgaggcgtacaggaatgttgaaatcacrtctatgtgggctatggcttgaatgattgtgtcccttccaaaatccatgatgaaacttaatccctaa

SEQ ID NO: 641920 - DNA, 584 bp, Homo sapiens
aaacattctcatgagagtctcagttgtataatttgtttgaactgaaaagtctaagatacctttaccaagaatccatagtcatagcacacacagtcctgttctatggagaggatatgacattggccttccatacacccccactctgccctttctacactctttctcayggacattcagttgctctctatcatccccttcctccatccacctttaccctcatttcagccctcacacacatacataccacatcactccccagtgggcatgcagcttgccccactttctgtgatccctcatctccatgtgtatatttattttcaaaaatgtttaatatatataaagaggcaaactagagaggatcattggaaaaaattttaacgctcttccatgaactttaatgtagctttgggaaaactctctacctttctctgtgcctcataccaacagttggggattttatatgatctgcatatttcatgagtttttattccttaagtacaggagaatttgttcttatagagcattagacttgggttagaatactgttcattaaattaatctgataactgcctcaataatccagt

SEQ ID NO: 641921 - DNA, 584 bp, Homo sapiens
aaacattctcatgagagtctcagttgtataatttgtttgaactgaaaagtctaagatacctttaccaagaatccatagtcatagcacacacagtcctgttctatggagaggatatgacattggccttccatacacccccactctgccctttctacactctttctcacggacattcagttgctctctatcatccccttcctccatccacctttaccctcatttcagccctcacacacatacataccacatcactccccagtgggcatgcagcttgccccactttctgtgatccctcatctccatgtgtatatttattttcaaaaatgtttaatatatataaagaggcaaactagagaggatcattggaaaaaattttaacgctcttccatgaactttaatgtagctttgggaaaactctctacctttctctgtgcctcataccaacagttggggattttatatgatctgcatatttcatgagtttttattccttaagtacaggrgaatttgttcttatagagcattagacttgggttagaatactgttcattaaattaatctgataactgcctcaataatccagt

SEQ ID NO: 641922 - DNA, 564 bp, Homo sapiens
attactctatagtttagtgctgcttttgtcagagtagtccttccgacttcctttaccagggtgaaaatagagagatgccaacaatcctgcttgagagtgtgcatttaacaagaatgaattaaattttcatgcttagaaaggaaactaacagccattcatttggaaattctcatttctaagtaaggtatgatttggaagatgcaaatcttttttttaacctgtttgtgaagacaaggtcaagaagccagctcattaattaattatttcatggttccatcaatttatacatagaacatctgctgagggccaactatgctgcttgagaacataaatatggctaatagatgtttcctgtcataaaggtttctcaattaagaggaagataattatatgcccaaattacttagacccaaagtgacaggtgctataagagacttgtggccataggagaggtatacctaattcaggctgggaatagaaaggagggctatkttgtgtagaaagtgctaaataggaggtttcctagtaacctagaaaacccaggtacaattgttaatattggaa

SEQ ID NO: 641923 - DNA, 608 bp, Homo sapiens
gttgtatccaaactgagcatggtttacaataatggaagcagctggtttactgagttagggaatgagaactgattattgatttgctatccttgtaacgacatcagtggagagtgataatggactgtaccactttgaacagagtaaatagccatttttatattacttgctttcttgcaaattggctactagcagtgagagtaaaatatatggctgtctcatatctcgaagcactaaacaaattgcactagaggaacgctgtgaagcatggtagaacatttgctgatatttacaacttgagctcaggctacaaactccacattaaaaagttctcaattctctccgtttattttccacagycatttgggtattgcgtccccaatttttagctgctgcagttattttggaataatgcataattgttttttacctcacaacattgaagaacactctggggttcttatcaatttgtcatttcagtgaaaaaatataagctattttctgggcttgtatttcttgaaaaaggaaaattatccatagaaaaataatagaagaaaatatcaagatacaagaatgttactttaaaatggttcttgaataaagacagtgct

SEQ ID NO: 641924 - DNA, 608 bp, Homo sapiens
gttgtatccaaactgagcatggtttacaataatggaagcagctggtttactgagttagggaatgagaactgattattgatttgctatccttgtaacgacatcagtggagagtgataatggactgtaccactttgaacagagtaaatagccatttttatattacttgctttcttgcaaattggctactagcagtgagagtaaaatatatggctgtctcatatctcgaagcactaaacaaattgcactagaggaacgctgtgaagcatggtagaacatttgctgatatttacaacttgagctcaggctacaaactccacattaaaaagttctcaattctctccgtttattttccacagccatttgggtattgcgtccccaatttttagctgctgcagttattttgkaataatgcataattgttttttacctcacaacattgaagaacactctggggttcttatcaatttgtcatttcagtgaaaaaatataagctattttctgggcttgtatttcttgaaaaaggaaaattatccatagaaaaataatagaagaaaatatcaagatacaagaatgttactttaaaatggttcttgaataaagacagtgct

SEQ ID NO: 641925 - DNA, 608 bp, Homo sapiens
gttgtatccaaactgagcatggtttacaataatggaagcagctggtttactgagttagggaatgagaactgattattgatttgctatccttgtaacgacatcagtggagagtgataatggactgtaccactttgaacagagtaaatagccatttttatattacttgctttcttgcaaattggctactagcagtgagagtaaaatatatggctgtctcatatctcgaagcactaaacaaattgcactagaggaacgctgtgaagcatggtagaacatttgctgatatttacaacttgagctcaggctacaaactccacattaaaaagttctcaattctctccgtttattttccacagccatttgggtattgcgtccccaatttttagctgctgcagttattttggaataatgcwtaattgttttttacctcacaacattgaagaacactctggggttcttatcaatttgtcatttcagtgaaaaaatataagctattttctgggcttgtatttcttgaaaaaggaaaattatccatagaaaaataatagaagaaaatatcaagatacaagaatgttactttaaaatggttcttgaataaagacagtgct

SEQ ID NO: 641926 - DNA, 608 bp, Homo sapiens
gttgtatccaaactgagcatggtttacaataatggaagcagctggtttactgagttagggaatgagaactgattattgatttgctatccttgtaacgacatcagtggagagtgataatggactgtaccactttgaacagagtaaatagccatttttatattacttgctttcttgcaaattggctactagcagtgagagtaaaatatatggctgtctcatatctcgaagcactaaacaaattgcactagaggaacgctgtgaagcatggtagaacatttgctgatatttacaacttgagctcaggctacaaactccacattaaaaagttctcaattctctccgtttattttccacagccatttgggtattgcgtccccaatttttagctgctgcagttattttggaataatgcataattgttttttacctcacaacattgaagaacactctggggttcttatcaatttgtcatttcagtgaaaaaatataagctattttctgggcttgtatttcttgaaaaaggaaaattatccatagaaaaataatagaagraaatatcaagatacaagaatgttactttaaaatggttcttgaataaagacagtgct

SEQ ID NO: 641927 - DNA, 598 bp, Homo sapiens
gaatatggacttatatcagcctcatactgcttataaagcacgtacaatagtgcatgacataaactacttaataaatagcatcttgtatctttttgagtgcacagactcatttcagaaaattcagaaagtacataaacttgtaaggaaggacaaaaaaattcatacaatcataaattcaaagaagccattgtacatatttaggyatattttcttaatcttttcctttattgttaaaagaaattctgctcatacattttttaacattttatcatgcatttgatcattacttttttttaatacttttagttaattttaatatactttatttttaaaagcagttttaggtttacagaataattgagcagatggcacagagatttcccacgtactccttctctcataggaactgcctcccatatgagagggttttatctgttacaatctaggaatctaaattgacaaattattgcccaaagtccatggtttacattagggttcacgcttggtgttttacattctatgtattgtgataaatatattttgacatttatccaccattagagtatcatttagaatagtttcactgccctaaattgct

SEQ ID NO: 641928 - DNA, 423 bp, Homo sapiens
tctatatactggcaatgaacatgtgcacacaaaaactaaaaatacagttgctaaaaatcagagagagaaatacttagatgtaaaactaacagatcatatgtaggactttgatgctgaaaactgctaaatgctgatgagagaaatcmaatgagttctaaaaaaaatttaggtgtagaccatgttcatggatttgaagactcaacatagtatagatgtgaaatcacccctaactgatatacagatgtagttcaaatcctattgaaatcccagaaagtctgttgtgactatgaatattactttaaaatttatatgaaaattaaataaactagaatagctgcattaattttgaaaaaagaataaagtagaagaaatcagcctaagcgatttcaagaactattatatagctataataatcaagactgt

SEQ ID NO: 641929 - DNA, 583 bp, Homo sapiens
ataactagttaatttacattcattgtaattattgatatggttgaatttattttttatcttactttctgctttctatttgtcccatctttactatttcctcttttttcttcttttcttttgaagtcttcttattccttttcttttccaatctacttattggaaactatacaaactgtttttttaaattttaggagttactctgatatctttaatatacatacttcacttacaaaaacctcctgttaatctgaagtttttctttcttttgaataaaacagaatactccaaaatattttaagtcttttcctctcctccctagctatatagtcttttgttatatattttagttttatttctttttctacatgcataacaacactatcattgtttcatattattgttatacctatagacttatccagttatcaggttttttgttcatgatttcttttcacaactttgactttccatccggaatcaaattacttttgcttgatgaagtctgcggtagaatgaagatggctgcmaattctttcatattcattctatggagaagtaaattttatttttctttttgaatgtg

SEQ ID NO: 641930 - DNA, 417 bp, Homo sapiens
caagaactgaactgattggcrtgttgatcttggactttccagcctcagaatgcgagaaataatgtcggtggttaagccatcaggtctatggtatttattatagccggccatggcgaataatataacaaccaaaactttaattgctggacataaaagggatatgatcaactttgtattttgaaaagttcaaattggctgggaagggaagaacaagttggcatttttaattgtatcattcagtggaatcactccaactactatatttgaccttgtaagtgatagcattgaaaattacaaatgaggacattaccagtgctgatattcttctcccatccttagagcctcttatgaccctagtaatataaagaaaataaaggtctttatagtttgttaattcttttattaacctgttgtatg

SEQ ID NO: 641931 - DNA, 417 bp, Homo sapiens
caagaactgaactgattggcatgttgatcttggactttccagcctcagaatgcgagaaataatgtcggtggttaagccatcaggtctatggtatttattatagccggccatggcgaataatataacaaccaaaactttaattgctggacataaaagggatatgatcaactttgtattttgaaaagttcaaattggctgggaagggaagaacaagttggcatttttaattgtatcattcagtggaatcactccaactactatatttgaccttgtaagtgwtagcattgaaaattacaaatgaggacattaccagtgctgatattcttctcccatccttagagcctcttatgaccctagtaatataaagaaaataaaggtctttatagtttgttaattcttttattaacctgttgtatg

SEQ ID NO: 641932 - DNA, 651 bp, Homo sapiens
attggaatttaatgtcataacagttactctggctgccagataaagcaaagaatgggctgggtgcagtggctcatgcctgtaaacacaaaactttggggggcttatgtgggagaatcgcttgagctcagagttcaaaaccagcaaggacagcatagtgataccctgtctccacaaaatgtaaaaatgtagctgagcatgctagtacacgcctatagttgcagctacttgggaggctgaggtgggtggatcatttgatctcaggaggtcaagactgcagtgcaccatgactgcacactgcactccagcctgggtgacagagtgggaccctgtctcaaaaaaaaaataagtaaatgaagcmaagaatggaataagtgcaattatttagaaggtgattgctataatccaggtaacagaaaatggttgcctgaattagagtgggagcagcagaatggaaagaatattcacatttggaaatattttgaccatagagccaacaggatgtgctgagattagaaatagaagttgagattttaaaaaaataataatctaaaatttttgacctaagcaactaaaaaaaaaaatggagcttctatacagaaatggagaagatgttggaaaaacacactctatatgggaaagttgaagttgggt

SEQ ID NO: 641933 - DNA, 492 bp, Homo sapiens
atcacttctacctcatttttttattgtgataaaatacatatcatataaaatttattattttaaccatttaaagtttttaattcagtggcattatgtacattcaaaatattgtgtaaccatcaccactgtctggttccagaacttcttcatttccccagaaagaaatctcacatccattaagcagtcactccccattttcctaactcctcagctcctggaaaccactaatctactttctgtttctattgatttgccaaccctggatatttcatataaatgaaatcgtaaaaaacatggcttctgtggctagcttctttcacttrgtatagtgttttcaaggattatccatgttgtaccatgtattggcatttcattcttttttattgatgaagaatattccatttgtattagtaagatttcgttgctataaaaaaacctgagactgggtgatttataaagaaaagacatttatttgcctcacagtcctgtagg

SEQ ID NO: 641934 - DNA, 492 bp, Homo sapiens
atcacttctacctcatttttttattgtgataaaatacatatcatataaaatttattattttaaccatttaaagtttttaattcagtggcattatgtacattcaaaatattgtgtaaccatcaccactgtctggttccagaacttcttcatttccccagaaagaaatctcacatccattaagcagtcactccccattttcctaactcctcagctcctggaaaccactaatctactttctgtttctattgatttgccaaccctggatatttcatataaatgaaatcgtaaaaaacatggcttctgtggctagcttctttcacttagtatagtgttttcaaggattatccatgttgtaccatgtattggyatttcattcttttttattgatgaagaatattccatttgtattagtaagatttcgttgctataaaaaaacctgagactgggtgatttataaagaaaagacatttatttgcctcacagtcctgtagg

SEQ ID NO: 641935 - DNA, 492 bp, Homo sapiens
atcacttctacctcatttttttattgtgataaaatacatatcatataaaatttattattttaaccatttaaagtttttaattcagtggcattatgtacattcaaaatattgtgtaaccatcaccactgtctggttccagaacttcttcatttccccagaaagaaatctcacatccattaagcagtcactccccattttcctaactcctcagctcctggaaaccactaatctactttctgtttctattgatttgccaaccctggatatttcatataaatgaaatcgtaaaaaacatggcttctgtggctagcttctttcacttagtatagtgttttcaaggattatccatgttgtaccatgtattggcatttcattcttttttattgatgaagartattccatttgtattagtaagatttcgttgctataaaaaaacctgagactgggtgatttataaagaaaagacatttatttgcctcacagtcctgtagg

SEQ ID NO: 641936 - DNA, 320 bp, Homo sapiens
atctcactagatatagggtgaggtgaccaaggaagagctttctaagggggtaataggcaagctgcgaccaggagaatgggaaagagccatacatacaaagtgctatggaaatacttttccaggcaagagaaataagtgcataaggactgcaaggtggaaagaagtatggtgtgttgaaggtcatcagtggagccagaagccagtaagtraagggacaaatgatacaaggctgaagaggaaggctggagcagatgttgcagcccatagtcctaatatagccagtcccatgttcattctgagatcaatgggaacctattaaa

SEQ ID NO: 641937 - DNA, 504 bp, Homo sapiens
agaatgggaaagagccatacatacaaagtgctatggaaatacttttccaggcaagagaaataagtgcataaggactgcaaggtggaaagaagtatggtgtgttgaaggtcatcagtggagccagaagccagtaagtaaagggacaaatgatacaaggctgaagaggaaggctggagcagatgttgcagcccatagtcctaatatagccagtcccatgttcattctgagatcaatgggaacctattaaacaattatacatttatttacccactctttcagggacttacatgtttatacaatctgytttttagctttgaattaattcatatttaattactattcagtaaacattacagaattcctgttacatacctagcaagaatataagaagaaaaatacatcatcttttccattagaaatttaatatctagattgagttatcataaagcaataaaaagatgacataatatgcccataaataaattcaaagaatgcttaccaaaa

SEQ ID NO: 641938 - DNA, 504 bp, Homo sapiens
agaatgggaaagagccatacatacaaagtgctatggaaatacttttccaggcaagagaaataagtgcataaggactgcaaggtggaaagaagtatggtgtgttgaaggtcatcagtggagccagaagccagtaagtaaagggacaaatgatacaaggctgaagaggaaggctggagcagatgttgcagcccatagtcctaatatagccagtcccatgttcattctgagatcaatgggaacctattaaacaattatacatttatttacccactctttcagggacttacatgtttatacaatctgttttttagctttgaattaattcatatttaattactattcagtaaacattacagaattcctgttacrtacctagcaagaatataagaagaaaaatacatcatcttttccattagaaatttaatatctagattgagttatcataaagcaataaaaagatgacataatatgcccataaataaattcaaagaatgcttaccaaaa

SEQ ID NO: 641939 - DNA, 534 bp, Homo sapiens
atggtaatgtttcttttaaatgcaaaatcaaatcaccttcaataatattggaaaaagaactgattccttgtgtacaaggcattcctaggggtttttttttacctaatttcatatatgacatttgaaaatgacttatttaatgaataggcaactaaactagaaatcagagttacagaggctttgaacagattttaacataccaaattataggggacaatgcgatttaaagaagtccctaatggagggagtgatgaaaactgcaacatcaataagaatgcatacctcaaaggtctccattgattgttagctgattattgccagttgagaatgtggactcagtattcctgcactttctaatttttcaaaaaaaggcataaatttgaattttaatgtgtgatatgagttttacatttttcatccaggtttgaaagaataaattcataccatacaaaacacatctatggaytgatatgacccatgggatcaatttgtcacagacctggtttagggccactggaaagtctagaagatacc

SEQ ID NO: 641940 - DNA, 552 bp, Homo sapiens
ccatacaaaacacatctatggactgatatgacccatgggatcaatttgtcacagacctggtttagggccactggaaagtctagaagatasctaatactccaaattttataggtcaatagatcaattgctctgctccttatcctaactgcactcttcccccatttttcattcactgtaattatatggcacttactggtacctaatccccagaatttattcagtgttttgtgttttcagcaaagtatgaatgtgggtatttctagtaattagttcatttctaccagaaggagaacacttgcttctcaagtgagtggaacatcagcatcctaccttactgttagaaggcatcatcagccaccataaatatttccatttctgaaacaaatgatatgtttgtaggatgtactcattcaaaaggtttaagattgaaatgtcttatttgttacctgaactgtgcattgtccagacaacaactatggattaattgtcataggtgtactgatgatgattaaattttatggcagtttgttgaaagaacatgacagttggacc

SEQ ID NO: 641941 - DNA, 552 bp, Homo sapiens
ccatacaaaacacatctatggactgatatgacccatgggatcaatttgtcacagacctggtttagggccactggaaagtctagaagatacctaatactccaaattttataggtcaatagatcaattgctctgctccttatcctaactgcactcttcccccatttttcattcactgtaattatatggcacttactggtacctaatccccagaatttattcagtgttttgtgttttcagcaaagtatgaatgtgggtatttctagtaattagttcatttctaccagaaggagaacacttgcttctcaagtgagtggaacatcagcatcctaccttactgttagaaggcatcatcagccaccataaatatttccatttctgaaacaaatgatrtgtttgtaggatgtactcattcaaaaggtttaagattgaaatgtcttatttgttacctgaactgtgcattgtccagacaacaactatggattaattgtcataggtgtactgatgatgattaaattttatggcagtttgttgaaagaacatgacagttggacc

SEQ ID NO: 641942 - DNA, 521 bp, Homo sapiens
tccctccaagaggctctagggaaaaatacttccttacatctttcagcttcagaaggctccaggtaatccttggcttgtggccccattactctgatttctgccactgtggtcacattgtctgcttctcttctctgtgtgtctcctataaggacaattgctatgggatttggggcccactaaataatccaatattayctcctcatttcaatatgcttaacttaattatatctgtaaagacactttttccaaataaggtaacattcacaggttctggggatttggacacggacttataaatttatgtcagggggcatcatttagctgacaaaacattgattgatcaagaaagcctaaaaaatcttaatttaatgcgattatgtaataaagagttctaattcttcttttctctacaatataagccttacttatacactggactagatacatgtctatataattctcattctcatatagaaaagatgccctgatattcaaagtgtacaaaacacacatatacaata

SEQ ID NO: 641943 - DNA, 526 bp, Homo sapiens
ggagtgaatctacagaactaggataaagaaaaagggccttactggcctttgtgaacagcccacgtaatgtgaaatagcaaaagtgaggaacagacagtatgcagtggcttcaagctagtaaaacaaacccctgtatttagctcaagctttggagcacaacaccaaaagatggttggatttatggagactgtcctgagaacttcctgtctaagcacctgcgcatttctttttcaatgaactttcttcaatgtgaagaaaccaactgcctatggatcatgcttatttcttcaatgacttactaacttatctttatgctagatattgaatgcttattttactgagcatttctttttgacaatgttatktaagagcaccaaggtacagaaaacaattttccaggcatttggaggaatgacattctttccatatgaaaggatacaatacacagcattgcactgatttaatacaacacatttccattaaaaaaaaaagcaactctgaaggctagggattcatgttgctaatt

SEQ ID NO: 641944 - DNA, 521 bp, Homo sapiens
attgaatgcttattttactgagcatttctttttgacaatgttatttaagagcaccaaggtacagaaaacaattttccaggcatttggaggaatgacattctttccatatgaaaggatacaatacacagcattgcactgatttaatacaacacatttccattaaaaaaaaaagcaactctgaaggctagggattcatgttgctaatttttaggacaaagactctataagctactttgaaagatctctgtgaagcagcatatgaacagtgactgattgtggtatcaatgcaattggaagcagactcgctcaacagtcctggagatctaggagcatcgtcakgggcagtcagcaggtctgtaggaggttgggggtcctcaatctcagaaatgaataaatgacattggttgtgatttgactgttggtgctgagttaactgttttgcacagttttaatgtaataggtgtgtaataggagagtttggagcatgggatgaggtcacaggatattattttgatgccaca

SEQ ID NO: 641945 - DNA, 576 bp, Homo sapiens
tggttgtgatttgactgttggtgctgagttaactgttttgcacagttttaatgtaataggtgtgtaataggagagtttggagcatgggatgaggtcacaggatattattttgatgccacagtgtggcatatgaataaagccacttgtaccatatgaataaagtcacatgtaccatagaggctggagaatacagtggcaargggaagaagaatgagaacaaacttaaagtggaaagagcacaagtcttggagccagacagacctgggtttgaatctcagttacattacctcttagttgggtcaactgtgaacaagttactaacctgctagagtgtcaaaatttttgtttattaaaacaagcagtaaaaactatgtatcttgaggggcttttacaaaattaagagatactttatgaaatgagaatagtaggcactggcgactccaatggagggaaggagagaggcaagggctgaaaagcttcccattgggcactatgttcactatctgagtaaccagatcaatagaagccccaaacctcagcactatgcaatacatctttatcaaaaacctgcacatg

SEQ ID NO: 641946 - DNA, 397 bp, Homo sapiens
catcttcttcttcatctggcacaggttcagaagcactcatctctatcgagtcatcttctgttaattcgtcttgggtggtgtctattaagctcttcaatttttctgagatccatatcaaacccttcaccccatcttttttgccatatccacaatctttttcatgatttccttgcttggctttatcatcaatcctgtgaaatcatgcataacatctggacrcagtattctccaggaggaatttattgtttcaggcttgatggttttcatggctttttccataacaatgatggcatcttcagtggtataatccttccagactttcacgatgttctatcagggttcgcttccatagagttgacagtcctttccatagagtaccatgtatatgtgtaatgag

SEQ ID NO: 641947 - DNA, 497 bp, Homo sapiens
aagagaaaacatattactttaaaacaaacgtaagttcaagttgcagcaagtgcaaattctagaggccaccaggaaaggaaaaaaatcacatcgggcactaggaaactcactcccagtaagtttccaaatcacaaattaaacaaggcctaactttaccccctcctgctaattgagaataaaagataggcaaaaaagataagaattactaagaccatgacattacataatacaagaatataaggaaaatatttaaaataattatatgtaactttaagcatatatgcctcataactgagttacattacttaaaactttctattcagtaagaatgtatgaattattacmaatatcttgttagtaaatattgccaataaagttttaattgtataaataaatatatcctattaccggatataaatttttttttttttcagacagggtctcgctttgttgcccaggctaaagtgcagtggtagatgacagcttactacagccta

SEQ ID NO: 641948 - DNA, 497 bp, Homo sapiens
aagagaaaacatattactttaaaacaaacgtaagttcaagttgcagcaagtgcaaattctagaggccaccaggaaaggaaaaaaatcacatcgggcactaggaaactcactcccagtaagtttccaaatcacaaattaaacaaggcctaactttaccccctcctgctaattgagaataaaagataggcaaaaaagataagaattactaagaccatgacattacataatacaagaatataaggaaaatatttaaaataattatatgtaactttaagcatatatgcctcataactgagttacattacttaaaactttctattcagtaagaatgtatgaattattaccaatatcttgttagtaaatattgccaataaagttttawttgtataaataaatatatcctattaccggatataaatttttttttttttcagacagggtctcgctttgttgcccaggctaaagtgcagtggtagatgacagcttactacagccta

SEQ ID NO: 641949 - DNA, 573 bp, Homo sapiens
tagtaggcaatatataaaataatgcataaattagaactacttaaacttgagggaagcgagtttttatgtaagatttactactagtattacttgattgacaacttagctactatagcaaaaaccaactccctgtgatattttaaaaagaaatactccatgtcataacactgaaggtgactcaccattaacttcctgctcttgcctaaggaccctcttgcattagtaatgactaactaaaaccatttgccatgtctattcaaacaggaaaatcctgattaactacaccacgagttagaggaccaacctccccttgtcacctgccccacaatttgggaataaagaagtcacctaggacactgargtttactaaacacaccctgatgagtcctacaaagtacaggattatcaagtagtttccttagaaagtaacaagagtagctggaaaagtacattcaatgaccttttaaaggaacattctgcctgctgcttgttttgaaattctggtctcgtgtatttatgatgattcacaaactgttcttactatgtacacggcacttttcctaagttctttgc

SEQ ID NO: 641950 - DNA, 611 bp, Homo sapiens
tatagcattgtgtatggcttacagtaacttaaaaaaatgtgtgttggcttaatttatgctttaaaccttaaaacatgttaaaaatatattgtcatattaagaatattaatagaaccttgtcaaaaaatttttacacatgcaaatcttttttcagtgaaaacatacatacaaatggkttttttttttttttttggagacagtcttgctctgtcactcatactggagtgcattggcataatcttggctcactgcagtctctgcctcctaggttcaagtgattctcctgcctcaccttcctgagtagctaggattacaggtgtgcaccaccatgccgaactaatttttgtatttttagtagagacagggtttcaccatgttggccaggctggtctcaaatgcctgaccccgtggttgctggtctcgaatgcctgaccccgtgatttgcccacctcagcctcccaaagtgctgggattacaggcgtcagccaccacgcctggctgaacatggtctttattcttaagactagaatagtacttctcaacaagggatgattttgtccctttccttcctgggtacatttggctatgtctgaagacatatttggttgcta

SEQ ID NO: 641951 - DNA, 599 bp, Homo sapiens
ccatatacaaaaattactcaaaatggataaaatatttaaatgtaagacctcaaactatgaaaatcctatttaaaaaccctagcgcggtggctcacgcctgtaatcccagcactttgggaggccaaggcgggtggatcatgaggtcaggagatcgagaccatcctggctaacaaggtgaaaccccgtctctactaaaaaaaatacaaaaaattagccgggcgcggtggtgggcgcctgtagtcccagctactcgggaggctgaggcaggagaatggcgtgaacccaggaagcggagcttgcagtgagccgagattgcgccactgcagtccgcagtccggcctgggcgacagagcgagactccgtctcaaaaaaaaataaaaataaaaataaaaataaaaaccctagaaaataccctttctctacatcagacttggccaaaaaattttggcaaagtcttcaaaagcaactgaaataaaaacaaaaattgacragtgagacctaattaaaaatcttcctcacagcaaaagtaactatcaatagagtaaacagacaacttacaggatgggagaaaatattcacaaacaatacatccaacaaag

SEQ ID NO: 641952 - DNA, 599 bp, Homo sapiens
ccatatacaaaaattactcaaaatggataaaatatttaaatgtaagacctcaaactatgaaaatcctatttaaaaaccctagcgcggtggctcacgcctgtaatcccagcactttgggaggccaaggcgggtggatcatgaggtcaggagatcgagaccatcctggctaacaaggtgaaaccccgtctctactaaaaaaaatacaaaaaattagccgggcgcggtggtgggcgcctgtagtcccagctactcgggaggctgaggcaggagaatggcgtgaacccaggaagcggagcttgcagtgagccgagattgcgccactgcagtccgcagtccggcctgggcgacagagcgagactccgtctcaaaaaaaaataaaaataaaaataaaaataaaaaccctagaaaataccctttctctacatcagacttggccaaaaaattttggcaaagtcttcaaaagcaactgaaataaaaacaaaaattgacaagtgagacctaattaaaaatcytcctcacagcaaaagtaactatcaatagagtaaacagacaacttacaggatgggagaaaatattcacaaacaatacatccaacaaag

SEQ ID NO: 641953 - DNA, 506 bp, Homo sapiens
tcactgactagaatttccccaactatgttgcatagcactggggagagtgagaattctctcccatctgttcccaattttaggggcaagcattcagttggtaactattaagtaggatgttagctataggtttttctgtagatattcttcatcaagttgaggaagttgccctattttsctagtgttctgagattttttaaattatgagtagatgttgaatttcatcaaattccttatgttcatctatttatatgatcctgtgatttttctcctttagacctgtaatatacaccacttggtcactgtgtataattttttacatatcactgaattctatttgctaatattttgttaaagatttttgcatctatattcattaaaaatattgggctatggtcttctttttttgtgtgtgccattttgcctgcttttgctaatagggtaatactgggttcatagaataagttaagaagtgttctttccacatctgttttctgaaagaaattgta

SEQ ID NO: 641954 - DNA, 506 bp, Homo sapiens
tcactgactagaatttccccaactatgttgcatagcactggggagagtgagaattctctcccatctgttcccaattttaggggcaagcattcagttggtaactattaagtaggatgttagctataggtttttctgtagatattcttcatcaagttgaggaagttgccctattttgctagtgttctgagatttttwaaattatgagtagatgttgaatttcatcaaattccttatgttcatctatttatatgatcctgtgatttttctcctttagacctgtaatatacaccacttggtcactgtgtataattttttacatatcactgaattctatttgctaatattttgttaaagatttttgcatctatattcattaaaaatattgggctatggtcttctttttttgtgtgtgccattttgcctgcttttgctaatagggtaatactgggttcatagaataagttaagaagtgttctttccacatctgttttctgaaagaaattgta

SEQ ID NO: 641955 - DNA, 506 bp, Homo sapiens
tcactgactagaatttccccaactatgttgcatagcactggggagagtgagaattctctcccatctgttcccaattttaggggcaagcattcagttggtaactattaagtaggatgttagctataggtttttctgtagatattcttcatcaagttgaggaagttgccctattttgctagtgttctgagattttttaaattatgagtagatgttgaatttcatcaaattccttatgttyatctatttatatgatcctgtgatttttctcctttagacctgtaatatacaccacttggtcactgtgtataattttttacatatcactgaattctatttgctaatattttgttaaagatttttgcatctatattcattaaaaatattgggctatggtcttctttttttgtgtgtgccattttgcctgcttttgctaatagggtaatactgggttcatagaataagttaagaagtgttctttccacatctgttttctgaaagaaattgta

SEQ ID NO: 641956 - DNA, 506 bp, Homo sapiens
tcactgactagaatttccccaactatgttgcatagcactggggagagtgagaattctctcccatctgttcccaattttaggggcaagcattcagttggtaactattaagtaggatgttagctataggtttttctgtagatattcttcatcaagttgaggaagttgccctattttgctagtgttctgagattttttaaattatgagtagatgttgaatttcatcaaattccttatgttcatctatttatatgatcctgtgatttttctcctttagacctgtaatatacmccacttggtcactgtgtataattttttacatatcactgaattctatttgctaatattttgttaaagatttttgcatctatattcattaaaaatattgggctatggtcttctttttttgtgtgtgccattttgcctgcttttgctaatagggtaatactgggttcatagaataagttaagaagtgttctttccacatctgttttctgaaagaaattgta

SEQ ID NO: 641957 - DNA, 597 bp, Homo sapiens
ttttttgctttcccagtgcatataaaagtttacactatactgtagtctattaaatgtgcaatagcattatgtctttaaaaagtatatggcttaattaaaaaatactttattgctaaaaatgctgacacaacaacactaaatgggcacatgctgctrgaaaatggtgctaatagacctgcttaatgtaggattgccacagacctttaatctatttaaaaaatacaatatatgtaaagcaaaataaaacaaggtatgcccatataatgcaacacctagagaagccactaaaaatgctataaaaagatatctaataaaaacactatacaaaaaaaaagactatagatgcaccaaaatgggattataagaaaaagttcaagtgacccacagaaatgcaggaaaaagaaaagagagaaacaagaaagaaaaagaacagttcattttaaaaatggcatacaactgtagcatatcaatgaccacataaaatgtacattgttttcttcatttttagaacaataatggccataaattcccattgtaaaagtgaaagtagaagttcagaagtttataagtttggaaaataatgttctttttcaccta

SEQ ID NO: 641958 - DNA, 420 bp, Homo sapiens
gagaaacaagaaagaaaaagaacagttcattttaaaaatggcatacaactgtagcatatcaatgaccacataaaatgtacattgttttcttcatttttagaacaataatggccataaattcccattgtaaaagtgaaagtagaagttcagaagtttataagtttggaaaataatgttctttttcacctaatcccacatccatgaataactgtacttgaatttgctgtgcacactttctggcaattatccatgagtaaataatgacagtggaagcaagagacagtaggagtgagagagagtttggtttttcagagaatccacaagctacttattttttggtggygggcttggggggattctttattttcctttgaacttttattttaagttcaggggtacatgttcacaatgtgcaggttt

SEQ ID NO: 641959 - DNA, 622 bp, Homo sapiens
taaggttaatattgttatgtatgaatttgatcctgtcatcatgatgttaattgattattttccagatttgtctatgtggttacttcatagtgtcactgatcagtgtgcttcagtgtgttttcgtagtggctggtaacagtttttcctttccatatttagtgcttccttctggagctcttgcaaggcaggcctggtggtgatgaattccctcagcatttgcttgtctaagaaggatctttttaggcaaggcataatggctcacacctgtaatcccatcactttgggagaccaaggtgggcagatcacctgaggtcaggagtttgagaccagcctggccaaaatggagaaaccccatctctactaaaaatacaaaaattagctggacatggtggtatttgccygccatcccagctacccaggaggctgaggcagaataatagctggaacctgagaggcagaggctgcagtgagctgagattgcccccccgcccccccccccgggggacaaaacaaaaatctgtttccaaaaaaaaaaaaaaaagaacacttttaacttttctgggccaaaaattatcttatttctccttcatttatgaagcttagttcagctggatttgaaatt

SEQ ID NO: 641960 - DNA, 622 bp, Homo sapiens
taaggttaatattgttatgtatgaatttgatcctgtcatcatgatgttaattgattattttccagatttgtctatgtggttacttcatagtgtcactgatcagtgtgcttcagtgtgttttcgtagtggctggtaacagtttttcctttccatatttagtgcttccttctggagctcttgcaaggcaggcctggtggtgatgaattccctcagcatttgcttgtctaagaaggatctttttaggcaaggcataatggctcacacctgtaatcccatcactttgggagaccaaggtgggcagatcacctgaggtcaggagtttgagaccagcctggccaaaatggagaaaccccatctctactaaaaatacaaaaattagctggacatggtggtatttgcccgcmatcccagctacccaggaggctgaggcagaataatagctggaacctgagaggcagaggctgcagtgagctgagattgcccccccgcccccccccccgggggacaaaacaaaaatctgtttccaaaaaaaaaaaaaaaagaacacttttaacttttctgggccaaaaattatcttatttctccttcatttatgaagcttagttcagctggatttgaaatt

SEQ ID NO: 641961 - DNA, 571 bp, Homo sapiens
tcttggggttggtcttcttgtggagtaccttgctggcattctctgaatttcctgaatttgaatgttggcctgtcttgctaggttggggaagttctcctggatgatatcctggagtatgttttccaaattgattttgttctcctatctctttcaggtaccccaactggtcataggtttgatcttttcacataatcccatatttcttggatattttgtttgctccttttcattcttttttctctatttttgtctgcctgtcttattttagaaagatagtcttcatactctgagactctttcctccaattagtctattctgctattaatacttgttattgcattatgaagttctcaagytgtgcttttcagctccatcaggtcagttatgttcctctctaaactggctattccggttatcacctcatgtattgttttattgggttcttagtttctttgcattgggttacagcatgctcctttagctcaacaaagtttgctattactcatcttctgaagcctacttctgtcaattcaaccatctcagcctcagcccagttctgtgcccttgctgg

SEQ ID NO: 641962 - DNA, 484 bp, Homo sapiens
ctggtcataggtttgatcttttcacataatcccatatttcttggatattttgtttgctccttttcattcttttttctctatttttgtctgcctgtcttattttagaaagatagtcttcatactctgagactctttcctccaattagtctattctgctattaatacttgttattgcattatgaagttctcaagttgtgcttttcagctccatcaggtcagttatgttcctctctaaactggctattccggttatcacctcmtgtattgttttattgggttcttagtttctttgcattgggttacagcatgctcctttagctcaacaaagtttgctattactcatcttctgaagcctacttctgtcaattcaaccatctcagcctcagcccagttctgtgcccttgctggagaggtattgcaggcattggaaggagaagaggcactctgtttttttgaattttcagtgtttttgagttaattattt

SEQ ID NO: 641963 - DNA, 601 bp, Homo sapiens
caacttgcttttcttttctgactccatagagtatatatttatttcactgctttagactatgtattaataaataatacaaatctactaaaatttatacaattctatcttccaattttgctattagaaagttgttcttaattaatttaaaatacrttacataacattatattgtacatgatatgcatattacttatactataaacaatctaatgaacatcaattaacttctagataagttctgtgatccccattgtacagagaaagcaagtggggctacagggagttctatccttttttgtattaactggtgagacaataattcaaaaccagggctacctatttcctttctactgcaaaatgttccatctaaatgaagcctgagaaacccagcactacccacttgttaggcatgtttgaaatgcttgagtagttggccattttccttgtagcatttatttgatctgaaaacaccttcaacatagatgaaacaaaatattttatactaaaccaacctaccattggctcaacataaacccagatatgtacagattctgtatgagggggtaggtggcggggcttgtattagtttccttagtccttg

SEQ ID NO: 641964 - DNA, 579 bp, Homo sapiens
gagggcagggagttgacaaaatggctcagccattgggatcaggagcaaagagcctgtggcagaaaagagtgtgaagacttgaagagatccagtgggctgaaacagagatagcaagagccagagtggtacaaggttgggtagtggccatggggcagtcytggggtttggactttattccaagagtcatgggaatccattgaagagtttcagatagggctataacataactgccaggagttatctagtttaaagagacatgagcctggttgatgaagccactttcatttctatgcccataaagcagagccctatagcctgaaggttagaaataaaatgacctgcaggatcagtcatctgaatttaactcagtgctcagtggtattcaaagctgtgaaagcagtaggctttggttctcctcctctggaaagtatattgaacaagcaataaaaatatggctaatgcctcaccaaatgcaaatgccagtcaccacagggtgagagagagacatcacttgagatagtgagttcagaaaaatgatcattttcattaactaacagcctactaagcaaattaaaattt

SEQ ID NO: 641965 - DNA, 579 bp, Homo sapiens
acattttcattcttacctagcacctttcccccactatgatcctcatttttgtgtytactattctcttgcttctctttatcatgttactacatatttatgaatccttaaacagcacattgtttagtttgcacatttttgtaaaccatagaaatacaaaggatcataagagcctactgtgaacaactatgcacaagcgaattgagtaacctagaatatatggataaatttctagaaacatacaacctaccaagactgaatcatgaagaaagaaaatctgaacaggtcaataatgattaaggagagtgaagcagtaatcaaaaacctcccagcaaagaagagcccagaatcggatggtctagcaccttttttgaattatgaattttatgtatttatttatttattttagagacagaatctctaaaaaaaacaaaactctagttgctcaaaaaatctctatgttgcccaggctggtattgaactcctgggctcaagagatcctcctgccttggcctcccaagtgttgagattacagatgtgagcctggcccaagcaccttttttgaattgatttcatgtttcc

SEQ ID NO: 641966 - DNA, 565 bp, Homo sapiens
gaatcatgaagaaagaaaatctgaacaggtcaataatgattaaggagagtgaagcagtaatcaaaaacctcccagcaaagaagagcccagaatcggatggtctagcaycttttttgaattatgaattttatgtatttatttatttattttagagacagaatctctaaaaaaaacaaaactctagttgctcaaaaaatctctatgttgcccaggctggtattgaactcctgggctcaagagatcctcctgccttggcctcccaagtgttgagattacagatgtgagcctggcccaagcaccttttttgaattgatttcatgtttccttatataatctgtctaaatctcccaactttcttcagattacacagtaaccaagtctgtttggagatttacaaggtgggctatttataacactgagtggggaacacgtttgagatagtaaatttgcctaaggagagtcgggttgctatttctaagtaatcaggagaacaagcagtgcttgaaagtctctggtttggaccaagggagacagaaaaagcgaaccattgagcccgctcccactt

SEQ ID NO: 641967 - DNA, 527 bp, Homo sapiens
ctgtccacatgaaattccaggtctagcttgggagacacatattaaataatttattacccaatatgttatctgaatacaattgtgataaacttcacaaatgaagagaagcaggtgctgcaagagcatgtgactaatttagttttaggggtcagaggagatagacatgaggaaaaggcatttgagttgagccttggagaaagaatggcaattgacaagatgatgtcaggggaggtggaggtttggaggaacattccaggcagaagaaaaagtggcaaaagrataagacaactagggaagggagtttcacagcaacttaaggtaggctaattgcattaatttctggaggaaattatctggaggatagagaaagaggaggagtgtggtagagagtctggagctggagcactggttagggatcagatcagatcagatcaggcctggccttgttggtctcatttaagattgttttttttcaaccctaaactaaagagaaatttattaaacccaggttactggttgttaattta

SEQ ID NO: 641968 - DNA, 521 bp, Homo sapiens
tagggggcagagtgaaactttgtctcacaaaaaaaaaaaaagaaaagaaaaagaaaaagaaaagaaaactttttgagctatttacagcttgtaggaattgaggtaaagtatactcctgtgaacaaaatttggagcatatttatttctttctgcctgattttyccagatttgggaaactatttatgagtattcttaacttatggcagtatatttattggcataagtgcaatatgcctgttttcttttgcaacaggacaccattgcagaaactggttattttaccaaggctttgactggaatagtgtgcttccctttaaggaatcaaacttgacttttggagctaataaaagccccttgggaaaactgctctcttaccttgtctacacagtctctggacagagttcctgacctgtggtaagtaaagaatgccactttctgacaggctcaggagccccaagttatcttgggacctcaagaggagaggaatctacccaactcatagttatttgatggtacaaagc

SEQ ID NO: 641969 - DNA, 521 bp, Homo sapiens
tagggggcagagtgaaactttgtctcacaaaaaaaaaaaaagaaaagaaaaagaaaaagaaaagaaaactttttgagctatttacagcttgtaggaattgaggtaaagtatactcctgtgaacaaaatttggagcatatttatttctttctgcctgattttcccagawttgggaaactatttatgagtattcttaacttatggcagtatatttattggcataagtgcaatatgcctgttttcttttgcaacaggacaccattgcagaaactggttattttaccaaggctttgactggaatagtgtgcttccctttaaggaatcaaacttgacttttggagctaataaaagccccttgggaaaactgctctcttaccttgtctacacagtctctggacagagttcctgacctgtggtaagtaaagaatgccactttctgacaggctcaggagccccaagttatcttgggacctcaagaggagaggaatctacccaactcatagttatttgatggtacaaagc

SEQ ID NO: 641970 - DNA, 521 bp, Homo sapiens
tagggggcagagtgaaactttgtctcacaaaaaaaaaaaaagaaaagaaaaagaaaaagaaaagaaaactttttgagctatttacagcttgtaggaattgaggtaaagtatactcctgtgaacaaaatttggagcatatttatttctttctgcctgattttcccagatttkggaaactatttatgagtattcttaacttatggcagtatatttattggcataagtgcaatatgcctgttttcttttgcaacaggacaccattgcagaaactggttattttaccaaggctttgactggaatagtgtgcttccctttaaggaatcaaacttgacttttggagctaataaaagccccttgggaaaactgctctcttaccttgtctacacagtctctggacagagttcctgacctgtggtaagtaaagaatgccactttctgacaggctcaggagccccaagttatcttgggacctcaagaggagaggaatctacccaactcatagttatttgatggtacaaagc

SEQ ID NO: 641971 - DNA, 593 bp, Homo sapiens
tcaactccgtgttaaaaccttattaaatacaacttttattatttatgctgcacaaataaaaagcaaagaaacatggtccttttgttaatcatatggtaagagaccattttccttcaggcattttgaattattgaagatacctcccctctctcccccatgtattcttctctttcttcctttgcttttggttgtgttgttttgtgtgtccataattgatgtaacaaagagcatttaatgagccctggtctggtgatcttttcctgccccacaccactgcctgacatttgttctaatttggacttctgcttctgacctttgcaaagctctctaggtaataagctcccaagataataagctccccagataatatgttctctagataataagttctataacatcagagctcacaatacatctcccatggctaccacaatttcatgtacaacaataagtatttatggaaaacaagttgtggattcagctccaaccatatatgtgtggcctattaaggtatatgaaataaggacccrtcacctaatatttcttatctaatatgttggcaggggagaaggaagaaacaatacaagaattgg

SEQ ID NO: 641972 - DNA, 547 bp, Homo sapiens
aacacccattttgaaaaaccacatgtaggttaggaggattcaatgtatgtgaaagagttcttcaaactcctaagcacttgctgtgctgatggtaaaggtgataatgaggaggaaggagtgtctgctatgggaaaaccactgtcctaaaacttttaaatacattgttaattaatctgcaccaataagtctaygaattagattctatcataatctcaattttacagatgaggttcagagagatgacaaattttccccaatatcacacagtcattttaatggtggaacagaaattttaacccaaatctatctggctccatagttaacactcttaactaccatattatatggccccaatctaactcccttatctttgggaaatacttttatttataggtcaatgacacagagttacagatcctgggtacagcctgggtctgtaacttactcaatgtataatgctgggtaagtcttaacctctctgtgcctcatctgttaaatgaaagagttgaactctaggatctctcaagttcattccctttgagttcat

SEQ ID NO: 641973 - DNA, 670 bp, Homo sapiens
ctttctcctctcctccccagcattaaaaggaatagaaaggaaagcacttggaatccccaggacagcttgtggaaggttttggggtagtgtgggtggagctttaaactgaatatgagattgatttttaaaataacttyttattttgaaacagtttaagactcacaagagttgcaaaaattatagtataaagtccccatatactctttagctaacttcttccaataataatgttatataaccatagtaaatggccaaaaccagaaaagtgactgtgatgcataatactgttaactcaggtgcagatattatttggatttcaccaggatatacgtgcactctttttgtctatttgttttggtatatagttctgtgacattttatcacatgggtagactcaagtacccatcaccataatcaagatacagaactgctccaaatccacaaagaaactctctcatgtgttaccccttaataggcgcacgcttccttcaaccccagtctctaataaacactgatctgttctttattactgtaatttagtcattccaataattgtatataaatataattttacagtatattgccctttgaggttttgtttactgttttatttttcattcagcataatgcacttgagtcatctaagttgttgtatgtatcaatagtttat

SEQ ID NO: 641974 - DNA, 670 bp, Homo sapiens
ctttctcctctcctccccagcattaaaaggaatagaaaggaaagcacttggaatccccaggacagcttgtggaaggttttggggtagtgtgggtggagctttaaactgaatatgagattgatttttaaaataactttttattttgaaacagtttaagactcacaagagttgcaaaaattatagtataaagtccccatatactctttagctaacttcttccaataataatgttatataaccatagtaaatggccaaaaccagaaaagtgactgtgatgcataatactgttaactcaggtgcagatattatttggatttcaccaggatatacgtgcactctttttgtctatttgttttggtatatagttctgtgacattttatcacatggstagactcaagtacccatcaccataatcaagatacagaactgctccaaatccacaaagaaactctctcatgtgttaccccttaataggcgcacgcttccttcaaccccagtctctaataaacactgatctgttctttattactgtaatttagtcattccaataattgtatataaatataattttacagtatattgccctttgaggttttgtttactgttttatttttcattcagcataatgcacttgagtcatctaagttgttgtatgtatcaatagtttat

SEQ ID NO: 641975 - DNA, 590 bp, Homo sapiens
cgcacgcttccttcaaccccagtctctaataaacactgatctgttctttattactgtaatttagtcattccaataattgtatataaatataattttacagtatattgccctttgaggttttgtttactgttttatttttcattcagcataatgcacttgagtcatctaagttgttgtatgtatcaatagtttattccttattactgatgaataggagcccattgtatggatgtaccaaagtttatttaacaatttacttgttgaaggatatctggattatttccatttcttggctgttataaataaagctgctatgagcttttgtgttcatctttttgtgtgaacataagttttcatttctttaggagaaatgcccaggaatgtgattgctggatcattcatatggtaagtgcatatttacctttataaaaaaaaaacaccaaactgtcttataatgagactgtamcattttacattcccattaacaattcatgagagatccatttataaggctgttttaaaatagaagcactatgtgaaaataacccaaatgagattgtttcaataactaaaatgacttcacagctaag

SEQ ID NO: 641976 - DNA, 597 bp, Homo sapiens
cccatttttacactttagaaaagagaagatctttgtatgaatttgaagcccaaacttctagcattgacaaggaagtaatgtacctgagaatgaagctaacctggagaagaactgagttgaacattgagaaagagagacattaggacaatatcctgaaaaaaagtaatttttgcccagtagaaccagccatgcttgaagacatatgtaaccctgaacttttctgttttgtgagccaataaatacctttttttattttcattttttcagacagtaaattccattttctcttaaatccatttgatctatgttactgtctttcaactcacatggtcattattgatataaacacatctttcaaagacatagcatgagttattgaatcaggggagaaacaggtcacttccagcctgatgactgggaaaggctactcagagaaggggcaatccgagctggaccttggaacaaaagagagagtaagcataaggaccaaagaaacctggaatttatagaggtataaatgyaaggtatttggtaagatgcttttactgaaggagagactttgtgttgggaagcaggaagtgatgggctggggacaac

SEQ ID NO: 641977 - DNA, 575 bp, Homo sapiens
taagcaatgaaatatccattaargaattttagtaagtgtgtgacctgttgaaaatcatccttccagaaaaataattagcgtgagagttatacctaatgaaagtataaaattggcaccctcttcatccttttcctcctgtaatctcttcccagggaaattcactagctaatctcctggtcttcagttttccatactgatttatcctccatacattgtctggtggactttttaaaaatatgtctaattgtggcacttaaaaagtcaggatgtttcttaatgtccatgctgcaacatggataaatctcaaaatgattatgttgagggaaagaaaccagaccaaaaaggaaaaatgcatagtatatgattccatttatataacattctagaaaaaaaaatgacagaaagcagagcagtggttgcctagcaatggggagaaggtgaggaggaggggtgagagtgtgataacagggggatgagaggactttaggaggcaatgagataatcactgtcttgtgtgctaatggcttcacgggtatatacacatgtcaaattttgcaccttacatacatgcagtt

SEQ ID NO: 641978 - DNA, 544 bp, Homo sapiens
ttagaaattatcctataagcaatgaaatatccattaaggaattttagtaagtgtgtgacctgttgaaaatcatccttccagaaaaataattagygtgagagttatacctaatgaaagtataaaattggcaccctcttcatccttttcctcctgtaatctcttcccagggaaattcactagctaatctcctggtcttcagttttccatactgatttatcctccatacattgtctggtggactttttaaaaatatgtctaattgtggcacttaaaaagtcaggatgtttcttaatgtccatgctgcaacatggataaatctcaaaatgattatgttgagggaaagaaaccagaccaaaaaggaaaaatgcatagtatatgattccatttatataacattctagaaaaaaaaatgacagaaagcagagcagtggttgcctagcaatggggagaaggtgaggaggaggggtgagagtgtgataacagggggatgagaggactttaggaggcaatgagataatcactgtcttgtgtgctaatggcttca

SEQ ID NO: 641979 - DNA, 608 bp, Homo sapiens
tacatgcagtttagcatttgtggaattgttacacagttatacctcaatataaataatacctcaataaagctagtttaaaaataaagtgacaatgacgatgtggtccagtctcaaagcagaaagcaaaacagtacaactaaagaccagtttttaaagtagttcaggctattttcatgtattttctgaactcgacagcatcaactctctaaagcgcccttattctttcttgatccagcttcttccaaattccttcgctgttcccacatccstttattctaaattccttgaaaattttaccttctaccatcagccataagggaatagattctctattttttctaaatcatattaaatccagttccagactccaaatgttggcaagaagttctcaaatcaagtatttttggtattaaccactgcccttttattgtttaaggatctcagggtaccagaagaaaagaaataatagaagatgcctcatcttcattctgtggtcatccttatcactgttgatcgttctgctacacaaggctatttttttaccagttagcattcagtagttctttcattgtgccaggcattaagctaaatgcattttcttactcctc

SEQ ID NO: 641980 - DNA, 497 bp, Homo sapiens
agttcaaactttccttggaaaataagcataagcttgtacacagtgcccagaaatcagagagcagagggtagaagaagcaagaagagcatttgtgtaagaacaacaggagacaaaaaaaaaaaacaagaagaaaatgtaaaacatactacagatgcctatctatcccatcccctcatttctacaactcagagaaaatacagatgaggctttgctaacacaagtcacagaattagctcagaggatgtgttcgcaaagatgtgagccttcaaccrccttaaaaataactgatagcctcactcagtttgaggcagcccagatagatgataaagttttaatttgctaatgatttttatctcctagaagtcaggaaaagaccctgagtttgtgtccaattatagccaacaaggaggaattgattaatataatagaaaccatcagaatcttgtgggaaaatacccatgccaccttaggatttacctatgtctaggaagaaaatc

SEQ ID NO: 641981 - DNA, 579 bp, Homo sapiens
ctcagcttccccaactgcaaaatgaggctgacattacccacctgagtgatttatggcaaatagaaccaacgcatgtaaagtgcttggcattagtgccagatacttagtaaaagttcattcagtcttatctattatcagtcttatcaccagyatctttatcctcagaaatataattattatttcttgtttgttcaccactagcttagaaatcctgtgtgattgggaacagagggctatataatgaagcatcatgctttccagtgaaggagggaagatcataaagtcaggaggcgtgagatcaaatgctcaccctatagcttaagagacgtttgcaggtcgagcctctgaggggcaagtgtgagccaaagtattctcactgtgtgtcagccccaggcccatggctgcacctgcccagagaaagcacccttttcttatatacatcgtaatcttctgtaggtctccatcatcctcataaaaggtgaatgatggtatctacgtaatctatcccaaagggtcattaattcatacattcatgcagtcagttattccaaaactcttgttagggttccagcctcatgg

SEQ ID NO: 641982 - DNA, 594 bp, Homo sapiens
tggagtataaatatgattcatggcataagcaccccaccagaatgggcatctcagcctggacacttcctttacttagcacaatattggccgaaactacatgctaactaatggtagtggttatgacagaggaattcactggctaagagaaaaggagaagacagatagaagatgaagagagagaagagatagaggaagagaaaagagaaagcagagggagagaaaggatcttgtgtgctgagctaaggagtttgcattttatccttactgcattgctgcctctcttcctactatacatgagaatgtgtccctagcacagcatccctcccaccttcatcctcacaacacaatcacctggcatttctaagctgttgrtaaaagaaaagtaataatcagtgataattacatctttcctgcgtcatcaaaacttttaaaattatctgattctcgtggaaatgatagtcctagttgtaaaatagatggaggagaggagagagaaagaagttcaagtgctaagagatgaaaatgggccatgaggagacagtgcctttctggaagttgagtctggcagttaagtgaaggatgaaatccaaaaga

SEQ ID NO: 641983 - DNA, 534 bp, Homo sapiens
aaaatctctgcggcatccccgtatgtgttgttacagttttaacctacgaaccttcctggggatttgaagaaacaatgaacccagaagaatattattgtcagtacactgttccaggactctagatagctgctcagagtacagcgaaattgcaattgattacattctatactttgatcttgatccatcaggatgtcttccaacctaatctgctctgaaacaacaagcagcacatgatttttcagtacgggtcacaatgagatattttaatcaccctcttcatcactgaatcactcttcctggttaggggacctaaactttagtatcataaatgtgaaaaatttaaacacctttgaaattatttagtccagcatttcccaagggactcagggggcatgtasagaagcagaatggacactggtggcattttctgtacaaaagaagcaatggcacttcactgcctggactgattctaacagataaaggcccattttacgtcattgcatctggagacccataggtgaaatgagtctaaag

SEQ ID NO: 641984 - DNA, 527 bp, Homo sapiens
taaaccaaatccttgcattcaaaccgggatcccttaggaaaaacctatgggcactgactcagagcctattagttcttccctaacacagtgattttatacatatatctcattctggttatctgcttccccagcccgtagtggcttggaagtagccaactaataaaagcatgaagacaatgctggagccaggcccacagagagtagtgagcagtaactacttacagcaaacaataaggaaacacagatggggactcacattgtgtgagcctgacaagtgccaggttcggaatttgccccgttaggctattttctcaagtaattctaatgatgtgaggatatascactcctagttttcagttgaaattcatgttcagaggggttaagcatttaagccaatggacataaactggtcagtggagaattcatagcatagcactaaataatgcaggcactagagcagagctgctcaatgctggctatcatttgaagccacctaaagaagttattttttaaagtcctaatgccta

SEQ ID NO: 641985 - DNA, 573 bp, Homo sapiens
cccactttttctccttggagattcacaacctgtcaaggtacacttagaaatcttgagcaccgaggaaatgttcctggaagtggttcgtggaaaggcttacagccttgccttggaaagatcaagctggaaattctggcttcacacacaatctgagaacatctctccttcttttaggttcaaaatacagatttgaaataactgaatctggggctgtaagaatacaaggcgatttagagccgtaaccattaagtctatgaccttacagatcatccagtccaacctcccacggcaggaaatatggaaatccacattactctgagcaatcccagtgacagrtgggtccctgcccagtgcctgtcatttcctctgaggcaatacaagccaatgttagatcgtggaaccagatgactgaagttgcaatgactgtctgaggtttaaacagggcatggagaaacattcactgagagaatataggtcaatatattcaataagcactaggtcacatacgttcacatagctagttatctcaactaattctagcccagttagaaaagactatgctgttatatttag

SEQ ID NO: 641986 - DNA, 562 bp, Homo sapiens
gtcatgatatgttttctttttaaagatagtgtaaaaaacagtactacaggtagcataataccaatttttagaacatatattaatatatctatattcaaaatatttatggtagtatctgggtagtaagattactggtgattttccttttttttttttttacttttattttagtttcaaggatacatgtgcaggtttgttatacagataaattgtgtgtctcgggaggcatcactactcacaatagctaagacatggaatcagcctaaatgcatatcagtggtagactgcttagataaaatgtggtacgtatataccatggaatactacacatccattcaaaagaataagataacgtcctttgaagcaacatggatggagatggaggccattatcctaggtgaactaacgcaggaacagaaaaccaaacactrcatgttctcacttctaagtgggagctaaacattaaatacacatgaacacattttgtttatttattcagcatcattttttgttctgtttcagtttggctcccactcttcatgccagtatatctcaaactgcc

SEQ ID NO: 641987 - DNA, 588 bp, Homo sapiens
tccagatacagcttccttgaataacmgggcataagatttagccagaacatgaagggatcccaggccaatgaagaggaaatgaaatcatgttcagggtgtataactttcaagtgcttttctctgcaagacatcgcctgggttagcagcttttacatctgatatttcatcacatttggcctttactatggaatcttcgggaccatgttgctcatatatttggtcaagtaagaatactattttattccagtaatccagaagatcctcatcctttccctatcagagctatttgtcattagctttaagagagattagattatgacatcatgccccatttcttgcagctggggtgtttttaagcaaatgtgaaaaaaaaaagttgaaatagttgaataagacgagctctttgcaaaaaaaatttgcccaatctccattttttacccacttcctggattcctaattgaagcatttcagttgaaccctaagtccttaaaattgtaatctaggtagacatagtaatccctaccaaagaatgacagggaaggatttttttttaagttcttttatgactagaggttttcccaaagcaaa

SEQ ID NO: 641988 - DNA, 427 bp, Homo sapiens
atatgtgtattccatagttgtaataaaatatagttggttgtctacccactattcattttcctttatttcttcctgaaaggactattattttgtgtggaaggtaatgcagccatataaataaagtctttwtgtccaagcttccattgtagctatggtggcacttgtcttagtttgcattcctgagatatggctgtgagtaaaggtcatgtactgggggagaaattgtagtgaagaatgaagcttacctaaagacaaatctgacctttgccctcagctactgggagacaatctctgaatcactggagtgtactgcctaataagaatgtctttctttgtttggaggctttagccactggacaatcgaacaatgtgatttgtgatggggtctttaggatattctatgtcgatttatacctccagaggcact

SEQ ID NO: 641989 - DNA, 427 bp, Homo sapiens
atatgtgtattccatagttgtaataaaatatagttggttgtctacccactattcattttcctttatttcttcctgaaaggactattattttgtgtggaaggtaatgcagccatataaataaagtctttatgtccaagcttccattgtagctatggtggcacttgtcttagtttgcattcctgagatatggctgtgagtaaaggtcatgtactgggggagaaattgtagtgaagaatgaagcttacctaaagacaaatctgacctttgccctcagctactgggagacaatctctgaatcactggagtgtactgcctaataagaatgtctttctttgtttggaggctttagccactggacaatckaacaatgtgatttgtgatggggtctttaggatattctatgtcgatttatacctccagaggcact

SEQ ID NO: 641990 - DNA, 593 bp, Homo sapiens
atgtcccggctccccacagaggccatagacaaacctgagactgttattcagaaggcagcagagacgacacagggagaaaagcaggcacagcagcaaccaggcaacctcgttcatgagccaaggtaggaaaattggactctatgtactgtcttagtggttggaggtcaagtgtgtgtaactgagatgtatcytagatacaaagtgagtgcagagttttgttctcctacaagggaaatggccagagatggatgaagcgattctcagagtgtgcaaaaaatctccagtagtgggggttgagtacacaaggaaaagttcagacacagagactgaccaaaaatgggaaacagaaattctaggcctaggggacaaaggaaagagggagtcaaagagaattcctctgacattttcctggatactcctttggggataatgctgcaggtttggagggacaaccctcaaaccagggacaaggaaaagcaaaagatgataaagtattcctgtcttatctggctcaaagtcctcattcataagccttcagtgttttggcccaaatttggctcagatgaggattgggtgtgccaagctttaatcct

SEQ ID NO: 641991 - DNA, 593 bp, Homo sapiens
atgtcccggctccccacagaggccatagacaaacctgagactgttattcagaaggcagcagagacgacacagggagaaaagcaggcacagcagcaaccaggcaacctcgttcatgagccaaggtaggaaaattggactctatgtactgtcttagtggttggaggtcaagtgtgtgtaactgagatgtatcctagatacaaagtgagtgcagagttttgttctcctacaagggaaatggccagagatggatgaagcgattctcagagtgtgcaaaaaatctccagtagkgggggttgagtacacaaggaaaagttcagacacagagactgaccaaaaatgggaaacagaaattctaggcctaggggacaaaggaaagagggagtcaaagagaattcctctgacattttcctggatactcctttggggataatgctgcaggtttggagggacaaccctcaaaccagggacaaggaaaagcaaaagatgataaagtattcctgtcttatctggctcaaagtcctcattcataagccttcagtgttttggcccaaatttggctcagatgaggattgggtgtgccaagctttaatcct

SEQ ID NO: 641992 - DNA, 523 bp, Homo sapiens
ggcagttatggcttggagccaggcagttaggttgatgaatgttcactggaaagggctgcccagatgcaccccagatggtgggaaatacctcatctatgggaggccataaaaatccagataaataaaggacacttctgtctatgtggacattgaatgtttggggaagagaaaaggggcaaagaggagggagagctataggtcatgaagtacctgtttattttactgaatcattaattagtactgaaaatctaaaattagtcttgaaattgtctctgccagatgaggcaggaagacataaaaaacaacatgttctctctgtgcactgcctacattatatctttgatcgagctctcaagacatcactcttcttaaattgctcatcaatagattcagacaatcaawtttttttttttattatacagacaatcaatttaaaagcagcctcgtctggctgggaatgtcaaagaatgccttcttactcatttattaataagagatgtttatttctactaacctggctttt

SEQ ID NO: 641993 - DNA, 496 bp, Homo sapiens
tctgttgcccaggctagagtgcagtggcacaatgtcagctcactgcatcctctgcctcctgagttcaagcaattctcctgcctcagccacctgagtagctgggactcctggcacacactaccacacccagctaatttttgtgtgtttagtagagacagggcttcaccgtgttggccatrgttggtcttgaactcctggcctcaagtgatctgcccacctcagtctcccaaagtgctgggattacaggtgtgacccatggtgcccggtcaactgcgtatggttttatgagcaaggtcttatgacctatatcttgtgccaacttcctgtctcatcctgtgacttagaatatctaacctactaggaatgcagtccagtgggtctcagccttattttagccagctcctagtgaagatgaagttgctctggttcaaacacctctgacatatttcccccatcccttttataagagaacccttaatcttaagggttgtagagg

SEQ ID NO: 641994 - DNA, 447 bp, Homo sapiens
gaccagtttgctttgctggcttaaacagagggcttatggggtcctagccccacattctatcctaaggtacccctttttatgacagaatgatacagaaagacaaatttatagcacaaggtatatcagatttgctacagcttaagactagcttcacaaatcttttgtcccattaatcaaatcttcacagagcaggtaaatagcaacttttgccattcattcagtttgcayagagaggggaaagggaagggagaaaagtgttgcctgcagcagagtgggaaaggtgaggagctcagggaggccagagaaagacccacccatcgcagtgacactgtaaagttcaggtggccacttgtcagtctcgaaagatcttttccagcagtcccatcagctctcaagtttccccttttagggagaaaaaagctcttcatgtcccatggtcctgcacat

SEQ ID NO: 641995 - DNA, 577 bp, Homo sapiens
caggttagccttagctgtaccgtaactccttctgcacaaattgtgctttcagctttggtggtaacaaatttaaacattctgcagttttccaatccttattttgtctttttttttccctaaggtggtgacctatagaggttcctctgaattcctcaccttcacatattctgtttcttctaacttgccataacacaatctttctctccaaatcagtgaacatttttgcactcatactatgtttttgagtactgattaaataattatgacccagctactctatgtaatattaagcagggacactatgcaaacattaaaaatgtttatctttatgtgctgacctggaaggctatctttagtggaaaaaaaaaaaccaagtkgccaaatagcatattcagagaaagtctagtcttaccttggtttaaaagaaaaaggaatactccacatacacacaaatattaaagcaaaagaacccaattgtgtgtagataacacatggacatgtgaaaagaaaaagcctacaagataacagcctagagctatcacagaggttatctcatggtccttcttgtgaatccaaa

SEQ ID NO: 641996 - DNA, 577 bp, Homo sapiens
caggttagccttagctgtaccgtaactccttctgcacaaattgtgctttcagctttggtggtaacaaatttaaacattctgcagttttccaatccttattttgtctttttttttccctaaggtggtgacctatagaggttcctctgaattcctcaccttcacatattctgtttcttctaacttgccataacacaatctttctctccaaatcagtgaacatttttgcactcatactatgtttttgagtactgattaaataattatgacccagctactctatgtaatattaagcagggacactatgcaaacattaaaaatgtttatctttatgtgctgacctggaaggctatctttagtggaaaaaaaaaaaccaagtggccaaatagcatattcagagaaagtctagtcttaccttkgtttaaaagaaaaaggaatactccacatacacacaaatattaaagcaaaagaacccaattgtgtgtagataacacatggacatgtgaaaagaaaaagcctacaagataacagcctagagctatcacagaggttatctcatggtccttcttgtgaatccaaa

SEQ ID NO: 641997 - DNA, 569 bp, Homo sapiens
gtttacaatcattgaaaacacagtcaagggcaacacaaaaactctggtaattctatagtgaattgtctcagctttgatcatgttaacttatgtttctctggtgactagtaagatgagactgttttgtgtggctactaaataaatagtaatttatatctgcccttttgcgatttgttcacgaggtttctgagcacatgtttaaaaaacgtgaatgcctctactcagttttcatcttgtttcagttgagcacctgttcctaaggcccaggcaccagttcccaaggctcctacaaacccttaatgcccagctgttggagcttccaggacccatatgcaggagtgggtggttggaaaygggatgactgggtccttggggctccctgctcaccttcctcatctgctcgagcttgtcttcatccttgaggaaggtcaagtacatgaaagacacgtccacaacacagttgcccccaaagtgcctgtgctcctcgatggtgtctctctctccagaaaatgcatgcttactgatctgcaccagaagagaacacagaaccactcatgagtcctgctcat

SEQ ID NO: 641998 - DNA, 569 bp, Homo sapiens
gtttacaatcattgaaaacacagtcaagggcaacacaaaaactctggtaattctatagtgaattgtctcagctttgatcatgttaacttatgtttctctggtgactagtaagatgagactgttttgtgtggctactaaataaatagtaatttatatctgcccttttgcgatttgttcacgaggtttctgagcacatgtttaaaaaacgtgaatgcctctactcagttttcatcttgtttcagttgagcacctgttcctaaggcccaggcaccagttcccaaggctcctacaaacccttaatgcccagctgttggagcttccaggacccatatgcaggagtgggtggttggaaatgggatractgggtccttggggctccctgctcaccttcctcatctgctcgagcttgtcttcatccttgaggaaggtcaagtacatgaaagacacgtccacaacacagttgcccccaaagtgcctgtgctcctcgatggtgtctctctctccagaaaatgcatgcttactgatctgcaccagaagagaacacagaaccactcatgagtcctgctcat

SEQ ID NO: 641999 - DNA, 572 bp, Homo sapiens
ttcagaaaagactggtactttaaaacagtttggggaaaatcgtggatatcagcctaacagtcctgattccccggattttgctgaaccctctagcagaagctggccttttctttttgaaggaaaagagttgccatcccttgccagctttccaagcaataacttcaatctaaggcagctgccttgtaaaatggcacttgttgatgttgagatatgctgtgccctctctcattacttataggttaataaccatagtcagttttcatcaccacccaaatggataaatagtccaactctaagaggaaataaaytacatacaaaacgttttggagtacatggaaaatatgtgatcacaagaaagtaaatcttgaagatgctggaccaaggtacatggaatataatatcagtggaaaatttatggacaggattcaatattttgacaaatacacctgaaagtgatgctaatagtctattagaaagggcgccatgaaatcaacctagtgatcaatcaatggtagactggatcaagaaaatgtggtatacatctaccactgaatactatgcagccataaaaa

SEQ ID NO: 642000 - DNA, 580 bp, Homo sapiens
tggtactttaaaacagtttggggaaaatcgtggatatcagcctaacagtcctgattccccggattttgctgaaccctctagcagaagctggccttttctttttgaaggaaaagagttgccatcccttgccagctttccaagcaataacttcaatctaaggcagctgccttgtaaaatggcacttgttgatgttgagatatgctgtgccctctctcattacttataggttaataaccatagtcagttttcatcaccacccaaatggataaatagtccaactctaagaggaaataaattacatacaaaacgttttggagtacatggaaaatatgtgatcacaagaaagtaaatcttgaagatgctggaccaaggtacatggaatataatatcagtggaaaatttatggacaggattcaatattttgacaaatacacctgaaagtgatgctaatagtctattagaaagggcgccatgaaatcaacctagtgatcaatcaatgktagactggatcaagaaaatgtggtatacatctaccactgaatactatgcagccataaaaatgaatgccatttgcagccat

SEQ ID NO: 642001 - DNA, 558 bp, Homo sapiens
gtcaatcataaagacaagtttcattagctacctcttgggatggctacccaggctgcagtttttccctcttctttgctaaaggcccctcctcccaaacacaggggtgatcccctggccatctgtggccatgtctagtctgtgttaaaatgcccctggaaacaattggtgcttgatccagcggtgggcttctgaactaagctgcactaatccaattccttgccccaaattgtgaaacgtagaaccaaggktcatacagacagggattattgtacatgggacatgttaacaatggcaacttcagttgttccatgagaacctccaggatcacttggggagtggggagacaagtccaagagttatttctattgcttgtaaccaaaagaacatttctaagacacaagtgcacagatgactaaacatagttgagttggtgtacttcttagagtaaggatctgctgggaattccaagaagagaactccccctttccgttggagatcaggggcaggtgcctggaggaggtggtcatatcctgggtagggtttggacttgtcaagaca

SEQ ID NO: 642002 - DNA, 558 bp, Homo sapiens
gtcaatcataaagacaagtttcattagctacctcttgggatggctacccaggctgcagtttttccctcttctttgctaaaggcccctcctcccaaacacaggggtgatcccctggccatctgtggccatgtctagtctgtgttaaaatgcccctggaaacaattggtgcttgatccagcggtgggcttctgaactaagctgcactaatccaattccttgccccaaattgtgaaacgtagaaccaaggttcatacagacagggattattgtacatgggacatgttaacaatggcaacttcagttgttccatgagaacctccaggatcacttggggagtggggagacaagtccaagagttatttctattgcttgtaaccaaaagaacatttctaagacacaagtgcacagatgactaaacatagttgagttggtgtacttcttagagtaaggatctgctrggaattccaagaagagaactccccctttccgttggagatcaggggcaggtgcctggaggaggtggtcatatcctgggtagggtttggacttgtcaagaca

SEQ ID NO: 642003 - DNA, 560 bp, Homo sapiens
gtatatacttagttattgtttttaaagctatgtaagaattaaaaagaaagtgagatttcagaagctgtaattaaactcctaatcgattcagcactctgctagtagsagaattggagtgacagaactattgatttcttcaagccctgcgtgtttgtgcctaccagtgtctgtgtttgtggatatgaatccatctgggtgcctgtctatattatctggatgcctgtatctgtctgtgtgtctgtatatccctatttgcgcaaatagatgactgtatatgtgtttacaggacttacctcatataaactggatgattaaaaactggaggtggaggagcttgagcatgggtacacttagtgaatcatttccaaagaaaagagtatagaaaagggagaaataaagaaactttacagtggagaaacctggcagtcgctattttaaccaagtgatcaagtttaacctcaccaaggataaggcatgttgctagcatgtacccctgaaaggatatgataagaagtgcacttcatcttgtagcattcttcccctaggacacgtagcctcag

SEQ ID NO: 642004 - DNA, 629 bp, Homo sapiens
caaacctgcacatcctgcatgtgtatcccagcactttaaaataaaatgaaataaaataataaagtagatgagcagagagagggatgaggcagccttaacataggcagatggggaggaccatttgcccaagcaacaacttggggctgctatgggcaaaggaagatgaagggaaactgtgagcccctgaaccctgcctacagctcgggagaggagagtgggcaagaatcatgagccgccaagatataattgctgctttcaggccaaagccacacagagctgtccagctgcaggagttgcctttcayggtaacagtcctagaaatgaggacagacaaggtgccagtggggaaaagcagaatctggtttactttaagaatgagcttaagccaggtgtgatgtctcatgcctgtaatcccaacactttgggaggtggaggtgggaggatcccttgaaactaggagtttgagaccaacctgagcaacatagcgatacccccatctctacaataataattattattattaataataattagctgagcatggtggctcttccctgtggtcccagctactcaggatactcaagaggctgaggcaggaggatcacttgagcccaggaggtcaaggctgc

SEQ ID NO: 642005 - DNA, 494 bp, Homo sapiens
gttgggcaagtaactagatcccacaaaaagtatgataataaagattttgaaatacttgaagctgatgtcattagaaccagagaaacttctcatwcaaggcatttttgcaaatgttcctgtcttccactaagcaatgctctggttgggtagagcttagacccttagaaaccattgccccaattctcagagcctggcctgaatgtaaaggcaaacagtgctctggtgagttgtgggtatatattctcaagcccttgagaagtgtctgtccccacatgacaccaggaaccaacatagaatattctcaaccagttcaacaaggtttaaaacattaagcagtatctctcaggcaatccctggtcaacttaattcaatgaaacactattgacactgacaatgttccaggccttgttctggtgatccctgcccccaggaagcttacatagtcgagcagaagagacagacataagaaagatagcccaacttcactctcatcc

SEQ ID NO: 642006 - DNA, 494 bp, Homo sapiens
gttgggcaagtaactagatcccacaaaaagtatgataataaagattttgaaatacttgaagctgatgtcattagaaccagagaaacttctcattcaaggcatttttgcaaatgttcctgtcttccactaagcaatgctctggttgggtagagcttagacccttagaaaccattgccccaattctcagagcctggcctgaatgtaaaggcaaacagtgctctggtgagttgtgggtatatattctcaagcccttgagaagtgtctgtccccacatgacaccaggaacmaacatagaatattctcaaccagttcaacaaggtttaaaacattaagcagtatctctcaggcaatccctggtcaacttaattcaatgaaacactattgacactgacaatgttccaggccttgttctggtgatccctgcccccaggaagcttacatagtcgagcagaagagacagacataagaaagatagcccaacttcactctcatcc

SEQ ID NO: 642007 - DNA, 616 bp, Homo sapiens
tctgtccccacatgacaccaggaaccaacatagaatattctcaaccagttcaacaaggtttaaaacattaagcagtatctctcaggcaatccctggtcaacttaattcaatgaaacactattgacactgacaatgttccaggccttgttctggtgatccctgcccccaggaagcttacatagtcgagcagaagagacagacataagaaagatagcccaacttcastctcatcccatcatgatgggtcatgaggctcgctcaagtgcatctaagagtccccagagttcatctaacatatgttcccccaccaccccccaaaagactggttcagcaactacaaggtggaactgaatgattctgacaccctttcttccttagcagccttacactgggcatgatcctagctgccatgccctgccatgtccacccagcatggctgccattccttccagtgaatgtcatgctctctggactccacaggacatctcagactgttacattcatcacttcttctcttactgctacctctcttaggtaccagggtaccaccaccaggcatgccactgggtcttctaggcatggtgaagactcctgttggttaccactgctcccacca

SEQ ID NO: 642008 - DNA, 616 bp, Homo sapiens
tctgtccccacatgacaccaggaaccaacatagaatattctcaaccagttcaacaaggtttaaaacattaagcagtatctctcaggcaatccctggtcaacttaattcaatgaaacactattgacactgacaatgttccaggccttgttctggtgatccctgcccccaggaagcttacatagtcgagcagaagagacagacataagaaagatagcccaacttcactctcatcccatcatgatgggtcatgaggctcgctcaagtgcatctaagrgtccccagagttcatctaacatatgttcccccaccaccccccaaaagactggttcagcaactacaaggtggaactgaatgattctgacaccctttcttccttagcagccttacactgggcatgatcctagctgccatgccctgccatgtccacccagcatggctgccattccttccagtgaatgtcatgctctctggactccacaggacatctcagactgttacattcatcacttcttctcttactgctacctctcttaggtaccagggtaccaccaccaggcatgccactgggtcttctaggcatggtgaagactcctgttggttaccactgctcccacca

SEQ ID NO: 642009 - DNA, 536 bp, Homo sapiens
cacatcttaactggtggcaggcattataaaatcatcagatctcrtgagacttattcactaccatgagaacagtatgggggaaaccacccccatgattcaattacctcccacctggtccctcccacaacacatgggaattatgggagccataattcgagatgagatttgggtggggacacagccaaaccatatcatattatcttatgagacgaagaagaaagaagcaataaggtggcatctgaagaacatgagaaaggagaacccaaaatagcctctgggtatttactggaaagcatagtatgggaatttgagaacagtggctgaaactagaaggagatttgcctttccaatatagctgagtatagggtgttttatgaactctcaaaactgacccaccaggaatctctaccacaacaaagcaccacattaaggagaaactcctgagagtggaatccaaattcagtgggacagggacaacagaggcacaggaacgagatgttcagatcaatgtgagggaagaaagcagagataggaac

SEQ ID NO: 642010 - DNA, 556 bp, Homo sapiens
ctgagtatagggtgttttatgaactctcaaaactgacccaccaggaatctctaccacaacaaagcaccacattaaggagaaactcctgagagtggaatccaaattcagtgggacagggacaacagaggcacaggaacgagatgttcagatcaatgtgagggaagaaagcagagataggaacactcagagagcaggtcatcawatttttggaccctatactaaaacaaaagaaggtggagttctataaagttagaataggtttcctgaaccctgccttcttctaaaggttcatgaaaactaatttcacttaaaagtgagcaacagaaagttattgtagtctcatcccatatatagttattttaaaaagagaataaagagcagaataatatctctacaatgagaaaatgccagaaaaaaaatgtactcttaaaacagataagactataacaaaataagcttaaaattttaaggaaattataaaaaacaggaacaagaagcataaattatcagaaaggaaatgtcccaactcaggaaggaattagaaataaagagggga

SEQ ID NO: 642011 - DNA, 556 bp, Homo sapiens
ctgagtatagggtgttttatgaactctcaaaactgacccaccaggaatctctaccacaacaaagcaccacattaaggagaaactcctgagagtggaatccaaattcagtgggacagggacaacagaggcacaggaacgagatgttcagatcaatgtgagggaagaaagcagagataggaacactcagagagcaggtcatcatatttttggaccctatactaaaacaaaagaaggtggagttctataaagttagaataggtttcctgaaccctgccttcttctaaaggttcatgaaaactaatttcacttaaaagtgagcaacagaaagttattgtagtctcatcccatatatagttattttaaaaagagaataaagarcagaataatatctctacaatgagaaaatgccagaaaaaaaatgtactcttaaaacagataagactataacaaaataagcttaaaattttaaggaaattataaaaaacaggaacaagaagcataaattatcagaaaggaaatgtcccaactcaggaaggaattagaaataaagagggga

SEQ ID NO: 642012 - DNA, 606 bp, Homo sapiens
catgccttgcctcctaataatttgattcctaaatcgttttcatgtaatttaatttcttgtgaccttaagacttctgaagaggttgcaagtgggagagagagagggttcaggcyccaggaccagccacatcaaacctgtacctgccttaccacatcttccagctgtgtggaggcacctctggtggccccaagtgtctccttcttcagacaggatgttctccagcccctctcccctcgttatccgggcttccccttcttctcagtatgtgcctttcccaccctccctcattgcccaactcaggacaacaagtacttcccaaggatcagctctatgctcagttttctccttgatgctctgggcaaaagagaagacatccaagggtagaatgacaccttctaggttgtcaccttctatgacatcttctatgttactagcacacccattcgattctttgtttcatggtcagcctcagcattagacttcagctcattagggactgggatatgcctgattcttcagtgtcccagggcccagttccattaatatttgctgagtgaacatgacatccccaataccttatgctcggcatcctccccagaaaattgc

SEQ ID NO: 642013 - DNA, 553 bp, Homo sapiens
gagtaatttgtggcatgggcatggattatggcactgccaacactttatcacatccatttctccaggcagtggccctctctcaattggtagaagggtttgagggcaaagaagagatttgactactctaacaaattatttttaatgtagcatagttccaagmacactatgaaagaaactatctcttgagtaccttctgcatagcaggcacttatcaagaacttgcacatacaatatctaactagtattcagtaaaatgctatttattaccctcatcttacagaggaggagaaactgaggctcaaagaggtttctgacagtgccagatttcagtccagtgcctgactccaaagtctgtgctctcaccacctctgcagtttgtccagcaccctaatggaacttgttgttatttcggtttcagaaagccaaggaacatgaatttagctccaggtaactgttttcactcttatgagccaatgtgtacatctgacagctgccttctcttcaatgactcagagccccatcttgttaactgtcaaactccagcattgtagat

SEQ ID NO: 642014 - DNA, 567 bp, Homo sapiens
aagtggtgctaggatttgattctggcaatakctattaccaaagcctttgtgctgaagtcatatgctatatacaaaggtaatgtctaggtcctcccacctaatgtgatgatgattattattattacgatagaaaacacttgtgcaacattaaccaggtgccatggacttgttttatattattctcagtatagatattaacatttactactacatacccattttacagagaagaaacagaggaaactcattttacagatacaacaatggagctgaagtagcaagaaaatggcagaccttggattcaaaccaaggtcttctgagtccttatacaaagcttccatttttagaaataaggtatatatatatatatatatatatttcactgagttgtgcagattgttcagatattggcaactttcattatatgatatcaacagacaacttttgttaatatcattatgatctcatctgaaaagtttttaaatattgggaaactatcaagcttgaaagcataaattttgtcattggcaacaaatactgtcagctgtttcccttgaagagacggac

SEQ ID NO: 642015 - DNA, 567 bp, Homo sapiens
aagtggtgctaggatttgattctggcaatagctattaccaaagcctttgtgctgaagtcatatgctatatacaaaggtaatgtctaggtcctcccacctaatgtgatgatgattattattattacgatagaaaacacttgtgcaacattaaccaggtgccatggacttgttttatattattctcagtatagatattaacatttactactacatacccattttacagagaagaaacagaggaaactcattttacagatacaacaatggagctgaagtagcaagaaaatggcagaccttggattcaaaccaaggtcttctgagtccttatayaaagcttccatttttagaaataaggtatatatatatatatatatatatttcactgagttgtgcagattgttcagatattggcaactttcattatatgatatcaacagacaacttttgttaatatcattatgatctcatctgaaaagtttttaaatattgggaaactatcaagcttgaaagcataaattttgtcattggcaacaaatactgtcagctgtttcccttgaagagacggac

SEQ ID NO: 642016 - DNA, 567 bp, Homo sapiens
aagtggtgctaggatttgattctggcaatagctattaccaaagcctttgtgctgaagtcatatgctatatacaaaggtaatgtctaggtcctcccacctaatgtgatgatgattattattattacgatagaaaacacttgtgcaacattaaccaggtgccatggacttgttttatattattctcagtatagatattaacatttactactacatacccattttacagagaagaaacagaggaaactcattttacagatacaacaatggagctgaagtagcaagaaaatggcagaccttggattcaaaccaaggtcttctgagtccttatacaaagcttccatttttagaaataaggtatatatatatatatatatatatttcactgagttgtgcagattgttcagatattggcaactttcattatatgatatcaacaracaacttttgttaatatcattatgatctcatctgaaaagtttttaaatattgggaaactatcaagcttgaaagcataaattttgtcattggcaacaaatactgtcagctgtttcccttgaagagacggac

SEQ ID NO: 642017 - DNA, 593 bp, Homo sapiens
gcaaaagtaatccaactggaaagctacattatgccaaacacaaaaattaacagaaaatgcatgatagacctaagtataagarctaacactatacaactcttcgaagtaaacataggtgtaaatctttataatcttgggttagacaatggtttcttggctataatacctaaagcacaagtgacaaaagaacaaatagataaattggacttcaccaaaattaaaaacttttgtgcttcaaagatcaccaataagaaagtgaaaaggcaactcatggaataggcaaaaatattttcaagtcacatgtctgataaggggttgatatcagatacaataaattcttataattaaacaataaaaacacaacccagttaatagctggacaaaggatttgaatagatatctctccaaaggaggcatagaaatggtaaaaaggtatgtaaaagatgctcaacatcatgagtcattagggaatggaaatcaaaattgcaatgaggtaccacttcattctggtgggatggtatggtgggatggtgggatggtaaaatagtacagctggtgggatggtaaaattgctggtgggatggtaaaatagt

SEQ ID NO: 642018 - DNA, 593 bp, Homo sapiens
gcaaaagtaatccaactggaaagctacattatgccaaacacaaaaattaacagaaaatgcatgatagacctaagtataagagctaacactatacaactcttcgaagtaaacataggtgtaaatctttataatcttgggttagacaatggtttcttggctataatacctaaagcacaagtgacaaaagaacaaatagataaattggacttcaccaaaattaaaaacttttgtgcttcaaagatcaccaataagaaagtgaaaaggcaactcatggaataggcaaaaatattttcaagtcacatgtctgataaggggttgatatcagatacaataaattcttataattaaacaataaaaacacaacccagttaatagctggacaaaggatttgaatagatatctctccaaaggaggcatagaaatggtmaaaaggtatgtaaaagatgctcaacatcatgagtcattagggaatggaaatcaaaattgcaatgaggtaccacttcattctggtgggatggtatggtgggatggtgggatggtaaaatagtacagctggtgggatggtaaaattgctggtgggatggtaaaatagt

SEQ ID NO: 642019 - DNA, 596 bp, Homo sapiens
tcggacgacccacagctccatcatgtcttatctctggctatattaaacctcagaataattactgtcccttcaacgctatctttttgtaacacccacaaactcatagtgtggaaagatggtgttacacataaaggaaactttattaacaagcaaaagaaaaggaggaagaaaaggaagttggacactgaatggaaaactcragccaaagatttgcagggtcttttttttttttaataatattcagaaaggtggaacctttgaaagggaaagtttaaatgaggaaagaaggggtgacgtcaagccctggatgagatttacagttaaagcccatagcaggtgggagaatgacctgtcctgcctctccaggctgtgcagtttagggcaggcaggagacatgactcagtctcaactgatgagaccctctcaaagtccaactgattttaacagagatttggagtgtagactgggaacttggccatatctatgttctgggtaagaagtcataacagggaccctgaggcaaagaatcctattctggaactcagaacagggaagaattgaaggagcctttcctcagctcagtggctccatttgaa

SEQ ID NO: 642020 - DNA, 617 bp, Homo sapiens
atttcaaaaacaacagttcaaaagggaataaaaggaaaatgcaacaaacagaagaaaataaactttcttgcttaataacaatattccacgccctttgaatttttttgcttggggtaaggagggctgggagcagaaagtgtgtaagtctaattttctaatataagttgtagaaaagaataagaagtgaagatcaaagaatgagggaatcgagagcctattcaaaggcgttgagacacaaatgacactacataagcttccgacgtaagatccttcatgagaggacttgccctcggacgacccacagctccatcatgtcttatctctggctatattaaacctcagaataattactgtcccttcaacgctatctttttgtaacacccacaaactcatagtgtggaaagatggtgttacacataaaggaaactttattaacaagcaaaagaaaaggaggaagaaaaggaagttggacactgaatggaaaactcaagccaaagatttgcagggtcttttttttttttaataatattcagaaaggtggaacctttgaaagggaaagtttaaatgaggaargaaggggtgacgtcaagccctggatgagatttacagttaaagcc

SEQ ID NO: 642021 - DNA, 601 bp, Homo sapiens
ttggctgctctctgtgactagccatcaaaagacaatgggcttggtctcctccccaaagaccagtccacaagagtaaaggtggcggggtggacactcacacacttgatctatggcctttgccttcctcctaaatgtctatcccttgagcttgggacattcaactgtcattccagggctctcccaaaccagatacaaattttaaartttctttatcaattaaaatgtcttatttctcttgttatttaatggtattttccaacatttaagtggctctcctcttattgcctgctatttccttaatgatagaacctgctgaggcctgaaattataaaattgcaagatcaaaaagttcagttaaacagccacatggtcttggcaaggataacagagagctcatttaatccaagcccaagatgcacgtatccattattatttactgattggaagacattttgaaccttgtatatattttaaattttagtatagagaagagattggtagtggtaaattcataaaataaaatactataaataaatttgaaaagtttgtcatctaagtatatctcaacatattgttggagtaagaaaaagaaagtgataaa

SEQ ID NO: 642022 - DNA, 631 bp, Homo sapiens
acgcccccaaaattcatgttgaactcctaaccacccccccgcctcagtacctcataatgggaccttatctggaaaaagggttattgcagaaatagttagttaaaatgaggtcatattggagtaggatgggcccttaatgcagtatgactagtgtcctttttataagaggagatttggacatagagacacatgcacagggagaagaccatgtgaagctggagttatgcygcccggagtcaaagaactaccagaagctagagagaggcctggagcccatccgtctctagtgccttcagagggagcacagccctgcccacccttgatctgtgacttccagcctccagaactgcatgacaatgaatttctgttacttaagccacttggcttatggtacttagctatggcaaccccaggaaactaaaacacatgggaaagatacacatgaacttcaagacaatgtctacccctggagaggtaggaaagggaacaggattgaagaggagcatatgagacctttatttcattaataataaaataaaagacctgcagtatatatgggaaaatgttgctagttgctaaattaggtagtagacatacgggtgtttgttatattattctctatactttttaa

SEQ ID NO: 642023 - DNA, 631 bp, Homo sapiens
acgcccccaaaattcatgttgaactcctaaccacccccccgcctcagtacctcataatgggaccttatctggaaaaagggttattgcagaaatagttagttaaaatgaggtcatattggagtaggatgggcccttaatgcagtatgactagtgtcctttttataagaggagatttggacatagagacacatgcacagggagaagaccatgtgaagctggagttatgccgcccggagtcaaagaactaccagaagctagagagaggcctggagcccatccgtctctagtgccttcagagggagcacagccctgcccacccttgatctgwgacttccagcctccagaactgcatgacaatgaatttctgttacttaagccacttggcttatggtacttagctatggcaaccccaggaaactaaaacacatgggaaagatacacatgaacttcaagacaatgtctacccctggagaggtaggaaagggaacaggattgaagaggagcatatgagacctttatttcattaataataaaataaaagacctgcagtatatatgggaaaatgttgctagttgctaaattaggtagtagacatacgggtgtttgttatattattctctatactttttaa

SEQ ID NO: 642024 - DNA, 516 bp, Homo sapiens
cacccccccgcctcagtacctcataatgggaccttatctggaaaaagggttattgcagaaatagttagttaaaatgaggtcatattggagtaggatgggcccttaatgcagtatgactagtgtcctttttataagaggagatttggacatagagacacatgcacagggagaagaccatgtgaagctggagttatgccgcccggagtcaaagaactaccagaagctagagagaggcctggagcccatccgtctctagtgccttcagagggagcacagccctgcccacccttgatctgtgacttccagcctccagaactgcatgamaatgaatttctgttacttaagccacttggcttatggtacttagctatggcaaccccaggaaactaaaacacatgggaaagatacacatgaacttcaagacaatgtctacccctggagaggtaggaaagggaacaggattgaagaggagcatatgagacctttatttcattaataataaaataaaagacctgc

SEQ ID NO: 642025 - DNA, 556 bp, Homo sapiens
tttttgatgtcataagacagaatacaggtatgggggtcatctagatctggatgtaaatctcagtcagccacttactatttaacctgaggctattatttaatatctctgtactttatctatgaaatgagaataacatcaagctcacatggttgttgtaagaattagaaataatatatgggatgtgtctaacacagagcctagtaccttgaaggtacaaaacaaratgcaacttattattgttttgttattcctatatttaaaatagttattgtgttatattgaggtaatagagattataatagacctgggggacaaataaatggaagaataggaaactttccctgcctttgagacatgcacatctagtcctggagccagatgcataaacacatgatgatgggatgagaaaggttttgtgaatgaggtaagggcaagctgctctgggagcacctcttatggtttactattagttagcttaaatataattatatataggagctacaaattaatatagagtctaaagatattgggtgcctgtggcatccaccagtggctc

SEQ ID NO: 642026 - DNA, 556 bp, Homo sapiens
tttttgatgtcataagacagaatacaggtatgggggtcatctagatctggatgtaaatctcagtcagccacttactatttaacctgaggctattatttaatatctctgtactttatctatgaaatgagaataacatcaagctcacatggttgttgtaagaattagaaataatatatgggatgtgtctaacacagagcctagtaccttgaaggtacaaaacaagatgcaacttattattgttttgttattcctatatttaaaatagttattgtgttatattgaggtaatagagattataatagacctgggggacaaataaatggaagaataggaaactttccctgcctttgagacatgcacatctagtcctggagccagatgcrtaaacacatgatgatgggatgagaaaggttttgtgaatgaggtaagggcaagctgctctgggagcacctcttatggtttactattagttagcttaaatataattatatataggagctacaaattaatatagagtctaaagatattgggtgcctgtggcatccaccagtggctc

SEQ ID NO: 642027 - DNA, 553 bp, Homo sapiens
atgggatgagaaaggttttgtgaatgaggtaagggcaagctgctctgggagcacctcttatggtttactattagttagcttaaatataattatatataggagctacaaattaatatagagtctaaagatattgggtgcctgtggcatccaccagtggctcacaaaggttaggccctaagccaggaatctctgggccaaaggtggaaattaggtttcctttcatgcatcaactctgataattgatagtgtgttcttgcatgrctttgttagtgaaaattctgagcagagaagtttgctcacattgtagaagcagcatatccaagagactgagaacttggcttgtggagccacactgctctgttgcttgcttgatcctggacaagttcctcaacttccttgtcctttaagtgtcttcatgtgtatgcctggttctgatccaggtttttttctgccatattctgagttttagctttagtttttgtgtgctggttttcagttctttctataccccatactagctgctgttatattttggcctttgctagtttataac

SEQ ID NO: 642028 - DNA, 648 bp, Homo sapiens
tgctagaacttattgttttcagcacttggttctagcacaagttaagatacagaactttgaagaatattgagaaagatgggaaaattagcgggaaaatggggtagagctctcagaaaagaaattagcaattaaaaatcaagtgcactcagggacttaggatctaatccacttgtatacttttgtgcaggtgtgagaatcaggctggactgatttaggttcacgtaatggaggtgaggaagatcagaactgcagagcaggcatggcaggatatctggcctagtgggaacagtggaactggacctcagggaggggacaagtagagctagcaggctgaagcagacaagtaagcctatcaaaatactggagtgcaagacagggctcccacctttctgggtcctagttcctcaaaaggtatcccagagagagtaaaataggcagrtggcagcttggcctccccttggacaatttatcttgcagaagggcaaggtgcctggagcttccattttccaataataagacagagatgaggtaccctgactgacacacattgaaaacaatggaaaacagtgaataagttatatacaacatcttattaaagactttaatgagctggcaagagaataaaaaaccatgaaccaagcaaaactg

SEQ ID NO: 642029 - DNA, 607 bp, Homo sapiens
ccacccttcccaccttcccctcgcatgcgttggcgcgaagcccagcagaggagaaggcgagaaggggagagcaggtctacagcaaggtgcgtccacgcctggtttaggcataaatcagggcagaagtgtctgtttgtgtgcacgggcgcgtgtggcttctccctggccttcaacaaaacagaaccaaaattcatcctttctctccacccttcccctaggacacctttttccgctctatcaagccattcactcactgcaatgtgtctcttgagattcacagcagcccttcctgcaaatgaagggaacagaggctcaggcagctgaagtaacgtgcctaaggtcacatggcagttgtggcagaggcaggactggaacctagatctgtgctggtgcagtagtaacgtcatccttcctttacagagaggcggcatgggtttccggaagttctcccccttcctggctctcagtatcttggtcctgtaccaggcgggcagcctccaggcggcgccattcaggtgagacagcctggagccagaggcgccttctgctcccactgcccctaggaccagacagctctgtgcctytgaagtcacgcgtggctcctggt

SEQ ID NO: 642030 - DNA, 501 bp, Homo sapiens
ccactgaccctctcacctctcctaatggagtgtgtgtgagctgccctcctgcctgccccacctgctcccactcgacatgtcccctgcctggtccaaccttctgagtgactgcccatggggacagtccctagtgcatggtactgtctggcatgtccttcccttgcagcttgagcagtcctagatttaagtagcrtatagtaatctgagtacctgcttgcagggcacatacttgcagtacctgaaaaactttcatatgttccctggcatcaacttcgggcctgaaattcctggcaagaatagggacatagtcaacagcttgcagagggaccactacccgactccagggtcccccagatggcagctgaacttctctcaactctcctgattccccttcttgctccactttatgaacctgatgcatgtggattcctctctgatttgtcttcatgctggtattggtatttttgcttatgacagagaatgttttgaagacctcaggat

SEQ ID NO: 642031 - DNA, 573 bp, Homo sapiens
atcagttgccactgttgttatgtctgtatatcatctatatcccttcctccagtgtattatcatgtcaatatatccataagtaaatatttcatcaygtatttccaaatgggaagggcttttaaaatataatcacaatttcatttaacaactaaaataaatttacaataattttaaaattctttaatattacacatcagccatggttcaaattctctatgtatcatgtaatataaatgataagatggagaatttacatatatttatatatatgtgaaaccagggctcaaattgaatcttcacattgctgctggttaataataagttttaatttaaggctcttacaaattagaggttcctccctcatctattttcccccttgctgtttatttgttggagagactaagttatttatccaataaagagttctacattctgcatccctgtggtgaggtttaacagttaagtcctgtgaatcagcaatcggatctagagtgagtgattgggaaaagaaataggggatgaggccagagagtagatgaaggcgaagacagatcgtgtagtactttgtagggc

SEQ ID NO: 642032 - DNA, 587 bp, Homo sapiens
atttatccaataaagagttctacattctgcatccctgtggtgaggtttaacagttaagtcctgtgaatcagcaatcggatctagagtgagtgattgggaaaagaaataggggatgaggccagagagtagatgaaggcgaagacagatcgtgtagtactttgtagggcataggaaacactggctttttattagtcaatctctagtcaggaaaacaggaactacctgagtaattttaacagaaataatttwaaaaaggagttggctaaatcagtattagtgtagtgacaaagcgaaagaaaagggtagttcagagatagaaaccataggaagaggccaccatcctcggggctatgggaataaagagaagaagggaggtaagtaggatctagagcctgcaggaggattctcagaccacaaagatgggaagctggcagatgctggtatctctgagggggtatctcttgtatctctgaggctattctagaagtagggaaaaacaaaacaaaagttaaaactggaaacaacctcactgacagggtagagcatctctgtgggtgatgccagcagaaatagaagtcgaaattgga

SEQ ID NO: 642033 - DNA, 587 bp, Homo sapiens
atttatccaataaagagttctacattctgcatccctgtggtgaggtttaacagttaagtcctgtgaatcagcaatcggatctagagtgagtgattgggaaaagaaataggggatgaggccagagagtagatgaaggcgaagacagatcgtgtagtactttgtagggcataggaaacactggctttttattagtcaatctctagtcaggaaaacaggaactacctgagtaattttaacagaaataattttaaaaaggagttggctaaatcagtattagtgtagtgacaaagygaaagaaaagggtagttcagagatagaaaccataggaagaggccaccatcctcggggctatgggaataaagagaagaagggaggtaagtaggatctagagcctgcaggaggattctcagaccacaaagatgggaagctggcagatgctggtatctctgagggggtatctcttgtatctctgaggctattctagaagtagggaaaaacaaaacaaaagttaaaactggaaacaacctcactgacagggtagagcatctctgtgggtgatgccagcagaaatagaagtcgaaattgga

SEQ ID NO: 642034 - DNA, 592 bp, Homo sapiens
agattcactcagaagacacatgtggagaaggtgacatgacagaggcaaggaggcacaagccaaggaagtctgtgtctaccagaagccagaatcacagaacagtctctggaagaagagcagccctgctgacacctagagtttggacttccagcttccagaactgtgagagaataatttctgttgttttaagccacaaagtttgtggtaatttgttatgacagccctaggaaactaatacaatacattttcatttattttgggtaaatgccttggagtgggattgctgggttatttggaaagtgtgtatttaactctgtaagaaactgccaaactattttctgaagtgactgtaccacttcgccttcttgccagccacatatgagagctctagtatttccacaaataggtatgtagcagtayctcattgctgttttaatttgtatttccccaatgactaatgacgttgagcatctattttaccatatgtttatcacctttattgaagggtctgtttaaatcttctgctaaatttttgttggcttgcttgctttattagtgttgagtttttagagctctttatatgttgtggatg

SEQ ID NO: 642035 - DNA, 609 bp, Homo sapiens
tgttatttcaccatttaattgcccctgcacctttgtcaaaaagcaactgatcatatttgtgtgggtatatttctgggttctcaattctgtctcattgattgatttgaccattcttttgccaatgtcatactgccttgattagtgtagtgttaaagtgaatctcaaaaccagrtaatgtgggtctaccaacattgttcattcttgttcaaaaagattttagctacatctaaaatattttctacatcttttatacattttagaatcagtgtgttactatctacaaaatttctgatgagatttttaatgggattgtgttaaatcagtgggttaattttgggagaattagcatattaataatattaagtcgttcaattcatgaacacaatacatgttttcacttatttaggttttctctgtttttttttttttaacagtgttctcagttttcaacagaaatattctacacatatcttgttagatttttaactattttattttttggtgctaatgtaaatggtacttaaacatttttgtttttaattgttcattgctagtagatagaaatacaatatttaaaatattaacattgtattctgtgaccttgctaaa

SEQ ID NO: 642036 - DNA, 509 bp, Homo sapiens
aggctcaggttcatgctgtgtactctctggctttgcaccacagagagctcctggaaaattttgtgaagaagagagatttagatctaagcttggaaggattggcagaattttaatacacagatttacagagaaaacatttgctgggagcaaggatcacggcacagttcagggtgytctggcttagcccaggtggacagggcctggagagagtggtaggtctgcagccctagggatgggttggagccagactgagaagggccgaacagatggacagtggcccagagataatgaggaaccacagaaaggttccatgggggtttcatgaaagtgtcatgattataaactgtcattaggaaaattaactcagaagccacacggagaatggattagggagggaggggttctcttcagcatccaccaactcatccacaagatataatcctttttcggcttgaaagtccttcaagtgattaaagatagtagccaagctcttctgtgtgctctccttc

SEQ ID NO: 642037 - DNA, 585 bp, Homo sapiens
tactctactttgggagtccttagagacctagtagggaagaatatatagacgaagcatgcattttctctctggtactattgattatttcatggtggacccctagcaaaaagaagttgggtggggacttcctaggagacacttgcttgtgttcaaggtgaagatccaggtggctgctgaatagtccactctgtcttgtyatgttccttctctttctattccacaaaggaggagagagctacaatgctggaagagcaccagcagatgggctccctgtagggacaagtggaggtttttctcactttattccctttggaataggcaggggatatccctatcctagctcccatgttctgcaggcaccatgacatagacacgaccagctagcgttccacaggaacctcaaaggttcctggttcctaaaattgtagtggtagaacagagggaagagggagtttctcagccctcatctttcacacatatgacctcatataattttcatcatgattttatgaattaagtgaaacaaatattacaatgttcacaatcctaaagagaaaagctaaagcccagagaggttttatggct

SEQ ID NO: 642038 - DNA, 585 bp, Homo sapiens
tactctactttgggagtccttagagacctagtagggaagaatatatagacgaagcatgcattttctctctggtactattgattatttcatggtggacccctagcaaaaagaagttgggtggggacttcctaggagacacttgcttgtgttcaaggtgaagatccaggtggctgctgaatagtccactctgtcttgtcatgttccttctctttctattccacaaaggaggagagagctacaatgctggaagagcaccagcagatgggctccctgtagggacaagtggaggyttttctcactttattccctttggaataggcaggggatatccctatcctagctcccatgttctgcaggcaccatgacatagacacgaccagctagcgttccacaggaacctcaaaggttcctggttcctaaaattgtagtggtagaacagagggaagagggagtttctcagccctcatctttcacacatatgacctcatataattttcatcatgattttatgaattaagtgaaacaaatattacaatgttcacaatcctaaagagaaaagctaaagcccagagaggttttatggct

SEQ ID NO: 642039 - DNA, 615 bp, Homo sapiens
ttactggggaagaaatcaggccttttccagtgtttccatatctgtttcccatcagtaaaatggggcaaaaatagacaacctcacaagattgttgtgagcaccaagataatccatgggtaaacattyatctttctttctggcctctaacatatgaacccatttcctacatttgagaaatatccctttgcttaagagtcttagtgaagtggaaacctgcctcccaacatagaaacttaaaaagccaggcacttgtttcccagaatcctttgcagcaagagtaaaacacatgacttaggtgccaccaatcaggcacacagagcagaagcacatgatctaggattcaccaatcaggtgcacaggactaggagcttgagactgaaaggagatttctttctgaggccttgtggtacctgcagaagaatcaagttcctctgtacctggcatgcagattacaccttaaaatgggactacattgtaggctttttttcaatttgacttccccagtctatgcaaaatgcacaggatttagagcccagaggctagatctggatgtcttgcctgagacttatcctggatacatccctttccctcatcatatttttttcattcatgact

SEQ ID NO: 642040 - DNA, 529 bp, Homo sapiens
attgcagggtttttggaaaaagggctcccaagtgaaggccgccttggtgtccctcattgtttccaaaagcgagcccaccatctaaaaatctaaacagttgaactcatggacctagagagtagagatggttatcagaggctgagaagggtaatgggtggtgatggtggagatgggaatggttaaagggtacaaaaaaaattgaatgaataagacctaccatttgctagcacaacagggtgactatagtcaataataacttaattgtacatttaaaaataactaaaacagtgtaattggattgtttgtaacacaaaggatacatgcttgaggggacaaataccctattctccatgatgtgattattacattgtatgcttgtatcaaaacatctcatgaaccccataaatrtatacacctagtatgaacttacacaaattaaaaattaaaaaacaaagcagaaccaaaaacacaaaagcgcatccaacagtctagacgtagagaaccttcgcatacatagaaatactcctta

SEQ ID NO: 642041 - DNA, 544 bp, Homo sapiens
ctcagcttcctcacagataaactggagacaatggtaactatttcagcatgccgtgatgagtattcagkaagatgaatactcacggtgggaaggaggagcctttgcataccatatgcactgtgcgttgaaagcgctctacaccaacatggcacatgtatacatatgtaacaaacctttgtgcacatgtacgctagaacttaaagtataataaaaatatatatacaaaaaaacaaaaaaaaaaagaaagtgctctgcatcctaatatccactgagacaaagctgcatgtccctcctgagttcttgcagtcctcactgcgtggtcgtacccagctaggcagcctccctctccactcccagctctgtgttcatcaagttctcccataggacagacagacggatcagtggacagtcacactgctgtgcaaaaactgcaatgacaggtaaccaagggaatgtcaccctcccccgaagcgggacaaacaagcttctaagcagtaccagatcagaatggaaggtggtgagaaggggtcatgggaagtttctc

SEQ ID NO: 642042 - DNA, 636 bp, Homo sapiens
tatcaccgtgttaactctgaaatttgcagcaacaatgtcaactgcagccctgagaacaaaaagcagaataattttcagcctctagcaagcttgtccaacccatgacctacaggccacatgtggcccaggacagctttgaatgtggcccaacacaaatttgtaaactttcttaaaacattatgagatttttttgtgygtgatttttctttttagctcatcagctgttgttagtgttagtgtattttatgtgtggcccaagacaattcttcttccagtgtggcccagggaagtcaaaagattggatagcactgctctaggggaagcccagtgcttctctccaccctcttccctccacaccacttcctctaccaaagagcagaaagaatccagacaaggacattgatctgtagaattaagggatctaagggaagaaaggtggatctctttgaaaatactttcttttccaaggccagagaggcaagagagcccaggagaaggtatagccctctcctcttctgctctcttttgagccttttcctccctctggcagacatggcccagggcccagggcgcaggacctgagagggctggacaggtgtgcagactaggagaagggcactgacctagacccagaga

SEQ ID NO: 642043 - DNA, 636 bp, Homo sapiens
tatcaccgtgttaactctgaaatttgcagcaacaatgtcaactgcagccctgagaacaaaaagcagaataattttcagcctctagcaagcttgtccaacccatgacctacaggccacatgtggcccaggacagctttgaatgtggcccaacacaaatttgtaaactttcttaaaacattatgagatttttttgtgcgtgatttttctttttagctcatcagctgttgttagtgttagtgtattttatgtgtggcccaakacaattcttcttccagtgtggcccagggaagtcaaaagattggatagcactgctctaggggaagcccagtgcttctctccaccctcttccctccacaccacttcctctaccaaagagcagaaagaatccagacaaggacattgatctgtagaattaagggatctaagggaagaaaggtggatctctttgaaaatactttcttttccaaggccagagaggcaagagagcccaggagaaggtatagccctctcctcttctgctctcttttgagccttttcctccctctggcagacatggcccagggcccagggcgcaggacctgagagggctggacaggtgtgcagactaggagaagggcactgacctagacccagaga

SEQ ID NO: 642044 - DNA, 632 bp, Homo sapiens
tctttgcttcttttgccattctagatattcccccactctttttgcttccaggggtgggagaggaggggcaccttgttccctgctgtgtatatgctcaggaagagggaagaaattaatatttatcaagcacttagcatgcattgtctcagttaactggtaaacaggtctaggtaggtgcacagctcacatttagtttcaggttgctctatcagcagatctcaatattaaagcacttcgtttattcatttcttttcagccaacatttattgagccctgtgccaacctctgtgttgtctgctatagatacagagaaatagaaaacaagatccttactctcraggagctcagagtctagtgtgggagataaatacctaaaagctagttatggccaagtgtgagaagcttgaggtcagcccaggggccctggttgcacaggggagggagggatggactgtctctgcttcaggataattggggaagccttcatgggggaggtgacaataggcaggagcaggaagtcacttcaagtcacaagtaagagtatgagcaaggaggagggggtatagctcagaggtagagcattgggctgaagattaagaatatgagcaaggacacatggacacaaaatagaa

SEQ ID NO: 642045 - DNA, 632 bp, Homo sapiens
tctttgcttcttttgccattctagatattcccccactctttttgcttccaggggtgggagaggaggggcaccttgttccctgctgtgtatatgctcaggaagagggaagaaattaatatttatcaagcacttagcatgcattgtctcagttaactggtaaacaggtctaggtaggtgcacagctcacatttagtttcaggttgctctatcagcagatctcaatattaaagcacttcgtttattcatttcttttcagccaacatttattgagccctgtgccaacctctgtgttgtctgctatagatacagagaaatagaaaacaagatccttactctcgaggagctcagagtctagtgtgggagataaatacctaaaagctagttatggccaagtgtgagaagcttgaggtcagcccaggggccctggttgcacaggggagggagggatggactgtctctgcttcaggataattggggaagccttcatgggggaggtgacaataggcaggagcaggaagtcacttcaagtcacaagtaagagtatgagcaaggaggagggggtatagctcagaggtagagcattgggctgmagattaagaatatgagcaaggacacatggacacaaaatagaa

SEQ ID NO: 642046 - DNA, 641 bp, Homo sapiens
agctagctgaccaagagatgtggttgctatgttgaccaggtgaccaagatggtgactgagatgccaagtggctaacatgatgatcaacccaaattgtctggtaaatgcaccactttctgaaatgcacatttcagggtaggtgaaggaaatacatgtacctgacatggcccagtctgacacgtgtcacctcttctgtcttctccccaggctgctctgcgtagattggctggggtctgccctgaaggcctccaggactctgactttcagcagttggtccagcctcggctggtggactccttcttactctgcagcaacatggaggagagttttgtgtagtgagtgtgggcgaagaaatacatttggctgttctcacaccccctctgactatgcaccagtgaacacatctgagtacataccagctctcctcatcttcttatttatacttaacttatttttgtgtgaaataaatggaggacraaatcttagagcaacatcatcaaacagtctttggtccttgagaatcttctttgtgttttattttttgatttctgtagcttttcagttgcagatgttgaaattcgtaatgacaaatatgacaaattgtcatgggtgattccacttcatcttattttttctactct

SEQ ID NO: 642047 - DNA, 574 bp, Homo sapiens
ccatcacttgggtaccttgcctccaccatgccctggctccactcccaagcctcaggctcctaaggaggattctctattttcagttgtaggcagacccagggacaaaagatccttcacctggggctgcactggcagctctgccctccaaacgggcccccaggtgcaagaggccaggagaagttgcctgtctcaagtcctacagccagtgcacactggggccaggcctggagacctagtctcctggtgttytccatgggcctgctcagaacaagccctgttctaggagctgaggctacaaagttgaacaggagaaaactccagccttcatagagctcagccaagacccaaacaggcaaaaaaaaaaaaaaaaaaaaaccaccaacaattcatctggttataattataagagcagttgaagtgttgagttccagcaaggagtcaggcagtgtccaagccctctctatatattatctcctttaagcctgcccacagccatgtgagggaagtagtattattacccccgtttacagatgaggagacttttgtttggagaggtcacatggtgagtaaataa

SEQ ID NO: 642048 - DNA, 641 bp, Homo sapiens
ctgaggtggggggactgcctgaacccaggaatttaaggttacagtgagctatgattatgccactgcacttcagcctgagcaagaccctacctctaaaagaaaaaaaaaaaaaaagaagaaagaaagaaatcaaaaaaaagaataagacaccaactgaggtcacacagcaagccaagctacacctgggacatgcacacaggcttcctcattccaaccatgggaaatccaaataaggctttgcctggctggagtgaacaggcccaccagcacctcagagtggtttaccataggaagtcaatggagccttagttctccacctgtaaaactgggaaagcgcaagtacgcttgcactttttccyttgctgtggttatcaagtacgaggaaataaagagtgggcagggaaattaatgagtcctgttcagactcagctcagctctggaatgggacaggcaggttaactcagaagtgcccatgagtccccagaggtcagagagagaggagcccagtgtcaaggtgtcctcactgatgcccatgtgtgccagcacctggtttatatgaatacacatcctctagagagctccagcttgtccaagcagcacccccgaaggagcttgtgtggccatctcagaggaaagctcag

SEQ ID NO: 642049 - DNA, 616 bp, Homo sapiens
aacctgaaagccacaatatggcaaagcaaaataaataaataaataaataaataaataaaggaggaagatgagacttgactcacagcttggagtagagccacctaatccacatcaatctgcggggtaagcaagaaataaacaacatgttaagccactaatattggggggtcatagcaactagtcttaattaatgagactaattgtgagaactaaagtaaatgctctatataaggcacctatgaatgtgctacacacatggaagtcacttcttcctcagtgctggaggagatggtggaatattttgtttgtctaatgacagccctctggacaaakaagtaaactcgtgcacaatacagccagagtccaaaaattaatgggatcatggtggaatggagtaaatacctacaaacatttaagtcctatcaattctgagactaagattctgtttctcaaccactgccttttttgctcatatgcatccattcatagtaatagctaaaatttactatagtcaggtcattctaagatatctttttttcatattttaacaaccaaagttgggatgtatgcttcagtcaatggcatcttggcattgtgtcatcgttcaattggaacc

SEQ ID NO: 642050 - DNA, 554 bp, Homo sapiens
gaaaacctgtgcagctgggatggctggaggcatttttcctttcacctatctgatgctgctcaaatgccagagtgctttaatgtgtctttcgcagtatagacggcccaggccctagcctgagattcagaccctgcccagttgagcaaaaggagaaagagatgctcgtagtctgggggtttattttgtgccaggtgctgagatagtccactacatatgtcctttcattaatgcaccagaaccttgtgaggtgagcactattagtatctccwtcttaaagataaggaaatggaatctcagacagtttaagtgacttgcctaaataacatagtaagtgttagagccagaatttggacccacatctgccatagtacagcacccctgtgtcacgaccttgctggtttaatgattactctgagagcactgaaaaggtccctgcagcttaatcccagaccaccttgctattcctggccactgtgctaacccctcacatccccagctggcataggggatagtagcttacctggacatttctcctctccaggccagattgctta

SEQ ID NO: 642051 - DNA, 449 bp, Homo sapiens
tccttaatctctcccaccctccacccacaccccctccctgggttctgtccatgcctgccaccctctgtgagctgggctgctcagcactgcccacagaggctctggtgaggttggccattgtcagtgttgaggatggaagatggtgaagaccaggcacaggccggattgtagaaaccacrgagtgacaggtgagtgaaggtggagtggggaagtgtggttccctggggctcttgccagccacccactcaccgggcatggttcgtggccaaattagatcacatcaaagttccagccttctccgcctgatttactggcctggccttctcactgaggttcgcttaattaattggcagtgggaaacgtgctggatttggtgaaattcgtctctgttgtgcagcttccccctcctttccttcaaccgtgaagaggttcattaaatcctgcacagc

SEQ ID NO: 642052 - DNA, 449 bp, Homo sapiens
tccttaatctctcccaccctccacccacaccccctccctgggttctgtccatgcctgccaccctctgtgagctgggctgctcagcactgcccacagaggctctggtgaggttggccattgtcagtgttgaggatggaagatggtgaagaccaggcacaggccggattgtagaaaccacagagtgacaggtgagtgaaggtggagtggggaagtgtggttccctggggctcttgccagccacccactcaccgggcatggttcgtggccwaattagatcacatcaaagttccagccttctccgcctgatttactggcctggccttctcactgaggttcgcttaattaattggcagtgggaaacgtgctggatttggtgaaattcgtctctgttgtgcagcttccccctcctttccttcaaccgtgaagaggttcattaaatcctgcacagc

SEQ ID NO: 642053 - DNA, 578 bp, Homo sapiens
acaggcgttttgaggcctcattctttcttttcagagctgtcacgtggaggtctggttcatctgggctgcagcctccctgcatcctaagcttcaggacatctgtccttccttccctgtgtcttcatctgacatcactcctcattccctaccccttatgctggggttctggagaagagacaggctccctgcttcccaggatggctgaagggggagaggcccagcaggacagacagtggtaagggctgtcccatggccatcagaggctataagcaggaggccccacctctggtggggttgccggtgtaggcagcaccaaagaggcaatgaagctgggcccagaagggccagggaggagctcccaggcagaccagaggaaagcagtcttaacaagggcaggggcagaggggacaccacagcagggagccaccccagcagggagccacccaatggggctccaagtctccaagtcttycagggtctttgtgttcagtgaattgggggagccccaaggagaaggcagtgttctctggacctcacttgggagaagactagagggagaaaatgagggccaaggaggg

SEQ ID NO: 642054 - DNA, 563 bp, Homo sapiens
ggcagaggggacaccacagcagggagccaccccagcagggagccacccaatggggctccaagtctccaagtcttccagggtctttgtgttcagtgaattgggggagccccaaggagaaggcagtgttctctggacctcacttgggagaagactagagggagaaaatgagggccaaggagggagtaagggccccagagccacacagtccagcgagagcagatgaacccagcctggtcagggtggactgctgagggtggccttcctggaggactgsagctggcaaggtgaactggcattaccaagggggaggactgcagggtttggggaagaatgaagagaggtgagggagcaagtcacttctcctgtctgaatcccagcttcatcttctgtaaaatgggactcccaccttctttatagggctgctatggtgatgcaatgaagcaatatgggtgggtcttgcagcaatggtgcctgcgtggagaaagcactctgcctgtgtctgtttccttttcctcctcccatgcccatttgtctctacttttccaggctggtctggggaaaac

SEQ ID NO: 642055 - DNA, 419 bp, Homo sapiens
cagagataaagagagacagggagaaggaaggaggataagaaaaggggaagagacttactggaggaagagaaagggagaagagctggaaagacacaagcccagctaatggacaatcaatttccaaaggagtgtttcrttctctctttgggctacttcaaaaatacaaaccaagttatttggagatttgtaatagctggacatacagtgctctgcttgtgaccaacttgagtgtaccgtcctctcttattatggtttcaatttttattttcctgatgagtaatggttttgaacacttgttcacatccttactggccatttggttatcatcttttgtgaaatgtagggctgagtcttttgcccatttttaaaacactgggttgtttgtcttttcttattgatgtataaactttgaaaaacac

SEQ ID NO: 642056 - DNA, 511 bp, Homo sapiens
tcagtaggttttccaggctagtctttaaaggatgccctcaagtttcccaggaaaagagttagtattggaagaggatagagtttcaaacagaagaaacaccatgtgcaaaggagtagaaccatggactcatgtgttgggaaaatggcaagttgctaagtgtagccagaggggtggaggtaaagttgaaaatgactggctcaaattttgcagaatgttagaatgctaggatccatgtgtttatctgyattatattccatcaaggcagggcaccctaggccaccccacaaccccaccatagaatacttctcctggctataccaaggggcttctataaaacctgaacagggcacattttagatcctaagaggactcccaaactactatgccttgaaatgtccatcccagccacaaggcaaacacaagacccctttgcacatttcacaggaaagaatgggaagaacttgttttagtcaatgggtttgctttcctatccctgtggcactaacatggg

SEQ ID NO: 642057 - DNA, 569 bp, Homo sapiens
gagatccaacttgcaaaaaacaaaagccaaaacaaaccaaatcaaagcaaaataatgatattaaaagtctttcaacctcattaggaagtggagacatgcaggttaaaatacaatttttgtagccataaaattggcaaaaaatttaaaaatctgccaatagcaagtattggcaagaatctggtttttagtgtgattatgtattgctggtgggaataaaagttactactatcatgtcgcaaaacaattggcaataccaataaacctaaagatgcggaaacactttgccctaggaattccactcctagattgggatctctgaagaaactggcrgatgttcaccagaagacatttagaagaatatttatagcagcactgtccattatagcaaaagctgggaagccactcagacacccatcgacgggagaatgcataaatgaattgaaattgatttatataatgaaataccatacaacagtgaaaataaatggatcatagccacatgcaacaacaagaagaggtttcataaacaaatactgactggagagaaaaataaattgccatattcagca

SEQ ID NO: 642058 - DNA, 596 bp, Homo sapiens
tttcacaggaaagaatgggaagaacttgttttagtcaatgggtttgctttcctatccctgyggcactaacatgggttatttttgtccaaaaaaaaagggacaaaagcattcaaaacttattcacagacttagaatgttaaagctggaagggtccctggggatacttttgtctacctcctcatcctcagatgaagaaactaaggctcagagagagagaaaaattgtccaagaacacacagaatatcagtggaagtctggcccctggctcctaatccatgctccccactgcactgtgctctcctgcaggggatttgatgatgagattgcaaacttttttccagtgaacttaactgcaaagactaaaaatacttcttaattattcttcattagaaggaaacaaagcctcttcaactctctgactccttcaaccaattaaatctttggctcccactcaaagggcgtatttaaattaatcaggataaatctctggcttaccctttccctccaaacagcaattttatactaaaaaaatgagaatagcttgctggagacagaagagtgtcttagagaataaaacacaatccaagctacttaat

SEQ ID NO: 642059 - DNA, 564 bp, Homo sapiens
acaacagtgaaaataaatggatcatagccacatgcaacaacaagaagaggtttcataaacaaatactgactggagagaaaaataaattgccatattcagcattataccatttatgtcaagtacaaatcttgtaaaactaacagtggataccttcaataaacctctgaggaaaacaagggaataatatgcataaaactcagagtaatggcccatccagcaggagaaatcagaggtatgagatcatgaaaggtgtgctggggattttcttgattttatttctagaactagaatttttggatattaggcatatacatctaaacatacaggtgttcattttattatttgttaaaacttattctctctctctctmtatatatatatatgtacatatatatatttcccttttgaagggataattaatgagttaccaaaagagatctgaagcatataaaacaaactacaagggaagcaagacgatgggcaattggcaattgtataagcaactccacacatcctctggaaaccaaaggacagtgaagaaattggggtctacatcaggatggg

SEQ ID NO: 642060 - DNA, 635 bp, Homo sapiens
caaggccaccagggaagcagccccatttctatagtggagaatggtggaggacaagatggggaaggaaatactaagctcatcctgttgctaaatatgaggaagggaggaagaaaccaacatttcctgagcatctcttctagatcaggcattgcctgctttatctcttcaatcccacaacaccctgttgaasggtgaggaaacagaatctcagagagggtaagtgactaacgccaagtcacacagcaaggaagaggggattggaggtcagggatgtgagatttctaagtgactgttctttctatgacgatttgctgtggtggatgaccagggtcctgactctagacacttgacttgatgtccgctatctaggaggcccatgaaaggttactgatctctgctggactcaaaggagaggcctccaggtgccagaatttgagtcattatgagggccttatcactggattgtccctggttccacatggggtcctgggctgttctgggaagccagagctggcttccatgtagtgggggctgaatctgtatctgtctcattaatgtcatgggcagtggtgtccacccaggatgcacaggggagctccctctctccatctgcaggtggatggcgttctgtgctt

SEQ ID NO: 642061 - DNA, 538 bp, Homo sapiens
ttaagcaacatattccaaactttcagggtcayagatttaaaaatattattaaagcacctatttacttcttctgagatgctggtgttttaggaaatgcaattcgagaaacattcttttagcactaagaagtcgtgtgggctcttgagcagaggaacaaatctccccacccccttcaccccagtattaagggctttttggactccttcaattatggttggaaagaatggtacaaactgagaagtcctgaaggaacctcccattgttgtacagacagcctggactaaagctgctgaaagaaacccagctccccacacactggaatgaggccttcctggctgagatgaacaaagtataaaaattgaagtgattgtattaacccaagaatctgggactttggattattcctagagtaaaaggatttaagttttttcttttcctttattttttcccaggtaactttaaaatgggataggagcatatcaaaattttggaaatctttatgtttgtcatcatgcaagtatgtttggattatctttgt

SEQ ID NO: 642062 - DNA, 538 bp, Homo sapiens
ttaagcaacatattccaaactttcagggtcacagatttaaaaatattattaaagcacctatttacttcttctgagatgctggtgttttaggaaatgcaattcgagaaacattcttttagcactaagaagtcgtgtgggctcttgagcagaggaacaamtctccccacccccttcaccccagtattaagggctttttggactccttcaattatggttggaaagaatggtacaaactgagaagtcctgaaggaacctcccattgttgtacagacagcctggactaaagctgctgaaagaaacccagctccccacacactggaatgaggccttcctggctgagatgaacaaagtataaaaattgaagtgattgtattaacccaagaatctgggactttggattattcctagagtaaaaggatttaagttttttcttttcctttattttttcccaggtaactttaaaatgggataggagcatatcaaaattttggaaatctttatgtttgtcatcatgcaagtatgtttggattatctttgt

SEQ ID NO: 642063 - DNA, 601 bp, Homo sapiens
gagactgtcttggttgcagccttggtaggatgtcagtcagtttatttcagttgtctatagtctataaagatttgtgaacatacactcactgggggaaaacatccaccacaggttaattgtggtactatgtttaccatatatggggaaaaaaatgcctcctttctcattgacgggcatttgaactgttttccttttcctgcaaagtcaggcatttgcaacttctttactaggacttgcttgatttgcattctttcccattcagcatattcaaaacatcttaatttttagctccctgaaaacacwgtgtttctgccactccagcatgcattgatttgggcttcttgaagtgacagaccagtagtcttcaaaccatttcaaatgcactgcattccccaggttctcaaagatttcccaggagaaatgcaagcacatacagttttaaggaaatcttatttccagatcttcaattttcatttgttttctttcttaaaaatgatcttcccaataattcactgagttttttataggccttctattattttccaaaaggcatactcttcatccatcccaaatcttatagtacattgccttgccatacaaa

SEQ ID NO: 642064 - DNA, 474 bp, Homo sapiens
taattcactgagttttttataggccttctattattttccaaaaggcatactcttcatccatcccaaatcttatagtacattgccttgccatacaaaaatcttggtatgggagtggagaatcaagcaaaggaaaagctttcattcatgaaccattaagacccttaagcttccatgaattatttccatgctttatacatatttatgttgagtatgccattagaaattgtgtattttggctgggtgtggcgactcacgcttgtaatctcagcactttgggaggccgaggcaggcagatcacctgaggttgggagctygagaccagcctgaccaacataaagaaaccctgtctctactaaaaatataaaaaaaattagccaggcatggtggcacatgcttgtaatcccagctatttgggagcctgaggcaggagaattggttgaactcaggaggcggaggttgccatgagccgagatc

SEQ ID NO: 642065 - DNA, 614 bp, Homo sapiens
gatgccaaccacattaacatatcccaccaaaccaaaatgaagcatgtctctcacactcaacttcatggctggatctgaaaaatgcctgtagccactccaatactacattcaaggaagactaaatcaaaaaggatggtggttttcattaattataatgggagttgtaattaattagcttcatggttaatttgcccctgaatttggattcaagacacttagagcaaatataggcaactaatagccctaggacctcagtaaggtcttttgtttcttgtttttagtctcctttttcacttgaaatatgacatcaccattggagacagaaccagggatctaattggtagcaaagttatgtccttcggtagacttaagatgctagtcacaggaagatgccctggcaacagtggttcccagtgcccactcggtatcgcagtccctcagagagtttgtggaaaacccagatacttgtgccctacccaagattccatkgggtctttgggtaagacctgagaatcttcattttaacaagccctacaagtagttctgaagcatggccagactctcagaatcactcatctaagcccttaaagcaatcttaatattagagcacggta

SEQ ID NO: 642066 - DNA, 577 bp, Homo sapiens
accatttttccctttcaaaatgagttgcaaacacatgctggatttgggctctctgtgtggatctgaggtctgggtgggataaggacttctgaatggcacatgggktctgaagatattttatgttttgtaaagaatgggccttagaaatttcctgggaaggaaactttgcttggcaagagctctgaagctctgggtgttctgtttcaggacctgagcactcaaggtctgtttccatgtgccgcttgatatagacagctcctaccacctgcctgcatttgtgcttcacattcaggaaagcagagaggagacatgcatttggttgtaagccaagatgatgtttgacctcctgcagatttagtctcctgtcaggaccaggccttaactccagttaaacattaatcccaaacatttccagtggtagaaagcagggggaaaggcctgggttgggacaagagggcagctctcatcccagctctgccactagctcactggaggaggttggccagaccactggggattaactcctcctttgtggcctgaggatgctgggctgtatatttaagacaccttccaaatc

SEQ ID NO: 642067 - DNA, 611 bp, Homo sapiens
catttggttgtaagccaagatgatgtttgacctcctgcagatttagtctcctgtcaggaccaggccttaactccagttaaacattaatcccaaacatttccagtggtagaaagcagggggaaaggcctgggttgggacaagagggcagctctcatcccagctctgccactagctcactggaggaggttggccagaccactggggattaactcctcctttgtggcctgaggatgctgggctgtatatttaagacaccttccaaatctaccatgctgcctgactttcccagtgttttcatgggaaaagtaagggtgcaattttactttyatcctattccattttaaaacaaaaggctaaggtgaactatttgccacgtttagtcatcacttcctacatttctgtccacaggcttctcagctgttccatcacttcctcagctactcagggatctcccatgcccctaacactcccctgggctctcaagagccatgaccaggagttgtttaaagatttcaaataatcctttgattatttacatgggccacaccctccagagcctgccaggagaatacttgagtctcactgaatattaacaacaacgataataatta

SEQ ID NO: 642068 - DNA, 501 bp, Homo sapiens
tcactgagccaggttttgcagctcaacttcaccttccagccagtcctgcttccttcctcccccttccacaggcattgatcctaaagatggtcactaaaaaccactctgaactctaaaccccacctaaaaggctgttcccatataactcaacctatgacctcttgtttgcaaaatatagataataataattatacacatgggtcatagtgaagactaaatgaatagctgtgtggagtatccakcccataacaagtacttgaaaccataagccaactttgttgtgggggtttgcaaaggcctgcctattaatcagtattgccaccctgactcttcactggcagggattcggagagaaaaattctaaatgccatagatgatttgtgggctaggtaagttatagaaggaagtggggaaggaaggggacatctggacccagccctgtgtggaccctgggctccagcttacaccccagaagccttcccataaagaaagttaaaccaa

SEQ ID NO: 642069 - DNA, 642 bp, Homo sapiens
tttccagttctgacagtgatgcaggagctgggagtccctggcatgccctgcacagcatcctcaccttggatgctcagtagatgtacccagtgttgtaacagtgtggggcagtgatctagcagccttcctcatccacctctttgtggcctgctgttctgtttgtttgggtccttcatctatcttagctgcttctgggagaaaatgtgggcaacctgtctgaggcttgtcctctcagcttcttgggttcctctgaaggctaaagaataagcccagacctctctatgatgatggtgamaaactccatcccttcccctgtgcaaggcacagaaaagtcctctgggcttcatcaaaattatcccccccaccaataactcctctgttattccttccaccaccagcccacacaccccacaagtgatctcttcccactttatgacagctcatcccaagtctctctgaataattcatactgttatgtggctgggctctgagcccggagctttctataaaattaaacaagcttcagccaacagtgtgattctgctaggtcaggccattcccagcttcactccaggatgagtgctgcactcggttcttgaatgggggctccagagtggtcctcaagaccaatccattttattt

SEQ ID NO: 642070 - DNA, 377 bp, Homo sapiens
tgtagtacatgccagatttccctataccttttgccatgattgtaagtttcctgaggtctccccaaaagcagaaccctgtacaccctgcagaaccacaagccaattaaacctcttttctttataaattacccagtctcaggtatttytttatagcagtgcaagaatagactaatacagaaaattggttccaggagaatgcaatattgctataaagataccagtaaatgtggaagcaactttggaactggataatgggcagaggttggaagagtgtgaagggctcagaaaaagacagaaagatgaaggaaagtttgaaactttctagaaacttgttaaatcgttgtgaccaaaatgttgacagtgatatggaaaatgaa

SEQ ID NO: 642071 - DNA, 453 bp, Homo sapiens
ggaggcttttgtccctgccctagagatctatggaactttgaacttgagagagttgatttagggtatcaagcagaagaaattcctaagcagcaaagtgttcaagacatagccaggcggcttctaacagcataatctcatatgcatgagcaaagagatgatctgaaactggaacttatatttaaaagggaagcagagtataaaaatttggaaaatttgcagccaagccatgtggtagaaaagaaaaatccatttttctggagagaaattcaagtcagctgcagaaatttgcaaaartaaagagaaacaaagtgctaatagccaagaaaatggggaaaaggcctcaacgggatttcagagatgtttgcagcagcccgtcccatcacaagcctgaagccctaggagggaagaatagtttcctggtcaggaagctgcacaggtccctgctaccctgca

SEQ ID NO: 642072 - DNA, 576 bp, Homo sapiens
atgctgttttgcagtgtgagaaagacatgagatttgggaggggccagaggcagactgataggatttgaatttatgtcccagcccgaatctcgtgttgaattgtgatctcctatgttggagaaggagcctggtggaaggtgattagatcatgggggtggacttccctcatgctgttatcataatagtgagtgagttmtcatgagatctggtttttaaaagtgtgtaacacctttcccttccctctcttcctcttgttcaggccatgtaagtagtgccatctttccctttgccttctgtcataattgcaagtttcttgaggcctccccagaaacagaagcctctgcagcctgaagaaccatgagccaattaaatctcttttccttataaattacccagtctcaggtatttctttacagcagtgtaagaacagcctaatacacctggggcatgtgggccaaagaggtcaacttcttgggcttctccagtagctccactcatgtcaaaagtaaacagcacttggggagggcacttctcatgcttctccatcaccttcaccacccacagccagcactcaca

SEQ ID NO: 642073 - DNA, 592 bp, Homo sapiens
caatcacaagactaggtcaatcaattttgtcaaggtgggaattttgtcaagctgggaatttagtgttaamggtgtaggaattagatggtcaagcacatggatttgaggtcagatagatttggccacaaattctagctgcttctcttgtatctatgggacactatcaaccccccttcttccttcattcctcttcaccttaccaagtctcttaaatagcttctcatttctctttctttacctgttctaaagtgtcatcttatgccatcattttctctatgttcgaactgatctagccacccaagccacattcaacttttaaaaacacccaaattcttctatgtcagaactttaatctttactgtcaagttagtttaaatggccctgccatcagctcttggaaaagaagtctcctcatgctttagatttcaagttagaatgtgacctttcctgatcaccttttctaggcattcacacatagttttccagtcatgatcccaattttctttcataatagcaatctgttactttctcaaataaaaatcacaaatatctatgtttacctccttgtttttctttaactattgtattataa

SEQ ID NO: 642074 - DNA, 592 bp, Homo sapiens
caatcacaagactaggtcaatcaattttgtcaaggtgggaattttgtcaagctgggaatttagtgttaaaggtgtaggaattagatggtcaagcacatggatttgaggtcagatagatttggccacaaattctagctgcttctcttgtatctatgggacactatcaaccccccttcttccttcattcctcttcaccttaccaagtctcttaaatagcttctcatttctctttctttacctgttctaaagtgtcatcttatgccatcattttctctrtgttcgaactgatctagccacccaagccacattcaacttttaaaaacacccaaattcttctatgtcagaactttaatctttactgtcaagttagtttaaatggccctgccatcagctcttggaaaagaagtctcctcatgctttagatttcaagttagaatgtgacctttcctgatcaccttttctaggcattcacacatagttttccagtcatgatcccaattttctttcataatagcaatctgttactttctcaaataaaaatcacaaatatctatgtttacctccttgtttttctttaactattgtattataa

SEQ ID NO: 642075 - DNA, 592 bp, Homo sapiens
caatcacaagactaggtcaatcaattttgtcaaggtgggaattttgtcaagctgggaatttagtgttaaaggtgtaggaattagatggtcaagcacatggatttgaggtcagatagatttggccacaaattctagctgcttctcttgtatctatgggacactatcaaccccccttcttccttcattcctcttcaccttaccaagtctcttaaatagcttctcatttctctttctttacctgttctaaagtgtcatcttatgccatcattttctctatgttcgaactgatctagccacccaagccacattcaacttttaaaaacacccaaattcttctatgtcagaactttaatctttactgtcaagttagtttaaatggccctgccatcagctcttggaaaagaagtctcctcatgctttagatttcaagttagaatgtgacctttcctgatcaccttttctaggcattcacacatagttttccagtcatgatcycaattttctttcataatagcaatctgttactttctcaaataaaaatcacaaatatctatgtttacctccttgtttttctttaactattgtattataa

SEQ ID NO: 642076 - DNA, 523 bp, Homo sapiens
ggctctgtaaaatactaagtaatttctaggggaaaacacatcagccacacttgttaagggagggagcacaagagacctccttgagagcttgaacttggacatgggcagaatgttatttttccaagcaggacgtaacatgaccaactctggagtggctagatgttacgttagtaagaaacatctttctycttctctaggacaaacacagacagttctttcctaactgaaagtgtgttctcaatggctgttttttcctcggtgttagaaacaatgcccttcaattgacaaattctaatagaaacaggaagggctttgattacaagttgctgagaatcacactgagatgtgcacattcaacatcatcatttattttaaagataactacagaaaggtgctaagcgttgtattctgcttctcctgctaggagtacagaataaacatgagaggggagggtgtgatagattaacctaaacatggagtcttcatattaataccaaacaaaaaaatcagtcactgtcattga

SEQ ID NO: 642077 - DNA, 448 bp, Homo sapiens
cttttccttgcaactagtatgagatmggtgtatagtagacactcagtaactgcttctggagtgaatggctcatctgaccatcacacagttgcattcaaaagggaaataatggtctgaaatctgaacaattctacatccgagtccattctgtaaaacgtattatcgtttgcttagtttagttttagaagacttattttgaatgtgtcagataaaggaaaggtggagctaaacagcatttccttaatcaggtttcagaatgctaatatatactatacattcattttattacatttcatttttagaacagggagaacactcatccaaaaaataaaaaaagaaagaaagtgtggctctttccttttaagaacccgaattataatatagaacataagtttttaatatacaaaacatgttgtcatgcagttgaaaaagtaaatgcactagagaa

SEQ ID NO: 642078 - DNA, 448 bp, Homo sapiens
cttttccttgcaactagtatgagatcggtgtatagtagacactcagtaactgcttctggagtgaatggctcatctgaccatcacacagttgcattcaaaagggaaataatggtctgaaatctgaacaattctacatccgagtccattctgtaaaacgtattatcgtttgcttagtttagttttagaagacttattttgartgtgtcagataaaggaaaggtggagctaaacagcatttccttaatcaggtttcagaatgctaatatatactatacattcattttattacatttcatttttagaacagggagaacactcatccaaaaaataaaaaaagaaagaaagtgtggctctttccttttaagaacccgaattataatatagaacataagtttttaatatacaaaacatgttgtcatgcagttgaaaaagtaaatgcactagagaa

SEQ ID NO: 642079 - DNA, 494 bp, Homo sapiens
aattcatttaggtgagaaggaaaaagaaaaacaaaaacaaaaacagacagaatgatttaatgaagatatcacatagagaatgcttttgaaagaagacaagggagtagtatttatttgacttttaaacacattcaaatccattatattgaatttatatcaaggaccaagaaagggaattgcaggttcctgaagatgcagagtgagatgrtgcaatggtactgcaatttgcagttgtttccttgatggatgttggtttgttttcaacgggcacagtgtttctttctgattactgatatcaaatacatcaagaaaacatctgttgccaggctgcaccttgtatatttaagatgcagagctgataattttttaatgaatatattttcaagtaatgaagtaactaataatgatggacagaaaagatgcttagtgaaatttttcttttattgaaattttacataaattaaaatcctgccagtataaacaaacaaaaaatt

SEQ ID NO: 642080 - DNA, 553 bp, Homo sapiens
ctaatatcaggtggcggcttcaaagtcaaagtgttggttggatgtaacgtggaattttaattggcagaggaggcagagagtgacagatgttgatccaataataacgtgaagtcatgcatgtgtatgtgaagttatgtgtgtgtgtgtgtgtgtatatatatgtctgggtgtgtgtatatacacgtgccacgtttcctttatccaattatctgttgatgaactcttaggttgattttatgattttgctattatgaataatgatgtgataaacgtatcggtgcaggtgtcttctttatataatttactttcctttgcatagatacctaatagtgggattgcaggattgaatagtagttctgttttaggtctttgagaaatctacatactgttttccataggggttgaactaatttacattcccagtaacagtatgtaagcattccattttctctgcatcytcgccaacatctgttattttttgaccttttataatagccattctgactggagtgagatggtatctcactgtggtttggatttgcgtttgtctgat

SEQ ID NO: 642081 - DNA, 519 bp, Homo sapiens
taattatccctggttttctccacttacattccaaatatcataatattattaaatctttctgctaatagagaattcattatttctaaacattgctgtcattacaggcatattattgttgggatttcaaactctatcaggattattttttctctttagtaacatttccttagacatcagaatagatattaatataatgggaaaagtgctttattgaatctgatggttactgtgacacataaacttagtgtatttcataatagacagtgatccattgatgatccacacaacgaagagcaaggagataccaaaaatgcattttctatcrtcaaggaggttgcgaagcagttgaggaggcaaagtagacataaaggaaaggtgaagtaacatctcaggagtcaaatatcagtaatatctgaatataacacattttataaaagtgtacccttttagtaaacagaaatatgttgcaatacactgggatagggtggaagaaatgcaaagatgcatctgtccaagtct

SEQ ID NO: 642082 - DNA, 354 bp, Homo sapiens
tcttgagatccatatacctttaacaacatcaataaagtggttatttgcaacttcagatattaatgaagataatactttttaaaaataactaaaccagaagtttgaaatataatcccacaaaacttacacatatctatacatatctatgtaacatatgttgatcatatttgttggctctagggattccaatatcattctctggtttctaatatttaagaagctgggaataatttgtagccagtttagcyagtggaataatatttgagttagttcaacatgactcctcctgtttatattattgttattgtactccatcagatttgtagttagttgctaaattctcattgtgaaaac

SEQ ID NO: 642083 - DNA, 576 bp, Homo sapiens
gtgaggaaattatctggtgacttggatactggttagagggtgttatgatggtcaaaatattaagctaatggggcctgcattagcacagtggccatcaatctgagccacaaaaatgaagaaaaagaatgaagaatggaccaaatttattctatcatatccacatggtcatttactctttcgttgtatctctaactctttcaatgcagaaaagcacacacttagcaatatttaaactatcttatttccagatttctaacatcttccattgccccgcactccctaattctcgcaaaattttgcttactcatgccctctcttgttacwttcccaaaacaaattaaatgaaagaaaagaactgaaaatatccactgcagctatgaaggtaggaagtcatttttgaccttagaacaattttagtagagaagtgaggtcaaagccagataacagtagaccaaggaagaatgagtgggcaaagaaagtggatattgataaggaaaagtctgaagaaggaaagaaagagagcgagagtgagaacaagagcaggagaaagcacaaaagtaaaaggaagacacaaag

SEQ ID NO: 642084 - DNA, 465 bp, Homo sapiens
taaccaattctttcacaatccaacacacaaacacacacccacaaatgtgcaagtctactcatgtttagacacaaacacacaataataaatagtaaagaacagaaaaatcggcaccaagtatacagtagaattctagtgacgtgtgttacatagwagttgttgatctttggaactgggtctgcagtcacaatcactgcacgaaaggtcactagagataacttcatatatatttctaggatttatggaccaagagtagtccctctgttgggaacgatcttcatgttttacaataattagagtccagataacttttccgctccactattagagttgacagattgtggatataaagtttgggaagagaaaatatggattgaataattgaaatcagcctcttactttcatataagtctccttaagctgtttctcccctctccatttttacaatgggtactcaagatagaa

SEQ ID NO: 642085 - DNA, 465 bp, Homo sapiens
taaccaattctttcacaatccaacacacaaacacacacccacaaatgtgcaagtctactcatgtttagacacaaacacacaataataaatagtaaagaacagaaaaatcggcaccaagtatacagtagaattctagtgacgtgtgttacatagaagttgttgatctttggaactgggtctgcagtcacaatcactgcaygaaaggtcactagagataacttcatatatatttctaggatttatggaccaagagtagtccctctgttgggaacgatcttcatgttttacaataattagagtccagataacttttccgctccactattagagttgacagattgtggatataaagtttgggaagagaaaatatggattgaataattgaaatcagcctcttactttcatataagtctccttaagctgtttctcccctctccatttttacaatgggtactcaagatagaa

SEQ ID NO: 642086 - DNA, 535 bp, Homo sapiens
actcctgtgtggaagctccaaccccacatttgccctctgcattgtcctagtagaggttctccatgagggctccattcctgctgcgactactgcctggatctccaggtgtcttcatacatcctctgaaatctaggcagaggcttccaagccacagctcttgccttctgtgcacccacaggtttaccatcatgtggaagttstcaaggtttatggcttacaccttctggatcagtgtcctaaaatgtatctggggcccttttagccacagctgaagcaggggtggctgggatgcagaaacctatgtctagaggttgtgcacggttgtggagccttggccctggccctagaaaccattcttccctccctactagtgcttttcatcttaggtttagataagaatttaaaactgaagatttgtcctgttgttgttaggattacatgacatacacatatttttaagagagggaagaaaatatgctttcatgtttgactttaggaacaatctagaactattttttaaatggttgcttatact

SEQ ID NO: 642087 - DNA, 570 bp, Homo sapiens
agtagttcaacttatatgttttcatggaaaatagagcatgtccatcaaacacattttttttctttgctatgaagttatagtttgattagacagaagaagcgaaaatagagtttataaagttagtactgtaatttaacatggtatctcaaaatatactggtgaagaactggagaattaagggatggatttaaagacaagctcttgaatgtaactgatkatgatctatgttgatgatctaatgttatttttgtagtggaagcagctctgtggctgttttcagggacgtaacctgagttatcttgtgtagaatcagtgaattagtaacttgtatgagaaaatagagaacatgatcataagattttaggatggaataaacttagatgagatcataattgcataacataagaaaattagcacgatatacagaaaagtccttttgaaaatattgttcatggatcacctctacaaaatttactttaagtgtttattaagaagtcttttgaaatgttcattaactgtttataaataaatttattgtttattaacaagtcttaagaagggtttaataat

SEQ ID NO: 642088 - DNA, 570 bp, Homo sapiens
agtagttcaacttatatgttttcatggaaaatagagcatgtccatcaaacacattttttttctttgctatgaagttatagtttgattagacagaagaagcgaaaatagagtttataaagttagtactgtaatttaacatggtatctcaaaatatactggtgaagaactggagaattaagggatggatttaaagacaagctcttgaatgtaactgatgatgatctatgttgatgatctaatgttatttttgtagtggaagcagctctgtggctgttttcagggacgtaacctgagttatcttgtgtagaatcagtgaattagtaacttgtatgagaaaatagagaacatgatcataagattttaggatggaataaacttagatgagatcataattgcataacataagaaaattagcacratatacagaaaagtccttttgaaaatattgttcatggatcacctctacaaaatttactttaagtgtttattaagaagtcttttgaaatgttcattaactgtttataaataaatttattgtttattaacaagtcttaagaagggtttaataat

SEQ ID NO: 642089 - DNA, 430 bp, Homo sapiens
atttttcttctgtaaattaaagattttctacaaattaaatattattagcaaggcataattagctcaaaaagatgaaaaccctccatgcatcagttctggtatgctgggtgaattcattatataagtgcaatgttttacctcctaagttcaatgctaatggttgagccacattcrgggagaaatacaaatcaggaaggataaaaatactcccaggaggtaaaaaagaaaataaatgtcctaccgaagtttactaataacatgcttttctgaaaggcagcaaacacattattaattatgttttggcagtagcaaactctaagctcattgttggcagtacaagttatacagatctataaaatactcaacccatatatttactccccacttcctaatccctgcattaaatacgtcatcttcccaatttatttac

SEQ ID NO: 642090 - DNA, 430 bp, Homo sapiens
atttttcttctgtaaattaaagattttctacaaattaaatattattagcaaggcataattagctcaaaaagatgaaaaccctccatgcatcagttctggtatgctgggtgaattcattatataagtgcaatgttttacctcctaagttcaatgctaatggttgagccacattcagggagaaatacaaatcaggaaggataaaaatactcccaggaggtaaaaaagaaaataaatgtcctacygaagtttactaataacatgcttttctgaaaggcagcaaacacattattaattatgttttggcagtagcaaactctaagctcattgttggcagtacaagttatacagatctataaaatactcaacccatatatttactccccacttcctaatccctgcattaaatacgtcatcttcccaatttatttac

SEQ ID NO: 642091 - DNA, 634 bp, Homo sapiens
cagtgttatggaaaattgaacttattcctcgtatccagctataattttgtatttgttgactagtttctacttctcccctgcatcctttacctttctcagcctctggtaaacacttttgtactctacttctcgacatcaattttgtagtttccacatgtgggtgagaatatgtagcatttaactttccatgcctgacttcattcacgtaatataatrtccttcaggttcatccatgttactgcaaatgacagatttcattcttttttatggctgaataggtcttcattatgtatataccacactttatttttctattcatctggtgatggacatgtagtttgatatcatatattgaccactgtgaataatgctgcaataaacatgggagtgcacatatctcttcaacatactggatatatatccagtaatggcattgctggttcatattgtaggtctatttttagcttttttaggaaacattcatattgttttccataatggctgtatgtatttaccttcccaccaacaatatatcagtttatttttctctgcatcctcacctgcattatttttttttgtcttcttaattatagccattctaactgaaaagagataaaatctaattgtggttttg

SEQ ID NO: 642092 - DNA, 634 bp, Homo sapiens
cagtgttatggaaaattgaacttattcctcgtatccagctataattttgtatttgttgactagtttctacttctcccctgcatcctttacctttctcagcctctggtaaacacttttgtactctacttctcgacatcaattttgtagtttccacatgtgggtgagaatatgtagcatttaactttccatgcctgacttcattcacgtaatataatgtccttcaggttcatccatgttactgcaaatgacagatttcattcttttttatggctgaataggtcttcattatgtatataccacactttatttttctattcatctggtgatggacatgtagtttgatatcatatattgaccactgtgaataatgctgcaataaacatgggagtgcacatatctcttcaacatactggatatatatccagtaatggcattgctggttcatattgtaggtctatttttagcttttttaggaaacattcatattgttttccataatggctgtatgtatttaccttcccaccaacaatatatcagtttatttttctctgcatcctcaccygcattatttttttttgtcttcttaattatagccattctaactgaaaagagataaaatctaattgtggttttg

SEQ ID NO: 642093 - DNA, 449 bp, Homo sapiens
gattttatcaaaaatgagttagctgtaagggtgttgatttatttctgggttctccattgagttccatgggtctatgtatgtgattttatgccagtttcatgctgttttggctactatagctttgtagtataattcgaaattaggtagggtgatgccttcttctttgttctttttattcagggttctattagctattcaagtcatttgtggttccatacaaaytgaaatttttgttttaatttctgttgacaatgtcattggaattttgatagggatttcactgaatctatagatcactttgagtagtatatgtatattgacaatattaattcttccactccataggcataggacagttttccattttttggtgccctcttctattcctgtcatcggtgcttcgtagatttctttgtagaaatctttcccttctttggcaagtttattcc

SEQ ID NO: 642094 - DNA, 449 bp, Homo sapiens
gattttatcaaaaatgagttagctgtaagggtgttgatttatttctgggttctccattgagttccatgggtctatgtatgtgattttatgccagtttcatgctgttttggctactatagctttgtagtataattcgaaattaggtagggtgatgccttcttctttgttctttttattcagggttctattagctattcaagtcatttgtggttccatacaaattgaaatttttgttttaatttctgttgacaatgtcattggaattttgatagggatttcactgaatctatagatcactttgagtagtrtatgtatattgacaatattaattcttccactccataggcataggacagttttccattttttggtgccctcttctattcctgtcatcggtgcttcgtagatttctttgtagaaatctttcccttctttggcaagtttattcc

SEQ ID NO: 642095 - DNA, 575 bp, Homo sapiens
ttaaattttatcgaatgcttttttggcatctatttaaaaaatcatatggtttttgtctttgatttgtcctttgtgatgtatcacatttactgattgagtgtgttaaaccacccttgcctccctggtatgaattttacttgatcatggtgaatgatttttaaaatttgttgaatttcatttgctagtattttgctgasagattttgcacctatattcatcaaggttattgaccagtagttttctctttgtgtctttgtctggttttggtatcaggatgattctggcctcttagaataagtttggaagtattccctccatttagattttatacaatagtttgagtagaataggtattagttctatttaaaggtttggaagaattcagcagtgactctgccaagttctgggcttttcttagacgtgagatgttttttactatttcaatttcatactcgctattggtctgttcaggttttctgtttcttcatggttcaaccttggtaagttgcatgtgtccagaaatgtatccatatcttctaggttttccaattttttggtgtatagttgttcatagt

SEQ ID NO: 642096 - DNA, 575 bp, Homo sapiens
ttaaattttatcgaatgcttttttggcatctatttaaaaaatcatatggtttttgtctttgatttgtcctttgtgatgtatcacatttactgattgagtgtgttaaaccacccttgcctccctggtatgaattttacttgatcatggtgaatgatttttaaaatttgttgaatttcatttgctagtattttgctgagagattttgcacctatattcatcaaggttattgaccagtagttttctctttgtgtctttgtctggttttggtatcaggatgattctggcctcttagaataagtttggaagtattccctccayttagattttatacaatagtttgagtagaataggtattagttctatttaaaggtttggaagaattcagcagtgactctgccaagttctgggcttttcttagacgtgagatgttttttactatttcaatttcatactcgctattggtctgttcaggttttctgtttcttcatggttcaaccttggtaagttgcatgtgtccagaaatgtatccatatcttctaggttttccaattttttggtgtatagttgttcatagt

SEQ ID NO: 642097 - DNA, 450 bp, Homo sapiens
cttcatttcactgtttctgccctgacttttattatttctttcctcctactaattttaagtttggcttgttcttgctattctagttccctgaggttcatcattggattttttatttgaaatctttctactattttgatgtaggatcttattgctataaacttccctgttagaactgcttctgctctattctatcggttctggcatatgtgtttctatttttatttttaaaaataatttaaaaaatttctttcttaatttcttcattgatccattggtcattcaggaacatgttttttactttccatatacttttagtttccacagatgcatttgttattgatttctaggtttattmtcttgtggtcagaaaagatattggatatgattctgactttttaaaatttgttaaggactacaatttaacttcagtgtttctttgttgattttttg

SEQ ID NO: 642098 - DNA, 531 bp, Homo sapiens
tcttttttggttttcatttgcattgaatatgtttttccatctctttacttttagtctatgtgagtctttataggtaaagtgagtttttgttgacagcatatagttgagtcttgcttttaaattcattcaaccactgtatatgttttattggggaattcggtctatttatattcaatgttattwttaacaggtaacaactaactactgccattttgttacttgctttctacttgttttcttacttctctcttcttctctttctttcttaatgtcttctcttttcctctctctttttttttaatatcctcctttgtgcttaagcaattttctcaggtaatatatattttaatttgtccctttttatttttagtgtatctgttgtaagtttttgctttgtggttaccacaaggcttaccaaaaaaattctatcattataacaaattatttaaaactgataccaacttaattttgactgcaaaatttaaaatgaaaagaaaaaaagaagcaaaaacaaaacctatatgcattaac

SEQ ID NO: 642099 - DNA, 611 bp, Homo sapiens
tttcttcagcactctgtatatattgtccctcttttgcctggcctataagatttctactgtgaagcctgctgccaggtgtactggatctttcttatatgctgtttccttctttttgctgctttcaggatcctctcaatgttttgtcctttgagaatatgattataataggtattggggtattcttatttagggtgaatttgattggttgcctttgaccttctattacctggatatttatgtctttccccaggtttgaaaaattttgttattatttctttaaatatttctttgaataatatttaatttatttccactactttgtctttctcatttcccctttttcagattaataacctaaatatttgccctttttatgttatttcatagatctcaaaaactttgctcattcctttgttttaaagtttttctcctctgactgtatattttcaartagtctgtcttggagctcacagattctttcttctgtttggtcaattctgttggtaatattctattgcattttttaattcatccattgtatttttcatctctaagatttctgtttgatttttaaaaaaattatttcaatttgtgttaaatttctccaataa

SEQ ID NO: 642100 - DNA, 594 bp, Homo sapiens
tctcagttttctttaacattaatccaatgaaaattatgagaaaatccctgtgctgagtgatgtgctaataattctatgaatttctttataagacacactaccattattaagtgcataatcttgagtcagtcatttaaatttattgatctttaactttttcatcagtaaaattgtaggtgtttctatgatgagccatttagttaaaagtacacatgaaaatcatttgtaaactataaagggttaactgtacattacagatgttttttaaattgccataaagaatgtgcaagactctatgagtcataaatgaagctccttagggtctatacactaaatgatattagaaagtttcattgctgagctctcagttaatacctgtgatttcaaagtctagagctgacccatctgaaaagccagaagagaacttacgcacccacttatcatgttygttctcttaaaaaaaaaaaaaaagaaaggaaaaagaatcctggaaaactaagctgaaattttcttctctcaaattagggttgcaatattacaccaaactcaaatcccagaaatacaatgtagtgggaaagagcagaaatgggaatc

SEQ ID NO: 642101 - DNA, 594 bp, Homo sapiens
tctcagttttctttaacattaatccaatgaaaattatgagaaaatccctgtgctgagtgatgtgctaataattctatgaatttctttataagacacactaccattattaagtgcataatcttgagtcagtcatttaaatttattgatctttaactttttcatcagtaaaattgtaggtgtttctatgatgagccatttagttaaaagtacacatgaaaatcatttgtaaactataaagggttaactgtacattacagatgttttttaaattgccataaagaatgtgcaagactctatgagtcataaatgaagctccttagggtctatacactaaatgatattagaaagtttcattgctgagctctcagttaatacctgtgatttcaaagtctagagctgacccatctgaaaagccagaagagaacttacgcacccacttatcatgttcgttctcttaaaaaaaaaaaaaaagaaaggaaaaagaatcctggaaaactaagctgaaattttcttctctcaaattagggttgcaatattayaccaaactcaaatcccagaaatacaatgtagtgggaaagagcagaaatgggaatc

SEQ ID NO: 642102 - DNA, 570 bp, Homo sapiens
ggggtgaatccctcatgaatggcttagtgctatcccctggcgatgagtgagttcatgtgacagcaagttgtttacaggtgcatggcacctttcctctactcacttactcctgctctcgctatgtgatatgctagctcccttttgccatctgccgtgattgtgagcttcctgaggcccttaccaggagccgaacagatgttgatgccttgcctgtatggcatgcagaagtgtgaatcaaattaaatcattttttaagataaattacagagcctcaagtatttcttcgtagcaatgcaagaattgcctaacacattttttaccatgttcaaatgcgtctgctaatattttatttaagatttttaaatttttaagggacattcatctatgtcttaaggttactgttatcaggcttgggtatcaatgcaatatctgcatcataaaaagaaacgaagtttcctcttattttctgtgctctgagataatttatgyagcatttgtattgtctgggttgaaatgtttttaaggttttcctgtgaaaactacattgttttttcctctgtggaaacctag

SEQ ID NO: 642103 - DNA, 465 bp, Homo sapiens
taggaatttatccatttcctctaggttttcaagtwtgtgtgcctagaagagtttatattaatctctgagagtcttacatatctttgtgggatcaggtgtaatgtcgtttttattatttctgattgtgcttacttagatctcctattttttctttgttaatctagctagtagtctattgatcttgtttatccttttaaacaaccaattttttgttttattaatttttcatatatattttggtacaatttcattttgttctgctatgatgttagttattatccttttccttctgctaactttgggattactttgttcttgcttttctagttactttagatgtgatgttaaattgctagtttgagatgttttcgcgatgtaggcgtttagtgcaataaactttctcttcacactgtttttgccgcatcctagaggttttggtatgctgcatctctattttcatttgtt

SEQ ID NO: 642104 - DNA, 465 bp, Homo sapiens
taggaatttatccatttcctctaggttttcaagtatgtgtgcctagaagagtttatattaatctctgagagtcttacatatctttgtgggatcaggtgtaatgtcgtttttattatttctgattgtgcttacttagatctcctattttttctttgttaatctagctagtagtctattgatcttgtttatccttttaaacaaccaattttttgttttattaatttttcatrtatattttggtacaatttcattttgttctgctatgatgttagttattatccttttccttctgctaactttgggattactttgttcttgcttttctagttactttagatgtgatgttaaattgctagtttgagatgttttcgcgatgtaggcgtttagtgcaataaactttctcttcacactgtttttgccgcatcctagaggttttggtatgctgcatctctattttcatttgtt

SEQ ID NO: 642105 - DNA, 465 bp, Homo sapiens
taggaatttatccatttcctctaggttttcaagtatgtgtgcctagaagagtttatattaatctctgagagtcttacatatctttgtgggatcaggtgtaatgtcgtttttattatttctgattgtgcttacttagatctcctattttttctttgttaatctagctagtagtctattgatcttgtttatccttttaaacaaccaattttttgttttattaatttttcatatatattttggtacaatttcattttgttctgctatgatgttagttattatccttttccttctgctaactttgggattactttgttcttgcttttctagttactttagatgtgatgttaaattgctrgtttgagatgttttcgcgatgtaggcgtttagtgcaataaactttctcttcacactgtttttgccgcatcctagaggttttggtatgctgcatctctattttcatttgtt

SEQ ID NO: 642106 - DNA, 473 bp, Homo sapiens
gttgtcatgtacagtatcttgaagaagttctctggatttcttatacatgcatgttgacytctttaataaaagtggggaaattttcctgaattgtattctcagatatctttttcaagttgcttactttcttttcttctcattcaagaatgtcaataaatcatagatgtaattgctttacataatctcacatttcttaaagtttttttcaaattcacttttttctttttatttggtctgagttggtagattcaaaagattattcctcaggcttgaaacttctttttttctgcttggtctagtctattgttaaggcttccaaatgtagtttgaaattcctgtagtaaattttttaataccagaagttcacttggttctttcttaatatagctatgttttctttcaaatcctggatcatttttctgttttctttgtgtttgatttcaactttctcttggattcctttgagttttctt

SEQ ID NO: 642107 - DNA, 473 bp, Homo sapiens
gttgtcatgtacagtatcttgaagaagttctctggatttcttatacatgcatgttgacctctttaataaaagtggggaaattttcctgaattgtattctcagatatctttttcaagttgcttactttcttttcttctcattcaagaatgtcaataaatcatagatgtaattgctttacataatctcacatttcttaaagtttttttcaaattcacttttttctttttatttggtctgagttggtagattcaaaagattattcctcaggcttgaaacktctttttttctgcttggtctagtctattgttaaggcttccaaatgtagtttgaaattcctgtagtaaattttttaataccagaagttcacttggttctttcttaatatagctatgttttctttcaaatcctggatcatttttctgttttctttgtgtttgatttcaactttctcttggattcctttgagttttctt

SEQ ID NO: 642108 - DNA, 534 bp, Homo sapiens
cattatatcccttaggcttaacaaagattcttctaaatcacttgttctaatgagttaatgatactttgaaaatgaaatatagttcacttcgttatgaatgtatacaaatatcttttggagataaaaatcaacattatgtgctcagttaatataaataatgtgtcagtttaacataaactaaatggatcaatataaatattggtaatttttaaattacaaagttttcagaaaaaaataatccttctccaaagattttaattgaatgcatttatctcagttttcttacktatatatgctcatacataaacaaaaaagaacagtaaacagtctttattgatacaaacttactttcctttatctagaaaataatgtctttgttctgtacaataaattgtcaactaaaagatctggggtaggtagaatctgagaaactgaagcaaactgtatgaattaatctgatgtctatccacaaagagattattaatggaattagcttaaataaggtataattaaaaactgttattttgataacag

SEQ ID NO: 642109 - DNA, 534 bp, Homo sapiens
cattatatcccttaggcttaacaaagattcttctaaatcacttgttctaatgagttaatgatactttgaaaatgaaatatagttcacttcgttatgaatgtatacaaatatcttttggagataaaaatcaacattatgtgctcagttaatataaataatgtgtcagtttaacataaactaaatggatcaatataaatattggtaatttttaaattacaaagttttcagaaaaaaataatccttctccaaagattttaattgaatgcatttatctcagttttcttacgtatatatgctcatacataaacaaaaaagaayagtaaacagtctttattgatacaaacttactttcctttatctagaaaataatgtctttgttctgtacaataaattgtcaactaaaagatctggggtaggtagaatctgagaaactgaagcaaactgtatgaattaatctgatgtctatccacaaagagattattaatggaattagcttaaataaggtataattaaaaactgttattttgataacag

SEQ ID NO: 642110 - DNA, 590 bp, Homo sapiens
gtaagcaatgcactgtagtaaaagaagatctagctctggagtcagatagatggggtttgaatcaccattatctatggcacctactagtgaggtaacctcaggcaagttacttaatacttctaaatcacatttacccttttgtaaaataaagaaaataaaatctcccaggatgagttgttttaagatttaagagtataatctaggtgagctatatattttccctctaggagcttctgtatttactaagtcagtgtctgtgtgaccttatagaacataactaccatgaataatgataatcaactctgtgtatattatacatataaatttatatatgacatttatctccttcaggatgttacctatgcctgaatagaatataacaccgtaccatcactatgcctattatatacaaaggtggaggaatgaaggaaaggtgagaagagagaaaggatagcagggactgaaggaagaatgactgcatgaaagatggctktgaaactcatcacaaaattgacatatggctatggctaatgcctgttttcccctcaaaatttgactgccaggttttcatagaaatgttactctaatgc

SEQ ID NO: 642111 - DNA, 630 bp, Homo sapiens
tccaactccgaggctcaaacaatccaggcgtctcagcatcttagtgttgggattgcaggcatgagccaccatgccggcctggaccttttatgtattgttataggctgaatatatcttcctctccaattcacatgttgatgtcctaaaccccaacaattcggaatatgtctgtatttggataaggcctttgtaaggtaattaaggtaaaataaattcatatgggtgggccctaatccaacatgactcttgtcataagaagcggagattaggtcagaggaaacaccatgggaagagagtgggagaatatgaccatctacaagccaaggagagaggccttagaagacatgtacattgcygacaccttgatcttggatgtgtagccgaagaattatgaggaaataaatttatgttgtttgccacctagcctgcagtgctttgtatagcagccttagcaaatcaatacatatatttcattcccttggtttcctatgatatcatataaagaacaaacaagtgtcccccttttataggtgaaaataaaggctcagatataatgtttgacagtgggccatctgaagtggagaaacaactcactgatcaatgagattcaatagttcaaagagcaaaaat

SEQ ID NO: 642112 - DNA, 511 bp, Homo sapiens
gaggtaatttaggtcataagagtggattaatacccttataaaagacacaccagaagctctctagctctcgttccaccacgtgaagatacaagtcggcagcctgcaatgcagccaaggctcctcaccatgctgccatgctgatctcagacgttcagccttcagaactgtgagaaatcagtgtcgttatttataagccactaagtctatgttattttgttatagctaccagaactgactaagacagttttcaaacatttaggtaaaatcctagtagcatgattgctgaatcataaattaagactatatttaaatttagctctgtaagaagctgcccaattgtcttccaaagttgytattgttttccattcccatcagcaattaatgaaaattcttgttgcttcacatccttgtcagtatttggtgttgtctgtgttttggattttagtccaaaactaaatgaaatgatatctcattttttaacttgaaattccctgatgacatataatattgt

SEQ ID NO: 642113 - DNA, 504 bp, Homo sapiens
caagtaagcatatgagtagtttaggggattattgcatcattcatacatgattttggattctatattaggcgtacctttgaaatttttgttcatagacctgaatgaaatcaaagtcataatttttactgttctaacacattttgccttaaaaaagttttaaaattttacattcctcctgagaacatamgttttttaagcttttaaagtgttgtaacataaatttaatgtttggcattgtttatattacctgtgggtaatattattcacatttgtaattaactctttaattgttaaatttaaaaaattaatagaataaaatttaaaattgttaacatagtttttctataaattgtaatacatttttcctctaagttagccagaatatcatactctctaaccattctttaaaaagtaattaaataaatgcatcctgagtatattagttcgctagggctgccataatgaaataacacagactgggtgacttaaacaacaaaaatttat

SEQ ID NO: 642114 - DNA, 578 bp, Homo sapiens
ctgaggcatctctccctggcttgcagatggctgccttcttgctgcctctgtacaagctccttcctttaatacaggtgcccctggtgcctctctgtgtgtcctaatctcttcttataaggccatcattcagaatatatgaagagctgaccctaatggcctcgttttaccttaattatctctttaaagtcttaatctscaaatattatcacattctgagctactggatattgaggcttcaacatatgaattttggaggacacaatatcacccataacaccattcttccaaatcttctgtttctgtgtctgttttacacagaaattcttcaagagtattctgagaaacaaaagtggagagcatcaaatcatttttataactattatgttctttttaagtgtatagtctgatacaagagatgcttgattcaggcaaaacactcatcttcatttttttataacacagaaaattagtgtaaaatgccaaaggccaatctttaatttccaacaagcattttaaagcataatgccctataattttcattaggactttaaaatgttaattattttatgatctgtaat

SEQ ID NO: 642115 - DNA, 578 bp, Homo sapiens
ctgaggcatctctccctggcttgcagatggctgccttcttgctgcctctgtacaagctccttcctttaatacaggtgcccctggtgcctctctgtgtgtcctaatctcttcttataaggccatcattcagaatatatgaagagctgaccctaatggcctcgttttaccttaattatctctttaaagtcttaatctgcaaatattatcacattctgagctactggatattgaggcttcaacatatgaattttggaggacacartatcacccataacaccattcttccaaatcttctgtttctgtgtctgttttacacagaaattcttcaagagtattctgagaaacaaaagtggagagcatcaaatcatttttataactattatgttctttttaagtgtatagtctgatacaagagatgcttgattcaggcaaaacactcatcttcatttttttataacacagaaaattagtgtaaaatgccaaaggccaatctttaatttccaacaagcattttaaagcataatgccctataattttcattaggactttaaaatgttaattattttatgatctgtaat

SEQ ID NO: 642116 - DNA, 579 bp, Homo sapiens
taacctatgaaataatggaaactggctttgtatggcagcagcatccattttttttcctgatgataatttagaataaaaggtacattttgataagtaaaactgaaacaccattaaagattaaacttataatgcacaactctggatgaattttatcagtacccagaactaaatgactaaattcataatatgctaatgtgaagaataataatcacttagtgttgaaatctttaatggctctcgtctttaaaaggaaaggccatgtgaaaagtatcccacttgcagtgagagagaattgtgctttcaccacttcctagctgagtgatcctcagcaagttattcaatctctctgagcctggattttcacctgttcacgaaacccagacactagcctccctacctgtttcttccatctcwcaatggtgtctttaagtcattctgagaggtgatctttttcaccatattgccagccatatcagttggtgtgtttgctggtggatagaagaaaggcagttgtctcttcccttttgtatttgttatactgaatttagtttttataattgaaaatattacttaaagata

SEQ ID NO: 642117 - DNA, 592 bp, Homo sapiens
cagtttatttccctcaaactacctgagagtgctgcttagtattgtaattattattattttttgtcgctcttccacttttccttcattccagtgcctggatccttttaaaccctttctttactcttcccagatagtctttccctaacctatttcgtcatggaaacttcagcctcagatgtgagtgacagcttctaattctgaagagatgcaaacagggaagacttggttacttctgatactctgcttttacatttttcttcttctttgtaatttttggtcattctcagagaaatagcagtaacatatgcgctgcattttagtggagtgtgagtttatctcctgccaatagttccaccacacttaatagtgaagatttatacccacattcttaayttaatttggaaacaattatgcccaaagtgtgtctatctccttccaagacccaagcaacatagaaacaaaggccaacaataacaaaaacctcttatgttaacagtatgttggccagggttgtgcccaagggctttctgattcttgttttcctttggatttggtttctctgcttgtatatttcttataccaactttacttt

SEQ ID NO: 642118 - DNA, 592 bp, Homo sapiens
cagtttatttccctcaaactacctgagagtgctgcttagtattgtaattattattattttttgtcgctcttccacttttccttcattccagtgcctggatccttttaaaccctttctttactcttcccagatagtctttccctaacctatttcgtcatggaaacttcagcctcagatgtgagtgacagcttctaattctgaagagatgcaaacagggaagacttggttacttctgatactctgcttttacatttttcttcttctttgtaatttttggtcattctcagagaaatagcagtaacatatgcgctgcattttagtggagtgtgagtttatctcctgccaatagttccaccacacttaatagtgaagatttatacccacattcttaatttaattyggaaacaattatgcccaaagtgtgtctatctccttccaagacccaagcaacatagaaacaaaggccaacaataacaaaaacctcttatgttaacagtatgttggccagggttgtgcccaagggctttctgattcttgttttcctttggatttggtttctctgcttgtatatttcttataccaactttacttt

SEQ ID NO: 642119 - DNA, 170 bp, Homo sapiens
cggtgcccatcttatggatttatcatctcttaactaaaattatattgatttrtgtatctctgctatctttttcatgaggctgcagcacagggactcttggatacttatttttaaatcccttacagctcttggcctgagttttgtaccatagcagaggcataatatttaac

SEQ ID NO: 642120 - DNA, 607 bp, Homo sapiens
atgacaaaaagtgtagcatagtaaatgcctaaaccagtaacatagtcatttattattattatcaaatattatcttctctgcataatcataggtgctagacttttatatgactggcagcacagtagctttgtgtacaccagcatcatcataaatgcataagtaatgttttacattttgccagaaagttactaggtcaaagaaattttcagctccattataatcttatgggattctgtctttgattgaaatgttgttatgtggtgcatgactgtatttcaatgtatcttttttttttttttggttggaggaacacaattcaatagatagcatggttttattattggaaaggatttcttacttttgatagttttatgggagggtaaccagaacagttcagaatagatgactgagacaaatgactatttttcttttgsgggacaatattttcatagtgtatttcaggtgaaaagtagagttctaaagaggtgaaataagccctgttctttgagtgtttttaagtaaagttttagagtcattattcttcataggacatttttaaaagaacagatacttaaattttggctgctggatcattagaagcaagcca

SEQ ID NO: 642121 - DNA, 615 bp, Homo sapiens
tgtgcaagctgaatccagcagcacatcaaaaatctaatccaccacaatcaatcaattcrtccccaggatgcaaggttggttcaacatttgcaagtcaataaacatgattcattgcataaacataagtaaagacaaaaatcacatgattatctcaacagatgcataaaagcctttcattaaaatataaataccattatgctaaaaatatacacaagctaggtattgaagaagcatacctaatataataagaaccatctatgtcaaacatcatactgaatgggcaaaagctggaagcattccccttgaaaactggcacaagacaggtataccctctcttaccacttttattccacttagtattggaagtcctgacaagagcaatcaggcaagataaataaataaagggcatccaaataagaggaaaggaagtcagactacttctgttacagatgacatgtttctatatctagaaaatctcttcatcttggcccaaaagctccttcagctgataaacaacttcagctgtttcagcatacaaaatcagtgtacaaaaatcactagcatttctatatgccaatgacagccaagcagagagctacatcagaaaggcaatcc

SEQ ID NO: 642122 - DNA, 615 bp, Homo sapiens
ccatctcacaccagtcagaatgactatcatttaaaagtcaaaagaacaaaacaaacaaacaacaacaaaaaaaaaaccagatgctggtgaggttgcagagaaaagagaacacttayacactgttggcaggagtgtaaattagttcaaccattgtggaaagcagtatgatgattcctaaaagaactaaaagtagaactatcattcaacccagcaatcacattactgggtatataccccgaggaatataaataattctgccataaagacacatgcatacggatgttcattgcaatgctatttacaataacaaagacatgaaatcaacctaaatgcctatcaatgacagattaaatagagaaaatatgatacatatacatcatggaatactatgcagccataaaaaagaaggagcttaagtcttttgtgggaacatagttggagctagaggctgttatccttagtaaactgatgcaggaatagaaagtcaaatattacatgttctcgcttataaatgaaagctaaatgatgagaactcatgaacacaaagaagggaacagcagacaatgggatctgcttgaggagggagggtaggaggaaggagaggagtagaaaaga

SEQ ID NO: 642123 - DNA, 570 bp, Homo sapiens
aaacaaacaaacaacaacaaaaaaaaaaccagatgctggtgaggttgcagagaaaagagaacacttatacactgttggcaggagtgtaaattagttcaaccattgtggaaagcagtatgatgattcctaaaagaactaaaagtagaactatcattcaacccagcaatcacattactgggtatataccccgaggaatataaataattctgccataaagacwcatgcatacggatgttcattgcaatgctatttacaataacaaagacatgaaatcaacctaaatgcctatcaatgacagattaaatagagaaaatatgatacatatacatcatggaatactatgcagccataaaaaagaaggagcttaagtcttttgtgggaacatagttggagctagaggctgttatccttagtaaactgatgcaggaatagaaagtcaaatattacatgttctcgcttataaatgaaagctaaatgatgagaactcatgaacacaaagaagggaacagcagacaatgggatctgcttgaggagggagggtaggaggaaggagaggagtagaaaagataa

SEQ ID NO: 642124 - DNA, 615 bp, Homo sapiens
ccatctcacaccagtcagaatgactatcatttaaaagtcaaaagaacaaaacaaacaaacaacaacaaaaaaaaaaccagatgctggtgaggttgcagagaaaagagaacacttatacactgttggcaggagtgtaaattagttcaaccattgtggaaagcagtatgatgattcctaaaagaactaaaagtagaactatcattcaacccagcaatcacattactgggtatataccccgaggaatataaataattctgccataaagacacatgcatacggatgttcattgcaatgctatttacaataacaaagacatgaaatcaacctaaatgcctatcaatgacagattaaatagagaaaatatgatacatatacatcatggaatactatgcagccataaaaaagaaggagcktaagtcttttgtgggaacatagttggagctagaggctgttatccttagtaaactgatgcaggaatagaaagtcaaatattacatgttctcgcttataaatgaaagctaaatgatgagaactcatgaacacaaagaagggaacagcagacaatgggatctgcttgaggagggagggtaggaggaaggagaggagtagaaaaga

SEQ ID NO: 642125 - DNA, 570 bp, Homo sapiens
aaacaaacaaacaacaacaaaaaaaaaaccagatgctggtgaggttgcagagaaaagagaacacttatacactgttggcaggagtgtaaattagttcaaccattgtggaaagcagtatgatgattcctaaaagaactaaaagtagaactatcattcaacccagcaatcacattactgggtatataccccgaggaatataaataattctgccataaagacacatgcatacggatgttcattgcaatgctatttacaataacaaagacatgaaatcaacctaaatgcctatcaatgacagattaaatagagaaaatatgatacatatacatcatggaatactatgcagccataaaaaagaaggagcttaagtcttttgtgggaacatagwtggagctagaggctgttatccttagtaaactgatgcaggaatagaaagtcaaatattacatgttctcgcttataaatgaaagctaaatgatgagaactcatgaacacaaagaagggaacagcagacaatgggatctgcttgaggagggagggtaggaggaaggagaggagtagaaaagataa

SEQ ID NO: 642126 - DNA, 575 bp, Homo sapiens
taccggtaaagactcaatgacaatgcgatgctacacactatggaagaaacaaggagagattaaggtacctaatccrggtaaatgtggtttaaaaaaaaaatgcttctactaggtgacgatacttgagcaagtctttgcgaactgaactagaggttcagaggcaagaaaccatggccataggagaaaatgttggacactccccatggttggagcttaagtgttgatgggaaagtggtcttatataaacctgaaagacaacagagcccaagtcataaaggaattggtaaaaaccaaaagaaatcaggctccctcctaaaaacaatgggatgtcactgaaggatttcaggtgaaagaatcacataatccaatttatattatagacatttcactttgagtccatggccagtttaattctggattcaaaaagctcttagaaggttttatagcaattatattttcctcagtgtgacattattcctatatcttttccctacgatgtttagacttgagtaatcttagatatatgtagggacatggtctttctttgttagtcctggagcacagtttagaggaag

SEQ ID NO: 642127 - DNA, 484 bp, Homo sapiens
aaggatttgaatttctacaggtattctatttgtagaaataaaaataatgggaagaaaccatctcttctcctgaaattttttatacataaaaaactcatctaatatacattaatccagtacttatcatatgtgtagcactatgtttggcactgagaagacaataattgaaagttattggttatttacctatagaggctcaaaatgcttttgggtacacatgcagagaaacagagtattacaggatattgaaacaatggcaaagttagagacatgctgagggtgttataagaatacctgggagggacaaatgaatgtttccgtgggaaaggtctcattttctccatagttttggaatccaagctcatactctgtggatctccttgagttccagtgatgtagctctgaggcctagtcagccttcagatgctttycaaatctatagtaaacagagtttttcttgtgatttgccctctacttaaatctc

SEQ ID NO: 642128 - DNA, 449 bp, Homo sapiens
aaatagggaaagtgtgatcaagggagaaagagatagacaagaggaagaaaagagaaagagattgttagtataaagtttttttataggtcttctttacatattcatattcattcatttatataagaagcaagttattgacaattttattagccagtaaacatttatcaacctagacatcaccaatttccaaggaacaggaatttttagccaatctagagatgtaaaaagtggagttttttttttattctcttctattactttttcagcctcaagtcatctargtcttccccaagatatattacatttttatattttatgttatttcattttaacattaatatttttttacaaaatcatgccacagagaataggatagccataggaaggagtatgtgccactattcacagaaccgatttttagaatctgaaaaaagttggaatgttattag

SEQ ID NO: 642129 - DNA, 637 bp, Homo sapiens
gagatagacaagaggaagaaaagagaaagagattgttagtataaagtttttttataggtcttctttacatattcatattcattcatttatataagaagcaagttattgacaattttattagccagtaaacatttatcaacctagacatcaccaatttccaaggaacaggaatttttagccaatctagagatgtaaaaagtggagttttttttttattctcttctattactttttcagcctcaagtcatctaggtcttccccaagatatattacatttttatattttatgttatttcattttaacattaatatttttttacaaaatcatgccacagagaataggatagccataggaaggagtatgtgccactattcacagaaccgatttttagaatctgaawaaagttggaatgttattagtataacttgcctttgagaaaggatagaataatttattacttgcacaaactggctctgagtaaccctaatgatgaattctgtaacacctccttggaggagtcttgttctttgtcagtttcaaaattattcttcccttaatgtccttttccctatagagaatccctgggaacatacacagagaatcgtgacattatccataggtagagagaataataac

SEQ ID NO: 642130 - DNA, 580 bp, Homo sapiens
gccaaatatcagaggcaaatgagtgtcaagtttataacttactgttctagcaatggtatactgtcctcacatttgcataaaataatattatggttatgaaatatagtatttataccaaggctttctgaagctattttttaattctatgatcttcactgaatgtaagttgaaatactttatttagacttatgatggacagcataagttcaattttatagtacagacacaaattttagaataaaaatatttaaacaaataaaagtacacacacacacacacacacacacacacayatatatatataaaatcaaggctaaattccagattgagctgataccataaaactgatagaagtaaagaagaagctaatttagacatgcccacaataaaaacaagaatatgaaagagatgggttcatggtcttgggtcaatgacataatttttaataaaaactaagagaagccaaattacacaacacactttagtgtccaaaaaagtattaatttatactgtaaatataaacacaaatatagccagccacactgaaaccaatgagagataagaatatagttacagcaca

SEQ ID NO: 642131 - DNA, 517 bp, Homo sapiens
attcttatttgcatttgccaagcagatactttacatccagtcactgtaatgcaaaatatcaaaaacgtgaggaaacattgagcatattatttttctttttgtattggaaatattgttttgttgttattattacatttaaggagaatagtaagggatttaaaaaaaataacagtggagggtcaaacgaaaaaaaaaaacacaactcagtcacaaggaggaacaaataatggattggaaaccatcagcytaaaattaaagaaaactatgaatacataatatagtcatcgtgtcagaggcatttgaaccaaagtaactccatcttaaataggagctgagtaaaattaggctgaaacctactgggctgcattcccagatggttaaggcattctaagtcacaggttgagacaggaagtcagcacaaaatacaggtcataaagaccttgctgaaaaaacagtttgcagtaaaggagtctgccaaaacccaccaaaaccaaaatggcgacaagagtggtggtcc

SEQ ID NO: 642132 - DNA, 609 bp, Homo sapiens
caaacaaaaagtatcaccctggcttaatgtggggttggatattgagagggttggccaaagtataattatctgggtcactcaggagttcaggcaaagatagtactagagttattagaaggaggaggagaacaattaaacctagaatatctttggttgtatggtaggggtggaaagtgattttgtcagagtctgatgaaacccctgaagtgtcgttagaccctgtttcatgtgagaataaaaagtgaacagttgctagagcagtaatgatgaagggtaagatgaaatggaaggagaaaagtcacgtgagggtgcctttgtcaactgagaatcygcctcagattcattgtacgaggtcagttccaatatatgggatggctgaggataggtttataattactgtagcacctcagaatgatatttggcctcaccggagcacataggctatgaatgctgttactatagttgtgaggaggaggctaatgtcaatatttacggtttctagttatataattgactcatagtataagcctcagacaacgtgtaagaagaagcacatgaaaaatattgaagcactgttagcatgaaaatagtgtactgttcagccatagt

SEQ ID NO: 642133 - DNA, 556 bp, Homo sapiens
gctgggtaaaattaggctgaaacctactgggctgcattcccagagaattaaggaattataagtcacaggatgtgacaggagggcagcacaaaatacaggtcataaagaccttgctgataaaacagatttcagtaaaggagtcagccaaaccccaccaaaaccaaaatggcgacaagagtgaycgctggtggtcgtcgctgctggactcccatcagtgccatgacagtttacaaatgccatggcaacttcaggaggttaccctatatggtctaaaaaggggtggcatgaataacccacctcttgtttagcatattgtcaggaattaaccataaaaatgggcaaccagcagccctcagagctgttctatgaaatagccattcttttattcctttattttcttaataaacttgctttcactttgcactgtggacttgccctcaattccttcttgcgcgagatccaaaaaccctctcttggggtctggatagggacctctttcctgtaacaattgtagctgggtatgtgaaaagataatatataaaaagtatgccaatca

SEQ ID NO: 642134 - DNA, 641 bp, Homo sapiens
gtggtaattttctaaatgtttgtatattcaaggatattacctgatatattaaaatttattttattattttctttacctttcctcacaatgacatgggagctggctcttgaataaccagtagaacagttttattatacctgattctactctaatgacaacaaacagaacaagacatttgagcttattgtcactatttaaatctcaaacaagtggaatataacataatagtttcctgaggttaaatcaggaattattattatttatttaattatttgtttgtttatgttttcagagaccagatcttgctttctcacccaggctggagtgcagtggcatgatcatagctcactgcaacctcaaacccctgggcacagtratccttcctgccacagtctgctgactagctaggactatatgcctgtgacaccactcctggctaattatatttatttttattttttttgtagaatgggagggtcttactatgttgccaagctggtctcaaacacctggcctcaagtgatgctcttgcctgggactcccaaagtgctgggattacagacatgaaccaccacacccagtctagaaattattaatttctgtttgtattcatacttcaagctacagatagcttatatgtg

SEQ ID NO: 642135 - DNA, 517 bp, Homo sapiens
atgaaactacacatgtgattctagccagtattttctctagtgtcattagttaataggtgaattaaggaattaatgaaatatctgccatttaacatctcaactttgtctttttttttttttttctttagaggcagagtctcactctgtcacccmggctggaatgcagttgcgtgatctcagctcactgccacctctgccttccaggttccagcgattctcctgcctcagcctcctgagtagctggggttataggcgcctgaccctgagtccagctaagttttttttttattattcttatttatttatttttattttttaagtagatatggggtttcaccacattggccaggctggtctcacactcctgacctcaggtgatctgcctgcctcgggctcccaaagtgctgggattacaggcttgagccaccacactcagccttgtctttctatttgatccatgtaaaattcagttaaaaccaattccggtttaatgggatctaccccatctgcacctaag

SEQ ID NO: 642136 - DNA, 575 bp, Homo sapiens
acaaggtttggatctggacttgttgtttgctgcttgtctgacatttgacctcagtattcagcctacctcctcagtttttaaagggggacaatagtgtctacattagctataaagataatgtaagaatatatagtattttgaactagctgctggttgtacttgttttttaaccatcctagtcacagtgaaaatgaaccatcttcaacaaaatatattttatatagtcaaactttaagatgtctaatcctggatttggaaacatgcacttgaaattcaccacaaacacggagttcaacatgtcgaggttttaaatcagaaataagcatatgttcagttggtttttatgtctttttttctttttgaaaattatatttagagcatgtgtaggtttayggaaaattgagcagaaaaatacagagtttccattctttctctctctttctctgtctctctcactcactctctcctccccagtttctcacattattaacatttcacattggtatagcccatttgttacaattggcgaacaaatactgatatattattttaaaccaaagtctttagtgtatatt

SEQ ID NO: 642137 - DNA, 517 bp, Homo sapiens
atgaaactacacatgtgattctagccagtattttctctagtgtcattagttaataggtgaattaaggaattaatgaaatatctgccatttaacatctcaactttgtctttttttttttttttctttagaggcagagtctcactctgtcaccccggctggaatgcagttgcgtgatctcagctcactgccacctctgccttccaggttccagcgattctcctgcctcagcctcctgagtagctggggttataggcgcctgacmctgagtccagctaagttttttttttattattcttatttatttatttttattttttaagtagatatggggtttcaccacattggccaggctggtctcacactcctgacctcaggtgatctgcctgcctcgggctcccaaagtgctgggattacaggcttgagccaccacactcagccttgtctttctatttgatccatgtaaaattcagttaaaaccaattccggtttaatgggatctaccccatctgcacctaag

SEQ ID NO: 642138 - DNA, 452 bp, Homo sapiens
aacataaatgtgttcctcacaatgtgtacacacaagaaacaaaagaggtgaaagagagagatcatatcaaattagaaaatgaagcatagagtgaaggaatttgtacttgtaacctaacaattcatttgaaaaacaaaaaaaaaaccattaaagtacattttaataaaatcaaacaccccttcgcaatgtaacagaaaattagcaatgtccttccttgctgttaacttggaaggctgttaagaatgtaagaattactcttctttaccaccaggtggctcactttctatacctatgcctgatcagagatgccactgtggccccygagactggagataataaaattcccactagagggtgttgaaagaagaaaagtaattctttcagagcaaacctgaagtcctgaacaaggaaatacctgagctacagctaagatttcctcaccagcctgggag

SEQ ID NO: 642139 - DNA, 597 bp, Homo sapiens
tcaccagcctgggagacagagtaagatcctgtctaaatgaaaaaaagagaactatcctacagagacagaataaatgaggtggttttagactagggacatttaaaaccagatggagacttgtctaataaccattctgtgtccaagtccaaatggtttcacrgacttctcaaatgcattcataatgtgagacaggtatatgcagagtggagtgggggttggggggggaggtactgagagagaaagaaaagaaagcaaccttgaaataaaacaataattcacattatataattttgattgagtttggaattagaatggaaaaaaataaggaaaagggaaaaaaaataagccaacaaagttgaaaaatgtaatatggaaaggaaattcgcttttctagattagcaagattgctcttagcaatgaaccccttccctaaactgcattttactagagaaaatataataggccagtagccatagaagcttgtaacattatccaatgtattgctataaaaagccttaccatctggatcctaattctcctcaatatttaaagtgcagagcattttcttctcttcatcctaatttacagctatcactc

SEQ ID NO: 642140 - DNA, 665 bp, Homo sapiens
gaattaaagcatgaagtaacaaaaagtaaagttgtgctttctttgtgtgtttgttgttgtgtagcagactagagaatctattttctcaaattactttatgaatatccaatgtagaaactacaaatactatgggaactaaaggcaataccagataatatacattaaayatttgttaaagagtgaaagtccctattggatgctgcagagggatcacttgcatcaaacattaatgacagtgaagaaggtaaccgttctttctttctactaccctccaaagagacagcagacaacctgtgtacatggtctttttgctcaaagggtaggtccctagagttatcaaagaaagtacctggatgtttgagcttgaaaattcctgaccccaggtgataacttgtcctttaagcataaatctagatctgccccaaagttgtgtgtcacgctcctccatcagaactgaggtcatccccatcaagacaccatgccatagcttggaggctcttcccagaagagtaatgaaaagagactaatgtttttaaaagtgtgttacacatacaaagtgatgcttgtaaaaacaatcacaaaaactgtgtcttctgattctctgcttaccacaaacttcactcttgttgctaaattctgtgataacccagaggcaccatgagcct

SEQ ID NO: 642141 - DNA, 665 bp, Homo sapiens
gaattaaagcatgaagtaacaaaaagtaaagttgtgctttctttgtgtgtttgttgttgtgtagcagactagagaatctattttctcaaattactttatgaatatccaatgtagaaactacaaatactatgggaactaaaggcaataccagataatatacattaaacatttgttaaagagtgaaagtccctattggatgctgcagagggatcacttgcatcaaacattaatgacagtgaagaaggtaaccgttctttctttctactaccctccaaagagacagcagacaacctgtgtacatggtctttttgctcaaagggtaggtcccyagagttatcaaagaaagtacctggatgtttgagcttgaaaattcctgaccccaggtgataacttgtcctttaagcataaatctagatctgccccaaagttgtgtgtcacgctcctccatcagaactgaggtcatccccatcaagacaccatgccatagcttggaggctcttcccagaagagtaatgaaaagagactaatgtttttaaaagtgtgttacacatacaaagtgatgcttgtaaaaacaatcacaaaaactgtgtcttctgattctctgcttaccacaaacttcactcttgttgctaaattctgtgataacccagaggcaccatgagcct

SEQ ID NO: 642142 - DNA, 521 bp, Homo sapiens
agtagttaatattttttattagtgggtgtgttttgcgggtgttggttattagtgttcttatagttgaagtacaatgataatttttcatgtcattagtcatggttatagtccatgtgggaataatggcatatgctttatttttattaagtgttcttttgattatgggatttgtagatttttctttgaaaccttctcctatttatgggggtttagggctaattattagtggtgctgtgttgtggtattgtgttgaattttggtggggcttttgtggggttaatggtctttttaatttatttgggtggtatgatggttgtctttggttataccgcggtgatggctattgaggagtaccttgarccatggcggtcaagtattgacatttgagaggctttactaattaggattattaatagagtggtgttggttgggtgaatagttgagtacaatggggtggtggtcgcgattgatttaaatagcgtagacagttgaataatttttgagggtgagggggcagggtt

SEQ ID NO: 642143 - DNA, 595 bp, Homo sapiens
cttcatagtagtgtgagaatggactaattaatacaccaggttttcagaatgtatctttctgagaatgtttgtatatatatttagaggctatactaattttgcattcaatcatttaaatcactgttccaaaatctatatacttagtaaacaggtctrtgcaaaagagaattttaaagtcaaataaatctgaatataaaatggtattgttaaagactccacatgggaaacatatcaaagttagaaaaaaattaatatttcttcatcctttcaacttagccctccatgcaaaattaaatggaactataagttgttccaggtaaagccaatgttttattctcttctaaagtacaaagtgagaagtgtgaaataaaaattaattcagctgaaaagtcatcacttctctttggctttctcacttagaaatgatagattttcagtggtaaagtgaattgctctataatcttctgattgaaaaagcaataacatttgaattttagacatggttactagaaccatttagattttcatgaaattaatattgtttttcatattgcaaaatatgaaaaaacaaacttaaaaagaccaatattttcca

SEQ ID NO: 642144 - DNA, 597 bp, Homo sapiens
tggtgtattgtggctaaatagaaasctagtatattggagaagttgaatgtctgtaatgggtactttagtttaaggttattagttatgagattaagctctatggctagtaagaggcctaaggtggtcacatctagggctgtaagctttaggtggagcggtatagttgtttcgggggatgaagcaggaataatactgttggcgatgaggaatctggagaagatactgccgattgttaggcacttgagttaatcaggaagggattgttttcattaataataatcagagttgtgaagtggggttgtcctattagagcaaagaaaataatacgggccctatagacagctgttaaggaggtggcaacaagagtaatagaagaggatcaggcattggtgtatgacgtgtttgtggtttcaataataaggtctttcgattaaaagcctgtaaggaaaggcatacctgtaagtgcaaggctgccaataatgaggaggaagtgcagggtaaagtcttgaatagccttcctatttttcaggtatcttgttcatcattgagattatggatgatggaccctgaacatataaattatatagctttaaaaaa

SEQ ID NO: 642145 - DNA, 553 bp, Homo sapiens
tctaattgattatttccagtattattataactatttaagtgttctaatgacttcagttgattctcaagtttttttagggaactactatctgaaaaggataattttatctcttctagtaagtatcctgtgatggttaactttaggtgtcaagtagactggattaattaagggttatctagatagctggtaaaacattatttctgcccgtgtctgtgagggtatttctggaggagattggctggtagttggtgggctgagtggggaagatccaccctcaacgtgggcaggcatgatctaatcaggcataatttcagttggaaaggagaacaggagaagtaataaagttgcatgtcacggaaatcctctttttggaagagagtmggggaaggactagaggtgcttcaagacattgcagcacagaggccagttggagtagtctcagtatccaaggaagaaatgagaaagaactgagccagaggcttataagaattattgcaacacaacctgaaaatttgggaacactgtgatttccaatcatacataaagagaagcg

SEQ ID NO: 642146 - DNA, 533 bp, Homo sapiens
gattttgttgtttgcttacttctgattgcacatttattagttaatctgcccaaatctatatctttgcaatatgaagtgagcaaagtcatattttagaatacctttactgtagaagtttttagggagtttattgtttgtgttttgttttcattatttttgcattaaatattaacttasaagttttagcagaaaacaattcagaatggcaaaagcaggtaaaagcaatgaaaagaaattaattggtagtatttattcccttagatccctaaccaacctgttttacaaaataccttcaaacattaaaagaaaaaaatacacagtaatgttcttctatactcaagtatttatatctgaatggatattcttccaccttctccatccagatagccacctccaaatcatcatgtatatatgtctgtttataatttttctaaaacacagttctgctaaggtgaatgtatttgctcataaatctgcaaaatcccccctttgtctatgcagtcgaatctaaactacacagcctgtttaatctg

SEQ ID NO: 642147 - DNA, 569 bp, Homo sapiens
tagaggaacttataagccaatgaacaatctcagtaagggtctagagatgatagaccatgacagaagctacaaatggtccctgattcttggggtgaatgatttgaaggagacattaataagaggtaaggcaagataggcaggcaaagccttctaataagtaaatggcytttaataacaggttaagaaagccagactttctcctgattgcattaaggattattatttgggaactagtcatcagaaacaagtatgaagtaaaatatataatacaggcaataactcaccagtacaagcatgaatatgcaagcaagctgaaatggtctattggtaatctgaattatgaaatattttaaatttattccttctggtttatctgaaagtgaatctagtctcactaagttttttgacagcatttaaagtgttaagatttttcaatatattttaaatatatataataagtaatatgatcaataaattggaaggttagaggcccgagttccagttcttgatttagcactaacaaattatgcatccttgcaaaggtcatataacttctagtggtgtcagtt

SEQ ID NO: 642148 - DNA, 606 bp, Homo sapiens
aactcaccagtacaagcatgaatatgcaagcaagctgaaatggtctattggtaatctgaattatgaaatattttaaatttattccttctggtttatctgaaagtgaatctagtctcactaagttttttgacagcatttaaagtgttaagatttttcaatatattttaaatatatataataagtaatatgatcaataaattggaaggttagaggcccgagttccagttcttgatttagcactaacaaattatgcatccttgcaaaggtcatataacttctagtggtgtcagtttctataaaagggagataygtaactaatttaacactaaagtaattttcaacactgtgattatgaatacttatacctgaataatataatctgtggatttgaccttttgtttgtttgtaactgaatgctttcaaattgctcaaggaattgagaacttatttttaactaatctggatcagtcactttgatcaaatcatcaaaatctctttacctcatcattttatttgccaattggacttaatggcaatatacactaattaataatgcgaatcaatttcaacctaaaaattctgtgtacatatgacaatttaaggatt

SEQ ID NO: 642149 - DNA, 536 bp, Homo sapiens
ggtcatataacttctagtggtgtcagtttctataaaagggagatacgtaactaatttaacactaaagtaattttcaacactgtgattatgaatacttatacctgaataatataatctgtggatttgacmttttgtttgtttgtaactgaatgctttcaaattgctcaaggaattgagaacttatttttaactaatctggatcagtcactttgatcaaatcatcaaaatctctttacctcatcattttatttgccaattggacttaatggcaatatacactaattaataatgcgaatcaatttcaacctaaaaattctgtgtacatatgacaatttaaggattaagaccatactgtctcttctcccttctcagtctatttgatttttttctggcatcaccattgttaataatatttattagaacctaaatattatttttatactcatatatttatgttatatatttctcaccttggaaacatattttaacaagagattgctgaatcaaactggggcttataattttcataaatgtca

SEQ ID NO: 642150 - DNA, 526 bp, Homo sapiens
atcctaattttaaagacgtgagaaagagatgctcaaagagtttaaacaacatctccaaaattcacataggcaagatgtcatggagttatgattcaagcccagaaaatatgatttcattatattaaaatcatctcatcttatatctcacagtctgtctccttctctactttgtacaaactgaaaatgcgacaagcctacttacaaaaccaggagcagctgaaagcaagtaaggtgaaatgacaaaaatacacattcaatatcagcatcatgaagaatacagttgggtaagaaacaaaatatgccagaattttgttaactcttgacaccaccaggaaatgttacctggacagatggtatcccaggcctccaaggagcattgacataatgaaaaagatgaaagggaagagaaggcaggcaagcattcatcagccagagtggactctragactcgcttggcctgcatgcatcaagaacaggtatgcaagcaaagagaaccaccctgtaaggacagaaaggcccagcacac

SEQ ID NO: 642151 - DNA, 419 bp, Homo sapiens
cttagctactttttagttttgtcaaagattgacacattaattacgctctctgcgcttcagtttatttatctgtgatgatatgctaccccatgtttttgtgcagattaagttacatttcatgaactttttcctttttttttttttccctgtacctgctaaaataggtatccaagtattgttagctctctttctaggaacagggcatggtggctcacacctgtaatctcagcctcttctgaggctggggtgggagaatcatttgagcccgtcactttgaggctgcagtgagctatgactgtgccactgcactccagcctarctatagaatactaattttagtgttctttgcactgaactccaatgctgtttctgactgaaacctctcctcatggctctctaataaattgtactcagaattc

SEQ ID NO: 642152 - DNA, 645 bp, Homo sapiens
ataaaacttgttttgccagattattcaatttcataccagtccagtttatgaattaatgtttcatagattttgcaaaagctcttagcctgcttctctaaaaccataggtttagagattggaaatgatctgtagcgatgcctttgtcatacatacaacatttatttcattaataggagatgttattttgkggatttattgactttgtttgggttctttaaaccttttttattaatctttttttaaaacgtgtttatgaacctgtagagaatctacatctcccctgagattatttgcaaaatggtctgtgaaaatccatgtttgcattttctaagaaaaggaccagggggttttataagattctttaagaagcatgtgaacttgttaagaaaaacattggctaattcaacataacaaatgctaatttattttcaaatattttttgaagtttggtgtttgacatttttgtgttcctactatgtattaggtacaactgttttgtttgtcttgtattcattgttttgggatccctcagttaaactgcggtctcagtaccagagcagctaggaaaccttccctaaggggaaatgaaagggagctggacatggatacttacagtgcacctttgatgggatacttattttatct

SEQ ID NO: 642153 - DNA, 614 bp, Homo sapiens
attcacctatatgcgatccaaacacttcccattagaccccatctccaacaatggggatcaaatttcaacgtgaggtttgtagggggcagatatccaaaacatagcatggaggcaatatgaaattttaagaattcactatataacacagtaagtaaaaatattggcaatatctatttgaaaatttgcctatttagaaaataccacaacataagatggaaagaaaaaaaactggatggacactggtcttttcccgttgaggtaagccgaaattttattttataataaygaaatgatacaatggatatagcttgatgtgtcacgtggagaggtattgaattatgttgcatcagctatgtaaccacttttggcgtaatatccagaaaatagaagaaacaaaatgtttatgagtcttcctatacaactttaataaagcaacatctagcaaaggtacctaacttgacaacagatactaaagcctttgcactaaaattcacagggtaagtaaatcaaacattctagacatgagaaatataaaatcaattaaagacaaactgatgccttaatagattctgccattgatatcaacctacaaaaaaatggtagaactccttaca

SEQ ID NO: 642154 - DNA, 622 bp, Homo sapiens
aagttaggcttccgggctccctgtgaaatcaagctgaagatgacagactagaggtgttgttagcatgcctcacttactcagtaatagcaaaaattgtgtttagagattcacacagtgaacgtatatccaagaaggaatacagttttgcattctttgtgctatttttatactatacattttaaacatcactaaaagaagatgcagtgactcagaaaaaagtggttacttagtaagcatatctcaagaaaatattttgatattaaaaattatctgtaaaccatggttattcatacacttacttcaaaagatactgtattaaataaggtaatgcatgttaagtactctgcaaatttcctggtttgtgctactcagtaagtatcaactrtggatgtataataacaaagggaaattaggacaatatctcaactgaattcctttacaacaatgtattttataaattgcaatttagttcatacagctaagactaacaggcacagtctatttttaattatctaattaaaactttaacattcttcagtgttcttaaccaatctcagtgttttgctgctttttgttcactttaaaatattacatatgttattgaagaaataatgtatgcatg

SEQ ID NO: 642155 - DNA, 550 bp, Homo sapiens
atttatgcaaattaaaaaattatccaaatctaaggatactcagaatacttaataaattacccaacttaaattaatagttaagctggaaaataacaaattaattgaatggtaaagattttgtgcatcgctgttaaataggaaatttaaactaaaacctagaaacaaatttagtttattcatacgttttaccaaattgttattgaatgcctaccatgaacatggctctacacaaggcagtgggatgtataaaagagcaaaacattggccttgctttcattgaactcacaattcattaagaaaaacagttatatagtatttccacaaacacgacaataaaattatgcaaaaggtacaaagttaatatacttatgagaatagatagctacatgggatatgggtmtccagctcaggttccgtgaatttcatgatgtgtaagcagggatttcataattaaacacttatttgccagaaaagtaagagcaaagcaaactcttaaacagatgggaaaacatatacaaagctatataatgtaaaatagcttaatgtctta

SEQ ID NO: 642156 - DNA, 582 bp, Homo sapiens
ataatgccaagctctaaacaaatcactaaaaaagtgagtaagaacattattattggctcaggctagtcatttagagtgatggttactcacttgttcccattatgaacaatggaacatggggaaaatagctgggggatagaattaacaatgtctactatagatgccactgtaagataaagaaaacattgtacaatttgcatatcagtagtagaattataatttatacaattcaattttttattaggctagaaacttagtgtaaatatttattttaaaaggtcaggaggagagcttgaaaaccttactggaaaaaataacccgtttgttattacgcaggagctctccctctacaacacatctgtgagttaaaaaaaatttctttaaaattttaaaatctcattcttcatgtaagagggaattctgttatgcttttattattcccagtgagtattttgcctactgcttttgcacaggaaataaaaatactttgtgtagaataaaatatgctaatatctgtgcttgcaattcccattttttaatttgtrttcttcactgttaccacagaaagagacagaggttttt

SEQ ID NO: 642157 - DNA, 497 bp, Homo sapiens
tcaatttttctatttttcaattgctacgcaaatataaaaccatctttattactgtactttaaagtataatactgtagctttatgattaccatagctttctaaaaatcaatgtactatagctgcatagggctgaagtcaagtagcgtgtgcacttcaacttcatcattcttttttacaagttttagagttagcttttcaattcctattaaaaactcagtagtgattattattgagattacataaaatctataggttaactaggggataatttcacattatagatatttagcttcccartccatgatcaccttatatttcccttttacttaggtctaacttaacagcattttgtgtttttcattgtggtggttttgatcaacatttgtgaaatttatttctccgtacattttacattctgaagctatcttatatggaatttaaaaatataatttccaaccatttctagtacatataactaaaatagacattttaaaagt

SEQ ID NO: 642158 - DNA, 505 bp, Homo sapiens
ttaaaacacatttgctataaacattgttaaataatcttattaaaaatataaaatatattttcttttatgatcatcattctctacacgtttaggcaaagttacctaaaagagcatgacccaagcttcaaatgtataccaagagcataattgtagaataagataggtcaggctgggcatggtggctcatgcctgtaatcccagcactttgggagactgaggtgggtggatcacgaggtcaggagttagagaccagcctggccaacatagtgaaaccccatctctactgaaaactcaaaacttagtcgggcatggtggcatacacctgtaatcccagctactcggaaggctaaggcagaagaatcgcttgaatccaggaggcggaggttgcagtgagctgagggcatcccactgcactccagcctgggcgacagagcmagactctgtctcgagagggaaaaaaaaaaaagagtaagataggtcagaccatcttacacacctcctccct

SEQ ID NO: 642159 - DNA, 553 bp, Homo sapiens
aattaggaggattcaggagcaaatccagtctgcaggtggataacaggagtttcaaaacggtacagagctgtgatctaataacaggtacatatagctttcttcagaaacttaaagttaccctgatttttaccaaagatgttcagaataaaacagatttgtaaactttatcagattttgtctgcaagaatagtagtatggtcacagtaatctcagatttaaaaacctccttgaggctaagaagctaagtcaaggtagactttagattttacctatagttttaaggttcctgggcstgccaggaaatgataatttttaattcagtgtaatgctgagaaccattgaagccaggcattctacacattctcaaatatgacattttaatcaaagccttggtaatacaaccagtgtttccaattgtatcctgttataacgagagccgatttttattgaacttaagcaaatcatattgccttaagagtactcacaaataggctgggcacagtggctcatgcctgtaatcccagctctttgggaggccaagacaggtggaaca

SEQ ID NO: 642160 - DNA, 402 bp, Homo sapiens
ctggtttctctgacggtgtctccttggacacttatacgagggggtcagtgatttcaataggractgggaataaaaacgtattgcagtttatgcttctatgaagtgtgatatgtcacgacggcttctgggtgggctgttcctgagcttgattgagatggtgtttggggaaagcaatactttacttatcacctgtaggagatcacacaacatgccagattcaagtgatgggccccatcgtaaagaccacagccttcagacacaccatcagtgtggcagctcattatacagctagtctggcatgtctggctgcctaatttatgggacctatgacattttggcatggccttggccttctgatcctggcatcctttctgccttatatccatgggtgtggatgattct

SEQ ID NO: 642161 - DNA, 525 bp, Homo sapiens
attatcaaatagccccatttttcagatgagaaaaaaaacagaggctcaggaaggccaactggctagcatagtgtgacatgttattaagaggcaaagtcaaatgtaagcctaggacttctccccatacatctggcacagattttccagtagccctcaacatgtatatgacttggataaaagtggggtgagggggaagcagaatccctgttactcagctgagtgctttacccctccctctactgacagagtgaagcayggagcctcctttgtccagaaaacaaaatacctctatgaaagggaagtcatggggaaagacagtgatgtctgtttgcatgaggaggggaggagcctggagattccaactagttttaagcaaatgttcaaccagtccaccagatgcagcctcatgcctcattctcatcctttgggataacttggggcctccatgccagggtcctcagaggtcctgcaggacaaactgctcacttctcctgagccttcccctctgcagatccttagagtgta

SEQ ID NO: 642162 - DNA, 579 bp, Homo sapiens
agagccaggtgcattggctcatgcctgtaatcccaacgctttgggaggctaaggcaaggcagatcacctgaggtcaggagttcgagactagcctggctaaaatggtgaaaccccatttctactaaaaatacaaaaaaaaaaaacaattagtcaggcatggtggcaggtgcctgtaatcccagctattcgggaggctgaggcaggagaatcacttgaacctgggrggcagaggttgcagtgagctgagatcacgccactgccctccagcctgggcatcaagagcaaaattccatctcaaaaaaaaaaagttctgcttagagactaatcttggttgacagatttctatcaagagaaactcaggcatttttcaagatagattcaatagtcctagtatcttctctggtgctgattctgtgctgctctgcatctgtgctgctctaagcatccaagatgagcttagcctaggcactcagcagggacagaaagggcagagagatggccttttcaggggcaccctgcctgcttgctggggagacaagtaaggttattccaaaagcaacggataactcaaagccaaac

SEQ ID NO: 642163 - DNA, 643 bp, Homo sapiens
taaacctcctccatgtacccatttatgcctctctcttcaagttttttttttcacttttaaatgttttcttttataaaagtaatgtatattcagataagaaaaaatcatatagcacagagtagaacagagaataaaaattagtctttcagtcctcctcagacacctcccccaactccagctccactcctcatcagtaagtatatgtatattgcattcttctacaccaaataaatcatactataataaatgtgttttttattttttgttaatttccaaagcattacaaataaaatgattttatttattttcattggctatatagcattttattgcatgcatgtgtcataatatttatgtgccacaatgtatttaatgtgatcccttctaactgacattttagtatttctccatttttcactgttacgaatcatgctgccrcaaacattcttgcacatatatttttacacatttgaaagagtatataaaatcctaaaaatgacattgcctgcacatagaataagtatattttaaatttaggtttcaacttctaaaataatgcttttgacctaacgcattctgactttcaaaagcagtgttttgcctaaatgctgtaaggtaaaagacaaagagaactacacaaaca

SEQ ID NO: 642164 - DNA, 585 bp, Homo sapiens
aaatgattttatttattttcattggctatatagcattttattgcatgcatgtgtcataatatttatgtgccacaatgtatttaatgtgatcccttctaactgacattttagtatttctccatttttcactgttacgaatcatgctgccacaaacattcttgcacatatatttttacacatttgaaagagtatataaaatcctaaaaatgacattgcctgcacatagaataagtatattttaaatttaggtttcaacttctaaaataatgcttttgacctaacgcattctgactttcaaaagcagtgttttgcctaaatgctgtaaggtaaaagacaaagagaactacacaaacattgtgtcttcattagtaaatttgtttcctatagggatactgttagattytgaaactattttatatatacactagggttgaacaaataagtaaatatattacagaaatgaaaatcaagtttctcactattggacaaagaagttacaaataagcaaaggcagaaaactgtaatgaaatctgttgcattgaattagtgttagagacatcagcacaaactcatttatgatcatca

SEQ ID NO: 642165 - DNA, 569 bp, Homo sapiens
aaaatggggtcatgtcaaaggacacaagccactctgaaaaggctcccaatacgatgttattgaattaaatcctaaagaacaaaataaataaacgatkggataagcaaataaactccaactaatagctgggcatggtggcatatgactgtagtcccagctactcaggaagctgaggtgggaggatcacttgaacccaggaggttgaagctgcagtaagctgtgatcatgtcactacactccagcctgggtgacagaacgagaccctgcctgtaaaaaaaataataataattccaactaataaatgtagaacaaatgacagaaatagaagatcaccattagaacatctcaattacaattactgtaagcagaggcaggctccatctctgaatgaatgctaacattaacaggtaaaagtttaagaaaaaacatgacgtatgttcaaaatatcttcctcaaaatacttattagttactgtagtgagaaatgttaacaaattctttgatacccctccctttgaggtggaccttaatttccctctccttgagtgtgggctgggacatagtgaatct

SEQ ID NO: 642166 - DNA, 601 bp, Homo sapiens
ctatctatgttgctgcaaatgacatgatttcattcttttttatggcctaatagtatttccttgtgtatatatagcatatattttttaacccattcatctgttgattcccacttaggttgattccatgtctttgctattgtgaataaygctgcaataaacatggcgttgcaggtatccctttgtaaaatattaatacatttttaaagattaccatgatacttaaatgccacattcacaagtcataatgcaataaaatgagaaaccatcaaccaaataatgccaaaaataaaatctctggacttgtgatttaaataacacatttatctcaataattactgaattaaaggttaatcaaaatggaaataacacattattagaacaaatacaagagcacagtatatccaaatatgtggagtatgattcttcagaagatattgtaaagctttaagttcattaattagaaaataccaagtctgaaaataaataacctatgatttcaacttaagaaattaggtaaaaagcaacaatataaaaccaaagacaataaagagaaataattaataaagatgaaagctcaaatgaacagaaaacaaaaagtgga

SEQ ID NO: 642167 - DNA, 576 bp, Homo sapiens
taaagtaaaactcttctccaaacaaaactgtttaatgtactaggcttatacatttcacaaaataatcacccaacgaatccaatttttctattaaaaactcaaaagcatttttaaaaaagtgaaaccacaatttactaaaacttgaatgcttatgaacaaaatttgtatctatccaagttttaggagattcagaaggcaaaaatacctggaatataattactctgtggctcaattcctgctgggaagttagtgttttctggaatggagtgagtatagtcatccagaggcggaagttctgttaggatctcggtgtgtcggggcactaatactggaggcaaaactgaaaaagttcaagaaatccaagttaatggcaaagagcaaaggggagtgggggaaccttttttaaagttttcaacaagaagagaagttgyagcttaatttttaaagctagggtccacctactcgatatatactagttactgagaaaatgacaaatctgattatggctctaacttaggtagtctattatccaaatttccaagttctaatttatctcaaacttttgggaacaatgtg

SEQ ID NO: 642168 - DNA, 569 bp, Homo sapiens
tatttaagacaagagcactctcaagtaaatgatctcagctttcacattaagaaactagaaaaagaagatgaaagtaagcccaaagtgagcagaataaaaaacagagatcagagcagaaatagaaaaaaatagagaaagttaaacaaaaagcaggttctatgagaaaaacaataaaattaataaatgcctagctaagctgatcaagaaaaaaagaaggaagacatacattaacattatcagaaataagagaggtgacatcactrtagattctacagatattaaaaggataacaaagaaatgttattagcaactttatgccaataaatttgacaacttagatgaaatgtataaattccttgaaagatataattcccaaagctcactaaaaaataaatagatagcctgaatatctactaaagaattaaatatgtttaactctcccctctcccccaaaaaacaacctccaaacccagagaatttcactggtgaattctaccaataatttttatttaagaaaaaaatagtattaattataggcaattgaaagttaaagaagaaagcatacttct

SEQ ID NO: 642169 - DNA, 489 bp, Homo sapiens
cctgtagtcccaactgcttgggaggctgaggcagaagaattgcttgaacctgggaggcggagtttgcagtgagccaagattgtgccactgctctccagcttgagcaacagagtgagactctgtcaaaaaaagaggtatacacagtagtcatcccttctctgtgggggatatatttctgtggggtatacatcttcagtggatgcctgaaactatgaacagtactgaactctaaatatactatgtttttcctgtatatacatacctatgataaagtctaatttatgaattaggcacaataagatattgaaaaccactactactaataaaataacattatactgcaatataaagttatatgaatgtgatctcttacaaatatcttattgatttacttacttatattgataatattcttgractgcagttgactatgggtaatggaaaccacagaacaagaaacttttttttttttttttgagacagagtttc

SEQ ID NO: 642170 - DNA, 581 bp, Homo sapiens
ctaataaaataacattatactgcaatataaagttatatgaatgtgatctcttacaaatatcttattgatttacttacttatattgataatattcttggactgcagttgactatgggtaatggaaaccacagaacaagaaacttttttttttttttttgagacagagtttcactcttgttgcccaggctggagtgcaatggcacgatctcggctaactgcaacctccccacccsgagtccaagtaattctcctatctcagaggaaactaatgtattacttttaaacaagttttccacccaactagacagaaagctgtaagatgcttcttcatataggatggtgccatgcacaaaaaagggagcaatgcttctcatttagataaatacttttcagagtgcttcaaaaactacattgcatctatcattttattttttatttttttgcactttctggcactttgccaattgcaggatccacactagaaagaacttggtgctatcgtggggcctaaaaaggaatagcttctgcctgcattctggaacttctgattgtatatcctattaagagtggctgtcttcttt

SEQ ID NO: 642171 - DNA, 582 bp, Homo sapiens
aagcttcttctagagccaagaacacagctttgtcccacaagctgaaaactgagtctgrgcaagtgggtctcccctatgccttagtggagtggaaagagaggaaggagactgagtttggggaagttaacaccaaaccttctcttggacctgaaattccccaggaatcttgaaaacagattgtgtttggaaggcagggtgtctaagccaagagctgcctaaaccagcccaggccagggagccagccaatctgtactggatttttcttttcctcacctttaatgatgttgtttgtgcctctggactgacataagggctggtgggtggcaacaagaggtggaggatgggagggcgtcgggatttttcacatatgagtgagaaagagaacaaactgtgtccaccagaggcagtgaatgataacattttcgtaaggccatagactgaccttttacctgggtgttggggtagggagggtattttcagaattaccagagacacttatgaaaccacagcatcgaataacactggtaagtatctttgtcatttcaacccttcaatctaaagtcttatagatctcataaccca

SEQ ID NO: 642172 - DNA, 597 bp, Homo sapiens
tacgttcttgttaataaaagagacatgggtgagtcctctaaatccctgcacatattcttctcagatgaaaaaaacagtctgcttactaaatatccatttttctttcttgttggcactctctcaggaagaaccagctcagggcagagtgcgctggggcagcaaatgtcagagggtgcagaaagaggtcaagtgtatcactccttggaacctattggttagttttgagttgaccaaagctacagcaagtaatttcatcattaatcttaaaaggaaaagggatggtgacaaacaaccagagttggttaaaaaaaaaaaamccaacatctgtaaaatgtcttcctttttatggccgaaagtgatggtttggagaaagtatgtgaacctccttcaattagcagagctattccatttttattcatattttctaaaagagaaattttcattcttagacaaccctaatcctgttatgaggctggtaatgtgtatcatttttaacccttgacatcatttttcatttgacaaactgggccttccttatcagttgttttaaaatttcttcctctgtgctgctactggcttttggcactttcatttaag

SEQ ID NO: 642173 - DNA, 533 bp, Homo sapiens
agaaaaactgttctctctccagagagagaacagtgaggatgtaatatgtaaactttgacaacttaagcagccatgttttctgccaggtgaacactggaagaggagaaagtttgcctgcagatggagaagaacgagcacaggtagagaggagtgtgtgtgtgtgtagggtgagatacagagacagagacattctgataaacattctaacagagatgaaaagaaagmgaaagatgaattgaagtggcccttccctggatgaatacaaggagagaggagcagcagggatgtgggaggggaaattcaactcctgggaagtagtggaatgagaaaattagatctgctcacctctttactgctgccctgcacaccaagatcagagttggactgagaagtggaccactcaaacgggtacatggtacaccaatgcacaaatgcatttaagtgctcttaggaatatcttactgacactggaaaatccccaggggtattccaatgacaccagaaatgtcgcaagatggagcaaactgcatttc

SEQ ID NO: 642174 - DNA, 643 bp, Homo sapiens
tgcacaaatgcatttaagtgctcttaggaatatcttactgacactggaaaatccccaggggtattccaatgacaccagaaatgtcgcaagatggagcaaactgcatttctaatactcctctcagggagactctgacatgcggagggaagggattctttggtgagctgcttggaaggcagatgcgttcccctatgagacatgcttgaggtcaacagatggtctttaartaaccttcaaacgagactgggtcatcttaaaatcagggttctcatggagcttggggccaaagctgaatttatttgggaaggaagatctttgagtgctgccacccactgccttttctctgcccttcccttcatataacatcctattcttgttcttttctgaacatatttagagaccatcaatttgaaggcgtgcagaattaaaagcctgcctagagcccccctcttttatcctctggaggacacccacatgtctggccttgagtgattgtttcctcttctatattttttcttaggctcttctcttatctctgcatgatgcttttttcaaggactagtttacattctatatatgttagcccagtggttccatctaagccaccacggacaccaaccttgaaccctctgcagaagagcta

SEQ ID NO: 642175 - DNA, 510 bp, Homo sapiens
tgcctctcaacatctgtgcataccttcctcagcctccttgggtgatcttaaatactgtacaggatgaatcatgcttaactaacacaaactaccattaaatacacgtaataaacatgaacattacatctggttgctgagtgttcctagataggggcagaattaagcttcacctcacccacacctacytaagctctatccttctctgaccttcaaggcaagctctcaggctggcctagcctctctattcctgccatgctgttttatgggtttctcagaactctctagaaggctgccactttggtcttcttcaaggacatacaatttggatcctgctttcaccatttatctgctctttggtcttggatgactgattgaacctgttactatctcagtttcttcaactataaaatgggaataatctcttggagttgtcgtgaggattaaataaagtaatacaagtaaagcttttggtgcctggcccactgtaaatcctcaaacagtattaatttt

SEQ ID NO: 642176 - DNA, 555 bp, Homo sapiens
agcaacaggagaacgtgtaatcagtaagaagaggagatgagaatgctaaggggcactgctgtgacctgactgtctataagtaggacattatcacctcagggttaagcatgtctgctcatgtcaatacttgatgagggaaaataaccatataaatagattcttacctgcacaccttgcatttagaatgtatttggtgccaggatcttagggacatttagaagaattattttatttaaagtctccaaaactttctgtgagggaaaaaacmaatctgaaaagccttttttaccagcaagaacagcagcatctgcttaagaacacatagcaaccctacattcagattaggacaggaaataaaaaaaaaaaacatatccaattgaaactgcgggaggacacagtagacagaatgtaattagttgggttgactgtcagccaaaacctcaggcaaccacccccttgctcttatgaaaactgcctggagatttttaatgatgatgagcagttaggatctcggttttaaatcttctctgaaatgcagggcgccatcattccctc

SEQ ID NO: 642177 - DNA, 555 bp, Homo sapiens
agcaacaggagaacgtgtaatcagtaagaagaggagatgagaatgctaaggggcactgctgtgacctgactgtctataagtaggacattatcacctcagggttaagcatgtctgctcatgtcaatacttgatgagggaaaataaccatataaatagattcttacctgcacaccttgcatttagaatgtatttggtgccaggatcttagggacatttagaagaattattttatttaaagtctccaaaactttctgtgagggaaaaaaccaatctgaaaagccttttytaccagcaagaacagcagcatctgcttaagaacacatagcaaccctacattcagattaggacaggaaataaaaaaaaaaaacatatccaattgaaactgcgggaggacacagtagacagaatgtaattagttgggttgactgtcagccaaaacctcaggcaaccacccccttgctcttatgaaaactgcctggagatttttaatgatgatgagcagttaggatctcggttttaaatcttctctgaaatgcagggcgccatcattccctc

SEQ ID NO: 642178 - DNA, 598 bp, Homo sapiens
gcttgttctttaagcactagctattctctccacacaaagctgcagggttctaacattgttttatgttatgttcacaataagcccaaacacatccagaagggaaagagcccagtcgtattttaaaaaaataaaaaagcataaggctgtaaaaattgctgaaactttgctcagcaaagaagctatttattcaaagtaaatgactcactgacgagaaaggaggaaggagcttcggagaagaagattagttagctgtgaatataaccctcccaggctctctcccaacctttctccctaaaaggtattctagcaggaatgtgtagtcactaagaatgtgaaaggggtggtggggtggtaatccagggcactggaaaagcttgaaaaatcccctaaagagagaatattgcctggtgcatcggggacaggcatcccttttcttgargaaaaaaggaaacagaatgctatgttcctttggaaaaaggtagaagtcgaggggagagatcagagccacaatggcaggagttttggggtccagtgactactatttatatcctccctattacacattagctgtgtgactctgggtaactagtttaacttc

SEQ ID NO: 642179 - DNA, 638 bp, Homo sapiens
cctggtgcatcggggacaggcatcccttttcttgaggaaaaaaggaaacagaatgctatgttcctttggaaaaaggtagaagtcgaggggagagatcagagccacaatggcaggagttttggggtccagtgactactatttatatcctccctattacacattagctgtgtgactctgggtaactagtttaacttctctgagcctatgggaacttgggggaagtaatataatgtctctcatagggcttcagtgaagggtaaatgagatatcatctgtaatgtttatcacacatagtagacactcaaatggcatttttttaatcagaagaggactgcaggatcaggaattttcatgtatgcatgaattttttattgataaccattggtgaaacatagcctcttattttaaatgtgcataaatatttcaaaggttgttcaatcagacttatacaaaaatacaattatacctataagtgtaattgctagacaagagtcagtttgggaagcaagtcaattaaaayaatattatttggcaaattgaattattctctatcatcaaatgtcccaggaaaatagtctgactttttaaaccatgaaaatagactttacaccaaaatgtataatgctgccagtgaagaa

SEQ ID NO: 642180 - DNA, 521 bp, Homo sapiens
ccaacttatcatccactgtgacagtttgtgctttgatctttttacatcttgtttctgactctgggtttgaaccaccgaaggaagcacctggcttttattttagtggcttcatttaaaagattatgatccaaatgttggcctgaatttacccacaaggccagaaatgtcaggatggctctggggtccatagagtatctccttggtgatccttgataggctgaaccgactgaactgtgcggaagagcagcttcacgaaatttcattcatcagtattagttgggcacttactatatggcatggattgctctaagtactgaaactctgcttcccctgaagctggttctccaaaggcagcaacaaaaacttaaaacatgattcatatatatgactgtttgtgaatctctttgaaatacawctactttaaatgactacacacaaatataattggcgatttcattgattctagggaagacaacaatgagaaatggaggtaaaatgtgaaattcagttgccaaactacc

SEQ ID NO: 642181 - DNA, 458 bp, Homo sapiens
attggtcattttgtctacccagtatttctacatcttttctttggtatgagcattctagctgtcttttgagaaattactatccctacgttttatgyggtcctcctaatggacttgtcaatcacagtgtcctgctagctacgtcttccattcacaaagtagggacatgacatgccctaagccaggataatctctattctagaattttgtcacaggaccaaatctactgatactaactcactcatagtcaatattatacgtatctcagaagcgattttagctctctatgttctgttgcttgactattactttaattgtggaagttttaagttcactatctttctaacaagttaatcctttcccttaaattcggccagattgttattctgtggctttcaacaaagtaaccatagcaggtaaaacattgctcagctacatcaacactgaatgaacaactaact

SEQ ID NO: 642182 - DNA, 458 bp, Homo sapiens
attggtcattttgtctacccagtatttctacatcttttctttggtatgagcattctagctgtcttttgagaaattactatccctacgttttatgtggtcctcctaatggacttgtcaatcacagtgtcctgctagctacgtcttccattcacaaagtagggacatgacatgccctaagccaggataatctctattctagaattttgtcacaggaccaratctactgatactaactcactcatagtcaatattatacgtatctcagaagcgattttagctctctatgttctgttgcttgactattactttaattgtggaagttttaagttcactatctttctaacaagttaatcctttcccttaaattcggccagattgttattctgtggctttcaacaaagtaaccatagcaggtaaaacattgctcagctacatcaacactgaatgaacaactaact

SEQ ID NO: 642183 - DNA, 382 bp, Homo sapiens
ccccactgatcatagaaaacttcacaatgataccagccatgtcttcatgtcttctaaagctgtcacttgagatgtggatctgcggtgggaaattcatcatgctgaacacagtcaatatttggtccaatcaaagtgtctttttgatcatgattcytgagaaatattgcacctcaagtggatgtttattttcatctagtagctcctttgagaagcagatagtaaaggaataagagacttttaatccatgatgcaattcatgatttaattcataattcaaggcaattgccctacttcctgaaatcacacaatgttgaaagcaatcaaagacaacagtgtagccaaatctgtctatgtctgtcatgatcatgtcacaaagggaaga

SEQ ID NO: 642184 - DNA, 545 bp, Homo sapiens
ttccttatttggtgtcaaggcttcctgatccttgactgactattgaccttaggtaaccagggaaatgctgacttctccttgattttctgtcttctaggacttggctcatcttggcctgctgtggcccattttgatrtattggcaagtgctgtaacactaactctcagggtgctgatttaggaggtgggccccctttctagctccttcccaaatctgacccattcttctggtcttcccctatcctctgacatttatgctcagtgtgatattttgtaagatgttggcctctggagcaaacacagaagtcatttcatataagccataaccatattgagcagaaggcttacttaaggttgagaagttcagtgcaaaaaatcatgtttagctttaggagcaaattcaagtacagccacatcttgagaagatatgatgcttacagttgtgaaaaactctgaatatgtcaaggtagatgcgatagttaattttacatgtcaatttaggtggaccatggtgccagggactgagtcaaacattattccagatct

SEQ ID NO: 642185 - DNA, 514 bp, Homo sapiens
attcaaatttctttcttatttcattcatcctgcccagcactccaaacctttttttttttttttttttggaaaaataagttttggccaattaaatcaccaattggggggtggcggaaaaagggccaatggggggttgaaaaatcaccctcagagttcagggctgcccgggccccgccaatcagactatctgtccagaagtgcatttcctcctgctccatgacaggagctctccactttacaaaactctttgcccyttgttccttgaacccatcttcaccattcttatttccaacctcgactgggctttcttccatttcctcctcttctgcctggatgtcttctaagaatactcactacactccttgcattaactgaagtttggctttccctggggccacagattctcctggggctggaaagagcagaggttgttcactccctggagcccaagtgacttaggagaggaaaagagaggaccgcagcatgttctttgaccttcattgccactctcatt

SEQ ID NO: 642186 - DNA, 518 bp, Homo sapiens
ttttataaagggcagttcctctgcacatgccctcttgcctgcagccatgaaaaacgtgactttgctcttccttcaccttccaccatgattgtgaggcctcccaagccatgtggaactgtgagcccattcagcctctttttctttataaattacccagtcacagatatttcttcatagaagtatgaaaatggrtgaatacagatagcaaagttagagcctttagctgatgcaaaagatgtccttgttagaataactgagctgtgctccctcagagatattattccttttcttaacttaaaaatatatatatttttaaattgacatgtaaaaatcgtatatatttatgatgtacaatgcgatgttttgaaatatgtacatacatgctgttgaatggctaaatcaagttaattaacatatgcattacctcacatatttatttgtggtgagaacatttaaagtctattctcagcaattttcaagtactcagtacattgttattaactataatcaccatgttg

SEQ ID NO: 642187 - DNA, 574 bp, Homo sapiens
ggaactgcaattccaaatcaaataaagtctaagagggatgtagggctggaaagagaccatctttcaagttctttccaacccaagatgttgtgatttttgaagctttccttgcaatagatgttgtttaactaccttgtgtcttctgtgaagttgccaccatgaaagctggacatgtttggcacccacttcccttggcacagtttatatacttgtacacttgttatagtatcagcgctctagattctgttaatgcatgacaggaagcataaagagtactaatcacaagggcaattttccaggttgtatgtactatagagaaaagatcatatatacttggtaattatcttttctccatagcacatataacctggaaaatatatacttggtaatttaaaatrtatacttggtaattttagacattttaaccattacttctatgaacagcagacttcacttgttataatcacataattagaagacattattgcagttcataaatgaaattaattataattttaattaaattttcaaaggacaatctaataaaagtaggattgattagaaaattatcaat

SEQ ID NO: 642188 - DNA, 503 bp, Homo sapiens
tcctccaatagctaggatgaggagaactgtctcaactacttatcaaaatccagaagcattaaggaaaaagttaaacttgatggcattaaaaaaaatacgtttgcaaggagaaaatactctaagcaacgtaaagaaaaatgacraatgggaaaaactgcaacttttatcacaaaggttgaacatgtctaatatataaagagcttctaaaaatagagaagaaaaagactgcaacttggtagataaatgggctagggaaatgaacagactgtttcttaaaaaagaaaagcaaatggctcctaattataatatgctcagccttgctcctaataagagaaaagcaaaatataatatcctgtccatttctcacataccagattggcaaaaatccagaagtttggaaaatatactcagttggcaaagttgtgggagagcaggcactctcttacactgctagtgggaagcaaaatgataccacatctgtggaagggaatttggcaatatct

SEQ ID NO: 642189 - DNA, 389 bp, Homo sapiens
atctggcagaaattgcagaatttattgcctatttttgttttgctgcttaatgggatgttttgcacataataggttgagtcaaagaatccataaatatagtagattcttattattcatgatagttataaagtccaagtcattggtctttgctcttggggaaatacagggtcattctctyaggggaaatacagggttagattcctgcaagctactgtttacaacatttttgtccaccagtcaatacataacgttgtttcatgtgtgtttctgtttaaagacaccttatttaatatatgttgttgattcattaatattgaacacatggccaaaatcattataactcattcctaaatgatgcttatctaacacatattttcttcattaggtac

SEQ ID NO: 642190 - DNA, 619 bp, Homo sapiens
gatagcttctgatttcctctcttgaattttcctttctctggactaccttggggaaattctaaatcttgtaaaaagaaactgcttaccacacctttgaarcacctgggaagttacttttgataaagttcaaaagccagaaatgttggccgcatggctaaagttgggtaatacgaaatttaaaaggattttgttaagagcactaaggttaaaagtcagcttaattaaaagtgaataaacaagttatggatacatttaaaagacctttatgtttttctcttcttggatctcgtttttctgtaaaagagggttttttcttcttagtaaactgaattatttttctccattttttgtcttgccactcttaatgcacacataagaggcactaagataacttttggtagcctgagactccttgagaaaaacagaggaagcaccacagaccccattttgggaaaaacaaacaacaagaaacaaacaaaaaaccctctgttttcttcatgacaaccaaggaattaaaagtagatggatcactctcaaaatcaaaggctctgttctgttttgcattgtgttatctgacagtttgaattttggggatatcagaaattactttgcattatga

SEQ ID NO: 642191 - DNA, 499 bp, Homo sapiens
gtgatctgcccgccttaacctcacaaagtgctgggattacagtcgtgagccactgcgcagggcctaatttacgttttaccaacagtgtacaagagtttctttttttctacatcctctccaccatttgttatcttttgtctttttggtaatagccattccaacaggtgcaaagtgatatttcattgtgacttcaatttccctggtggctagagaggttgatcatttttcatatacatattctctgtatgtcttcttttgaaaagtgtttattctggtcctttgcttatttctaaatcagtttattttcyttctattgaattgtttgtgttctttgtattttgcatattaattctttatcagatgtatggtttgcaaatcttctctaccatactgttgattatctctttaatcttttgattgtttctttgactgtgtaaaagctttttagtttgatgtaatttcatttgcatattttagcttttgtttcctgtccttttct

SEQ ID NO: 642192 - DNA, 596 bp, Homo sapiens
aatgtaaataattgggtttatttctgggttttctgtcctgttcatttgctctctgtttctatttttatgcaactattgtgctattttgatgactgtagtactttgtagtctattttgaactcagatagtgcgatgcctgcagctttgttccctttactcaaaattgctttgcctattcagggtttgtttttttktgtgtgattccatataaattttaggatttgtttctatttttgtaaaagctgccattagaattttgataggaattgcattgtatctttagatttctttgggtattagggacattttaataatagtaattttccagtccatcaactcaaaatacatttctacttatttttgtcttcttcagttttccctatcaatattttatagttttgagatttgttattattgctgatatttttgagacaggatctcattctgtagccaagactggagtatagtgtcacaattatagctcactataatctcaaattcctgggcttaagcaatcctcctacctcagacttccaagaagcaaggactatagacacatgctactatggccagccaactttttaaatttcttgtag

SEQ ID NO: 642193 - DNA, 596 bp, Homo sapiens
aatgtaaataattgggtttatttctgggttttctgtcctgttcatttgctctctgtttctatttttatgcaactattgtgctattttgatgactgtagtactttgtagtctattttgaactcagatagtgcgatgcctgcagctttgttccctttactcaaaattgctttgcctattcagggtttgtttttttttgtgtgattccatataaattttaggatttgtttctatttttgtaaaagctgccattagaattttgataggaattgcattgtatctttagatttctttgggtattagggacattttaataatagtaattttccagtccatcaactcaaaatacatttctacttatttttgtcttcttcagttttccctatcaatattttatagttttgagatttgttattattgctgwtatttttgagacaggatctcattctgtagccaagactggagtatagtgtcacaattatagctcactataatctcaaattcctgggcttaagcaatcctcctacctcagacttccaagaagcaaggactatagacacatgctactatggccagccaactttttaaatttcttgtag

SEQ ID NO: 642194 - DNA, 389 bp, Homo sapiens
  misc_feature 1, 2, 3, 4, 5, 6, 7, 8, 9, 10, 11, 12: n = A,T,C or G
nnnnnnnnnnnnaagaagttaaaattgcatatgaagcctgatacatattctgaaggactgttcaatttagttgtggaaatacagtctaatatgcaaattcctttttttattttttgttttgtacatgtrattgtgtgctaagacgaggctacatgcaggacatatgatgcacaattaaaggagacgtggttactaaaccttatggtatttacagtcaggccataaaggcagacattaattgggagaaaaaatgcaggtacaatgtagcaggaataaataatgattgtccactgtgataaaaacctttaaagaaacatttatgctcacatttgaaaaactaaggagtgcaaatcaagggtaaaagaggaacattctagacaagagaagca

SEQ ID NO: 642195 - DNA, 580 bp, Homo sapiens
tccattcgtttttaatgatattttagaaaaaatatcttgctaaagtgtatgataaaaacctgatctctggggatgcaacaagttttaagagtatgtaaggaaaccaaaccttctaagcatatatttcttcatagattaaacagtgacatatgttcctccttctcatttcagaaagttctgccaatgtgaagacatccagggtcctgatatattccaggtctggaggtatgttttcctgttcacaggtttggagaatttcctaagttaatagtcatcttttaatgacctttatgcatctagatagataratagatagagagatagagacatagatatagatgcatctatatatgcatctgtatatctatctatctatctatctatctatatatatataaagtgattttaggtaaaataaaaattagacaaaatttctctcatatcctatagtaaagttagcatgaaaatggttattttattacaatattataaatattatagtgcagattgctgcccaaagagagtttctattagcctagcagtacaacagaaagaaatgtggaaatcaggagtttagata

SEQ ID NO: 642196 - DNA, 532 bp, Homo sapiens
gaattctaaaactgactgctccaatttctgattgtttttctttttgcaaaatatttaacaatcccatgtctcagcttcttgatctctaaaatgtttttttaaggttaaaaattatgtattatcatagaatgcttagaacaccggccactgttagtgaacattcaatagctgtcattgttgatgttatttatccaggaattgggtgcagttaggaactgtttctataaacctgggattctaggatacaggaatttttttttttatgtaagggaagcagaagtaagattctccattgagaacagctctaagaaaaagtcactgcattttagaatcaccacaagtatatctttcaccccactctatccttatgttctgagcatggcacctctgtcaacttttctttccatatccttttagcttagtctagggagcaaagcttgacgcttcctcctgagcctgtggatgtaggcatagcaggkttgtcccacactggcactgcctgaggagtcgcaagagtcaaagaatatcatga

SEQ ID NO: 642197 - DNA, 598 bp, Homo sapiens
  misc_feature 1, 2, 3, 4, 5, 6, 7, 8, 9, 10, 11, 12, 13: n = A,T,C or G
nnnnnnnnnnnnnatgttcaattgcttacccagaaacaaactcaatgtggctaatttattttataaatctatttgatgaaaggtgggctaattgcaaaatgcacacggtatgttacgtttatcaaattctttaccaaaaattctcctgatttgttaccttaatatttttggagattaaagacccagagttagaaaaacatccaccttttgacatgtgggctaccagttttattttctgtgctctaggtgaagggttaaatgtgtttgggtttgactagaactcactgtgtaggaggacatcgtttttttttttttattttttattttttgacagagtctcgcactgtcaccccactggagtgcaatggygccatctccgcctcccgggttcatgtgattctcctgcctcagcctcccaagtagctggaattacaggcaccaccacacctggctaattttttgtatttttactagagatggggtttcactatgttcaccagactggtctcaaactcctgacctcgtaatctggccaccttggcctcccaaagtgctgggattatagatgtgagccaccatgcccaacctctcatggtgt

SEQ ID NO: 642198 - DNA, 579 bp, Homo sapiens
agcttagatccactggattagaatccccactacccagcatagcagcttagattaggcctaaaatgaccgaagtcctcaagggaggggcgactgctgttactgcagctctagtaagcggttttcccctcccagtgctagggaggctgggcagatyggactgggcagcagtcttcacagtgcagcacagcccctggagcagatcatggccagactgcttcttgaggtgggaccgggatccatccctcctcactgggcaaggcatccttgcaggaattccagcaactccagccaggagtttacagacaaagctctcatttccctgggacagagcacctgtggggaggggtggctgtggtctcagattcagccaacttaatctttcctgcctgctggctctgaagagtatcagagatccagacaagggggattcccccagcccactgcaccatctctgctaagggatagccagactccttcctaaagttgtttcctgatcctgggcctcctgagtgggttagacctttcaacaggggttgccagacaccttatgcaggagagttccaacaggcatcaggtaag

SEQ ID NO: 642199 - DNA, 603 bp, Homo sapiens
aatgtccatcaatgataggctggatagagaaaatgtggcacatatacaccatggaatactatgcagccatacaaaagaatgagatcatgtcctttgcagggtcaaggatgaagctggaagccattatcctcagcagactaatgcaggaacagaaaaacaaacaatacatgttctcacttataagtgggagctgaacaatgagaacacatggacacagggaagggarcaacacacaccggggtcagagaagaggatgggagctgggggagaccattagggaaaagagctaatgaatgcctggcttaataaataggtgatggttgatctgtgcagcagcaaaccaccatggcacacgtttacctatgtaacaaacctgcacatcctgcacttgtattccagaacttaaaaaataataattcataaaatggcagtatgatgatcatcattgaaggatttcaagaggtcagaaattcacattcacttttattgagtttaggattagaaaaggctcatgattgcaattcaacttgtagttcttccagttcttcaaaatctttacatcactgagtgactgatttaaacccaaactattttctcctgcac

SEQ ID NO: 642200 - DNA, 603 bp, Homo sapiens
aatgtccatcaatgataggctggatagagaaaatgtggcacatatacaccatggaatactatgcagccatacaaaagaatgagatcatgtcctttgcagggtcaaggatgaagctggaagccattatcctcagcagactaatgcaggaacagaaaaacaaacaatacatgttctcacttataagtgggagctgaacaatgagaacacatggacacagggaagggaacaacamacaccggggtcagagaagaggatgggagctgggggagaccattagggaaaagagctaatgaatgcctggcttaataaataggtgatggttgatctgtgcagcagcaaaccaccatggcacacgtttacctatgtaacaaacctgcacatcctgcacttgtattccagaacttaaaaaataataattcataaaatggcagtatgatgatcatcattgaaggatttcaagaggtcagaaattcacattcacttttattgagtttaggattagaaaaggctcatgattgcaattcaacttgtagttcttccagttcttcaaaatctttacatcactgagtgactgatttaaacccaaactattttctcctgcac

SEQ ID NO: 642201 - DNA, 603 bp, Homo sapiens
aatgtccatcaatgataggctggatagagaaaatgtggcacatatacaccatggaatactatgcagccatacaaaagaatgagatcatgtcctttgcagggtcaaggatgaagctggaagccattatcctcagcagactaatgcaggaacagaaaaacaaacaatacatgttctcacttataagtgggagctgaacaatgagaacacatggacacagggaagggaacaacacacamcggggtcagagaagaggatgggagctgggggagaccattagggaaaagagctaatgaatgcctggcttaataaataggtgatggttgatctgtgcagcagcaaaccaccatggcacacgtttacctatgtaacaaacctgcacatcctgcacttgtattccagaacttaaaaaataataattcataaaatggcagtatgatgatcatcattgaaggatttcaagaggtcagaaattcacattcacttttattgagtttaggattagaaaaggctcatgattgcaattcaacttgtagttcttccagttcttcaaaatctttacatcactgagtgactgatttaaacccaaactattttctcctgcac

SEQ ID NO: 642202 - DNA, 599 bp, Homo sapiens
ggttttaatcaaaatttattttgtatttctcaacacccttagcaaaggttagaaatatgcagattctcttcatggatttgtcaatagtaaactctgggatttggaaaaatgtcccttttcacatcatgctctcactatcataactgtcttccttctccccacctctcctgctgagttctaaattcttcaaagttatgtacttactataatttagatctgtattcccaaagcagaaagccctgaaaatggtattctgaaggaaaaaatggtgctattagccagttcrggtcttatgaatcaagtctgaagactctaaatccattacctgctctaagtttcatctttttttttccagtgtggtaaaaaacataggacattttcatttttatatcagacttaatggaatgcttgtggaactgtgtgtttttgaacagacacgactcaaaaagcaggggcataaagagagaattctttgcctcctctggggaaaagaaataaagcaaacatttttaaaagttccactaaaagatatgctacttatagtgtcataccaccaatggggctatacacattctgaaaagtaaagagcccatgctgta

SEQ ID NO: 642203 - DNA, 581 bp, Homo sapiens
catcactaatcatcagagaaaaacgaaccaaaatcaccataaagcaccatgtcacaccaatcagaatggctattaataaaacacccatagtatatcattggtcatcatgtataatagtttttatagttgctggattcagttttttagaatttttgataattttatttgtgaatttattagatataattttttaatttctgggattaatgtgcagcatgtgcaggtttgtgacttaggtaaacgtgtaccatggtggtttgctacacagaccaatctatcacctagttattaagccaagcatgcattagatatttttcctaatgctctccctcccttcaaatccccctgtcaggccccagtgtgtgttgttctcctccatgtgttcatgtgttctcattgttcagctcccacttataagtgaggacatgcagtgtttggttttctgtttctgtgccagttttctgaggataattgctaccaggtaattcatgtctctgcaaaggacatgatcttatccttctttatggttgcatagtattaratggcatatatgtaccacattttctttatccagtctatcg

SEQ ID NO: 642204 - DNA, 609 bp, Homo sapiens
aaaattattccatatacaatagctagaattaaaattaaatacctaggaattacattaaccaaagaagtagaagacccttgccatgaaaactataaaacattaatgaaagatatattaaagaggatgcaaaaawtttttaaaaattgtttatggattggaagagtcaatattgttaacatgtctctactgcctaaagcaatctatagattcaatgcagtccttataaagataccattggcattcttcacagaaataataaaataaaaagaaatcctaaaatgtatatagaaccacaaaagatctaaaacagccaaaggtactctgaagaaaaataacaaaactgtaagaatcacattacctgactttaagttacactgcagaactgtaattatcaaaatgtcatagtactggtataaaaacagacaaataaatcaatggaacagattacaaaacccagagataaatccacacatctacagtgaactcatttttgacaatggtgagaggactgtctctttaataaatggtactgaaaataaactggatatccacatgcaaaagaatgaacctagacccctgactcctgccatatacaaaaatcataccaaa

SEQ ID NO: 642205 - DNA, 510 bp, Homo sapiens
gaactcatttttgacaatggtgagaggactgtctctttaataaatggtactgaaaataaactggatatccacatgcaaaagaatgaacctagacccctgactcctgccatatacaaaaatcataccaaaatgaatcaaagacttaaatcaaagacctcaaactatggaactcttacaaaaaatagagaaactctccagtcctttggactaagaaagattttttgagtaacactccagaagcatgagcaaccaaagcaaaaatggacaaatgggattacatcaagttaaaaaccttctgcacagcaaaggaaacaatcaacaaagtaaagaaaaaactcacagaatgggcaaaaaattgcaaacaatccatctggcaagggattaaaaaccagaatatataaggagctcaaacaattctgmaggagaaaattttaataatctgatttaaaaatgggcagaagatctaaatagacatttctcaaaagagtacatacaaacgccaaacaggta

SEQ ID NO: 642206 - DNA, 458 bp, Homo sapiens
catgagcaaccaaagcaaaaatggacaaatgggattacatcaagttaaaaaccttctgcacagcaaaggaaacaatcaacaaagtaaagaaaaaactcacagaatgggcaaaaaattgcaaacaatccatctggcaagggattaaaaaccagaatatataaggagctcaaacaattctgcaggagaaaattttaataatctgatttaaaaatgggcagaagatctaaatagacatttctcaaaagagtacatacaaacgccaaacaggtatatgaaaaaatgcacaacattattattagtgaaatgcaaatcaaacttatttgtggaagctaaaatttcaaatatttgaactcaatgaaacagagagttgaagaattatttccagaggctgggaagcatagtgtggygtgggggaatttggggaatgttaatgggtacagaaacaaaagaataatcac

SEQ ID NO: 642207 - DNA, 606 bp, Homo sapiens
gtgtctctgcagggcaggaggtgggtgaaactaaatgattattttattgaggctgttggtcttaacagattggatctggctcccaggcttgttcactctccaaagaacttcaaaacttttttggaaggaagggtgttattggaagataaacatgtctggatctgctttctatgcttccaattgcaatagccaagcattcggggaagcagagtgaaaatagcatccactagagccctatcttgtggaaaatttcctccacatcacaggaacaggaatattcttgcagttgttcaatgactcataayaaaaagagccctttgcaggatgtctccagcaaacattatctattgataaagctttaaatctcaagattgactcttgcccgaagaaagagaagaaactctagtatttctgctccagctgaggcatattttggagttcatctattttccatacacttcactgtattttttagtgaatacatttgaagttcagtgagtatatttttactgatactctaaatggtgctgtatatggtgcaggtactaacgttgcatagtcccagagttacagtcgtaaatttagtagagagttaggaaaaggcag

SEQ ID NO: 642208 - DNA, 583 bp, Homo sapiens
aattctgtagcctctgccacacttacaacatgtaagagtttaaataagattgcaaaatgacagcaagctrctcctaaagcctcagttcctttctgggctttcctttcctttctaaaggctgcaagagtcatctaatttcttctctcctcactctcctccctgtccctcacttttgctcacataaacctccacagatactgatgatagcttccagaagagcaagcgccttccacaactttttcctcccaggggcctgtttttgggacagtaaaagactcaccggccatggcttttctctcctcccttcttgtgtaagctgaaactgaaagcatgcatcacctttctttttaccttccttttatacattttggcagggcatgtacacatattgggaaaccactgcacatgcatatgcatgtctttttttattttttcatttttttaatagagtaagattcagattcctgaactgtaggctgcaacagagagtgtatctttgggaaattttcttcaccagccctttgaacaagtcagggtaggaggggaatggggcttggagaataagacaagaatgacaaggtat

SEQ ID NO: 642209 - DNA, 583 bp, Homo sapiens
aattctgtagcctctgccacacttacaacatgtaagagtttaaataagattgcaaaatgacagcaagctgctcctaaagcctcagttcctttctgggctttcctttcctttctaaaggctgcaagagtcatctaatttcttctctcctcactctcctccctgtccctcacttttgctcacataaacctccacagatactgatgatagcttccagaagagcaagcgccttccacaactttttcctcccaggggcctgtttttgggacagtaaaagactcaccggccatggcttttctctcctcccttcttgtgtaagctgaaactgaaagcatgcaycacctttctttttaccttccttttatacattttggcagggcatgtacacatattgggaaaccactgcacatgcatatgcatgtctttttttattttttcatttttttaatagagtaagattcagattcctgaactgtaggctgcaacagagagtgtatctttgggaaattttcttcaccagccctttgaacaagtcagggtaggaggggaatggggcttggagaataagacaagaatgacaaggtat

SEQ ID NO: 642210 - DNA, 584 bp, Homo sapiens
tcgttttggaaaaaaaacaacaacaaaaagcaaacaaaaagaaaccgctctgttttcttcccgaaaccccaggaattaacagtagatagatccctatcaaaatcaaaggctctattctgttttgcattgtgttatctgacagtttgagttttggggggatcagaaattactttgcattatgagagagctttggtatgtaataactaggtaggaaatatatttaatggatggccaagagtatttttggaggcatacttggctctttgcacacttggattagagaaacatgcacttggacacctggaagatatggaaacatccttacccttgactgagagatgagattsccatgggggatgggctgatttcaaaatgggctgattggctttaggttgccttgcaacaaaatgcagggtagaagcaccacactgtcttctctggtagtattttcctccttttggggatcaagcatccagtataaaatgacacccttaattctggagatctgtctttcccttcagctgtggctgcttatttagctcagaaaaaaatgcatgctttcctgaccctgttcctccaagggc

SEQ ID NO: 642211 - DNA, 571 bp, Homo sapiens
gagtaaaatatgctctggtgaaaaaattttgaaccatctttgtttctctctatctgatttctccagaatttggaagctatttgtaagtattcacaatttatgggagcatagttaattgcataagtgcataagattttttgtttttttttttttttttttgtaacaggacacaatcggagaaattggttgttttatcaaggctttgactggaatgctgtgcttcttttaaagaatcgaagttgactcatagaaacaatgaaatcccttggggaatctggcttcataccttgtctacacagagtccttgtacaagtttcttgatctctggtaagtgaagaatatcactgtctaacaggttcaggagctccaatttatcttgggaccttgagaggagaggaatttacccmactcataggtatttgagtgtacgaacgcatggctggactcggctcttgaaaagtcttacctgagattgctcatggaacagagttccatcaaagccaatttaaacaaaaaacagcctaactgaaaaataattatctgttgcaccttatgcaaataatcaggtcaa

SEQ ID NO: 642212 - DNA, 539 bp, Homo sapiens
caaggccatgcatgataaaacactcaggaaacagtcaatgagtgatataaaatagttaaaatatgatttgttttcaaaggattcaaaccctaggataaaatttaatgggagcaggtcttaattaacactaattaatttttaaaatatgtgtttatccttttatttatttacctaatagacatggtagtaaacactgggaatatttttttaatgatcccttttcctgtccttcagcatctcctcctacaatgtatacatatgggaggacaagaatattgaatacrtaaactagaataaatataaaatagaacgatgaatgctaaaatcatggtgtgctctagatggattcatagcactaaacattgctttcacgaacatatgaggaaatgttttcacagagtttatgtgagaaaatctttgaggcttttatttcatcacaagatcaacacaatctgacaatgtgatgcacttgttaaaaaattaatgtgatgtttgtttcaagatagaactgaggtttctagatatccagaggatctttt

SEQ ID NO: 642213 - DNA, 539 bp, Homo sapiens
caaggccatgcatgataaaacactcaggaaacagtcaatgagtgatataaaatagttaaaatatgatttgttttcaaaggattcaaaccctaggataaaatttaatgggagcaggtcttaattaacactaattaatttttaaaatatgtgtttatccttttatttatttacctaatagacatggtagtaaacactgggaatatttttttaatgatcccttttcctgtccttcagcatctcctcctacaatgtatacatatgggaggacaagaatattgaatacgtaaactagaataaatataaaatagaaygatgaatgctaaaatcatggtgtgctctagatggattcatagcactaaacattgctttcacgaacatatgaggaaatgttttcacagagtttatgtgagaaaatctttgaggcttttatttcatcacaagatcaacacaatctgacaatgtgatgcacttgttaaaaaattaatgtgatgtttgtttcaagatagaactgaggtttctagatatccagaggatctttt

SEQ ID NO: 642214 - DNA, 594 bp, Homo sapiens
tctttcctggcaattgaaaatgtaagaattgagagttgttggagggtgaaataaatgaaagagctatatcggtggtgaagttcaatgaccaatgacagctgactgcttatatggtcaagttagtgttctttattgatgtagtctggtgagtatttatttgctcttttttattctacttatatgcatttagtttccctcaactatataatcaatcaaagggtaaggaaaattgcagcaaaatgtaatacacaatgaaagtcctaggttagtaattattaaaataataatgtacaaatattaccattattaattatgttcatttatctctcatacactccctctctttgtctctctctctgtttctctcccacctgccacacttagttaccaaacagtgcatcagaccttgaacaaaacagagtaaacacaggagctatctatrgggaaagcagggctttggtcctctgagtgcacatatcacattactgttgttgactttctccttagttcagctaaagatggggtccttgtcacacgaccatgagaaattagactcacagacaatctgaaaggtgaggagggcagggtttattg

SEQ ID NO: 642215 - DNA, 652 bp, Homo sapiens
ggctgtacacttaaaattgttaagcttgtaattttgttatggcattttactacgataaaaattgcaaaaatataatgatataattgaaagtgagaaggtatgagggcaacattaatcaacttacatagagaaaatttaactactgagcaacattgatgaaagaagaaattaggattaaatatattatttattgttccacaattaatcaataaaaagtatgaacatcatgacatcatcaaatattaggtagaatagaccagatatgtggctatgtaagtgagctgcatctcatttttcatatcaggtagtcaatggcattgtttatgttctatatttcgggaaacacagaggtataatagtcattattgagaattccaaatgttactgccaaacaaaacaaaacaaaaataattgaaggaaattacctctagtatgtgggactaaaggtggggagagttgtactgggaaatatgatttttattgtattcttttctgtactatggactgtctcatgaatgtattactttgacaaaayatttaaaattatattgaattgacacttttaataatttatagatttctaaaaatcaggtagtattgaattttaatgtgttgaatttttaaagggtttgtcctatgttgtgaagcaaag

SEQ ID NO: 642216 - DNA, 247 bp, Homo sapiens
attttcactggatgtgcttttttagggtcaaagttttttcctttggcattttaattatgtcacgccactctcttctggcctgtaaggtttccactgaaaagtctgctgctagatatattggagtatattatttgtttctttctcttgctgcttttagaaatctgtctttatctttgaccttcggaagtttgattatcaratgtcttgaggtagtcttctttgggttaaatctgcttggtgttctata

SEQ ID NO: 642217 - DNA, 460 bp, Homo sapiens
caactcaattcacactgcattgattttatttactaaacattttcagaatctgaccactactcttaattttaattgttcattacttctattcaggccaacaccctttctttctgaattacaccaagaaccttataaaccttctktttgtcctttctattctattcttcacaataaagagtgttcctatatctagatttgaccatgaaacctctcagcttattctaacctaggccttctcattcagcctcatcttctgatactgtccccaccttgctcattacaattaaaatattctgctcttcatttaatgtctagtccagtctcccaccttctccttgcttcctattctcctatactttctgttcattctccaagtctaagaccagatggcatttttttttttcaggcaatcctctgattctctgaggggagacaatgtcagaggtacatgcccctaggg

SEQ ID NO: 642218 - DNA, 460 bp, Homo sapiens
caactcaattcacactgcattgattttatttactaaacattttcagaatctgaccactactcttaattttaattgttcattacttctattcaggccaacaccctttctttctgaattacaccaagaaccttataaaccttctgtttgtcctttctattctattcttcacaataaagagtgttcctatatctagatttgaccatgaaacstctcagcttattctaacctaggccttctcattcagcctcatcttctgatactgtccccaccttgctcattacaattaaaatattctgctcttcatttaatgtctagtccagtctcccaccttctccttgcttcctattctcctatactttctgttcattctccaagtctaagaccagatggcatttttttttttcaggcaatcctctgattctctgaggggagacaatgtcagaggtacatgcccctaggg

SEQ ID NO: 642219 - DNA, 499 bp, Homo sapiens
cagacacatagaccaatggaacaatagaaaacccagaaacaaatccacacacttacagtgagctcatttttgataaaggtctaagaacatacactgggaaaaagaatctcttcaataaatggtgctgggaatactggatatccatatgcagaagaataaaactagatccctatctctcaccatataaaaaattaaatcaggctgagtgcagtggctcatgcctgtaatcccagcactttgggaggctgaggtgagcagattacctgaggtcaggagtttgagaccaacctgtccaacatggtgaaaccccatctctactaaaaatattttataaaattagctgggcacctgtaatctcagctactcaggaggctgaggcaggagaatcgcttgaacccgggaggtggagattgagatcacatcactgcactccagcctgggcgatggagtgagactctgtctcaacaaaaaaaaaaaaraaaaaaaaaacaactcaaaa

SEQ ID NO: 642220 - DNA, 557 bp, Homo sapiens
ggaaaatttatagctttgtatgcttctattaaaaaggaagaaaaatccaaaatcaacartgtaagttttcaacttaagaagctagaaaaagaaaagcaaacccatagtatatagaaggaaggaaataatatagatcagagcagaaacatacaaaatagaaaacaggtaaacaacagaaaaaaatcaataaaatgaagagtagtttctttgaaaagatcaacaaaattgataaatcttcagctagactgaccaagaataaaagagaagacacaaattacctaagtcaggaatgagaaagaagacacactgtagacccagcagaaattaaaacgatggtcaggcacagtggctcatgcctgtaatcccagcagagtgggaggctaaggtgggagtatcatttgagaccaggagtttgagaccagcctgggcaacatagcaagaccttgtctctacaaaaattttgtttcaaaagtctatgggattgtttcaatagaaaaaacaatcaagtaaattcaacaccttttcatgacagaaactcccaacaaactaggactaga

SEQ ID NO: 642221 - DNA, 557 bp, Homo sapiens
ggaaaatttatagctttgtatgcttctattaaaaaggaagaaaaatccaaaatcaacaatgtaagttttcaacttaagaagctagaaaaagaaaagcaaacccatagtatatagaaggaaggaaataatatagatcagagcagaaacatacaaaatagaaaacaggtaaacaacagaaaaaaatcaataaaatgaagagtagtttctttgaaaagatcaacaaaattgataaatcttcagctagactgaccaagaataaaagagaagacacaaattacctaagtcaggaatgaraaagaagacacactgtagacccagcagaaattaaaacgatggtcaggcacagtggctcatgcctgtaatcccagcagagtgggaggctaaggtgggagtatcatttgagaccaggagtttgagaccagcctgggcaacatagcaagaccttgtctctacaaaaattttgtttcaaaagtctatgggattgtttcaatagaaaaaacaatcaagtaaattcaacaccttttcatgacagaaactcccaacaaactaggactaga

SEQ ID NO: 642222 - DNA, 592 bp, Homo sapiens
atatttttataactgttattatcttgctaaattgacccctttatcattttacaataatattctttgtctttttaaaataggttttgtcctgaaatgtattttgtcttawaaaaatatagctactcctgccctttctttttccatccatttattttcagtgtttatgtgtcttcataggagaagtatatttcttgcaggcagtagatcattgggtcttgtttttttaatccattcagccactctgtgtcttttgattgaagtttagtccatttatattcaatgttattattgataagaacttattactgccttttatttgttttctggttgttttgtagtcttcacctccttctttcctttcttcctgtcttccttgtagtgaaggtgattttctctggtggtatgttttaaattcttgctttttatttttcatgtatctgttgtatgtttttcaatttgaggttaccatacagcttgcagataatatcttacaacccatattttaagctgatgacaacttaacactggttgcataaacaaatgaacaaacatgcaataagaaaacttataaaaactctacattttaacttca

SEQ ID NO: 642223 - DNA, 420 bp, Homo sapiens
cttgtttgtacctgtccttcttgggaaggatttccagccattcgaagggacttggatgctgtgatttaagttttttatcactgcagccgtatctgcactaggggaaaccccaagtccagtaatgttgtggctcttgcagactcagaagtagtgccttagtggtcttgggtaagatttaggagaattccctggattaccaggyagagactcttgttctcatcctttactttcccccacaaatgaagtctctctctctctgtactgaacttcctggagctgggagaggggtgacataagttcccctgtggtcaccaccactgggactgtcctgggtcagacctgaaacaaacatagcactgggtttcacccaaggtccacagtgaccgttgcttgactaccacttaggttcactcaagaccc

SEQ ID NO: 642224 - DNA, 519 bp, Homo sapiens
catttttgggagagcattttaaagtaaattcaaggtttatcatttcatcatcaatatttcaatctctaaaaataagaacttaagaaaacatagccacaataccattatcacacataataaatttaacagtaattccttaatattatctaatatccaatccacgtaattttcctacattatctccaaaaaataacttttttttttggttggtatgtgttacatatgtctcttttttttttttataagagatggggtcttcctctgtgttggcccaggctggaatgcagtggcacaatcatagctcactgcagcctcaaacttctgggctcaagtgrttctcccacctcggcgtcctcaggcacatgccatcacgcctggctaattttaaaacttttggtagagatgaagccttgctatgttgagcagactggtctcaaatttctggcctcaagcaatcctcccacctaggcctcccaaagtgctaggattacaggcatcagccaccacacccaacctgtc

SEQ ID NO: 642225 - DNA, 519 bp, Homo sapiens
catttttgggagagcattttaaagtaaattcaaggtttatcatttcatcatcaatatttcaatctctaaaaataagaacttaagaaaacatagccacaataccattatcacacataataaatttaacagtaattccttaatattatctaatatccaatccacgtaattttcctacattatctccaaaaaataacttttttttttggttggtatgtgttacatatgtctcttttttttttttataagagatggggtcttcctctgtgttggcccaggctggaatgcagtggcacaatcatagctcactgcagcctcaaacttctgggctcaagtgattctcccacctcggcgtcctcaggcacatgccatcacgcctggctaattttwaaacttttggtagagatgaagccttgctatgttgagcagactggtctcaaatttctggcctcaagcaatcctcccacctaggcctcccaaagtgctaggattacaggcatcagccaccacacccaacctgtc

SEQ ID NO: 642226 - DNA, 504 bp, Homo sapiens
tacatcataaggtacagagaggaaaagtctggtgtgctagagggagattaaagataaatgtgaaatcaaacaaaattataaaaatctatcataggattgtataaggagaccaattttatttgcatagggactacctatcttttaactggatctctgagctctaggcagaacctatacgaaatcctgggtttccaaaaagggagaattattatgaggctagactaagtgatgtttttacactgcacttaaagataattttttttaaacaaagacgtttctcagtgttgaatacactcttccttaaaaacctaaggctagcctctgttacaaataactattttagtcaayaaatcatgtaacacaatacaaaagcaagcagtttaaaagctgagatgaacttgtctgtttatacttttggcaccttctccactttcttaaaggaaccccaggctattataaactatttcagttccctcatgcagcagagggtgcaagagaaaggag

SEQ ID NO: 642227 - DNA, 510 bp, Homo sapiens
tgcccaggctgtgaactgagctcaagcaatccacatgccttggcttcccagagtgctgggattacaggcgtgagccaccatgcccggcccatttggatttcttaaagctctctggatgattctactgccaggcaaggtttcagagccccgacaccgggcagtggtcgacttgtggtttggtaagagaatttaccracaacagtataggtttgaaaaaaggaaagtttattagaaaggaagaatgttgcaaaagggtgcagcagggtgcgtcagtgagaggactgagagcgctgccctccatgggtttttcctttggggtatttatggttgtcaaatgagttttggcattccagagatgtatagaaattttacttataagttttttggggggaaggaaatctgaaaccagaaccctgctttagataataggaaagtccttttggtgctatcttggctcactgcaacctctgcctcttgggttcaagcaattcttgtgcctcagcctcccga

SEQ ID NO: 642228 - DNA, 610 bp, Homo sapiens
ctggtaataaaaataggagaatgaaatcattgttcccacagaaaggccccaatgagtcttccaaaataaacgcatattatttatgtaatttttcaaatacacctttatcaagaaaagaataaaacatcgttggatcatggcatattgctgtttaaaatgatccattaatgttctaattgtcatcaggacaaaggcccatarccatgcctgcctcatgtctggacttttcctccttccccagctccatctcctgcccatcccaacatactttaaatttcagccacaggaagggacttacagttcccagaacatgccccctggagtgtgcactccactggggtagtttcatccattcaactgcattcatccatctcctagcatgcctcatgccacgtgcatgccatgctcgctctcttccctacctggaccgcctttctccctcaccagtttcattcttcaagtttcatcttacatgccatcttctttgagaaactttctttgagcaagctgagcaagcctgccctcttctgtgttctctgtgtaggggagggttggaggagagaagggcacacatcttatttctcccactaaattctgagattagagctaa

SEQ ID NO: 642229 - DNA, 384 bp, Homo sapiens
gcacttccttcccctttctttctttgtctacctttgcactgttgccatccgctgggacctctttggagaggaggttttattcccctgctttctttcagaatcctgcttcacataatcttcactagctcttcacaaagaaaactaggactctcatttattttatccaatccaccactacatccagccttgaaaacagcaggcagcctattattctctaacagggacaaatagcaggatggagcttgactattttccatgaggctgatttttgctaatctaacrcatttattctttgacaccttttcatggccaattgagaagtggtacccagaaagacagtaatgcaacttagaaatgtatggaaaattgataatgttgagatct

SEQ ID NO: 642230 - DNA, 530 bp, Homo sapiens
gtttgctaatattttgctgagaatttttgcatctaacctcatgaggaacattggtctgcaattttcttttgatgtcttkggttttagtatcaggttattactggtctcatagtatgagttgggaaatattccttccatctctgttttatgagttcattaaggatggtattaagtattatttaaatgatttatagaatcctccagtgaaaacactggacctgggattcttttcatgtgggaagacttaaaattacaattcaacttctttacttggtataggtctattcagaatttatattcttgttgaatcagtattggcaacttttatatttctaggaatttgtccatttcatctaagttgtctagttggttagcataaagttcttcctagtgttctcttacaactctttttgtttctataaggtcaatggtgatgtctcctctttcattatttttggtaatttgtgtcttctcagttttttcttcatcagcctagataaagttttgccaatattttgatcttttcaaag

SEQ ID NO: 642231 - DNA, 287 bp, Homo sapiens
  misc_feature 1: n = A,T,C or G
ngaattcaatctaaaagctatcaaacttgatctttctttaagaatgcccagtaaatatattcccmatttaagactttttttgtttctgggtaagatttggccaaacgaccaaggtcaaatgcaagtgaaaataacagcctgaagttgacataaaatttggtatcttactccaacataggtaagaccattttcttctttctggtggtagtaatattaaactttgttcaaattcctttactctcaaatcaaaatagtactgaactattttgttcctgtattaatgcaat

SEQ ID NO: 642232 - DNA, 287 bp, Homo sapiens
  misc_feature 1: n = A,T,C or G
ngaattcaatctaaaagctatcaaacttgatctttctttaagaatgcccagtaaatatattccccatttaagactttttttgtttctgggtaagatttggcmaaacgaccaaggtcaaatgcaagtgaaaataacagcctgaagttgacataaaatttggtatcttactccaacataggtaagaccattttcttctttctggtggtagtaatattaaactttgttcaaattcctttactctcaaatcaaaatagtactgaactattttgttcctgtattaatgcaat

SEQ ID NO: 642233 - DNA, 287 bp, Homo sapiens
  misc_feature 1: n = A,T,C or G
ngaattcaatctaaaagctatcaaacttgatctttctttaagaatgcccagtaaatatattccccatttaagactttttttgtttctgggtaagatttggccaaacgacmaaggtcaaatgcaagtgaaaataacagcctgaagttgacataaaatttggtatcttactccaacataggtaagaccattttcttctttctggtggtagtaatattaaactttgttcaaattcctttactctcaaatcaaaatagtactgaactattttgttcctgtattaatgcaat

SEQ ID NO: 642234 - DNA, 545 bp, Homo sapiens
tctttaagaatgcccagtaaatatattccccatttaagactttttttgtttctgggtaagatttggccaaacgaccaaggtcaaatgcaagtgaaaataacagcctgaagttgacataaaatttggtatcttactcmaacataggtaagaccattttcttctttctggtggtagtaatattaaactttgttcaaattcctttactctcaaatcaaaatagtactgaactattttgttcctgtattaatgcaatagaatcttggacctttttttttttaacatttgctgggaaggaaaagggtagcatggggaaacaggcatgaggcagctggttatgcagatatactaaatagttactcaaaacctaatgtcagataactaaattacttcctaggttttcaatatttaaaaattttgcttactctatgaaacaggattgtagcttaaaaaaaaaaagtgctgcaagcaagagatttaacattacagaatgcaaattcccatcacactccttcaaaagggcctttagagtttattccttaattgga

SEQ ID NO: 642235 - DNA, 506 bp, Homo sapiens
gaattcgtcttcctgaagaaagattaaatgaaagctacttactgacacagaacatcaacagtattactaattcaatgattttaatttatattagaagaaactcaaagagtgaatggttctagcataaacttcccctaatagattaataattggggtatttcttgctaaactttgcaaaataaaaactatcccaaaatccaaacttattgaaggcattttatctgtatcatcacaccagtrcacagtcaaagataaaaatgttaagtctgaaagaagcagaaacattttggaagaagtgcgttaaatttctatgtgaaatagcaaatggcctcatgatttttaatgctcccagttggttttctaagcatcctgagactcctctagacatgctgagacatgtctcacccttttgtgcactgatttcggtaagtgtaaagccccaaacagaaataccatcactacccaggagagcaacagcaaagccacccacgcccttttcaaaggag

SEQ ID NO: 642236 - DNA, 506 bp, Homo sapiens
gaattcgtcttcctgaagaaagattaaatgaaagctacttactgacacagaacatcaacagtattactaattcaatgattttaatttatattagaagaaactcaaagagtgaatggttctagcataaacttcccctaatagattaataattggggtatttcttgctaaactttgcaaaataaaaactatcccaaaatccaaacttattgaaggcattttatctgtatcatcacaccagtgmacagtcaaagataaaaatgttaagtctgaaagaagcagaaacattttggaagaagtgcgttaaatttctatgtgaaatagcaaatggcctcatgatttttaatgctcccagttggttttctaagcatcctgagactcctctagacatgctgagacatgtctcacccttttgtgcactgatttcggtaagtgtaaagccccaaacagaaataccatcactacccaggagagcaacagcaaagccacccacgcccttttcaaaggag

SEQ ID NO: 642237 - DNA, 591 bp, Homo sapiens
tgacactcactaggagtcaaattcaaattaaaacatcaatgagataccatttttatattagcaaactggcagagattttaaaaatacacttaatgtggccaggcatcatgactcacacctttaatcccagcactttgggaggctgaggcaggcggatcatgaggtcaggagatcaagaccatcctggccaatgtggtgaaatcccctctctaccmaaagtacaaaaattagccaggggtggtggtgcgcacctgtagtcccagctacttgggaggctgacacaggagaatcgcttgaacccacgaggttgcagtgagccgagatctgcaccactgcactccagcctggtgacagagcaagactccgtatcaaaaaaaaaaacacacacagaaaaacctaaacaaaaccatatgtatttaatgcaggcaggcaaagttatagtgagacaggaacttctgtttatatcataaatcagatgaagttttcttgagagtaattcagtatgtgttaggaaatctaactcagtaattctccttgtagcaatttatcccaaggaagtaagagatggagacaaggatatgtgtgcaagga

SEQ ID NO: 642238 - DNA, 487 bp, Homo sapiens
aagcagcagcagtgctgtagcatggttggagctgaatacctcggagagtgagtggtagggaatgaggtcaaagaagtgacaagatctgggtcacaaaaaagcttgtaggttaatagaagtacattgaattttactgtgagcacagtgaagaaatactggagggttttaagacaaatattgccatcatctgacttatattttaaaagtatcactcttaaggctgctgagaataaacttcagagggcaaaggcataagcagagggacaaatcagaaagstatttcagtaattctggcaagaaatgatggcagttcagagcaatggaaactagagaactgctggcattctgtttgttttgatttgtaaaagattttgctaataaagtgaatgtagactacaaaagaaagagaggtataaaagagaactttattttatggcaagaaataggagatattgagtagggaagatagatatgtgattctggaatt

SEQ ID NO: 642239 - DNA, 412 bp, Homo sapiens
aacgtgtgcatgcatatgtgtaagagaaagatagataacctgagaaagatgagttcctgacaatctatttccaatctcataagacccagttacacattgttacttgttcttcatgttaatgagattgcttrtcaatttcacgtaataattaaaatttccctccacccacatttcagcaaattttattgggtttattttccttgtaattcatattctaatttatctttatttctgtgaattgaaaactaaatttgaagtcttattttcttagctaaaatctgatatttagctggatcttcagtcaatgaccctcaatattttatgattctacatttgtttgcagctaatcctttactccatccatctctttactataccttacctctgtgtagttaataaagaagaaaataaa

SEQ ID NO: 642240 - DNA, 412 bp, Homo sapiens
aacgtgtgcatgcatatgtgtaagagaaagatagataacctgagaaagatgagttcctgacaatctatttccaatctcataagacccagttacacattgttacttgttcttcatgttaatgagattgcttgtcaatttcaygtaataattaaaatttccctccacccacatttcagcaaattttattgggtttattttccttgtaattcatattctaatttatctttatttctgtgaattgaaaactaaatttgaagtcttattttcttagctaaaatctgatatttagctggatcttcagtcaatgaccctcaatattttatgattctacatttgtttgcagctaatcctttactccatccatctctttactataccttacctctgtgtagttaataaagaagaaaataaa

SEQ ID NO: 642241 - DNA, 412 bp, Homo sapiens
aacgtgtgcatgcatatgtgtaagagaaagatagataacctgagaaagatgagttcctgacaatctatttccaatctcataagacccagttacacattgttacttgttcttcatgttaatgagattgcttgtcaatttcacgtaataattaaaatttccctccacccacatttcagcaaattttattgggtttattttccttgtaattcatattctaatttatctttatttctgtgaattgaaaactaaatttgaagtcttattttcttagctaaaatctgatatttagstggatcttcagtcaatgaccctcaatattttatgattctacatttgtttgcagctaatcctttactccatccatctctttactataccttacctctgtgtagttaataaagaagaaaataaa

SEQ ID NO: 642242 - DNA, 597 bp, Homo sapiens
taatatatatattcttattcttcctcaaagatgagaaattaatatattctacactggtgatggcaaacataggctgattagtaatatcrcctcagaagcttttaaaaatcctcacgccctggccataccccctatcaattaaatcacacatttgagagtggaagccaggaatccacattaaaaaaaaaaaaaaagagagagagagagagagagagaattagatcatcatggcagaccggaggcaggactagattgcagctcctgacagggcagtatcatgcggaggttctcattgtgatttttatctccagattgactgcaagaacaaaccagcaatcccgaaaggacccacaaaccctctgaaggaattggatggctcctggaggacctagaagacatctcaaatactgtgagtgcactatctacagaggtgggtaagggagagcctcctctcccgaacacacacccttattggagaaactgaaggtttgtttgtgggagaagtttcctaccttacctaagagctgagtcaatttagaaagccaagtgaattcaggggtagaggaaggagcagaaagaggaaggagcttgctgggt

SEQ ID NO: 642243 - DNA, 526 bp, Homo sapiens
attacttttgtacagaagtaagtaccacatgctatttgaggaacttggcaaaattatccttttgaaatatatctcactgattgatttcctacagaatgtttatgatttatttacattatttaagtcacagtacctttttaaagagaactcytttagaatgaaggtacccttgtactaatagtagtagtgtcagtaatagttgaaccaagtttgttattttttttttctggacagtagggatccattatttctgatgaagtcataccctagaatcaaaggatcatcatttaatataatagaggtcatgggatacttttcatgccttgccaggggacaacttacaaaagggggccaaagtgtattaatttaatccagtatctaatatgtgcatagaatgagtggaattaaacatttttcatacataatctcatttaaacatctcagtagtcccacgggcagataatagtattccaaataacaagttaggaaaagaagtcccaaagacattgagtagcctgccatggtc

SEQ ID NO: 642244 - DNA, 520 bp, Homo sapiens
tataaaactcttagaagaaaacatagccataaatcttcatgatcttggggattagacagtggttttttagatgagacacaaaagcactagcagcaaaagagaaaaaataaactggacttcatcaaaatttaacttttgttcttcaaaggacactatgaagcacatgaaaagacaacccacagaatgggaaaaaaattgcaagttgtatatctgataaggaactagtatcccttaaataactcttacagttccacaagaataagtgaaataatgtaccccatattaaaatgggcaaactctgaatgtatgcatctccaaataagatatacaaatggacaataagaacatgggaagatgctcaacatcaagtcattagaaaaaygcaaatcaaaaccccaatgagataccacttcacatccactagatggcttcatatagtttgggtatttgtccccgcccaaatctcatgttgaattgtaatctgcattgctagaggtggggcctggtggagggtgtttgg

SEQ ID NO: 642245 - DNA, 590 bp, Homo sapiens
cagaagggagctctactggctagagggtgtggaagaggagatatgtggaatgaagggaactagagaaccttgaagggaactagagaaccttttgagaggtggctttagggtttacgcagggacatggggacttgggaagggtaagatggatgtaaagaaaaacccacagaagtccctatttggaacctttctaaaatggagttgagaatgcaatgctgggaagatatcagttcttggggttaatctctctcaatcagttccttctcatctacccaccaatctgcatcctcagacagggcataaataaaagaccaataaactcacgtgtctgtgtaataccacctgaaaatgaaaaaaggaaacagcagtaagaaaatatcatggtttaagtttaaattgtaggtaaaayttttctagtggaattagacactgcccacaagacttcccaaagagggtctcatccatttaggaaccccgagtcttggaggtgaggttcatgcttagcctatgagatttagctcatagatatatttattaagtagctcatagatgtaactcagatacatcggattcagaatataccagcatga

SEQ ID NO: 642246 - DNA, 590 bp, Homo sapiens
cagaagggagctctactggctagagggtgtggaagaggagatatgtggaatgaagggaactagagaaccttgaagggaactagagaaccttttgagaggtggctttagggtttacgcagggacatggggacttgggaagggtaagatggatgtaaagaaaaacccacagaagtccctatttggaacctttctaaaatggagttgagaatgcaatgctgggaagatatcagttcttggggttaatctctctcaatcagttccttctcatctacccaccaatctgcatcctcagacagggcataaataaaagaccaataaactcacgtgtctgtgtaataccacctgaaaatgaaaaaaggaaacagcagtaagaaaatatcwtggtttaagtttaaattgtaggtaaaacttttctagtggaattagacactgcccacaagacttcccaaagagggtctcatccatttaggaaccccgagtcttggaggtgaggttcatgcttagcctatgagatttagctcatagatatatttattaagtagctcatagatgtaactcagatacatcggattcagaatataccagcatga

SEQ ID NO: 642247 - DNA, 575 bp, Homo sapiens
tgagagacacgaggtgaaattgacattgggagatggaagttggatggcccttgagggctgacccacagggtgttggactttgggatatcgcagagagcttggcatgatttattgtctcaagtcatagaattctagargagacctaccatgtaacccatgtctggttgactgggagaccatccgagtggaaaggggacaatctgggcctctggccggccgtgtgcacaagcataacaattgtttttgtttaacgtgtggacagaatatttgatccatttcaaccaggcatttatagcttgatattctattttaattgttaaagttcatcttagatcatttacttttacaatattttatattgtaatataatataatatataatactttagtattatcattgtttattattatatattatttataattgtttattattatatattacatatatagtaatataatgtataatactttagtattattgggtatagaagagatggcagtctgattagaagaagccttagaaggagaagagaggcaatggggtgaagaggatgagggattaataaaatgca

SEQ ID NO: 642248 - DNA, 577 bp, Homo sapiens
ttcctgctttttgatttaaaattgttttaacttggtggggtgtgtttacagtcaatttttttctaaaagttaattttctactttctttaactaatattgttgtagttgtaacagattgaatgtattgaggccatctacaggtaactgggtctaaaacttttgataggaaggctacaggctgctggcagccactgtgtttttaggtaagcactcccaaagttacttcattatttacattaacaaaaagatggaatggtttttctagggaaggtaaggctagagcaggggcggttatgagcctttcttttagctctttaacctgatcgactttctcagacgtccacaggagatgatcaggtttttttctggacaattttttgttatagaagtttactgtttagtgagtcaatccataggccgcaatatccaactaaccctaaaaaattgctgagttcctgtttagtttgaggtgaggataaggacatgatgcckttaactcgttcaggccctatccgttgtttacctgtacttattaagtggcctaaatatttaactttggcctctacatactgaagct

SEQ ID NO: 642249 - DNA, 599 bp, Homo sapiens
gtatgctggaaaacaaaagcaggtcacttaggtttgcaaatttcacttattaaatcaaatattaaaacttgtcttcttgttttcttgcatttgtccacaaacagctaactctcaggaggatttgcagtggaagcaaagccagcatcccctctccatttattctgttatctaggagaccttcataatgccmaacaggggccagggttgtaggatctcttccctaccagtgatccatgtaatactttttttctccaaaaattctatcctttgaaataacttatccaataaatatgctgcatatactatttgttgaagacctgatcatttggactgtttctgataccacttttacaacacagaattattaaaaaatctcagctcagatacaagaatgtgatggttttgagttgctgcacaggcataaaaggtagaaatgttgtaacagtctgagactcttcaccattacctttgaggcctatgaaatattggagctgggctgggtgggatggctcatgcctgtaatcccagcactttgggaagccaaggagggcagattgcttgaccccaggagtttaaaccagcctggacaatatgacaaa

SEQ ID NO: 642250 - DNA, 606 bp, Homo sapiens
tgttccacagcgtgggagtgggcccgagcataggggctcaaaggccccactacagaatttttgggagtttaaatacctgctagaggattccattggttacttggggtaagccctatgtaaatggaraggatgaagtaaaatgacaaagtcattgagttggcctacgccctatggagaggatatttcctctcatagctgaagtgtgaattggccttatgttctctgcctccagaacctatttttctgcatcatctcccccgtgagggatgtgatctccataagtctttatgggaggcagagggactgatggtcttttttctgtaactgcttcatgttgacttggggatcatggaactctcaccctgttctgtctagtggaggtggagtagtttcttgatggcattggggcggtgtcttcacctggaattggctggaacctttgttgcatgattatctgaagcttgaaggtctctaggcaagaggaaatgaatttggttaaaagatttaatgggaacttcagggggcagatacctccgctcttagaaattttcattatagagatttgcaagagaaaaaacaaaacctggtctgttctagaatctatgt

SEQ ID NO: 642251 - DNA, 589 bp, Homo sapiens
acctggtctgttctagaatctatgtgtttccttaaagtcttagcacaagcaactccattttggtttggtttggtttgttggggcctagtgcatgaccttagtccaaaacaatgaccgccctagaattttgtttttaaaattccccctttatggacaagttctcacttaggtgagagtgtgacacaaacttaggggcttaacgccactctcagttaccattattttgggtttctggtctcagcacatcatttataggttayagggtcctcatggtcgcacatttcttttagcccctgttattccagttgaagggagaccatatgacattctagagatggctgagtaaaagtatttaaaacctttgagagaatacagtgcaccagagagactactgggaggataataccaagagtttgcagtatgctcctcacccaaggtctccataaaccaaaccacctcaaattaaatagatcaaataatgagctagataaagtttactctcttgactaaacaatttcttcatcaatcccctaccactgaatttctctaatcttcatttgatgtaattccccataggccaaaattgcca

SEQ ID NO: 642252 - DNA, 565 bp, Homo sapiens
cagaaaacatgcactgaaaattaaaatgggatgaaatccctttataaaatgtttaagttgcccaccaggcgaccaaatgtacctgaagctttaattgttttcccaggaatatgggatcaagcatcggttataaattattttagtaatttgtaagccactttaccaatgtattcaattgggatcattatatcttttccacgatgagtcatggaatgcagaagttttaataataaaagctttaaggactcaggaaggacaagatggccatcctgtttctccatgagtccatgcttagttaacattagacttatatcctcttggataccagttgtttatccaaattaggcacataacactggcaagaaaatttcattatttttgtggtttacaataacttaacataataaccataattataattgatagcatatacttagacattagaattttagaaatcccatacaatttaggaatatatattagtattattcacaaaaatataacctaaagaagattgaacatcattttggcycatgtacctaaacacatcaaataatcctgttta

SEQ ID NO: 642253 - DNA, 617 bp, Homo sapiens
ttcattatttttgtggtttacaataacttaacataataaccataattataattgatagcatatacttagacattagaattttagaaatcccatacaatttaggaatatatattagtattattcacaaaaatataacctaaagaagattgaacatcattttggctcatgtacctaaacacatcaaataatcctgtttacctcttttcaagatgttttcaggggccctctgattcatctagaaagccaggaattaggaaagacaattttgaaactgaagtttgattttggaattccagattaccataarttatttattttgccaaaatgatgactcagaaatcttaaagatgtaaaaaccttttatagcctcttacgaggaaaaaaaaacacattctacttacatatcttgcatgtaaaactgtttctagtggtcttaatttcatgttgtaatgaagaattttaaggtaaaacctggtaaattacattctgataagttttgactatttgcagcatagctagggtgtggccaattccacatgttcccagaccttacctagctggaaagcaggtaagttaaacaattttcaaaagccaaagaaacagtttatgaccttaca

SEQ ID NO: 642254 - DNA, 617 bp, Homo sapiens
ttcattatttttgtggtttacaataacttaacataataaccataattataattgatagcatatacttagacattagaattttagaaatcccatacaatttaggaatatatattagtattattcacaaaaatataacctaaagaagattgaacatcattttggctcatgtacctaaacacatcaaataatcctgtttacctcttttcaagatgttttcaggggccctctgattcatctagaaagccaggaattaggaaagacaattttgaaactgaagtttgattttggaattccagattaccataagttatttattttgccaaaatgatgactcagaaatcttaaagatgtaaaaaccttttatagcctcttacraggaaaaaaaaacacattctacttacatatcttgcatgtaaaactgtttctagtggtcttaatttcatgttgtaatgaagaattttaaggtaaaacctggtaaattacattctgataagttttgactatttgcagcatagctagggtgtggccaattccacatgttcccagaccttacctagctggaaagcaggtaagttaaacaattttcaaaagccaaagaaacagtttatgaccttaca

SEQ ID NO: 642255 - DNA, 346 bp, Homo sapiens
  misc_feature 1, 2, 3, 4, 5, 6, 7, 8, 9, 10, 11, 12, 13: n = A,T,C or G
nnnnnnnnnnnnnaggtaaccctttcagattggcttctttcacttagtcatatgcatttgagagtcctctttgtcttttcatggcataatagctcatttcttcttggtggcgaatcatcttccactgtgtgtaccaaaggttaataatccctgtacctcttaaaggacttctcagttgcttcccagttttgacaattttcaatcaagctgctatgagtatctgtgtccacatttttgtgtagaaataacattgcaattaatttaggtcaatatcaaggagmaaactcactggaatttatggtgagaatatgctcactttagtaagaaactgccacgttgtcttcca

SEQ ID NO: 642256 - DNA, 499 bp, Homo sapiens
agatactggccctgtgattatggagctaacagtccaggaaaacttgtatccatgaactgattacacatttgtaaaataacagccttggaattgctgcaaatgagaggtgcatggttccagcagtgtctgtaaagggcaacactgaccaaagcatcggggtcaggcaacaatgcccgtgggtggaaagaatgaactgaaatattgcatgaactaggtaaggaggagggacccattaaaaatatcaatgatgaaaactaaaaaaccctgtgcaagtgttaagggcaataggaatgataaaagtacaagcaaacagtcctctytcagagatacacatcctccccggtggaccatagagctgacaaggtgaatgccaagcctgtgccaggacaagctctggtccacagttaggatgaatgcctcacagacctgtctgctgtgaaagacgtctcagtcctgaagcccaagtccatgggtctgtagactcagagatcatgaactg

SEQ ID NO: 642257 - DNA, 560 bp, Homo sapiens
tgctgagccaagatgagcaaaagcagatactggccctgtgattatggagctaacagtccaggaaaacttgtatccatgaactgattacacatttgtaaaataacagccttggaattgctgcaaatgagaggtgcatggttccagcagtgtctgtaaagggcaacactgaccaaagcatcggggtcaggcaacaatgcccgtgggtggaaagaatgaactgaaatattgcatgaactaggtaaggaggagggacccattaaaaatatcaatgatgaaaactaaaaaaccctgtgcaagtgttaagggcaataggaatgataaaagtacaagcaaacagtcctctttcagagatacacatyctccccggtggaccatagagctgacaaggtgaatgccaagcctgtgccaggacaagctctggtccacagttaggatgaatgcctcacagacctgtctgctgtgaaagacgtctcagtcctgaagcccaagtccatgggtctgtagactcagagatcatgaactggatttctttttccatttatgtcagagagaaatggtgt

SEQ ID NO: 642258 - DNA, 492 bp, Homo sapiens
tttaaacacacacacccccatgaacacactcatttgatcatctatgaacccaatgatgtaggcacaattactagcctactttgacaaataggaaaactgaggttacataagctgaataattttcttaaggtccaagagcccacaaatgaggctgtatctgtgagccttgtatctgtgagcctcaccactggccctcccactccttggtggtggcrgaagagctggctcagggatttcctcatgatcctgtgtgatggaagtgacagccactgttgccctcagctggggctcaaacaaacctgccaagttgtctctgatgacacagcccataaggtcccctctttacatacatgtctttctgtgtggttttcagccctcctgcccatcagaaacaccagagcagtttaaacagtgtaggaatcagggagtcaacccaacgctactgaatcaaaatccccagagagagaaacctggggagtcagtatattttaa

SEQ ID NO: 642259 - DNA, 412 bp, Homo sapiens
gaattccagcctgggtgacaaagggaaaaaaaagagtttggctgttgatatgaagtgctttcctttattgtgagagcttgaggaagtcacacctgaagggtctggcattgtcatcagcacaacaaatgtatgtgaacatataacccaggggatcctgtctggtctaacgtcagggagccaaagagaaaaatcgactttcctaacatcaactatatttttattcttttgctgcagccaatgccgagttctgcccagctcttgtttctgagctgttagacttcttcttcattagtgaacctctgttcaagttaagtcttgccaaatttgatgcccctcyggaagctgttgcagccaagttaggagtgaagagatgcacggatcagatgtcccttcagaaacgaagcctcattgc

SEQ ID NO: 642260 - DNA, 543 bp, Homo sapiens
gtcacctgcctggatgccatgtccccagagtgtgctgaggacatggggagtgagcctgggcccaggcagaaatggtaaagggccaagcatggccscctcgctgctgggagctttcctgagaccaaactgccctcatgtaatggacacagtcactgtggaatgtcctggggagcatgggagccttgaacagggagaggaaggcagggagggacatagagcaggggctcctgcagatgtagcactggcaggctggacttctctgcagcttctgcagagccaggaaggagcccctcccagctcctgagaccccatactcccctccacacccacgacactctcctgaccatggccagtcgtccaagaccctagctagtctacctcctgcagtgccatggaagcgggatgttctcactctgtctttctcaagaaatcagaggttttccaggggcctctctgcctggctgcctctgagttgctgtcctgaggtttagctgcaaatgctcatggaagctgcaggctcgggactgagaggtgctcgggccc

SEQ ID NO: 642261 - DNA, 577 bp, Homo sapiens
cttttgctgtgggtgataattaactccagagaaccagcatcctgttactaatggggcctgagtccaggtgtcacagaggagaatatttggtaggaattatcctgcattccttacagatttcccatcttgcagccgtgaataaaaaccatggtaacaaggacacaggaattgaaatgttccactggtcttacactgagagaacccccagsctgaatgggtatccaggccgagggttcccacctatcagtgactttactctgatgtcccctcagacccacagtcagcctgcttggtgctctctctgcactatgctttctgtcctccgtcatgtccagtatacttcattttccacttatcacaatttggggtcctctttaggtttcaacctggagttcacattgttttactccccacgctcagagcactcctcagcgtctgcatcactcaccagcacctgaggtgaatgcttccttcctcaagctctcccaagagctccagagaccagcaccccctgacaactggacagctcccagtgcgcactccacagtcatttcaggagcaggatgtaaaactgagc

SEQ ID NO: 642262 - DNA, 577 bp, Homo sapiens
cttttgctgtgggtgataattaactccagagaaccagcatcctgttactaatggggcctgagtccaggtgtcacagaggagaatatttggtaggaattatcctgcattccttacagatttcccatcttgcagccgtgaataaaaaccatggtaacaaggacacaggaattgaaatgttccactggtcttacactgagagaacccccaggctgaatgggtatccaggccgagkgttcccacctatcagtgactttactctgatgtcccctcagacccacagtcagcctgcttggtgctctctctgcactatgctttctgtcctccgtcatgtccagtatacttcattttccacttatcacaatttggggtcctctttaggtttcaacctggagttcacattgttttactccccacgctcagagcactcctcagcgtctgcatcactcaccagcacctgaggtgaatgcttccttcctcaagctctcccaagagctccagagaccagcaccccctgacaactggacagctcccagtgcgcactccacagtcatttcaggagcaggatgtaaaactgagc

SEQ ID NO: 642263 - DNA, 358 bp, Homo sapiens
cacacagatatcctctctctctctctctctctttcacccatacacatacatatttaaaatgggcacataccatttggtggcttgatttccaggcccccaacccccatggttttttttcacttagtatattatagacatctgtctatttcaacacaggtcaatttcttagttttgatgrctgtgtaccttaattgtgctggaattcagccggctcctcttgatgagcatttgatctattttcacttcactgctgttaccaaacaaaacaatgttttcattgcagcattgttaagatgtggaaaacttggaagttagtatggtatctgtcaatgatggatggttacgttgcaaatcctgg

SEQ ID NO: 642264 - DNA, 544 bp, Homo sapiens
ttaaatatttcaactggaaacttagggagtacagtaatagatgctgaatgaattccatcatccatcgttctggtgtctgataattttgtattttattttccttaagaaaaaaattacataatattaattagaaaataaataaataatgaaactgatgagtttatcaagttagctgaataatgatcaccaattkggaaatgaatcactttcctgtaagcagctattgcattacataacaggaaaaaaattataccatcgacaatagtaacgacagtagcaacaaaaatatactgaaacatatgtattggaaatatacaaacttttaacaataaaatcatgaaattttacgtgaaatttacacaaagataaaagggaatctaaacaaatggagacacacaccttgttctgaagcaaattttggaaaattttaagatgtcaactattctcaattattctacaaattcaggcagcccccatcagaatccgaatagggtagctgtatgctttgttttgaattctgaagtggtgtttggaatatgaattg

SEQ ID NO: 642265 - DNA, 511 bp, Homo sapiens
actataaacacaaaaaaattagctgggtggggtagcaggcrcctgtaatcctagctactcgggaagctgaggcacgagaatcgcttgaacccgggaggcagaggttgcagtgagctgagatcgcgccactgcacttcagcctgggcaacagagtgattctttgtctcaaaataaaaaaagaaagaaagagagagagaagaaggaaggaaggaaggaaggaaggaagtcaatcagtcagtcaaggagtctccttcatcctaagttcctgtcaaggctgacaccaacgtgaggctctcttccaatacatctcttctacctggggaactgatcttacctaaaggaatgtcagagaaagaactgcctggcagcgaagtaagccaggccctaacaccctatcttgaccatccccgcagttagtaagtcgtgctggaccttgcttgagatacctgcatctcatggtaagtctgtcccaccctggaaaccagagacttgagaacgtcaagcacaacca

SEQ ID NO: 642266 - DNA, 511 bp, Homo sapiens
actataaacacaaaaaaattagctgggtggggtagcaggcacctgtaatcctagctactcgggaagctgaggcacgagaatcgcttgaacccgggaggcagaggttgcagtgagctgagatcgcgccactgcacttcagcctgggcaacagagtgattctttgtctcaaaataaaaaaagaaagaaagagagagagaagaaggaaggaaggaaggaaggaaggaagtcartcagtcagtcaaggagtctccttcatcctaagttcctgtcaaggctgacaccaacgtgaggctctcttccaatacatctcttctacctggggaactgatcttacctaaaggaatgtcagagaaagaactgcctggcagcgaagtaagccaggccctaacaccctatcttgaccatccccgcagttagtaagtcgtgctggaccttgcttgagatacctgcatctcatggtaagtctgtcccaccctggaaaccagagacttgagaacgtcaagcacaacca

SEQ ID NO: 642267 - DNA, 510 bp, Homo sapiens
tactttgctggctcagagcagtgagcactgtaaggagtacagagcaggtgcttcaggcatcaggtaactcagcttagctctgagtgctgctacccaggtttctatagatgtccaaggaagcctcagaatcaagctccaagaggttcagataggagaataacctgcgatctgcattgtttgcaatcccttggaatacaggttacagcccactttccttctcatgcctgctctttcttctttcttaaacctggaggaatgtttgcaccatggaagcccagagggaagaaaggctgctatgggtcttgccccmgcagaactcagccagcagccacagttgctcagtagcaagtggtacccacagttcaaggccccagatcccactgcaacacgtggactaggcatgtgctgtgaaaagcccagatggagccagaaaaaagctgtggcttagtttacttaagggagacaggaaaagcctcacatggcaggtagctagcaggtacttgacaagag

SEQ ID NO: 642268 - DNA, 420 bp, Homo sapiens
tcaggcacatgggtggaggcacaagagacacagaagcccctgtctctggcttccaatctggctcaccatcgcctgggagacatgaaaggcagagcmaagatatgacacagctcagctcctactcatctggtacaaaccattaaaatgatgcaagctctgagcacaaggagacaatgtacatttttcacgctgattgtttcctgcgagtatatgaccaggctgagcagatcctatctcattcttacccagtgttttaatttttaatttttttttttttggtgaaaagaaaaacaaggtgtcaatccacactctttctttgtgcagcccctccatctgtcattctctgtgttatcagcacatgagtgtgttctgttcctggcgccaggctatcccttgcaggtgtatgggatccttgggaat

SEQ ID NO: 642269 - DNA, 409 bp, Homo sapiens
gtctcacttagccacttacttggtcaatggctcactttccacatttgtaagataggtataataatgctacctacctaactgggttgttttgaagaataaatgggttaatccttggacagtacttacagcagtgaccactcatagttacacttaagaaatgtagccaataccattctrgccagggcgggggtggagactgtttctagggcctctttgaagatagtgtgccaaatttttaatggtctactggaatggacatgtgattactcaacatttaataaagcctagatatgagcacaccttggttcttgtcatcagaaacttgaaacttttccaagattattgatgttatggattagaatggtttcatccaaagaatcatgagatgcctttatctatatgtctatat

SEQ ID NO: 642270 - DNA, 409 bp, Homo sapiens
gtctcacttagccacttacttggtcaatggctcactttccacatttgtaagataggtataataatgctacctacctaactgggttgttttgaagaataaatgggttaatccttggacagtacttacagcagtgaccactcatagttacacttaagaaatgtagccaataccattctggccagggcgggggtggagactgtttctagggcctctttgaagatagtgtgccaaatttttaatggtytactggaatggacatgtgattactcaacatttaataaagcctagatatgagcacaccttggttcttgtcatcagaaacttgaaacttttccaagattattgatgttatggattagaatggtttcatccaaagaatcatgagatgcctttatctatatgtctatat

SEQ ID NO: 642271 - DNA, 592 bp, Homo sapiens
atactaacgacctcatcttaagttattacatctgcaaaaacccaatttccaaataagctcacattcacaggtaccaggggttaggacttcaacttattctttagagcagagggaaggtatagaatccaatctgtcacagtgctactttctcatttcctcctgttttataaacttattgtgtttataataagttgtataaacttattataaaataaacttattatgtttataataagttgtataaacttattatgtgtccacaatgtgaaggtagttgtgaagatagttgaaaggctgtttggacaaagaagagtggcttcgggaggggaattcattaggcagtaaatacaatagagggtttctcatgcttggaactgcttttagyttgcacgtttagtttggatactaaaaaggagtccttcttactcttcctctatggggtctgctgccccacatagagtcagcagtggagcaactctgggggacagagagacaaggccttctgactgttgccatgctgacagccaatgagaagagttcattctccatgctgcttcctggcagaacatgcattgattcattcattcaacaa

SEQ ID NO: 642272 - DNA, 592 bp, Homo sapiens
atactaacgacctcatcttaagttattacatctgcaaaaacccaatttccaaataagctcacattcacaggtaccaggggttaggacttcaacttattctttagagcagagggaaggtatagaatccaatctgtcacagtgctactttctcatttcctcctgttttataaacttattgtgtttataataagttgtataaacttattataaaataaacttattatgtttataataagttgtataaacttattatgtgtccacaatgtgaaggtagttgtgaagatagttgaaaggctgtttggacaaagaagagtggcttcgggaggggaattcattaggcagtaaatacaatagagggtttctcatgcttggaactgcttttagtttgcacgtttaktttggatactaaaaaggagtccttcttactcttcctctatggggtctgctgccccacatagagtcagcagtggagcaactctgggggacagagagacaaggccttctgactgttgccatgctgacagccaatgagaagagttcattctccatgctgcttcctggcagaacatgcattgattcattcattcaacaa

SEQ ID NO: 642273 - DNA, 566 bp, Homo sapiens
tctcatttaatctttacagcagtgctatgcattaggcattagattccccttttaacagatgagacaaataagactcagtgaggttaagagacttgctagaggtcttgcaattagtaaatagcattgttagaatttgtgtccttgactgagtgtcaacaaagtacccaatattttcaatatactttgttaaactagaaaatagacagtagagattctaaagttggaatggatataagaccgatcacatagtagacmagctgacagctgattggatatgatgtgaaaaagaaagaatgtctgagaactctacctcctattgatctgcctttgaccccatcttaataatggatagcaccactaataaaaggggaccagaatggaatggacatcttaaccgggaaagacggaaaatttgcttcccggggctatattcgatctttgttttttttttcctcgtctgcatctacagatcaaggctctgccgagcatagttgttaacattgtttgtggtctccttttactggggaagattggttggtactacttacaggacattttaccaggca

SEQ ID NO: 642274 - DNA, 566 bp, Homo sapiens
tctcatttaatctttacagcagtgctatgcattaggcattagattccccttttaacagatgagacaaataagactcagtgaggttaagagacttgctagaggtcttgcaattagtaaatagcattgttagaatttgtgtccttgactgagtgtcaacaaagtacccaatattttcaatatactttgttaaactagaaaatagacagtagagattctaaagttggaatggatataagaccgatcacatagtagaccagctgacagctgattggatatgatgtgaaaaagaaagaatgtctgagaactctacctcctattgatctgcctttgaccccatcttaataatggatagcaccactaataaaaggggacmagaatggaatggacatcttaaccgggaaagacggaaaatttgcttcccggggctatattcgatctttgttttttttttcctcgtctgcatctacagatcaaggctctgccgagcatagttgttaacattgtttgtggtctccttttactggggaagattggttggtactacttacaggacattttaccaggca

SEQ ID NO: 642275 - DNA, 581 bp, Homo sapiens
agttatttattttcttctgctagctttggggttagttttttctttttctaggwgtgaaaaacactaggtttggggtcatttttgtcttgttactctgggtgtgatgttagatcattgatgtgagatctttctaactttttaaggtaggcctttagtgctataagccttcttcttaacactgcttttgctgcagagggatatatttaacattattgccacatttattttaaactatgccaaaagggacctaataaatgatgtctatctagaagagggaaagcctttggtaatgtttttcattttttaacctattataggttgtaaggagtggacttatgttttgtttgtgcctgattatgaagtaataaaaatactactcaatttttttggtctacatcttaccatttattttttgtcatctgacactgtcacaataactttagaaaaattacatttaatgaagtttaagcaaagaataatttgtgaattgaacagccaccctcctcaactccaaacaaccagaataagtctagtactgtcacgtggttggagaggatttacagacagaaaaaagaaagtga

SEQ ID NO: 642276 - DNA, 249 bp, Homo sapiens
ttatctctccctggagagagtgtaaaaccctgaggggtgtttggttccgcagcaatgcactaaattagaggggccccaggagataagcaatggctmtccctggttgagaattctcagataccctgggaggcagggagggaaagtgagagggtaaacgggttttgtccttagaggtactggagtcacttccagctgtcctgtaacctcatttcctcctagcagagtggttggagcagataggttctgtcc

SEQ ID NO: 642277 - DNA, 550 bp, Homo sapiens
tggcacatgtatacacatgtaacaaacctgcatgttgtgcacatgtatcctagaagtataataaaaaaaattttattgaaatatatatatttttttttctttgtcttttttgagatggagtctcactctgttgctcaggctggaatgcagtggcactaccttggatcactgcaacctctgcttcccaggttcaagcaattctcctgcctcagcctcccgagtagctaggactacaggcacgtgccaccatgcctggctaatttttgtatttttagtagagacggggtttcactatattggccaggctgttcttgaactcctgacctcatgatccacctgccttggcttcccaaagtgctgggattacagacatgagacactgcacccagcctattgaaatacatattatccatttaacatatatttkgttttttaagctctgttttgttttgttttgttttttctaaaaacagttctgtaatgaagcttgctttgtcaaggactatgttgactgataatgaaagcatcattttataaaaaaaaagttcta

SEQ ID NO: 642278 - DNA, 596 bp, Homo sapiens
ctcatttacatcttctgttacctgtaccctaactgctgattgccacaaagggcacgtttgcacagttcttccctataaaacagggctgttcaggatggtttaaaacatyattaaaatagaaaccttaatatttctgtttttaggaattaaatagtctcccccgcatccccatacaaatctagtcataggtttcttagttctgaaggaaaaaataaatcctgagtgctttagtccctgggctatgttaattttccttgggaccacccagggaatcccctggtttctaagtaagagtgctggtgttgggcttgcctccagaatcaggttgactctgtgctgggctcaggttgaacctgacttctgcagtgtcggatgtgggtgtgcgcctctgatttggatctggatggaattctaagaagtgaatctcaggaagaaaaataagctaacatgactgtttgaggtaaaaaaaaaaaaaagaagaaaaaagcctgcacaaatctgtaatttatatcccagaagacagtgtattctttattgagatgatgaggccccagaccagtgcagggttcatttaaaatagtggaacataaacctgt

SEQ ID NO: 642279 - DNA, 553 bp, Homo sapiens
aactcttggaccttaactcccagtccagtgctctttccactgtaccatgtttgtgactgactgctgtcagacttgccttaaagtagagcaggaagctcagctgcaacctaaggcattttagagtgagctgggaaaagttgccttggatgaatcgtcatactgttcccagcacaggctcctctacaacagtcccgaggcttggcggccctccatggtggctgctgtcaggggtctggagactygctgtacatgaggggtggctgacattctcagtctgagcttggtaggaagtaaaagcaaatgtcaggagtggagggctgtgaagggtctcaggatccattattttgatagtcgtgtctggagtggagttttttgagttaattttaagattgaagtacaatgtacatacatgatatatttttcatttatttatgtattttttattagatactgacaagttataattgtatatatttacgaggttcaaaagggatgctatatgtgttatacaatgtggaacaattgaatcaagctaattgacatttctatcacc

SEQ ID NO: 642280 - DNA, 575 bp, Homo sapiens
gctgccagctttgccccacttcacactgcaaacacagcaattgacagagatccttccccatcctcctctgtggcttgtacaggtgtaattttgggaacgctggaggatgttggctgtaattcccacagaatccagtaggtggcactagaaaccagattaaggcctttgttttgctattacacatggtcccagtttccctaaaggcaaccaagacaggatgaaagtacaatcgcagagggaatacatttttttctttctttcttctttccttccctccctctcttcccttccttcataaaatgagttttaatcaaaacatctcaatttctttctgaaaagctagaaatgtagacagaaaaatcgttcagcattgatctccctctgcgttgacaygaacatcatactgaagctgacatctgtacctatattttagagtctgcaatttgtctgaaaagtcccaccagatttggggcatgagagttgaaaagggtaggctttctatctcttgaattcaggactggaatgtatatgaagaacttgaatttacctaatcggtgggaagagaacatctgcga

SEQ ID NO: 642281 - DNA, 612 bp, Homo sapiens
gtatcgatattattaacaggctagcactgaaatgaaggttttcattctctgaacacacaattcacagctggacatcagatggtgaaatattaggagaaataaaaataaatgaaggaaagaataatgaactgttttttttttacactttgcacttttgaagtgctttcccataygtagtcattgaattcttatcagtctttttattcgtcccatttccagacaaggaaactgaggcttgaatacattaagagacgtatccactgtcacccttaaatactgcctcaaaatacttccatttactcattgataaaagggggtaataatagtacctattttatatcatagtagtgaggatgaaataaattaaaacaaaaaatgctgattttaatcttctgcccttccccagtcttctgctttttccactatcctaatctacttctgggttaaaatctgacatcaataatgcataaggcagatgatacacatgagggaaaaaaagccaaagctataccctattactttaaaatgtatagactcaagtttaacgagagctcaccaccaagtactgttcgagcactttgtatgtattatttcaccctcactacaaccata

SEQ ID NO: 642282 - DNA, 389 bp, Homo sapiens
cactaacaagtcttaagttatctgcactgtaaatatgtaaatctcattctattatgttggttcagccatgctaaaataatccttttgttatcatcataaaaggctgagttaaaagaaccctgccagacattttcgtagaggaatatccaggctgccttactatggtatctggtcagttcatttccctgtttaaacctctacaaaggccccacttctctgagagtaaagcacaaagctgttaastggcctatgggcaagagtaatacttaaaacaggtaacaaaaagtacatggcatcccacctatcaaaatggacactgaccataaatcatcagtacacccaaacccacacatatcagcagaatatcagctctgacaacagggtcccat

SEQ ID NO: 642283 - DNA, 607 bp, Homo sapiens
ccatgtccatgtacgtgtgtatgtatgtgtgcatgcttacatattaccacgtttgtatgtgtccatatacaagatagatagtagagagggcttatgtctagtggcaaaatgtgaagcctttggggacagactgcctacattcaaatcctagctatgactcttactagctgtgtaatcttgggcaatttccttaacttcttcacttcatttttaccatttgtaaatagagtgtctatttcatagtattgttctgtggattaagcaaattagttaatataatgtattagaacakcattgggtatgtagcaaacactcagtgagtgttaactgttgccttatgcggtttacaaaattatctaaatggcataatacaaatggattcctctgaaacttatcatttcactctccatttttcttttgaacacatttagatctagttcattagtttgaactactgcataataccacaatgtattcattcatttgctattgatgaaaacttggcttggttcagatttttgacaaacaatactgcaatatacatcttcatgcatacctccttgttcatggcttttaaattcttatggcacataccttaccacagaat

SEQ ID NO: 642284 - DNA, 421 bp, Homo sapiens
ttaaagcaagttccatggctaagcaaggaagtggcctcccctaggaaaagacaacaaacatttgtgaatgataataaagtttattgtagtcttttcttctcatcacaaatatttggttcaatctctttttgattgagaaaatacactctcttctggcctttctctagggaggacaaacaaatgtcccatctaatcatggcaataggatcatagcccaggatcctgtgatgtgtctttctctaggtatttatttgattctcttgcttcaggtattcatgaaggaaaaaagcaaattatctgcttctcatattaaatattcattgtcrgaacaaggccagaatatttaaatatactattaaaaacacacacacacacacacacacacacacacacatagttttggaaaaaggaagaatggagg

SEQ ID NO: 642285 - DNA, 425 bp, Homo sapiens
ttaaagcaagttccatggctaagcaaggaagtggcctcccctaggaaaagacaacaaacatttgtgaatgataataaagtttattgtagtcttttcttctcatcacaaatatttggttcaatctctttttgattgagaaaatacactctcttctggcctttctctagggaggacaaacaaatgtcccatctaatcatggcaataggatcatagcccaggatcctgtgatgtgtctttctctaggtatttatttgattctcttgcttcaggtattcatgaaggaaaaaagcaaattatctgcttctcatattaaatattcattgtcagaacaaggccagaatatttaaatatactattaaaaacacacacacayacacacacacacacacacacatagttttggaaaaaggaagaatggaggatac

SEQ ID NO: 642286 - DNA, 579 bp, Homo sapiens
tggccagttcattcctgttttttttttttttcttttgagatggagtcttgctctgtcacccaggctggagtgagtgcagtggtgcgatctcagctcactgcaacctctgcctgcagggttcaagcgattctcctgcctcagcctcccgagtagctgggactacaggcgtgcgccaccatacacgtttaattttttgtatttttagtagagacagggtttcaccatgctggccaggctggtcttgaactcctgaccttgtgatctgcctgcctcagcctcccaaagtgctgggattacagacatgagccactgygcccagcctcttttctgttcttatcttgtattagtttgcaagggctgctctagcaaagtactgttgactaggtggcttagaaaacagaattttttctttccatttttggatgctaggagtccaaaatcaaggtattggtggagttggttccttctgagggctgtgagggaagggtctgttatggggctctctccctggcttgtagatggctgtcttctctctatgtctcttcaaatcattttccctctaagtggatctctatgttc

SEQ ID NO: 642287 - DNA, 519 bp, Homo sapiens
ctgtggcaaattgtgggaaaataagaaaggtgaagcatctactggcatttaaagctactgctcagaaatgatatgtgtcaattctgctcaaatttcattggccaaagtaagtcttatcgccaagccttaagttaaaggagatggaaagtacaattctcctctagggaggggcagcaaatatttgtgagcactgttggtcacagtctagcataatataatattttaatgtttttagaaaagttcggggagatagtagacagagtttaatgacttgacactaggtgagtgggaagactagggcaaagggtaaagagaaggactttggctttggcacagagatctaactgtagttaacaccagaagaatctatcctttatcagatgcttaacaggttaacatgtgagggyttgaagagttcttggcagagggggagggcggatagttggtgcaggctttgtattccaggacttcaagttgcagctctgccacttagtagctgtgtaaattttgtcatgttac

SEQ ID NO: 642288 - DNA, 602 bp, Homo sapiens
acacattttgtagggttattacaggatttagtgatttaaaacatttacgccaatgcttgtgataaatcctcaataaatggtaattattctcattgtagttagctgaggtgatacatgtaaagcttttagcacagtggcaggctcacagtgagaacacaataaatatgagacaatcattttctacactaacccttattaagaagtgcaagccgaagaagccagagtcagagaaataaagcagagaaggagggagaacaaatacaagagagttcattaccaagcaagccatakttgcctggcaagttgattactcagtctctgtatcagtctattctcacactgctataaagatactacctgagactgggtaatttataaagaaaggaggtttatttgactcacagttttgcttggctggggtggcctcaggaaagttacaattatggtggaaggtgaaggggaagcaaggcacatcttacataacagcaggagagagagagaatgaggaaacgccacactttaaaactatcagctctcataagaactcactcattatcatgagaacagcatgagagaaactgcccccatgatccagtcgcctc

SEQ ID NO: 642289 - DNA, 602 bp, Homo sapiens
acacattttgtagggttattacaggatttagtgatttaaaacatttacgccaatgcttgtgataaatcctcaataaatggtaattattctcattgtagttagctgaggtgatacatgtaaagcttttagcacagtggcaggctcacagtgagaacacaataaatatgagacaatcattttctacactaacccttattaagaagtgcaagccgaagaagccagagtcagagaaataaagcagagaaggagggagaacaaatacaagagagttcattaccaagcaagccatagttgcctggcaagttgattactcagtctctgtatcagtctrttctcacactgctataaagatactacctgagactgggtaatttataaagaaaggaggtttatttgactcacagttttgcttggctggggtggcctcaggaaagttacaattatggtggaaggtgaaggggaagcaaggcacatcttacataacagcaggagagagagagaatgaggaaacgccacactttaaaactatcagctctcataagaactcactcattatcatgagaacagcatgagagaaactgcccccatgatccagtcgcctc

SEQ ID NO: 642290 - DNA, 550 bp, Homo sapiens
agttttgatgttttctgatctctaggttgctagtttttgtttatttttccaacatttattttagattcagggggtccatgtgcaggtttgttacctaggtatattgtgtgatgctgaggtttgaagtatgaatgatcccatcatccaagtagtgagcatagtacccaaaagttagtttttcaactctttcttcctccttccccactctagtagtcctcagtgtctattgttgccatctttatgtccatgtttcccaatgtttagctcccagttgtgagaacatggagtattttgttttctgttcctttgttaatacatgtaggatagtggcctccagctgcatccatgttgctgcaaaggacatgatttyggtcttttttatgactgcataatattccatggcacatatataccacactttccttatctaatttaccactgatgggcacctaggtttagtccatgtctttgccattgggaatagcactgtgatgaacatgcaagcacatatgtcttttggtagaatgattttttttgggatatataccca

SEQ ID NO: 642291 - DNA, 567 bp, Homo sapiens
acatccacgtgtggaagggcttcacttctccttagacttcaaggggatggaaggagagaagcaggtttggaagaaatagagaggagctggctgctgctcctcccttccattcctagcactgcaagttctttgagacaaggagggaggagagactgctgttctgtggtgcaggaaaaatgtgtcctggtcagcagtgtcacagtggagagaaaaggagtgcagtccacctctggcagstctgaacctgcagccaggaagaaagagttcggccttgagtaattgagtttagagacagaagtaacttccccatttcagttcatggcaactccaccctttcagttgctgaggccaaaacacttgggagtcaccttgactcttctctttctctcacactccccatgaagtctggtggctcctcctgaaaatgtatctggcatgtgtttctcaccagctccagcgacaacaccctggctggagccatccccattctttgtcctttgcctgctggctgctgtggcctccttactgttaaccctgcagtattcttgctacatagcaactgggtga

SEQ ID NO: 642292 - DNA, 567 bp, Homo sapiens
acatccacgtgtggaagggcttcacttctccttagacttcaaggggatggaaggagagaagcaggtttggaagaaatagagaggagctggctgctgctcctcccttccattcctagcactgcaagttctttgagacaaggagggaggagagactgctgttctgtggtgcaggaaaaatgtgtcctggtcagcagtgtcacagtggagagaaaaggagtgcagtccacctctggcaggtctgaacctgcagccaggaagaaagagttcggccttgagtaattgagtttagagacagaagtaacttccccatttcagttcatggcaactccaccctttcagttgctgaggccaaaacacttgggagtcaccttgactcttctctttctctcacactccccatgaagtctggtggctcctcctgaaaatgtatctggcatgtgtttctcaccagctccagcgacaacaccctggctggagccatccccattctttgtcctttgcctgctggctgctgyggcctccttactgttaaccctgcagtattcttgctacatagcaactgggtga

SEQ ID NO: 642293 - DNA, 634 bp, Homo sapiens
gattattgttggttgactctctccccagctagaatggaagctattcagggcagaaatctttgctttatttactgataggtcctgaatgcttaactggctggcacatattagttgctctaaatatatatataagtatgtatattcatttgaacaggtggaatgaccccaagggttttatatatatatattatatatatatatwttttttgagacagagtctcactctgtcactcaggctggagtgcagtggtgtgatattggctcactgtagcctctgcctcctgagttcaagcaattcacctgcttcagcctcctgagtagctgggactacaggcatgcaccaccatgcccggttaatttttgtatttttgtggagatggggtttcactatgttgcccaggctggtctcgatctcctgacctcaagtgatccgcctgcctcagcctcccaaagtgctggattacaggtgtgagccaacgctcccggcccccaagagttatttcttcatctcagctctaaactttcccaattcatctccccctgtgagtccttgaatccgtcctcatctcctgaaatcccactcactaccatgctggagccccctaccaggtactcgagtctgtgcagacagcgt

SEQ ID NO: 642294 - DNA, 593 bp, Homo sapiens
ggctctcctgggtcttctgcctgttgactcagcctgcaggtgctgagatctatcagtctccataatcatatgagccaattcctcataataaatatctctctgtgtgtctctytctccatatatatatatatatatatatatatatatatggaacatctgagtagtggctggtgtctgcagcacacagctattttgtgaacagtatatgttagtacatagtaggctcccacagcagcagggaagaaaggtgagaggtctaaaccataacccattacacaactctgagtattgaaatgtggataaggaaaatgagttttctaaatgaggttgcactggaattttcagtgtttgtttgcaggccacacaatgtttaagatgtgtgtaatatggcattttctgctaactaaacttcttaaccttggggataagagtacttaccctgtattgcatttatccaaccagaaatatttgttgcatgtcaacaatgtgccatgcattgttctgggaaaggaagataagataggcaaggtccttgctccattgcacttatcttcttgtaggaggaaacatactatacacataagcaaataaat

SEQ ID NO: 642295 - DNA, 576 bp, Homo sapiens
atagaaaagtgagaaatttagtcaaatgaccagtaatgccttctgcttcattatttcacccaaataatcatttgctattttatcccttattagttgacttagcatgtctgtagtttgtcaataaaatggactccctttagagacagccagtcttccaagtatgtgattatgaagatttctgttttatgacttttctcttctatggctctgtcatytccattaaagccttttgctgattttatatggtgggttatccttgtaggtataggtcttcaccaaacttcacacttgcctgacactattggaaggaagcaaagctcatcttgatttagttctttctctctactcttttgaatgtgcctgacaggtatcctgaatagatattcagggacacggaatgatgtggatcgagagtttgttataatgtttactcttgtggatgagaatcaaagctggtacctcaatgaaaatatcaaacatttctgcaccaaccctgattcagttgacaagaaagatgctgttttccagaggagtaacaaaatgcatggtgagtacctcccatgttcccaaacgtat

SEQ ID NO: 642296 - DNA, 576 bp, Homo sapiens
atagaaaagtgagaaatttagtcaaatgaccagtaatgccttctgcttcattatttcacccaaataatcatttgctattttatcccttattagttgacttagcatgtctgtagtttgtcaataaaatggactccctttagagacagccagtcttccaagtatgtgattatgaagatttctgttttatgacttttctcttctatggctctgtcatctccattaaagccttttgctgattttatatggtgggttatccttgtaggtataggtcttcaccaaacttcacacttgcctgacactattggaaggaagcaaagctcatcttgatttagttctttctctctactcttttgaatgtgcctgacaggtatcctgaatagatattcagggacacggaatgatgtggatcgagagtttgttataatgtttactcttgtggatgagaatcaaagctggtacctcaatgaaaatatcaaacatttctgcaccraccctgattcagttgacaagaaagatgctgttttccagaggagtaacaaaatgcatggtgagtacctcccatgttcccaaacgtat

SEQ ID NO: 642297 - DNA, 554 bp, Homo sapiens
tggtacctcaatgaaaatatcaaacatttctgcaccaaccctgattcagttgacaagaaagatgctgttttccagaggagtaacaaaatgcatggtgagtacctcccatgttcccaaacgtataccaggccttttatactataaggtactacaagggataaaaaatacacagaaatgttgatctgagtttggcatgatttataactcagggatgaccatggttagaaagtgatacaatacatgacacatgtttgaacctgaaacaatctgagggggacagagcagtggatgcatgctaaattgggcatgcagtgtggacaaagccacagggctttgggaaaatggagggatcratgttatattgtaattggaaaagaatcggtgcctgaggtgagcccagagcatgggtgggcttagactgactggaaggagaaaggagaatgaaatcatcgttctataataatcctgtgttttgcaacattttgcttcatccagtaaccattttctgagccgctgataaattttaagaactgagttatgcatggggtttaaat

SEQ ID NO: 642298 - DNA, 599 bp, Homo sapiens
tgcattagcccgggagtttgaggctgcagtgaactaagtgccactgcaccccagcctgggtgacagagcaagaccctgtctcaaaaaacaaaaacaaaaaaccctagcctgtatgctgaagtagatgtgtgtttgcaaacaatccttcaagactggaaaagggtgggrtattgtggcacacgcctgtaatcccagcactttgggaggccaaggtgggaggatcacttgaggccaggagttcaagaccagcctggccaacatggcaaaacctgtctctactaaaaatacaaaaattagctggtcatggtggtgggcacctgtaatctcagctactggggaggctgaggcacaagaatcttttgaacccaggagacagaggttgcagtgagctgagattgtgccactgcacttcagcctgggtgtgacagagcgagactccatctcaaaagaaaaaaaagagagagagactggaaaaagagacctaatcaagtaaaggaaaaaatttaattaaaaaaatctagactatggaagataattaatatgtacaagttttattgatcaatttatttaaatttactaaaataatttagaattaattg

SEQ ID NO: 642299 - DNA, 609 bp, Homo sapiens
atgcaaattaaaaccacagtgagataccaccttactcctgcaagaatggccataattaaaaagttaaaaaaaaaagatgctggtgtgaatgtggtaaaagaacatttatacactgctgataggaatgtaaattagtacaacctctayggaaaacagaaaggaaattccttaaagaactaaaagcagagccaccatttgatccagcaatctcactactgggtatctacccagaggaaaagaaatcattatgtgaaaaagacacaggtgtatgcatatttagagcagtgcaattcacaattgcaaagatatggaaccaacctaagtgtgcatcaactgagtggttaaagaaagtgtggtgtatatacaccatggaatactactcagccataaaaaggaatgaagtaatgtcttttgcagcaacttgggtagcgctggaggccattattctcagtgaagtaactcaggaatggaaaaccaaatacagtgtgttctcacttataagtgggagctagcctatgagatgcaaaaacataagaatgatataatggacttagggaattggggccagaaggttgggaggaaggtgagaaataaaagactacatattca

SEQ ID NO: 642300 - DNA, 609 bp, Homo sapiens
atgcaaattaaaaccacagtgagataccaccttactcctgcaagaatggccataattaaaaagttaaaaaaaaaagatgctggtgtgaatgtggtaaaagaacatttatacactgctgataggaatgtaaattagtacaacctctacggaaaacagaaaggaaattccttaaagaactaaaagcagagccaccatttgatccagcaatctcactactgggtatctacccagaggaaaagaaatcattatgtgaaaaagacacaggygtatgcatatttagagcagtgcaattcacaattgcaaagatatggaaccaacctaagtgtgcatcaactgagtggttaaagaaagtgtggtgtatatacaccatggaatactactcagccataaaaaggaatgaagtaatgtcttttgcagcaacttgggtagcgctggaggccattattctcagtgaagtaactcaggaatggaaaaccaaatacagtgtgttctcacttataagtgggagctagcctatgagatgcaaaaacataagaatgatataatggacttagggaattggggccagaaggttgggaggaaggtgagaaataaaagactacatattca

SEQ ID NO: 642301 - DNA, 552 bp, Homo sapiens
atcaattggccaggtctggatcacaagtcctgccctaacaacagcttattagagaaatttggcgtgcttataggctaggctgaggcacttgctccattagtggggctgggggatggaaccccatccgaagcacagagaatgagagtgggacaggtgtgctctcccactctgggcacactcctcactcctcaaagagtggagtgtgtgtgccgagttgccaaaacttwaaaatgtcttctacatcaactttttctattttttttttcttgagtaactcttcattgttcgagagtatactgaagcattacttccttaaggaaacttcccctgacttatctttgactccagattagatgccccagaacataatgtgtgttctcataactctcccttccagaataggggctccttcaaggcaggggctttgtcttttttcctccatatccctggtactgatggcagggcttggtataattaatatttgttggataactgagagagaataaatgcacggacacttgcaggagtgtgtctcagagtaagatgtggcct

SEQ ID NO: 642302 - DNA, 562 bp, Homo sapiens
tgattgattgattgtccatgaggttgattttaatttctagtctccagttgtgatccaaagccccctccctaaatcacataattggtgtgagtcaaagcacctactgtaaatcacrttgttactattggactagctcaagatccccaagcaaacacagatactttaccttctggaaggccaggagaaagtccagatctcattttaggtgagactaaattctttattgcacccttgggaaagtcccttaattttcttccatcactgttctctcacatatagaatgaaacaaattatatgtgactgttagggttatattctggttaattataaagtatgcgaacttaagtaaaaaaaagtcactattctttctttagtttactactctcttcatgtatacatgtgggttctgccagcacagtcttgttaattttgtctttgtttccaactccaattcttttgacacacagtttcagtcacgatcactgagtttttgggtttgtcttttttcccacctcagtgcactggtttattatctttatcggggttctataatcgcattaga

SEQ ID NO: 642303 - DNA, 562 bp, Homo sapiens
tgattgattgattgtccatgaggttgattttaatttctagtctccagttgtgatccaaagccccctccctaaatcacataattggtgtgagtcaaagcacctactgtaaatcacgttgttactattggactagctcaagatccccaagcaaacacagatactttaccttctggaaggccaggagaaagtccagatctcattttaggtgagactaaattctttattgcacccttgggaaagtcccttaattttcttccatcactgttctctcacatatagaatgaaacaaattatatgtgactgttagggttatattctggttaattataaagtatgcgaacttaagtaaaaaaaagtcactattctttctttagtttactactctcttcatgtatacatgtgggttctgccagcacagtcttgttaattttgtctttgtttccaactccaattcttttgacacayagtttcagtcacgatcactgagtttttgggtttgtcttttttcccacctcagtgcactggtttattatctttatcggggttctataatcgcattaga

SEQ ID NO: 642304 - DNA, 491 bp, Homo sapiens
agacctttctcaaagacgttgtctcattaactttctcactgccagtaatggagtttctattatcattattctatggtcattccaaggagttctcctcttatccaatttccttttttttttttttgaagtcaagagaactgttattttagctccgtagctgaagtttctcattcaagggctgrtattcttttgtgcttggagaggattagaatggaaggtgtagggtcctttttgaatgatttctgaaccagttgagaaataagacaggaaagtaagtaaatggggcctaaaatttctttattggcaaaatctaggaattagggaatgtggcttttatgtccagataaatggattttctattactgaacctatgaattcaacaaatacaggcagcttttatggtgcagggagaatgtgtgctctctgtaggtagacccacttcaaatgggataaaagagaagaactagctgagcatgcttgctttattcttc

SEQ ID NO: 642305 - DNA, 601 bp, Homo sapiens
gtgctctctgtaggtagacccacttcaaatgggataaaagagaagaactagctgagcatgcttgctttattcttcaccagtttttttttcttgacacagagtttcactctgtcaccaaggctggagtgagtgcactggtgtgatctcagctcactacagcctggacttcccaggctcaggtgatcctcccacctcagccttctgagtagctgggactacaggtatgtacctccatgctgggctaattttttgtatttttagtataaatggggttttgccatgttggctaggctggtcttgaactcctggcctcaagtgatctatctgcctcagcctcccaaagtgctgggattagaggcctgagccaccacacctggccaggccagaatttgctttttttatggtgggaggactgagtctccctctgtcaccgaggctggagtaccgtggtgcaatcttggatcactgcaacctccgyctcccgggttcaagcaattcttgtgcctcagtatcctgagtagctggaattacaggcgggtgccaacacacctggctaattttttttatttttagtagagacaggtttcaccatgttggctag

SEQ ID NO: 642306 - DNA, 601 bp, Homo sapiens
gtgctctctgtaggtagacccacttcaaatgggataaaagagaagaactagctgagcatgcttgctttattcttcaccagtttttttttcttgacacagagtttcactctgtcaccaaggctggagtgagtgcactggtgtgatctcagctcactacagcctggacttcccaggctcaggtgatcctcccacctcagccttctgagtagctgggactacaggtatgtacctccatgctgggctaattttttgtatttttagtataaatggggttttgccatgttggctaggctggtcttgaactcctggcctcaagtgatctatctgcctcagcctcccaaagtgctgggattagaggcctgagccaccacacctggccaggccagaatttgctttttttatggtgggaggactgagtctccctctgtcaccgaggctggagtaccgtggtgcaatcttggatcactgcaacctccgtctccygggttcaagcaattcttgtgcctcagtatcctgagtagctggaattacaggcgggtgccaacacacctggctaattttttttatttttagtagagacaggtttcaccatgttggctag

SEQ ID NO: 642307 - DNA, 601 bp, Homo sapiens
gtgctctctgtaggtagacccacttcaaatgggataaaagagaagaactagctgagcatgcttgctttattcttcaccagtttttttttcttgacacagagtttcactctgtcaccaaggctggagtgagtgcactggtgtgatctcagctcactacagcctggacttcccaggctcaggtgatcctcccacctcagccttctgagtagctgggactacaggtatgtacctccatgctgggctaattttttgtatttttagtataaatggggttttgccatgttggctaggctggtcttgaactcctggcctcaagtgatctatctgcctcagcctcccaaagtgctgggattagaggcctgagccaccacacctggccaggccagaatttgctttttttatggtgggaggactgagtctccctctgtcaccgaggctggagtaccgtggtgcaatcttggatcactgcaacctccgtctcccgggttcaagcaattcttgtgcctcagtatcctgagtagctggaattacaggcgggtgccaacacacctggctaatttyttttatttttagtagagacaggtttcaccatgttggctag

SEQ ID NO: 642308 - DNA, 642 bp, Homo sapiens
tgctacagagccttgaatgatgtgtttattcagtcttttttcaagaaaatattggaaagacagaacttctgatttttttatagaggatcttctgtcagtcatttcccaggatggggcagggatggcctctaaaatatgtaggctgaaataccaaatccaaacttaatgctctagtccagaatgctgtcarctttaactgggattactgcaatgaccttccatctggactatctgcatttattcttacccctttctaagttgttctccatgtagcatctatggcaatatttttgacatgcagatctcattttgttaccccctgtcctaccacaccttttaaacgctaagtggtttaattatttctgagccagtgagtttgctggcattttatcagttagggaaaatctagcattttaaatggcatttaagtggcagttgccattcttcctaattgaaaataatctatgtattaagttactgattcttcactcacaggagtgaaactgtgccccaaagagttaaagaaaccaatgactaacagaaattattgagtttgcaggatagcaggcaagaaaagaaacaagactgaaactccctctgctagaaagataacaaaactggctgaaattcattggaaccaat

SEQ ID NO: 642309 - DNA, 593 bp, Homo sapiens
ttgtgttatgatgtctgcattccttccctgggtcctcagagttagcctcttgtgtagcatattaatgccatggatacctcctgcttgccttccattgtcccattaggacctccccagcagatttcttttcaaagtccttctgtgctgccatggattgatgatttggaaaacttctttctaaatggagttccagaacatggcctgatgctacagagccttgaatgatgtgtttattcagtcttttttcaagaaaatattggaaagacagaacttctgatttttttatagaggatcttctgtcagtcatttcccaggatggggcagggatggcctctaaaatatgtaggctgaaataccaaatccaaacttaatgctctagtccagaatgctgtcaactttaactgggattactgcaatgaccttccatctggactatctgcatttattcttacccctttctaagttgttctccatgtagcatcyatggcaatatttttgacatgcagatctcattttgttaccccctgtcctaccacaccttttaaacgctaagtggtttaattatttctgagccagtgagtttgctggcattt

SEQ ID NO: 642310 - DNA, 559 bp, Homo sapiens
aagaaactaggaaaaacactagtatttactgagcatctattatgttacaggtatctttcttggtgttttgttagtattttcttatccagatcttgaaataacatgatagagtttatattattactctgatttttacagaagagcaaactgatttcagagagtaaaacatttaggttcacacactaataagctacgttttgaactgaagtctgcatagtttcatattttcacttttcacactgggggaaagaatgggtgtcttacttattccccatttgttgtttttgagcttccaccacactaagatgtgctgactatgtgaactaggctgaattggagaggttctatatttcawtccatttttttggactcaaattcagctataacattcagcatttgccttctcttagttctgctaatgttagcaatcgtacttcttaaagtcctgtccactcttcaaagaaaaagctgaaatggttgatggaaagaacagcagtaggtaatagctaatttgatttgagtttgaatatcttattgaagttaatagtgttattcaaac

SEQ ID NO: 642311 - DNA, 599 bp, Homo sapiens
aatggtcacttgcttcatagagcatcttggggaactggtatttcacaaaccaccctttgggaaatgtggaggaaatggcatggcaaatgcacagaggcatgaaattgcctgacatgcctggggaccaatcagtagttcaccatggctgtggtgtgtggaggggkataaagcagggatcagataacagagaccactgttaatagtttggcctttatcctagacaatgagagcaactggaatatgtaagaagagtgaagcaatgaccaaattttatggtttagaaagattactctggctttggtgcagagattatatttgaaggactgagaattggaggaagccaggatgaccagtttggatggaagactaaaccaacatattaaagacacattctcactggctgggctagaaaggaggggaagatgttaggtaggtggattctataagatttggtgaccggaagggaatgagcaagcagagtctgagttgacttccaggtttctggtttagatgactggggcatgggggtgccattcaccaagataaggactgcaagagggagtgcaggttttgagggagaggcaatgaattcagtgtag

SEQ ID NO: 642312 - DNA, 417 bp, Homo sapiens
aataaatggaaagatatcttgtgtcaaggaytgaaagaatcagtattgttaaaatgcccacgctgtccaaagtaagctacatattcaatgtaatccctatcaaaattccagtaacatttttcacagaagtagaagaaaaatcctgaagtttttatagaaccaagaaagaccatgcacagctacagcaatcttgagcaagaacaaagctaggggtggcacacttactgatttgaaattatattacaaagctatagtaaacaaacagtacgcactggtgcaaaaacagccacatagaccaatggaacagaatagaaagcccagaaataaacccatgcatatacttccaactaatctctgacaaaaacaccaagaatacacaatggggaaaggatggtctcatcaataaatggtgttggg

SEQ ID NO: 642313 - DNA, 653 bp, Homo sapiens
acttgctcatgttcacacaattacaaagtggcagaggctgggtgcagtggctcatccctgtaatcccatcactttgggaggctgaagtgggcggatcacctgaggttargagttcaagaccaacctgaccaacatggagaaatcccgtctctactaaaaatacaaaattagccgggcatggtggtgcatacttataatcccagcaactccggaggctgaggcaggagaatcacttgaacctgggaggcggaggttgcggtgagccgagattgcgccattgcactccagcttgggcaacaggagcaaaactccctctcaaaaatagaaaaaataaaaacaataaagtggcagagttgggatgccaactagatttttatactaaatgggtgtgcatatgaggtccctccatgtcaagctcttatccagggatcaagttttcactggtcttacttagcagaatggatggctccaggctatgtatactggaaaatcttggatgatatcctccccaaatcctcacctcattcttttttatattattgctggtacagtgcttgttattcttcttccagtgtacttctcatttactcagacagagagactctctctaaatcttatattgtccccagagcgcagcacagagttctgtatac

SEQ ID NO: 642314 - DNA, 417 bp, Homo sapiens
aataaatggaaagatatcttgtgtcaaggactgaaagaatcagtattgttaaaatgcccacgctgtccaaagtaagctacatattcaatgtaatccctatcaaaattccagtaacatttttcacagaagtagaagaaaaatcctgaagtttttatagaaccaagaaagamcatgcacagctacagcaatcttgagcaagaacaaagctaggggtggcacacttactgatttgaaattatattacaaagctatagtaaacaaacagtacgcactggtgcaaaaacagccacatagaccaatggaacagaatagaaagcccagaaataaacccatgcatatacttccaactaatctctgacaaaaacaccaagaatacacaatggggaaaggatggtctcatcaataaatggtgttggg

SEQ ID NO: 642315 - DNA, 417 bp, Homo sapiens
aataaatggaaagatatcttgtgtcaaggactgaaagaatcagtattgttaaaatgcccacgctgtccaaagtaagctacatattcaatgtaatccctatcaaaattccagtaacatttttcacagaagtagaagaaaaatcctgaagtttttatagaaccaagaaagaccatgcacagctacagcaatcttgagcaagaacaaagctaggggtggcacacttactgatttgaaattatattacaaagctatagtaaacaaacagtaygcactggtgcaaaaacagccacatagaccaatggaacagaatagaaagcccagaaataaacccatgcatatacttccaactaatctctgacaaaaacaccaagaatacacaatggggaaaggatggtctcatcaataaatggtgttggg

SEQ ID NO: 642316 - DNA, 417 bp, Homo sapiens
aataaatggaaagatatcttgtgtcaaggactgaaagaatcagtattgttaaaatgcccacgctgtccaaagtaagctacatattcaatgtaatccctatcaaaattccagtaacatttttcacagaagtagaagaaaaatcctgaagtttttatagaaccaagaaagaccatgcacagctacagcaatcttgagcaagaacaaagctaggggtggcacacttactgatttgaaattatattacaaagctatagtaaacaaacagtacgcactggtgyaaaaacagccacatagaccaatggaacagaatagaaagcccagaaataaacccatgcatatacttccaactaatctctgacaaaaacaccaagaatacacaatggggaaaggatggtctcatcaataaatggtgttggg

SEQ ID NO: 642317 - DNA, 544 bp, Homo sapiens
ttgaagttgcagggtgtaattacactgatgggatagtaggtgccctgggacaggcctgataacaggttgcgttggatgcataaaggggcttggaaagttaagatggtattggttacagggccatgtataggcttttcattgctcatgtaataggtgaggttggaaaygtaagagagtaaaagctggattgtgcatcctgttagagtatttttggacctatcagagatggggaaggaagtctaactgctagtcctctctgggatagtgccctattctttgttcccccagaggggccttatgatggaccaagggattattcctttggcacatctcacaggctttgacaacttgttggatggtccagaggagatttggcccagtaaatagggatttggtcatttgatgagtgttctcaatactcatatgaaaagtttggtaaagagtcttaattattttccactggctggcttcaggtatgagtacctttccctcttctgtcgttaaccaccctgaggggagaaaactatgtccccatgaaagtccc

SEQ ID NO: 642318 - DNA, 620 bp, Homo sapiens
atactgttactctacatctttccttaaaagtaaaattaataatgattaacaataaaactaataattattaaaaataaaattgataatcagtaaacaattagtagttacaccttttaatttatctggagtttattttggcacagaaagtraggtagggatctagcttaatttccttttgtaaagtggccaaccagtaattccaacgctatttattgactaagtttgtcttttctctgttgacttgaaatgtcttcttttttcatgtattaaaaggtttcactctcttgggagatctgggtattgtccctagctctgccactaatttcaatatgatctttgaaaagctctatcctctctgggctttagtttactcctgtgtaaaatgaaggattgggagggttggtgttgaagtttccttctagccttcacgctgtgtattgataccaaaactccactgtgatttcaaatcctcctccctcttgggttgttttcaacccattgtcacgatgggctcacccagcacccagtgcctgggggcagtttccagggctgtgtctgcatcacttttaaaaattatgtttgtcttcacaaaatcattatgctgaaaccttgacacttaa

SEQ ID NO: 642319 - DNA, 620 bp, Homo sapiens
atactgttactctacatctttccttaaaagtaaaattaataatgattaacaataaaactaataattattaaaaataaaattgataatcagtaaacaattagtagttacaccttttaatttatctggagtttattttggcacagaaagtgaggtagggatctagcttaatttccttttgtaaagtggccarccagtaattccaacgctatttattgactaagtttgtcttttctctgttgacttgaaatgtcttcttttttcatgtattaaaaggtttcactctcttgggagatctgggtattgtccctagctctgccactaatttcaatatgatctttgaaaagctctatcctctctgggctttagtttactcctgtgtaaaatgaaggattgggagggttggtgttgaagtttccttctagccttcacgctgtgtattgataccaaaactccactgtgatttcaaatcctcctccctcttgggttgttttcaacccattgtcacgatgggctcacccagcacccagtgcctgggggcagtttccagggctgtgtctgcatcacttttaaaaattatgtttgtcttcacaaaatcattatgctgaaaccttgacacttaa

SEQ ID NO: 642320 - DNA, 620 bp, Homo sapiens
atactgttactctacatctttccttaaaagtaaaattaataatgattaacaataaaactaataattattaaaaataaaattgataatcagtaaacaattagtagttacaccttttaatttatctggagtttattttggcacagaaagtgaggtagggatctagcttaatttccttttgtaaagtggccaaccagtaattccaacgctatttattgactaagtttgtcttttctctgttgacttgaaatgtcttcttttttcatgtattaaaaggtttcactctcttgggagatctgggtattgtccctagctctgccactaatttcaatatgatctttgaaaagctctatcctctctgggctttagtttactcctgtgtaaaatgaaggattgggagggttggtgttgaagtttccttctagccttcacgctgtgtattgataccaaaactmcactgtgatttcaaatcctcctccctcttgggttgttttcaacccattgtcacgatgggctcacccagcacccagtgcctgggggcagtttccagggctgtgtctgcatcacttttaaaaattatgtttgtcttcacaaaatcattatgctgaaaccttgacacttaa

SEQ ID NO: 642321 - DNA, 589 bp, Homo sapiens
actgcttgaggattagggcatgagagaattaaaaaaaaaaaaaarggaaagaaaaaaggggattcctcaatactctcactgagtaagatgctccttgagacagaatagaataatttttctagtgctctccatccatgacactgtgtacttcttattttcaggccatgagtccagtctggagaatgtcggaggtaaaaaatggtgaacgcactgccatttggtggtatttcagattctggtcttccttaatctacctactactattttctcttcagggtcctcattgctgccttgtgtattctgtccaggtttaatagttaccttcagtgggagaggcagagtgaagtgtgtttactccatcttatccggatctataactttcaaatatattttatttcacagtttgttagtgtgatataaaactttatttagacattcggtatgtgggccttcatgcatgtgtacacttgcctcaggccctgcaaatgtaggagcaggcatggttgcgaagatttaatgaaagggaataagtagagagaacagtatgtgtttgcaaaatatctatcagatattggacaccaaggaaaca

SEQ ID NO: 642322 - DNA, 589 bp, Homo sapiens
actgcttgaggattagggcatgagagaattaaaaaaaaaaaaaagggaaagaaaaaargggattcctcaatactctcactgagtaagatgctccttgagacagaatagaataatttttctagtgctctccatccatgacactgtgtacttcttattttcaggccatgagtccagtctggagaatgtcggaggtaaaaaatggtgaacgcactgccatttggtggtatttcagattctggtcttccttaatctacctactactattttctcttcagggtcctcattgctgccttgtgtattctgtccaggtttaatagttaccttcagtgggagaggcagagtgaagtgtgtttactccatcttatccggatctataactttcaaatatattttatttcacagtttgttagtgtgatataaaactttatttagacattcggtatgtgggccttcatgcatgtgtacacttgcctcaggccctgcaaatgtaggagcaggcatggttgcgaagatttaatgaaagggaataagtagagagaacagtatgtgtttgcaaaatatctatcagatattggacaccaaggaaaca

SEQ ID NO: 642323 - DNA, 571 bp, Homo sapiens
tttaggtgacagacacatcatttaatatctgctttttgtttctataggggaattctggcctgggattcagtattgctggggggacagataatccccacattggagatgaccctggcatatttattacgaagattataccaggaggtgctgcagcagaggatggcagactcaggtaaagatctgaaacattagaatgattttgaaagtaaatctgctgcatcaatgagacacatttgtacctttgaagaataataattctacaaaagttctgtacttgaaagagatttttaaggcaagcttcctgaaatgactttgcagatcttttgctactgattgaatttcartagtgtttgatttgtgttcgttggtaggtaccacattgaacattgggccaggcactgtgaggaggggatgaagataaatcttttgtttggatgaggccttcagtctagttggaaagaacataaatatgaactaacgggcaaataatataattatcaaaaggatacactataagtagcattagcaagtaaagcaacgttgtagatattgtatgtattctcatattcgg

SEQ ID NO: 642324 - DNA, 531 bp, Homo sapiens
cctatgactgtgtatatgaatattgcctactaaggttgtacaataaacaacctgcaaaactttgtacagtgcttctaactagagcarcaaaattcaccttctccccaatccacattacagcctttgcctatgtgaagacagctaataattttcagtatttggcaggtggtctagtccaagacatacattttatagagtgggattctgcagctcagaggagtgacttatcctgaggcataaatcatttggggatcctatttaactaaaatccaaatgtcctgactcaaataattaagattattaggtagtgctaagagacagtaacaccatcgcctcaactaagtcagactaagtcttttctcagtgtgacaggaacactgaggttggaccaacaagccatgaggagtatgttttatctcaccattagtccttaaggacatgggagaaggacattgtaattagctctggaaagatgtgggttctaacttctgtatgtaacacagttgaccttggacacaagttaaactcact

SEQ ID NO: 642325 - DNA, 545 bp, Homo sapiens
tctcctttcaccctgtgtgttcttccctaagtttcctgtccctatttttcacatacttttttttctcttggtcataacatggaattaaagaccatttttaaaaaataggtatggtgcaaaaaacggttctgtacttctattctcaagtttataatgtaagccactgaatctgctatgtttcctttgcttaaaaaaaacccctataaattaaacacagttttcttttatgtaaacaaatccttggtgtttcctttgagttagagacacttaaatttctttaaaatgtacctttacattataaattgctatggccttaatatttgtatcctcccaaaattcatctgttgaaagctaatccccartgtaatgatatcaggaggtggggcctttgagagatgattaggttttgaaggtggagtactcctgcatgtctctgtaaaagaagccctggcttatattagtgccctcataaaagcttccttgccccttcctttatgtgaggacatatctaaaggcattatctatgaaccaggaagagggccatc

SEQ ID NO: 642326 - DNA, 517 bp, Homo sapiens
aacttattgaacaatccattttttcccacttaatcaaattgccaactatattataaactaaattcctttatgtgtcttgtctattttcagaatctatagtctttaactttgatatatcttaatttttattttagttattaaaaytttgtatgatgtcttaataaatggtaagcctggatctctctcattattgttctttttataaattttccttgctattattgctcattaatttttcatttaaatttaaaaatcagattttcttgcataaaatttttgttatttttatttaaaatttttagtataaaagtaaaaattgaaattttttgatgttgctcttcttttccaatggcacattatggtattcctttattatatgtctcttggtagcatttgaaagttacctttatatagatcccaaatgtttatcaagtttattctcttctttttaagttccagggtacatgtgcagggtgtgcaggtttgttacataggtaaatgtgtgccatggaatact

SEQ ID NO: 642327 - DNA, 603 bp, Homo sapiens
ttaaaataacaagtcaaaagtgacaaagaagggcattatatgataatgaagagttcaattcaaagaggacttaactatcctaaatatatacataccaaacattggagcacccagtttgtaaaacaggtacttctagatctatgaaaatacttagccacataataatagtgggagacttcaacattctactgacagtattagatagatcatcaatgcagcaaactaagaaaggaatcatgaacttaaactagacacttgaccaattggacctaataaacatctacakaatattctatccaacattgatagaaagtacattcttcttgtctgtatatggaacacactccaagatctactacatgctttactggtaaagcaagactcaataaatgcaaagaaataaaaatcataccaaacatactctcaaactacagtgcaataaaaatagaaatcaaaaccaagaagatctctcaaaaccacacaattacataggaattaaacaacttattcctgaatgacttttgggtgaataataacattaaggcagaaataaaaaattctttgaaattaatgaaaacagagctgtgacatactaaaatctct

SEQ ID NO: 642328 - DNA, 603 bp, Homo sapiens
gccagacaccagtgatttgtgtcctggctctgtcatcatttgtatgattttaggcaagttattaaacctccaaactgtacataaaataacaatacctatagggtttcttaaaaggactaaaatatgtatgcataaaacattagaacaccacctaatacataccaggtgcttaatagattagattacaataatacgcttctttctggttttgattgcggcattcttacagagttactaaattctttcatcctgctcatgattgggcagctcaattggacattctatttgctctgatataacgcatgtgactggtttacctttgtcctttgtgcctagaatyattttgttttcccacgccaagttacagtgggagtggaggtctggctattttgtgttctcatcacattttgtgcctgagcaatagctggcaagggtgttggaagagatctcggtagaggctacaggcaagtgtgtcatttttcttgtaagaccccaattctgttagcttttgagattttgttaaatgtcctacaccaagttgcatctaattggagaaatttctctaatttggagtgtggctagagaacatttatttccaccaga

SEQ ID NO: 642329 - DNA, 603 bp, Homo sapiens
gccagacaccagtgatttgtgtcctggctctgtcatcatttgtatgattttaggcaagttattaaacctccaaactgtacataaaataacaatacctatagggtttcttaaaaggactaaaatatgtatgcataaaacattagaacaccacctaatacataccaggtgcttaatagattagattacaataatacgcttctttctggttttgattgcggcattcttacagagttactaaattctttcatcctgctcatgattgggcagctcaattggacattctatttgctctgatataacgcatgtgactggtttacctttgtcctttgtgcctagaattattttgttttcccacrccaagttacagtgggagtggaggtctggctattttgtgttctcatcacattttgtgcctgagcaatagctggcaagggtgttggaagagatctcggtagaggctacaggcaagtgtgtcatttttcttgtaagaccccaattctgttagcttttgagattttgttaaatgtcctacaccaagttgcatctaattggagaaatttctctaatttggagtgtggctagagaacatttatttccaccaga

SEQ ID NO: 642330 - DNA, 625 bp, Homo sapiens
ttctgtaaggagtgaaaaaaggtaaggtgccaaaacatgggcttcactcatacggactcttcgcagttgaaaaactgtcagcttccatctgagccattccttttccccttgccacattgctttgatggttatgatctaccttgcactccccactcatctctgccccaattcttcccatttactacccagaactgggtcacagactggagcttgtactttccttttaagtatcacttaatgcttcaaatttagcattggccaggatagacatcattacattaatgacttagggttagaattagcggtttctttatctccttaatctgggttgttgatattcatccttttcatgccctatgggttacttggcctgataataaaagaatgaacaraaaaggaagaaataaagcacatcagaagttgttagaaatgaaagattgcttctgattgcgtcaattagtgatagctttatggagaagttaacactgaactggctcttgggggatggatatgatgtcagcagatagtggtcacaatagtaagagaagacattcaaagttgggaatgaaatgaacaaaggcttagaggaaggaaaatatggcatatgtttaagaaatggtacaca

SEQ ID NO: 642331 - DNA, 625 bp, Homo sapiens
ttctgtaaggagtgaaaaaaggtaaggtgccaaaacatgggcttcactcatacggactcttcgcagttgaaaaactgtcagcttccatctgagccattccttttccccttgccacattgctttgatggttatgatctaccttgcactccccactcatctctgccccaattcttcccatttactacccagaactgggtcacagactggagcttgtactttccttttaagtatcacttaatgcttcaaatttagcattggccaggatagacatcattacattaatgacttagggttagaattagcggtttctttatctccttaatctgggttgttgatattcatccttttcatgccctatgggttacttggcctgataataaaagaatgaacagaaaaggaagaaataaagcacatcagaagttgttagaaatgaaagrttgcttctgattgcgtcaattagtgatagctttatggagaagttaacactgaactggctcttgggggatggatatgatgtcagcagatagtggtcacaatagtaagagaagacattcaaagttgggaatgaaatgaacaaaggcttagaggaaggaaaatatggcatatgtttaagaaatggtacaca

SEQ ID NO: 642332 - DNA, 690 bp, Homo sapiens
agtatgcaacagtattacatccaaaaaaaccttaattaaaaaatactttataactaaaaaatgctaatgatcatctgaaccttcagtgagtcaatcatctttttctggcagaagatattgcctcagtgttgatggctgctgactgatcagggtggtggytgctgactgatcagggtggtggttgctgaaagatggggtggctatggtaaattttattttattttattatttttatttatttatttattttgagaccgagtttcgctcttgttgcccgggctggagtgcaatggcatgatcttggctcaccgcaacctccgcctcctgggttcaagcgattctcctgcctcagcttcctgagtagctgggattacaggcatgtgccaacatgcccggctaactgtttttgtttgtttgtttgtttgtttgtttttgtttttgttttttgtatttttagtaaagacggagtttctccatgttggtcaggctggtcttgaactcctggccttaggtgatctgcccatctgggcctcgcaaagtgctgggattacaggcatgagccaccgcgcccggcccggctgtggcaaattttaaaactaagacactgaagttttccacagtaattgactcttcctttcaggaaagatttatttgtagcatgtggtaccgtttggtagcgttttacccaca

SEQ ID NO: 642333 - DNA, 232 bp, Homo sapiens
ctgagagcaaagttgcaaggcttatcaggaccatatatttacaaagtaaagtgaatastggggtttgattaggtgacgcttaagtggaaaaccacagtgagaaataggcgttggaaagcaaagtgcaacataataacaaagtgccataaatgttatgcctaataaatttagactttattccctaagcagtagggagccaatgcacgtttcacttgtccctctaacattcatt

SEQ ID NO: 642334 - DNA, 628 bp, Homo sapiens
acatttaaaatgacttaattttaacaagaaaattactaactttaattaataatagtaaaattgcttaaataatttaaactacataagaaggagattttaaaaaattataaagcccctagtaaaatactaaaagcattattaagggaactaacatttattgcaygcttattctatgctaaacactaatctatgtttcttacaatttcctatgtggtagattgtattattctctttttatatattagaatgaaaaacaaacaacaagcaaacaaacaaaaactgaggctgagaggagtgaagtaacttacttaaagacgtgaagcaagtaaatagtgaattcagatttaaaagtaattctcagacttcaattactattttctttccattatatcacatgtctcttctgaattcaaaaactaatgcaatggtagggaagtaatacaaattttagttataaggaaccgcttcattggatttttggaaaagatttaaacttctatcagtatcatgaaaatatttcaaaacatttctaataaagtgatacggtttagtggaaaaacatagatctgggtcgttttaacctgggtttgcacactggctctgccattgacatctgcatggtattgga

SEQ ID NO: 642335 - DNA, 536 bp, Homo sapiens
aacaacaaatctcaaactccaatgcctatgaaggcagaaaacacatataggagggtgaagtaatcccaggagaggtaaaacaacagagcaagaatgtgagttaatgacaaactgatcttcgtattggaaacaaaacagaagtgcgggttgagaacgtatctcatctaaagcgataacctgccattcagcttttatgggttattgcctctctgaaatggggtcctcttactggatgattgtcttaccctccccacaccccagagaagccaggaatcaaatttccttaagtaaaatatcaatttttaaatgttagaaaattattgaatttatatctgtaaatatatattaggctgtactagtccaagtcctctgagaagcagatgtcaagacaggattaaatctaagaattttgttaggggaaatgcttgtgaaggaaaatggggaagcatccagaaaaggctagaagagctattagatcaccatgcaagtccgatcccaaagaggagracagaaagaaggaagataggttggaagta

SEQ ID NO: 642336 - DNA, 625 bp, Homo sapiens
tagcatattaatactaatttttcagatacaaatggtraatcctctcatttggcaaaatagtaatataaataataattaaaataatctgtactaatataacaattatatttttataatgttgtgatatgtttaaagtttggttatattcttatgtgttgtacccaatattacatgacattttatgcttgcagtagccaaaataagttaaaatttatgttcttgaaatgttctcgtatctcttgagattattatagttactctgaggagttgcagaaacagatgaattaccaccctaatttttgtttgtttgttttttgttttgttttgttttgttttaaggcagggtctcactctgttgcccaggctagagtgcagtggcaggatcatgactcattgaagcctcaagctcctgggctcaagtgatcctcccatctcagcctctcaaatagctgggactacaggcatgcactagtgcatgtggttattattattattattattattattattattattgtatttgttttttggtagagacagacccttgctttgttgcccaggctggtcttgaactcctggtcataagtaatcctcctgctttggcctcccaaagtgttgggattac

SEQ ID NO: 642337 - DNA, 625 bp, Homo sapiens
tagcatattaatactaatttttcagatacaaatggtaaatcctctcatttggcaaaatagtaatataaataataattaaaataatctgtactaatataacaattatatttttataatgttgtgatatgtttaaagtttggttatattcttatgtgttgtacccaatattacatgacattttatgcttgcagtagccaaaataagttaaaatttatgttcttgaaatgttctcgtatctcttgagattattatagttactctgaggagttgcagaaacagatgaattaccaccctaatttttgtttgtttgttttttgttttgttttgttttgttttaaggcagggtctcactctgttgcccaggctagagtgcagtggcaggatcatgactcattgaagcctcaagctcctgggctcaagtgatcctcccatctcagcctctcaaatagctgggactacaggcatgcactagtgcatgtggttattattattattattattattattattattattktatttgttttttggtagagacagacccttgctttgttgcccaggctggtcttgaactcctggtcataagtaatcctcctgctttggcctcccaaagtgttgggattac

SEQ ID NO: 642338 - DNA, 621 bp, Homo sapiens
taactcatacagtggaaactcttatgcaccctggagtgaagataaatgagatgtcgtctctgtcctcagaaagtttaaatgggagagatgcacttgaagtcaactacctttaatgcaacagaaaatgaactcagctctataatggagcctgagccatgatttcactggaacaaagtggaagatgtgattcgtcataactaggagagacaaaatggtccagaggatttaaaattttcagcaaactaatgcagtaacagaaaaccaaacaccacatggtctcagtcgtgggagttgaacaatgagaacacatggacacagggaggggaacttyacacaccagggcctgttccggggttgtggggaaggggagggatagcattaggacaaataactaatgcacacggggcttaaaacctagatgatgggttgataggtgcagcaaaccaccatggtacatgtatatctatgtaacaaacctgcacattctgtacatgtattccagaactttaaaagaaaaaaaaaacttaacatgtgcatagtttatctgaccttccttgagcacatgggtacaatatagtaagcatcaaaaatgtagccaactgagctaactggattgaatta

SEQ ID NO: 642339 - DNA, 621 bp, Homo sapiens
taactcatacagtggaaactcttatgcaccctggagtgaagataaatgagatgtcgtctctgtcctcagaaagtttaaatgggagagatgcacttgaagtcaactacctttaatgcaacagaaaatgaactcagctctataatggagcctgagccatgatttcactggaacaaagtggaagatgtgattcgtcataactaggagagacaaaatggtccagaggatttaaaattttcagcaaactaatgcagtaacagaaaaccaaacaccacatggtctcagtcgtgggagttgaacaatgagaacacatggacacagggaggggaactttacacaccagggcctgttccggggttgtggggaaggggagggatagcattaggacaaataactaatgcacacggggcttaaaacctagatgaygggttgataggtgcagcaaaccaccatggtacatgtatatctatgtaacaaacctgcacattctgtacatgtattccagaactttaaaagaaaaaaaaaacttaacatgtgcatagtttatctgaccttccttgagcacatgggtacaatatagtaagcatcaaaaatgtagccaactgagctaactggattgaatta

SEQ ID NO: 642340 - DNA, 629 bp, Homo sapiens
tgagctatcttgatgccatttattggtaaaatatatggtgktgtttcaaggatgaggttcagttttttagttggggtgccatttgtgaggtagggaagattatgaaggaatctctgaggacagagggaacctctgatgtgtctgaaaaggaaatctcaaggaagcagaactggagaaggtctgtctaaaaaccctgccaaattaacatattgatttttcactatattttgtgaaatatctgggtttgggaaaatatttttaaattgacttttttcctttttattaatcttaatataaaaaatatgaatatggctacttcagctattttaaagagttaatgcatttaataaatctattttatagattttatagattattaatgccaagaatgttttcagtttggggattgtgtttgtttttgcacagaatagaggataaacagatttatccctttgtatgctgtaggtaaaacattaagagattctgtgaaacagtgatttgtggcaaattaaatttacagtttttcaatttcgtactctgtattgatttggtctattgcaaaaattactaatttgagataacctttgatgtatgtgattttgtctttatagcagagctaatcttcccaa

SEQ ID NO: 642341 - DNA, 629 bp, Homo sapiens
tgagctatcttgatgccatttattggtaaaatatatggtggtgtttcaaggatgaggttcagttttttagttggggtgccatttktgaggtagggaagattatgaaggaatctctgaggacagagggaacctctgatgtgtctgaaaaggaaatctcaaggaagcagaactggagaaggtctgtctaaaaaccctgccaaattaacatattgatttttcactatattttgtgaaatatctgggtttgggaaaatatttttaaattgacttttttcctttttattaatcttaatataaaaaatatgaatatggctacttcagctattttaaagagttaatgcatttaataaatctattttatagattttatagattattaatgccaagaatgttttcagtttggggattgtgtttgtttttgcacagaatagaggataaacagatttatccctttgtatgctgtaggtaaaacattaagagattctgtgaaacagtgatttgtggcaaattaaatttacagtttttcaatttcgtactctgtattgatttggtctattgcaaaaattactaatttgagataacctttgatgtatgtgattttgtctttatagcagagctaatcttcccaa

SEQ ID NO: 642342 - DNA, 611 bp, Homo sapiens
actcattctgacttagaatgtcttttctcaaaataggtagaaaccttgctaacatcacagttatagatttggtcattgtaagcacctggggtgtctgcatgtgggcaatcaattgagaagaaaataggtaattatatgtaggaagaaagtattaggcaaatccatttaggcttgccaagcaaccaaaaatcaagcaaaggaaggaaatctgaagtgtgtatgtgggtttccaggaaatagatttactrtaaaaggcttcctagtgactttcgcaagaacacattaaatcataacttccaaggagctattaatatataattaaacaagtacagaactgtttgtttctatggcctgggccaaagaagcctaaagctacaggagaaattagatgacttcttttaagatgctgttgttgcttaggaatcatataagtggtttaaggctaagttctaaaaccaaaaatgtgaaagctacagttttattaattgatatccaaaggtggtcttgcttgtagctttattttagccaccttactcattaataaaaactgaaagagtgattaaatctaggtagtgacaatttttagcaattctcctccattattttttaaa

SEQ ID NO: 642343 - DNA, 611 bp, Homo sapiens
actcattctgacttagaatgtcttttctcaaaataggtagaaaccttgctaacatcacagttatagatttggtcattgtaagcacctggggtgtctgcatgtgggcaatcaattgagaagaaaataggtaattatatgtaggaagaaagtattaggcaaatccatttaggcttgccaagcaaccaaaaatcaagcaaaggaaggaaatctgaagtgtgtatgtgggtttccaggaaatagatttactgtaaaaggcttcctagtgactttcgcaagaacacattaaatcataactyccaaggagctattaatatataattaaacaagtacagaactgtttgtttctatggcctgggccaaagaagcctaaagctacaggagaaattagatgacttcttttaagatgctgttgttgcttaggaatcatataagtggtttaaggctaagttctaaaaccaaaaatgtgaaagctacagttttattaattgatatccaaaggtggtcttgcttgtagctttattttagccaccttactcattaataaaaactgaaagagtgattaaatctaggtagtgacaatttttagcaattctcctccattattttttaaa

SEQ ID NO: 642344 - DNA, 528 bp, Homo sapiens
gaattccattaacattttggctaccacctttgaaaacctgcttgtttaatatactttaacccctagatgtattttttaaaagcatgttttgcagtctacttcccaccacccyactccccccaaaaaaagtttctgatgtttcttcctccatttttctactttttcattttccaaaatattatctcaaaaagaaccgttctttcagtattaaaagatatgcttttgctcaaaagtcagataatgcaaaatgatttctgcctcactaacatttctttgttttctttggagaagagaatgaagaagaggtttttcctctcctgctagcagctgagtccttttgtttggctggcccagtgaggcttttgtttctatagaagagagccctgttatttctcaaaagcttttgtgtgcaacacttcctcctgtgtttctgctcacccagcacattttgcaggagtaaatgtcaaaaagactaagtgttgttgagcttggttgtgttttatgatgttgttgttctccctacaaatc

SEQ ID NO: 642345 - DNA, 572 bp, Homo sapiens
atcttggtggtcacatgtgcagtttagaagctggcacctgagcgaaatcaagccaagcagattgtttctcaggattttctacagtggagtatgggagcagagagggggcagcattcccactgtgtagtaaagtgtgacatacaatacagaaaagtggccactatgtggtctttttgccatatgaagtaatgtcatctgaaataatgagccttcctgcagagaaagctagagactggagatgagagagagggaaagaaggagaaagagaaaactggcaacttccaattcccatgttataactgtcccaaggacccaatcagaaaccaccaccctctttcctatgtctacatgagccttcccttaaattcctcttatatctaggtaccccaaatcaggaatgtataacttgccaacaagtggggctttatacaaatgtatcttgaagttgtactttagctatcactattctgaagttgtcaggtaggtcatgtcctagggtcatattgccacagcctgttctcaaaataaatgttgcattgcatagattcttcaygcaatgcaacatttctaaa

SEQ ID NO: 642346 - DNA, 622 bp, Homo sapiens
atatcacatatcatgtaaaatgtagtatccatccctcaagcatttatcctttgtgttacaaacaatccaattatacttttttgttattttaaaatgtacaattaaattattatttagaccttttctaaattctaatcatgtctttcaccatggagtaagatgataaagcaaagctctccagtagaacaacattggcaggttgccataaacyttaataccccaaagcttatacatatagtctcctttaactcattactgtgtcctaacttccaagaatgaaagagcaatttttcttaaagtggcaagtaaaaagaatgactagggacaggtctgcaaatttaggtctccactgcctagaaacctttctgatttggaaaccagctggcttttgtgtgtgcaaagtgcttttgcagtgttaactatctgagtcagatgtcagggaaaaaaatgtgtgtgttagaaatatagtttacagacattcggaggggcattaatctaacttttctttagatgtaagcatcaaagtgtcaggaatgagaagtgcctagtaaacatacctcaaagggctgagttagatgaatcggcacaaaatgcatttagctgaaattcagctgctgactcc

SEQ ID NO: 642347 - DNA, 623 bp, Homo sapiens
aagtattatataataatttgttaatagtaattattattattactactagtccaattgctattcatgttataggccttgagaaaccagcgtcaatctcttccctttcgtcttctcttctgaagattcatctacctccacatttctttaactatttcctatatggtttcctccctctggcaatgctcctgattattattctccctcctaaaatkttatcatattttataaatatgcattgaatgcctactgtggtgcctggaattcatgggttgtttattcaacaagtgtaaattgatcacctctgtggcgggtgtgtaagatgctgtgaataggaaatgaatgagacagtctctgccctcagagagattaaaggtagaaggggagacagacatgtgaatgggatgatcagggcaagctatcataaaatgtcaactagacttgactcttcttgttctatgtaactattccatgatacaaacctgataaaaggaaaaaataatctttcttattcactttgctgtggtaaaatgaaaacccagccttttccattggccagttgttaaagtgaatttttttttttttttttttttgagatggagtcttactctgccatgcagtttggg

SEQ ID NO: 642348 - DNA, 525 bp, Homo sapiens
tttgtgagaactatttattactgcttcaaaattaaacttgtgtcagtgttagttaatccccttctcttcaagcatattactttagggacgggctgtcttcagcctgtttggtttgatmgacattacaacacacgtttgacctatcatgtttggtggaacctcgaggatgctcctaggtgaactgatcaaatcctttggcaacactttcagatgcagttgaaatgcagcatactgctctgcctggacaacctatgcatcactcagacttggctgttctgaataagaagggaattttttccccaaatgttctggaaatctgatctttgttgttaaatccatccattgtattaccttacctaatcctccttgcagcaactctgaagtaattattgtcatatctattttgcatactgtggtgttgagtgattaagtaactagtataagattgcatacatagccaggatgtgggagagctgagatttgaactgagacttgttcaaatccaaaatttcacaaagaaccact

SEQ ID NO: 642349 - DNA, 641 bp, Homo sapiens
cccctttcctgccctgggaccacaatctggttagaatgagcctgtggaatagtttgtagtgttttttttctgctgtgcctcctcccttcagttctscatttggcatgaggttcccttgaataggccagaatccctggtagaaattccaaaagaaaaatgcagtgagacatttttacctcctactttgtatgagtagagtaagtgcaatagatctttcagctcccagcaaatgaatctcctgttttattgagcatgaatgagagtacactatgttttaacaaagtactattatctacttcccatgccacgtagagctctccagagactttgccttgaccataagcacaattaacttttagccaactgcaaagtttctgacccactgtttacggtcatattttgtttaaaaatctcagttctagccagtcacgtcctgttcatctttttgtctcatgtacttactattaacatgttacatattgtccttctcgagtctatgaaaccatatccttcacttcgttagattattcactagatagaatagattctcatatctcattttcttatagcacagatgtgatgatgatgtaataacagctcctaaatagtgagatgtactactgaagcctccattatgttat

SEQ ID NO: 642350 - DNA, 641 bp, Homo sapiens
cccctttcctgccctgggaccacaatctggttagaatgagcctgtggaatagtttgtagtgttttttttctgctgtgcctcctcccttcagttctgcatttggcatgaggttcccttgaataggccagaatccctggtagaaattccaaaagaaaaatgcagtgagacatttttacctcctactttgtatgagtagagtaagtgcaatagatctttcagctcccagcaaatgaatctcctgttttattgagcatgaatgagagtacactatgttttaacaaagtactattatctacttcccatgccacgtagagctctccagagactttgccttgaccataagcacaattaacttttagccaactgcaaagtttctgacccactgtttacggtcatattttrtttaaaaatctcagttctagccagtcacgtcctgttcatctttttgtctcatgtacttactattaacatgttacatattgtccttctcgagtctatgaaaccatatccttcacttcgttagattattcactagatagaatagattctcatatctcattttcttatagcacagatgtgatgatgatgtaataacagctcctaaatagtgagatgtactactgaagcctccattatgttat

SEQ ID NO: 642351 - DNA, 641 bp, Homo sapiens
cccctttcctgccctgggaccacaatctggttagaatgagcctgtggaatagtttgtagtgttttttttctgctgtgcctcctcccttcagttctgcatttggcatgaggttcccttgaataggccagaatccctggtagaaattccaaaagaaaaatgcagtgagacatttttacctcctactttgtatgagtagagtaagtgcaatagatctttcagctcccagcaaatgaatctcctgttttattgagcatgaatgagagtacactatgttttaacaaagtactattatctacttcccatgccacgtagagctctccagagactttgccttgaccataagcacaattaacttttagccaactgcaaagtttctgacccactgtttacggtcatattttgtttaaaaatctcagttctagccagtcacgtcctgttcatctttttgtctcatgtacttactattaacatgttacatattgtccttctcragtctatgaaaccatatccttcacttcgttagattattcactagatagaatagattctcatatctcattttcttatagcacagatgtgatgatgatgtaataacagctcctaaatagtgagatgtactactgaagcctccattatgttat

SEQ ID NO: 642352 - DNA, 535 bp, Homo sapiens
gtatcaggacactccacaaatatatcagttgtacaaacataaaaacagtctccatttcaaattagttgaggtacacacatagacacagacacacacacacacacacacacacagataacaaaagaggtctcttgagacaagactacatgtgatgtaattctatttttatctgggaaggagagaccttcaaatmtttggtggtgggaactgtacctagttccctgctgactgggtgacttggaattaaccaggttagaagacactgtgtgtgtgcctagttgggtgttcagaagataagaagctaagctttaaatatgaatgtgcttttgagcattgtcaagccctgaaataacatgctgactatacccatccactgagttccagtagatacctaggctttaataaatagcacttcttaacccaaattgaaattacctgtattcttttgtgtgagcctaagaaaatagtccaaggaagtaaactgtattgttgctgtgacatgataattgcaaaatgaatctgtttattccttcct

SEQ ID NO: 642353 - DNA, 563 bp, Homo sapiens
tgatgtaattctatttttatctgggaaggagagaccttcaaatctttggtggtgggaactgtacctagttccctgctgactgggtgacttggaattaaccaggttagaagacactgtgtgtgtgcctagttgggtgttcagaagataagaagctaagctttaaatatgaatgtgcttttgagcattgtcaagccctgaaataacatgctgactatacccatccactgagttccagtagatacctaggctttaataaatagcacttcttaacccaaattgaaattacctstattcttttgtgtgagcctaagaaaatagtccaaggaagtaaactgtattgttgctgtgacatgataattgcaaaatgaatctgtttattccttcctcctcaggaagactgtttctacctaagtttctgattggatcagaagctctccctagatgttactgtagcacccaaggtcatttcacgctatgtcatgatagcctgtttcctaggcagtcaccccattccttccctgtgctcaactagagctccttgagggtagtatcttttgtagctg

SEQ ID NO: 642354 - DNA, 497 bp, Homo sapiens
ggtatctaccaaagtaagaaatccatatcatgaatcagaaaatattagagctagataaggttgacagctaattcaacactatcatttttacggattttggcaaatgaagaaatggaatgtcacagagttacaaggacttacccaggctcaacacagctacctcattagtttaaaagccagatatcctatattgttccttgtctggttatgaaatatatgaaatatttgaacaaaatatgtcttcttttacctgggcataggggtgtacatctatagtcccarctattaaacaggctgaggtgagagggttgcttgagcccaggagttcaagactagcctgggcaacatagcaaaacactgtctctatttagaagaagaagaagtagaagaagaagaagaaggaaaaaattattctctctcaagagatccaaaacaaaaatgattaattttatagtgaagtagttttaaatggaaatgaactgcttccagtttagcta

SEQ ID NO: 642355 - DNA, 396 bp, Homo sapiens
gcattgaaatttgggggacatttggacagtttatatagataatgagactgtataattgaccttgagatcaccctggaaaattcaagtaacaggctaaggtctctcacagatgccttcctgaatacccaaacttcttcctgctgccatcctcttaaagctcccccagaaggactgcagggacttcaccctttggacatatgccatctagtctgtaaatrtgtcatggttcagtagatgacttcttagtccttcctagatttcaaagttttcttttgggcctgaaggacgttctgttgtattacatctaactataatactatctcttcagtcatcctgaaaaaaactgtaaaagaaagcctgtttaggtccctgaaacaacttttcctctgacccatt

SEQ ID NO: 642356 - DNA, 568 bp, Homo sapiens
ttgttccctcactgacattcacttattcattaatatatgtttatggaagtcccatcatgtgcccaacattgtacaaggaattgtaaatacaaaagttaactagacagacattctattaccccaaaaatgtgtagtttagtgggtaagagactaaaataactgagcagatcagtttataaaataattgtaaattaagtactacaaaggaaaaaacatagtctaatttttatctttgccagtttgataggcaaaattgttttttattgtttaaatttgcattttattactaatgaggttgaatatagtttcatacgtttacaaattggattgaaatattttttcttttctgaaatcgatatatatacacctctgttttttagttggcatgtttacattttttcttattgagttttaaaatctttatatamaacccatcaatattttgtcttttatattttgtatcagatgatttccaatgcatacaagtagttaactctgttagtatttcctttagagttttctttctttggtattatgctttaaaaggccagcctctccttgagataag

SEQ ID NO: 642357 - DNA, 566 bp, Homo sapiens
tcaacaaatatgatttcttatcacatttacgcaaaaaaatgttggcactatttaagtgccatgtctaaagacaataaatctagtttgtttggcagattcaatmtttcaaaataagatatccatgagagatcaaataatcaaagaggtccctgattatggaagtctaggacctctttgacatgtaccgtgtgggactgctattgtcaagtttatggtaaagaaagagagaaaatgggaaggagagagatccttcactaaacatttgttaagcgtctatcatgacagaaacctttattccacaataaagatccagagatgaatacaaattattttccaccctgctagagagattagtgaggtaaatattcaacaaatattgtgtttctttatgtagcaactgatatgatagaagcgtgagaatgaggttctttagaatcacagtggaatttctggatcttacaacctgtgaggtaaggggagtctgctcttttccattgtcaggtagaaataacaactcatggagaggtttgttttatcagaggacacggagatcacattttatgtca

SEQ ID NO: 642358 - DNA, 566 bp, Homo sapiens
tcaacaaatatgatttcttatcacatttacgcaaaaaaatgttggcactatttaagtgccatgtctaaagacaataaatctagtttgtttggcagattcaatatttcaaaataagatatccatgagagatcaaataatcaaagaggtccctgattatggaagtctaggacctctttgacatgtaccgtgtgggactgctattgtcaagtttatggtaaagaaagagagaaaatgggaaggagagagatccttcactaaacatttgttaagcrtctatcatgacagaaacctttattccacaataaagatccagagatgaatacaaattattttccaccctgctagagagattagtgaggtaaatattcaacaaatattgtgtttctttatgtagcaactgatatgatagaagcgtgagaatgaggttctttagaatcacagtggaatttctggatcttacaacctgtgaggtaaggggagtctgctcttttccattgtcaggtagaaataacaactcatggagaggtttgttttatcagaggacacggagatcacattttatgtca

SEQ ID NO: 642359 - DNA, 533 bp, Homo sapiens
gcaatctttcctttgtcttaatgataccacatttatttacattagatgactgttattttctttcttttttattttccaagatggagtcttgctctgttgcccaggctggagtgcagtggcatgatctcagctcactggaatctccacctcctgggttcaagcgattctcctgcctcagcctcccgagtagctgggattamaggtgcctgccaccatgcccagctaatttttgtattttcaatagagatggggttttaccatgttagccaggctggtcttgaactcctgacctcaggtgatctacccgccttggcctccaaaagtgctgggattacaggtgtgagccaccatacccagcaactgacttagttattttcttgatagctaaatctgaagagaagaaacatggcaatctctaagtctccttaatataccaccattctatatgtcttctatcccatgttattcatttactattctattttctataacatctagcatgtctctcacccacagcagacacttagaactaa

SEQ ID NO: 642360 - DNA, 619 bp, Homo sapiens
tcttaactaggaagaactattattcattcactcattccttcattgaataattcattttttattcaactctttgcttagtgcctgttaggagctcagcactgtcctaggcattaatgataaaatggtcaaccagacagacaaggctcctactctaagaaaggtgggcagaagataaacaaatatacaaatatattttctgtctgttggacagaaaataaacaactacacaaaatatcatatggtaataaaygctatgcagaaaatgaagcagagtgatatagtgatgaatgcctggtggcaactttagattaaataatcaagttaggcctttctgaggaggtgatatttaaggtaagatcttaatgacaaataggagctagccaaaaacatgagggaaaagactttcaaagctggggaaacaataagtacaagtaccctaaggcaggagtgagctaggtatgtagggcacaatggtagacgatgctaggagacagagctaggggacagtggtagaagatgagagcacaagaataaataggagctcaaactttgtaaggcaggtaagggctttgggttttaatttaaattacataggaagagctcgtaggtcttaagtaag

SEQ ID NO: 642361 - DNA, 420 bp, Homo sapiens
gaattcctagttaaattttaatttcaatggaacatacttatactaaaatgtatgtgtttatctaaataataattactaatgtttatctgaaattgaaattcaactgattgtcctgtatttttatttgctaagtctgggaactccattaatatttttcactaagtacctaatggaggaacactggagcaaataactgggccaaagatggcatcctagaagatgagataagcttgaattaagttttaaaagggaaaaaggaatgagctaagggagataacacatgtaaagtaytggtcacaaagtctgcctgtattaatcagaaatatttgttggcaagtaaaagacccaccagcttacttactcaaaagggagaattaattagaaggacatttgaagtatcttctcaaactggacaattaa

SEQ ID NO: 642362 - DNA, 536 bp, Homo sapiens
tctaacaaatatttatagaatacctattatatagtattactattaataataattattttctctctctgttgaattggtattataaatgtactttgtctttrggaagactctttttgtcctaaattctaagttgtctaatatcagtatagccgctccagctctcttaggtttatatttgcattcatttttaaagaaaaatgaatagattttcagaaacctgtgggacaacattatgcatactaatatatgtatagtggaagtacagagaaataacaaaggaaatgggtagaaaaattatttgaaaatataaaggacccaaatttccaaaacctgatgaaaaacattcatttacacatttgaaaagctcaacaaattttaagcaggataaacacaaagtgacccacagctacaaatgtagtattcaaatgctgaaaagcgaaaggcaaagataaaatcttagaaatagcaagaggaagtcaacttgtcatatagaaggtaactacataagtttaacatctgacttctaattagaaaca

SEQ ID NO: 642363 - DNA, 563 bp, Homo sapiens
attgaaatcctccccaagccagttcctagagccacttaaatacctctcttagattaagagggactttgcctctgagctggggagtctagggctcagagtctggtactcaaatggcaaacatgagagtatatttgaactcttaacaagttgaagccattccttgacacttagcagatttttcccatgtaacaaagcattgacatctgcaaagctgtggagcattgctactgaaaatttactggagaagcaaacattttcttgtttttctaaatgtgaaaaaataaacatttctgaagygtgtgtgtgtgttttggtacatagatgagaggtttctatgttgcccaggctgggctcgaacgtctagcctcacctccttatgcaccaggacaacaggcctgagccactgcggctcctgaagtttttcctctgagatttcagaaaagtgtagcaggtgaaattcttgtcttagtagtgtttttgaggagaaggaaaggcagttgtttatatttctttttgtttgtttgtttgtttgagacagtctcgcactgtcgccaaggctggag

SEQ ID NO: 642364 - DNA, 575 bp, Homo sapiens
ctttatcaaaacctttccttcactgtttgaacatagtaaaaatatctgcttgtcaatacctctatgtgatgatttcaatatgtttgctcccttcattatgattaagcaaagattataaataatcaaaataaaggttttataaactttgaaatttagtagaatgaggacatgcccttctcaactttatctccttttcccttkgcaacatatatttatcagtctggagatttgaaatttcatggtctatttaactcagtgttgctgtttgtgattccgcagtgctcagtaacatcactgtacattccaggcacatccacatgacctagttaatgaatgccctggatgttctgaatagatttatgctgataatatgctgtgttcaggccagagcacaggatgaagcccaagaagggctcattttctctcttgggtactgatttgctatgtaaacttgaatattatatttagtcttttaaagtttaactcccccatgcaaaacaaggttaatagtatatttgatcgtgaggtactttggcagccttatcagaaaaacattgtgagtgcagatatttatt

SEQ ID NO: 642365 - DNA, 575 bp, Homo sapiens
ctttatcaaaacctttccttcactgtttgaacatagtaaaaatatctgcttgtcaatacctctatgtgatgatttcaatatgtttgctcccttcattatgattaagcaaagattataaataatcaaaataaaggttttataaactttgaaatttagtagaatgaggacatgcccttctcaactttatctccttttccctttgcaacatatatttatcagtctggagatttgaaatttcatggtctatttaactcagtgttgctgtttgtgattccgcagtgctcagtaacatcactgtacattccaggcacatccacatgacctagttaatgaatgccctggatgttctgaatagatttatgctgataatatgctgtgttcaggccagagcacaggatgaagcccaagaagggctcattttctctcttgggtactgatttgctatgtaaacttgaatattatatttagtcttttaaagtttaactcccccatgcaaaacaakgttaatagtatatttgatcgtgaggtactttggcagccttatcagaaaaacattgtgagtgcagatatttatt

SEQ ID NO: 642366 - DNA, 425 bp, Homo sapiens
gtgctttaccttccattaaaataaaacatgaggtgaaaaacaacgccatcaaaatttcaattgcattaaactatcttaacaactaatgaaaaatattaacttctgtgcatttagctgcaaatgttaattgattaatttgacccctgggaaatcaatttattgccagcagccagctgaccatcttatatatctggccataatcaaagttatgtyctccaatctaaacaaattgccttaccaaaaaatatcaagtatgccatgactatactcctctcagttttttcagctttcattgactaagtaacaccaggcaatagttgctttattcaataaacagttgagtacaaatttaggtaattttatctagggaatgagagatgtcagtgggaaattgacagaggctatcacagagactttcattgcta

SEQ ID NO: 642367 - DNA, 562 bp, Homo sapiens
ggaagcagttcacatgtgtttccccaccgccattcattctgtaatctcataatgaaagagctatttctaagaaatgtcacctaaagtttaacctgtaaagttaaatcagcaattcccatctgtaagttttatttgtctttgtcacattttctagggggtttgagattgctcctattctactctgcaaaacctggaaagagttgggtatgactattcaaaaatgaatgtcttctgtagacaactgaggtgatagcaaaaaaaaaaaagtctgtcaaaagagattgcagactttcttaactaggcacagcctgagtgcctatattacatgctgaacactcagatctgtcaagaaagaattcatgtatcctaaagctcaccgcacattctatatgcagtatcatgttttttaaacmaaatcttttaagcacaaagaactattcaggaactcaacatgaatttattaaatgttgactctcagacattgacctatattctaggataaaaaagtgaatcaggcatagtacctatcttaaaagaaggtattgttcaatgcagtggtttt

SEQ ID NO: 642368 - DNA, 476 bp, Homo sapiens
tccttttcttcctatactgtactttacaattaggaagcatttctcctgtctaaagtcctctgttctgtgttcctaaatctgtctattctttgttctctattgtgaatgtgctaacagaaactacccaccagatatggtgattctaaagttttactttaattctcaaaccaagcagggaatgggaaaagctgcctgctttgtaaagaaaatctgaaatacagccatgttcattcttttacatactatccagcttacagctgctttcatgttataacatcagagttgagtagctgcaatggagactggatctgcaaagatcaatatatttarttcttgccctttagagaaaaaatgtgttgagccttgctttaatccattggcaagcaaacttttaagcaaataaaatgtttaaaacataatttttaaaagtaatttttgtattacaaaaagttaaggcaaaatgggtagaagtctta

SEQ ID NO: 642369 - DNA, 476 bp, Homo sapiens
tccttttcttcctatactgtactttacaattaggaagcatttctcctgtctaaagtcctctgttctgtgttcctaaatctgtctattctttgttctctattgtgaatgtgctaacagaaactacccaccagatatggtgattctaaagttttactttaattctcaaaccaagcagggaatgggaaaagctgcctgctttgtaaagaaaatctgaaatacagccatgttcattcttttacatactatccagcttacagctgctttcatgttataacatcagagttgagtagctgcaatggagactggatctgcaaagatcaatatatttagttcttgccctttaragaaaaaatgtgttgagccttgctttaatccattggcaagcaaacttttaagcaaataaaatgtttaaaacataatttttaaaagtaatttttgtattacaaaaagttaaggcaaaatgggtagaagtctta

SEQ ID NO: 642370 - DNA, 476 bp, Homo sapiens
tccttttcttcctatactgtactttacaattaggaagcatttctcctgtctaaagtcctctgttctgtgttcctaaatctgtctattctttgttctctattgtgaatgtgctaacagaaactacccaccagatatggtgattctaaagttttactttaattctcaaaccaagcagggaatgggaaaagctgcctgctttgtaaagaaaatctgaaatacagccatgttcattcttttacatactatccagcttacagctgctttcatgttataacatcagagttgagtagctgcaatggagactggatctgcaaagatcaatatatttagttcttgccctttagaraaaaaatgtgttgagccttgctttaatccattggcaagcaaacttttaagcaaataaaatgtttaaaacataatttttaaaagtaatttttgtattacaaaaagttaaggcaaaatgggtagaagtctta

SEQ ID NO: 642371 - DNA, 491 bp, Homo sapiens
cagggccagcatgaggcaggtaaagggtgcagttccatctctatctggcagactaagtactctattctattctctttgaccatcccttttcttaactgtgcttctgactcatggacaaattgttagggattgattgcagattaaattgatgttcagagaagtcaatgaatgatgcaactgctagactttctcttaagactgtggaatagagggtttccagttatcacatagatgacctacacaacctaggcatcactgtgtatcaatctatacaggcaaagaagggaagaagaagggaaagggtgggagctaacattgagtaagcaaccaagatgtgctaatgtttcttagatactctatcattgaatccccaaaacaatcttgagaggwaaatataatttctggatttattgaaaattatttgttgactatatactatatatcaggcactgttctatgtactagagatagagcaataaacaagacagatc

SEQ ID NO: 642372 - DNA, 619 bp, Homo sapiens
gacttgacatgtttaaatgatgaaaacattgatttatgtttggaaacaatgtgatatttatctcatttttttacctggaggattttctggcagtatataaatggatactttgcctcataygataaattatagcaccacgacagagtgaatagtcccaaggcacatagtttcccaaagtgaatatgattaaactcagtaggagggtgacgcatcactggctctcctgaacatttggatatgcgaccattagaatgaccttcctggccaagtagggctgaagagttttacaaatggttctggtagataagcaatgaaactaatcagaagttttttcaggatgcagaagttcaaaatggtgccattttataatcaagtacaacactgaaattggagtttcttgtttcctattttctcatcgtttagaaataaaatccatttgagcaaataattcagataatggtgtcttgccatgcacatgagcatgacacctttaaaaatgaacttttagatgggtatgcttcttttggcttggcttgagatgcaggaaatctgagctcttttttttccagacttacctgtgggattatatttgtgatctcactttatttaacactctgtg

SEQ ID NO: 642373 - DNA, 404 bp, Homo sapiens
taaaatcaacctttgtcacttaactagctgtgtaactttagtaaggtaaatatgcagctctctaggccactgtaaaatggagatgataacactttcctaaaagaattgtggcagggattaaatraaataattgtatatcagtagttctcaatcatgcgtgattttcctccctgtagaacatctggcaacatatcatatagcaaccttcaattatttgttgaatatttactatatgcactataataagaggaaaatacaaaggattataagttcatgatatgattattatcttggaaaatactaaacagatagaaaaagagtttgataactgtataaggaaaaatacataatcaagaaacaaaaagcagcaatcaacttctggaatggcccagtgaccacctcta

SEQ ID NO: 642374 - DNA, 500 bp, Homo sapiens
ggaacacaatacatctttgtgagacagaaatattgtcacaatacattaatgaccagaactcaaaaaatatatattaacatgcaaacaaatggtaaagtaagccacatgcacaaagaaaaagcagcaaacaccacatttcatatggaaactttaagcatgaacgtagtttacaaagacattaaatcaactattatcaatatatgtatactaaaggaaaccatgtctaaagaattcagggaaagagtgacaatgatgtctcattaaagagaaaatattaataaagaaaaaaattatcttaaaagaaccaaaaagaaattataaagttgaaaagtacaactgaagtaaaaattttaatagaaaggttcaacaamagatttcagctggaataagaaagaatcattaaatatgaagatatgtcaatagggactactcaatctgatgagcatgaagaaaaacaaaagaaagaaaaataaacaaaccttagggaactgaaaaacacc

SEQ ID NO: 642375 - DNA, 519 bp, Homo sapiens
gagactgtaaggacatatattttttccttaaaattctaccaattcacatattttagtaagatttaaagtatttaaaaatttctactctattttataattttttacttttaacataaagcatttttcataagaaaacaatgatatttgtttaaaattggaaagagattccatcacttggaatcctcagcctctgtccacaggcccaacaccttggaaattctaccagtctgtgatgagtgttgaaccggtaccagtacagccacttaggttatagaacaataaattgatatgcrgatgaattatccaaaatatctatcaggaaagtaatacaagtagtgctattatctaaatgctggtgtcctcccaatatttgtatgttgaaacttaacatgtgatagtattgagaagcaggaccttctgtgagtgattaagtcatgagggctccaccctcacagatgggattagtgcctttttaaaagaggcttgagttgagtgaggtcccttacactctctcaccat

SEQ ID NO: 642376 - DNA, 590 bp, Homo sapiens
agactgtaaggacatatattttttccttaaaattctaccaattcacatattttagtaagatttaaagtatttaaaaatttctactctattttataattttttacttttaacataaagcatttttcataagaaaacaatgatatttgtttaaaattggaaagagattccatcacttggaatcctcagcctctgtccacaggcccaacaccttggaaattctaccagtctgtgatgagtgttgaaccggtaccagtacagccacttaggttatagaacaataaattgatatgcggatgaattatccaaaatatctatcaggaaagtaayacaagtagtgctattatctaaatgctggtgtcctcccaatatttgtatgttgaaacttaacatgtgatagtattgagaagcaggaccttctgtgagtgattaagtcatgagggctccaccctcacagatgggattagtgcctttttaaaagaggcttgagttgagtgaggtcccttacactctctcaccatatgaggacacagagaaattgccacctgtgagcaacagtttttcacctgaaactgaggctgttggtgctttga

SEQ ID NO: 642377 - DNA, 365 bp, Homo sapiens
tatgttacctgaagtggtgtgtttattgctggggtggaggacagggggtcaggacagtagagtactttctgctaattggtgccggggtcaaagagggctggtgctgggtcacaacacagtacatagctttttggaatggatattctttcaaataaggaagttgtgttttctttyacaagaagaaagcaaaatcaatctttcccttatcacatagtggcaggtcattatacagaacccaaaggaggctataacaaatcgagggttcccagaagtgcatttagtaagagaaaacaatgaaggtttgtgatgtttcagatgaaaagggagtgtttggctttctttgtcaaaaatagcacttagatttg

SEQ ID NO: 642378 - DNA, 399 bp, Homo sapiens
aaacctaaaagtggacttcccaatagaaaaataaagtcaaggaataaaaattaagcaaattcccaataaacatataagaaaatgcaatcttgtcattatcaaaagaaaaccattattaaagttatgacttgttacactgtgttattgaaataataaaatactattttaatatacacaaaaagatttttttaaaattgtatgacattgtcttgagaaggaaatgagtacatggtatttgtgaaagtataaattgctgccaagttgtgcattttaacaacacttaacaaggcrttagaatagtgcaaatgttttgacccaggaatttatgaaaataaatatacgtaaatatatttctttaagggttttgtattacatatttttttgtaagctttaaaaatt

SEQ ID NO: 642379 - DNA, 467 bp, Homo sapiens
ggccaggcacagtggctcagtcctctaatcctagcactccggaggccgaggcaggaggattgcctgagcccaggagtttgagagcagcctgggtaacatggtgaaaccccatctctactaaaatacaaaaaattagccaggcatggaggcatgcacctgtagtgccagctactcaggagggctgaggcaggagaattgcttgaacccaggaggtgtaggttgcagtgagctgagatcgagccactgcactccagcctgggtgacagagtgagactctgtctcaaaagaraaaaaaaaaaaaaagctcttccaataaattgaaggagaactacttttcaacttgattctgaaattcatagaactgaaaatatggaatgtgaatacaaaggatctagaataacccaaacaactttgaaaaaaaaaccaagttgaagaagttacagtatctcagcctaagatttattatt

SEQ ID NO: 642380 - DNA, 527 bp, Homo sapiens
ggaggcatgcacctgtagtgccagctactcaggagggctgaggcaggagaattgcttgaacccaggaggtgtaggttgcagtgagctgagatcgagccactgcactccagcctgggtgacagagtgagactctgtctcaaaagaaaaaaaaaaaaaaaagctcttccaataaattgaaggagaactacttttcaacttgattctgaaattcatagaactgaaaatatggaatgtgaatacaaaggatctagaataacccaaacaactttgaawaaaaaaccaagttgaagaagttacagtatctcagcctaagatttattattaagcagcagtaatcaacaaagtaaggtgttggcaccgagacagacaaatagataaatggaacagaataaacagcctaaaaatagaacttcaaataaatgatcgatttttttaatgtagttgcaaggtaattaaatgtatatttatataaaaaagatctttgatccctaccttccaaaatgtataatactacttcaaaatggatt

SEQ ID NO: 642381 - DNA, 407 bp, Homo sapiens
tgcccaaattttgctcaggcccactgggctcattttgcccacttggcctgacaggctacacttggctcatgctaccagcctggatttcatgcctgtccagagcctggatcctatgcctrtcaagggcaagtcagccgtggagcagcaaggagtgtgtgagtgagcgtggggtctggccactgtgcacagtcagacatgctggctgctgcagcgggttggacagctccaggtgccatcccggacactggctatctgtgaggctgtggcaggaccaggtacacagcaagcagctaccacggctagcactggggaatgcagtggcaccccgaagcttggagaatgcagtggcactcagaagtttggagaatgcagtggcacccagaagcttggagatgccaggaacttca

SEQ ID NO: 642382 - DNA, 407 bp, Homo sapiens
tgcccaaattttgctcaggcccactgggctcattttgcccacttggcctgacaggctacacttggctcatgctaccagcctggatttcatgcctgtccagagcctggatcctatgcctgtcaagggcaagtcagscgtggagcagcaaggagtgtgtgagtgagcgtggggtctggccactgtgcacagtcagacatgctggctgctgcagcgggttggacagctccaggtgccatcccggacactggctatctgtgaggctgtggcaggaccaggtacacagcaagcagctaccacggctagcactggggaatgcagtggcaccccgaagcttggagaatgcagtggcactcagaagtttggagaatgcagtggcacccagaagcttggagatgccaggaacttca

SEQ ID NO: 642383 - DNA, 407 bp, Homo sapiens
tgcccaaattttgctcaggcccactgggctcattttgcccacttggcctgacaggctacacttggctcatgctaccagcctggatttcatgcctgtccagagcctggatcctatgcctgtcaagggcaagtcagccgtggagcagcaaggagtgtgtgagtgagcgtggggtctggccactgtgcacagtcagacatgctggctgctgcagcgggttggacagctccaggtgccatcccggacactggctatctgtgaggctgtggcaggaycaggtacacagcaagcagctaccacggctagcactggggaatgcagtggcaccccgaagcttggagaatgcagtggcactcagaagtttggagaatgcagtggcacccagaagcttggagatgccaggaacttca

SEQ ID NO: 642384 - DNA, 434 bp, Homo sapiens
tatttataaagtgcattgtattagtctgttctcacactgctgataaagacatacccaagagtgggtaattgataaagaaaaagaggtttaatggactcacagttccatgtggctgaggaggcctcacaatcatagctgaaagtgaaaggcacgtcgtacayggtggcagacaagagagaatgagaacaaagtgaaaggggaaactccttataaaaccatcaatctcatgagacttatttattaccacgagaacagtatgggggatactgcccccaatgattcagttatctctcaccaggttcctccgacaacatgtgagaattataggagctacaattcaatgtaaaattggggtaaggacacaaccaaatcatatcattctcctcctggcccctcccaaatctcatgtcctcacatttcaaaaccaatcatgc

SEQ ID NO: 642385 - DNA, 522 bp, Homo sapiens
cactagcagtggcttcagtctcaagataacaccttacagcagcagcttggatcatgtcatgaggtagaggaagcacaatgtagacttccactttggagcaatgcaatcatgtgaactcttggcagccccaccccagactgggctcaggacctgagagtactagatcrttctcaaccaacaaagacaatgagttttgacagttttaattaggacttctggtgacctcctgcttaccttttcccccacaggaagagtctctcctagttccaaactgaccccaactagggagatggagtagcaaaaacacagtgtttagtttccttttctatgcatccattctcatatggtttgcctgtgtcccacccaaatctcatcttgaattgtaatccccataattcccacatgtcatgggagggacctggtggatggtaattgatcactgggggcagtctcccccatgatgttctcatgatagtgaatgagtttttacgagatctgatgatgttataagcatctgatatt

SEQ ID NO: 642386 - DNA, 596 bp, Homo sapiens
gttctcaaccaacaaagacaatgagttttgacagttttaattaggacttctggtgacctcctgcttaccttttcccccacaggaagagtctctcctagttccaaactgaccccaactagggagatggagtagcaaaaacacagtgtttagtttccttttctatgcatccattctcatatggtttgcctgtgtcccacccaaatctcatcttgaattgtaatccccataattcccacatgtcatgggagggacctggtggatggtaattgatcactgggggcagtctcccccatgatgttctcatgatagtgaatgagtttttacgagatctgatgatgttataagcatctgatatttcccctgctggcattcattctctctcctgccaccctgagaagaggtgccttccgccataattgtaagttttttgaggcctccccagctattgaaactgtgagtcaattaaacstcttttctttataaattacccagtctcgggtatttattcatagcagcctaagaatgaactaatacacatcccatgtctccatgctctacaggagatctgccagtcccctgctgcactccagcactct

SEQ ID NO: 642387 - DNA, 559 bp, Homo sapiens
tatatttttagatttatctgctcttgaatattatataaataaatcatatttatatgattttaaaaatttgtttcktttggtccacattatgttttagagatttattaatgtttcaccatattttatttcatcaatttacatgccttttcttagatcattttaagagcataccataactgaattaatctttctattgttgatagacatttgaatagttttggggggttttgccttaaaacaaggattttgtaaatatccttgtacctgacttctggtgcatatgaaaaatttctctcacatataaatatagtagtagaattaagaagccataggttataggtatgttgtgtatattcagctttaataagtaatacaaaactggtttttaaagtagccttccctaatttgtatttgtaccaaaagtgaacaaggatttcaatttctctacacactctggccatcacttgatattgtttgattatttaattttgtccatctggaggaagaaaatggtgtcacatggtggttttaatgtgtatatcccaaatgattaatggct

SEQ ID NO: 642388 - DNA, 490 bp, Homo sapiens
tgcacataggtcttggcctcatgtggatcattgtagggaacatgccattggcgtgtctaacctgcagatgtgccattttattgtccttttggggcatgcttgcatgagggaatctgggcatgcacaaaaaaacatgtctcacagctgaagggggtgtttttctctkggagatgctgaatgattgtgtgttgtgtgtccacattttgactgtgactcaggtcagggctaaaatttccagttatggtatcatttcagcactcaaaaattttggattttggaaagttttgaattaggagtgctaaagctacatgttctgaatagaaatgctttattgattagatgtgatgaaaacatgattttccagtttgagcttttttttcccacttcctttgtgtttcttaaaatttaaaaaaattaatataccagtattttctttatgacttatacttttactgtctcaataagatatccttctctgccctaaggtcat

SEQ ID NO: 642389 - DNA, 569 bp, Homo sapiens
cctttggaatttgttcagatgtgtcatatagtacaaaatggaaacatttcaaaccattttgtgtgcttgaaaagggagggtattcagccgttaggtaaaatgttccatacatgttgttaaatgtgttgttcaaatatttcacatacgtatgactcttatatctgcttgatctatcaattactgagtaaagcatgtaaaaagtatttttcactaggattgttgatttgcctattttacttctcctttctgccaatttttattggtacatatatggtttatatacatatgcttatctatctayctacctacctacctaccaacctacagccagccctccatattcatgggttttgcatccttgaattcaacccaccacatgtcaaaacctgaggatgtggaggaccaactacatgtattttctgtctgcaatttgttaaatcctgaaatgtggaggctgaaaatatggagggccaactttactacactgttttgtataaaaggcttaagcatctgaggatcttggtttctgtggggggatcctagaacttccacatatggagggccaactg

SEQ ID NO: 642390 - DNA, 567 bp, Homo sapiens
tgaacctccccccagtctgacaatttttccttttttaacatctatttaacctctaacaaatttaacctctaaatttgtctttttttattataatttaatgacatattttgatttattactaacatgtttttgtgcttttatttctcccagtattttctgtttctttttctttgttttcttgctttattttggattgagtgactatttcatttttcattatatttttcctctactaatctggatataatttatttataccattttaatatatatctataaattttaaaatacatatgcaacttaccaaaatctcacattaatcaatacctttagcctctggcaaatgacacaaggtctattcttaraacatctaaggatatataaatatgctttatattatctgtgaccagcctgtcccaacctgtatgatattgttatcatatattctggtttagttttatagttgataatcccaaaatattataataattgttttatgtggccaatgcattttttaatttatccacttttttttgctttctattttcttaattaattgtggaatct

SEQ ID NO: 642391 - DNA, 565 bp, Homo sapiens
ccatctcactgtcttgtggcatctattgttactgttagtccatttttcactattttaatagtgaatctgtcttttattctcactagttttaaaatcctcggattcaaagttctgcagttataatatacatagttctggatttctttttatttgttttactttgatgttgtttggcttctaagttttctggaaaatctaarctgttatctgttcaaatattacccctgccacattctcccccaccaccgtcattctattcctcgtggcatctcagttaaacctgtgttagcttttctgactttatcctccattcctctttatctttatttcacatttctatctctttatttacctaatatgccttcccttattataaattctatctttccattcactattcttttctaattgtgtccagtctgctgttaggcttatagatggagtttttaattacattattatatttattcatttctataaattttgtcagctctgtttatatcctgattgctgtttgttcttattgtaaagcctctttaaatttcttgaaactgttaaatatact

SEQ ID NO: 642392 - DNA, 565 bp, Homo sapiens
ccatctcactgtcttgtggcatctattgttactgttagtccatttttcactattttaatagtgaatctgtcttttattctcactagttttaaaatcctcggattcaaagttctgcagttataatatacatagttctggatttctttttatttgttttactttgatgttgtttggcttctaagttttctggaaaatctaagctgttatctgttcaaatattacccctgccrcattctcccccaccaccgtcattctattcctcgtggcatctcagttaaacctgtgttagcttttctgactttatcctccattcctctttatctttatttcacatttctatctctttatttacctaatatgccttcccttattataaattctatctttccattcactattcttttctaattgtgtccagtctgctgttaggcttatagatggagtttttaattacattattatatttattcatttctataaattttgtcagctctgtttatatcctgattgctgtttgttcttattgtaaagcctctttaaatttcttgaaactgttaaatatact

SEQ ID NO: 642393 - DNA, 594 bp, Homo sapiens
tcattctataatctgtgttctattaattccaacatctggaaagttttacagccctaattctgccactttttttagttgcctctttctcataatgcctgatttccttcagttaattttgtctgttaaacactttccttgaaacttatctgagtaaatgtctttgtagccagggcaaaattaggttcctccaaaataacttgtctccttgcttctcaggtacttgcgatacaactggtttggtatgactcaatccttggcttgaggttattggccagcccagtcaattttcatttgacttgctcacctgcattagaatcaagatacggttataatttctcaagggagattttaattttgtcctttaatcagtgacaaggaatgaaatagacagttttcttgctattttctgagtagtagggagaagttacattttcgyttactcttacatcaaaggtgtagttcttcgtggtctgagtttaagaaatgaaggtaaaatcctggatttatcttctattttctgatgatactaagctctcaactcacacatgttcagttctactggatacgataaaatgttcaagggtagattggctt

SEQ ID NO: 642394 - DNA, 582 bp, Homo sapiens
tagactgcataagacaatgttaaagaagggcaccttttggttcagaamaaatttcttattactagagtatccagtttggaaatgagctggatcatggagtaatgagcactttgtcactggatgtgtttaaataaagaatagaaaatcatcttttattaatgtctgtgaagggacctgttatattgatgaggaatattgaattggggcatcaatatgttttatttcaatagtgtgacatggtggaaagaaacagacaaatcagccaggtgtacctgattatattctcccactacaactttcttgttatgtgattttgggcgagtgacttatttttcctgagcctcagatttttcatttataaagtgggaataatcacagtactcatagctgactcacagtgagaaattacacaatatttgtgaaatgtgtagtacaatacctggcacaggcaagtgttcaataaatagtagctactactatattatgaggcagatacgacctgtaaatagcacaggatttggagagaggtacatgtggttttgaatccccaccactatttgccagttatgccattttgactaa

SEQ ID NO: 642395 - DNA, 443 bp, Homo sapiens
tatagaacattgccctagtgtgttctccatatattctcatgcggcaagattacttggatattctccaagaagatcctcaggtaaacagatgttgtttttgttgttttagtgggcatgcaaattgagggtaaaaaaatgaatgacccagcacaatagaaggggtacattttrgaggctgagtaaggtaagaaaaacagcagggtcaggacaatgagtatcttggatgaaggaatactttccataaaggaagaggtataatattaagtgatgatggtaacggtgatgaagctttgctgtgtcatgtatatttcttttttgatttttctccaaataaccaacactatattagcctccaattctcttgaatttggatttgtttgtttttggaggagaaacacactggtgaatctgaactcaaagtgggctcaatgtacgagcagaga

SEQ ID NO: 642396 - DNA, 580 bp, Homo sapiens
attagcttgattaatatctaattaatagatcaattctcttaatagatcaatctcttaattagatattaatcagggagcttaatatctaatatggaagatagagataatacaagtgactcattaaatatttttaaagaaataattgagaatggtagctaatttgatatttrggagcaaataaatacttggccagaaaatcttggacccatatctcatagaatccttctcatgagttcagtccacattctaccagttcatttataacatattacagatacgaagtcaaagtatttggaattttgattagatgggacaccagatggtataagaacaggcaagaggaacaccacaccgtcccctgtggtatccaatggcaattcaattcaatggtatctcatttttatctttctctccctctcattgaaagatgactggactgtccattaaaatccaataaaacaaatatagaaggaagtcccttcctttgttaactacagactgagccactgaatttacttgtgtgcatgactaataaattgctgacttccctaacctttgcagccatgactttatccaaaca

SEQ ID NO: 642397 - DNA, 580 bp, Homo sapiens
attagcttgattaatatctaattaatagatcaattctcttaatagatcaatctcttaattagatattaatcagggagcttaatatctaatatggaagatagagataatacaagtgactcattaaatatttttaaagaaataattgagaatggtagctaatttgatatttgggagcaaataaatacttggccagaaaatcttggacccatatctcatagaatccttctcatgagttcagtccacattctaccagttcatttataacatattacagatacgaagtcaaagtatttggaattttgattagatgggacaccagatggtataagaacaggcaagaggaacaccacaccgtcccctgtggtatccaatggcaattcaattcartggtatctcatttttatctttctctccctctcattgaaagatgactggactgtccattaaaatccaataaaacaaatatagaaggaagtcccttcctttgttaactacagactgagccactgaatttacttgtgtgcatgactaataaattgctgacttccctaacctttgcagccatgactttatccaaaca

SEQ ID NO: 642398 - DNA, 562 bp, Homo sapiens
gaatgccagattacagtgtatgattgctgagcaaaaacatattggtgctttccagttatagacaggaatgtcaaaagctatctgaaagaggaacctcagagtactctgttatgtgctatctcagggtagaaggagtattcttgtgctttatggactcatgttgtataaacagagagtaaacgtcctcttattcccaagggcttcctgaaaatttgatgaagatgatgaaaaaaataggtaaatttttgcatatcttctatgagccaggcattgtgttggtgctttaatatgttaccttatttactgatcacaaacccatgtgagttctttggcacttaacccagttgtctcactgtctagggactgacttcctgttattaacacatgactgaatctcattgtttgattgataggcctgaccttctgaatctccttttcggttcttatgtttcacatgatttccctgtcctctacttaatactctcaagctatatatartaataatgataggaaagacttttcaaacactgtatgtcaggcactattctatgcatgtatgtat

SEQ ID NO: 642399 - DNA, 599 bp, Homo sapiens
tatacatacatgcatagaatagtgcctgacatacagtgtttgaaaagtctttcctatcattattattatatatagcttgagagtattaagtagaggacagggaaatcatgtgaaacataagaaccgaaaaggagattcagaaggtcaggcctatcaatcaaacaatgagattcagtcatgtgttaataacaggaagtcagtccctagacagtgagacaactgggttaagtgccaaagaactcacatgggtttgtgatcagtaaataaggtaacatattaaagcaccaacacaatgcctggctcatagaagatatgcaaaaatttacctatttttttcatcatcttcatcaaattttcaggaagcccttgggaataagaggacgtttactctctgtttatacaacatgagtccataaagcacaagaataytccttctaccctgaaatagcacataacaaagtactctgaggttctactttcagaaagcttttgacattcttgtctataactggaaagcacaaatatgtttttgctcagcaatcatacactgtaatttggcattctgtggtatggccccatgacagtcatttgcagtgtaa

SEQ ID NO: 642400 - DNA, 597 bp, Homo sapiens
atttactattcattaagtggaagtggataatcataaacgccttcatccttatcatcttcacactgaataagctgacgaagaagaggaagtggagaggttaatcttcctgtctcagggttgtcagaggcagaaggaaatccacgtacaagtggacctgtgcagttcaaatccatgctgttcaagagtcaattgtatatgcatacatgcatgagtgtatctgtatgtgcgtggttgtattcacrctgtacatacaattttagaaagaaaatttctctatctgcattttctggtcatatcttcctgatggcttggtcatatctttccagtgtttaactggaaacttgaagaatgcacttgttctacccatatttttaagaaatttcactccctcttcatacatttattcttcttactgtatatataatgcagtagacttttattatgtctttaatattacatatgtctcccaaacccacgcagtattattttttaagtaggtaacatcctcatattagttatagattctgtttctgaaaaggcatgattcaacaaccttgaaggaaaaatcattcacgttattgcctccacagtagtggc

SEQ ID NO: 642401 - DNA, 547 bp, Homo sapiens
cagttgacataatcttggagagaaatgatggtctgaactaagagaatgagactaggaagagagaaaacagataagaaagaatctgtaagtctggatcattgccaaatagaattttggcagcaagagagattttaaattctaacaacacattcgctcaacagtacttgttgagtatctattatcaaagtatgcaaaccatcatctggaaactaagacccaaaaaagttaaktaaattaattaaggtcacatagataattactggcatatctgaatctaatataggtcttccagtccagtgattacagctcagtattttatatggaagaatactccagttatctcaataaaatgaattcctatccattcatctaaaatgctacaatagtaaaacgttatgaactacagtgtttaaagtgagcttaattccaatccctacaattcacattttagaaatgtaatgtggctgagtaccttcctcccaaatagtttaagtccctttgaattagtcggtacatacatagaattcatgcagttgcatcaccaacc

SEQ ID NO: 642402 - DNA, 600 bp, Homo sapiens
ggaagttatcacttacgacactatcactcagagataactatgcctgtttgtttacatatacaaacatataaatattcattacacatatrcgcatacatgatacatggtcatattatatatatgttgagtctgatacttgatctgatgctgctgttttggtctcatggatacaggtagaagacacgaaactcctggatcatagaccaagaactttataactcaaggcacagcaagcagcaagagtatcaattcattgcattagttctccttgctcccaagtccaatggggataatggggaaggtccaatttttgacttttcctcagaccatagggaatctgctaccaggccataagcctgaactgagggaggagtgtcagagcaacagatgtaagtgtcataggattctgggatacctattcatataaactaccatggtctccagacctgctcaggtatgatccctgatatgccattttcatcatgtaatggattactatgtatgacttgatgagtctgacaacattcttgatgggcaactgcagttacaaagctgcttaatatcccatggtctctattagtctctgtgtatagcaacagc

SEQ ID NO: 642403 - DNA, 603 bp, Homo sapiens
tgtgtcatcattttcaggggaagaggttggctaatacaggaaataacaggagtaagaaaggatgtgatagggtttcttggtgttttgtatctttagaagactaccattgycatctactttcaaagcaatttcaggttggaagggaaaatgtggctcctcagggctgtcagtgcacctacttattttgtcacagatgcgaaacatttaccttgttccctctttgagtctcactgaacttccacatctcatgggtgcacagaattctgaactgattggacattgcaaacactatgcacaaagggggcaaaaacagtggatgcacatattgtgtacagctcctctgttcatgcacgtgttctgctgtcccattgcacttcacttataaaacacaagaccaaaaataaaattattaagaagttttaggatggcaacagcagagaatcaaaccaagcatcaggctcttctgagcatggtaagcaatgtagctgcacagggtacatactcatgaggtcagccttgtctagctgtttccagaaaaaaacattaagaaaaactattttctgaaagagttaacacttaagaaaaccaggtacataaacagga

SEQ ID NO: 642404 - DNA, 651 bp, Homo sapiens
tgcatgaacatttacacataagaatttgaatagaatttcagggaaatccttaagtttattgatggcactaaggttaagagcctatatagtaggtatttagatttttttaaaaattcaatataaaacactttcttcaaggtaggcttcatgaataacttaggattttaatgaaaggaaggctagagaacacaaaatgtacacacacacacacacacacacacacacacacacayatatataaaattctacaggagtattacattgctaaagcaagaagattatttaacaggcttgagggtttggagacaggaattctggatggttcaacctacttgaacaaaagtagagagttgaggaataagcttggtgtagcttggaataggaattcatgctggaaaatattaaggtgcaaggttagatgaatagtgaaatatgaatttgagagccatttttggcctttgaacagagactcattataaaattaaaaaccccaaaagttgtaagatgtatttgagctgattgattccaatctcttggcattacaatacctctggcaagctgtcatttagctctgcatgaacacattagtgggggagtcacaatatgatatgccagctatcccatttttgaatggctctaattgataaaatt

SEQ ID NO: 642405 - DNA, 568 bp, Homo sapiens
tcctttgctctctctttctctctctctctctttctctctctctctctcctgctgccatgtaagacatgycttgctttcccttctccttccaccatgattggaagtgtcctgaggcctccctagccgtgtgaaactgtgagtcaattaaatctcttttctttataaattacccagtctcaggaagactaatacacattcccactgggaaacctgaaaaatccagatcatggagaaggatttaatcttacctagagctaaaacagatttagggagctgggtgaaatataaaagtagaagaagcagtaggaagagccctgtaggcacttccagtccccaactaaagccccaggatagccatccctgggataagaggtccctggaaaagttagccaggagaattggggaaggggcacagggtaaaggaagcttccaactgaactttgtaataatttcaaccgagcatgaattttactgagcaaaatctggggttgagggcaggggtgaattgcaggtgcagatattagcaaagaagccacagctgacagtgctggaaggcaaggaggggcaa

SEQ ID NO: 642406 - DNA, 577 bp, Homo sapiens
tgctctctctttctctctctctctctttctctctctctctctcctgctgccatgtaagacatgtcttgctttcccttctccttccaccatgattggaagtgtcctgaggcctccctagccgtgtgaaactgtgagtcaattaaatctcttttctttataaattacccagtctcaggaagactaatacacattcccactgggaaacctgaaaaatccagatcatggagaaggatttaatcttacctagagctaaaacagatttagggagctgggtgaaatataaaagtagragaagcagtaggaagagccctgtaggcacttccagtccccaactaaagccccaggatagccatccctgggataagaggtccctggaaaagttagccaggagaattggggaaggggcacagggtaaaggaagcttccaactgaactttgtaataatttcaaccgagcatgaattttactgagcaaaatctggggttgagggcaggggtgaattgcaggtgcagatattagcaaagaagccacagctgacagtgctggaaggcaaggaggggcaaggtctgagagatct

SEQ ID NO: 642407 - DNA, 577 bp, Homo sapiens
tgctctctctttctctctctctctctttctctctctctctctcctgctgccatgtaagacatgtcttgctttcccttctccttccaccatgattggaagtgtcctgaggcctccctagccgtgtgaaactgtgagtcaattaaatctcttttctttataaattacccagtctcaggaagactaatacacattcccactgggaaacctgaaaaatccagatcatggagaaggatttaatcttacctagagctaaaacagatttagggagctgggtgaaatataaaagtagaagaagcagtaggaagagccctgtaggcacttccagtccccaactaaagccccaggatagccatccctgggrtaagaggtccctggaaaagttagccaggagaattggggaaggggcacagggtaaaggaagcttccaactgaactttgtaataatttcaaccgagcatgaattttactgagcaaaatctggggttgagggcaggggtgaattgcaggtgcagatattagcaaagaagccacagctgacagtgctggaaggcaaggaggggcaaggtctgagagatct

SEQ ID NO: 642408 - DNA, 577 bp, Homo sapiens
tgctctctctttctctctctctctctttctctctctctctctcctgctgccatgtaagacatgtcttgctttcccttctccttccaccatgattggaagtgtcctgaggcctccctagccgtgtgaaactgtgagtcaattaaatctcttttctttataaattacccagtctcaggaagactaatacacattcccactgggaaacctgaaaaatccagatcatggagaaggatttaatcttacctagagctaaaacagatttagggagctgggtgaaatataaaagtagaagaagcagtaggaagagccctgtaggcacttccagtccccaactaaagccccaggatagccatccctgggataagaggtccytggaaaagttagccaggagaattggggaaggggcacagggtaaaggaagcttccaactgaactttgtaataatttcaaccgagcatgaattttactgagcaaaatctggggttgagggcaggggtgaattgcaggtgcagatattagcaaagaagccacagctgacagtgctggaaggcaaggaggggcaaggtctgagagatct

SEQ ID NO: 642409 - DNA, 340 bp, Homo sapiens
ctcgtggctggaggccaaccaactcaagccattacagmaactcatgaaagaacaaccctgatccaaagaaggagaaaacagctaattccactgcttgcaacaccctggctaactaaatgtcttgagtctgtccacatgacaacatcgctgctagcataaacagtatcaagaaaaccagtacactaaacaaaactacaaccaaggactctcaaagagtccaattcactctcctgccaccttcaccagagcaggtgctggtatccatggctgggaaacctgaagatggatcacatcacaggactcttttgcagacactcccctaaaccagcttggtagccct

SEQ ID NO: 642410 - DNA, 491 bp, Homo sapiens
caggatatggatgaaaatgtctccagagaaatacatttcataaagaaaagacaatcacaacttctggaaatgaaagacaaatttagagaaatgcaaaatacactggaaaactccaacaatagaatcaaacaagtagaagaaagaaattcagagctagaagaaaagcttttgaattaacccaattygacaaagacaaagaaaaaaaattaaatgaacaaagccttcaagaaatttgggattatattaaatgaccaaacctaaaaataattggtgttcctgaggaagatgagaaatctaaaagcttgaaaaacttatttaaagcaataatcgaggaaaactcccctggtcttgctcggtatctagacatccaaacataagaaactcaaaaaacacccaggaaattcattgtaaaaagataatcacctgggcacatagtcatcaggttatctgaagtcaaagtgaagaaaataatcttaagagctatgaggaaa

SEQ ID NO: 642411 - DNA, 622 bp, Homo sapiens
tgggtgcagcccaagaagtgtgagccaaagcagggtgaggcatcaccttgcctgggatacacaaggggtcagagaattctctttcctagccaacggaagctgtgacagayggcttcctggaaaattgggacactcctgccctaatactgagcttttccaatggtcttagcaaagggcacaccaggagattatatcccacgcctgactcactgggtccccgcccacagagccttgcttactgctagaactgcagtccaagatcgaattgccaggcagcagcgaggctggaggggggtccgccattgctgaggctttaacaggtaaacaaagcagctgggaagctcaaactgggtggagcctaccacagctcagtgaggtctgcctacctctgtagactccgcctctgggggcagggcataggtgaacaaaaggcagcaggaacttctgcagacttaaatgtccctgtctgacagctttgaagagagcagtggttctcccagcatggactttgagatctgagaacggacagactccctcctcaagtaggtccctgaacccgagtagcctaactgggagacacctcccagtaggggcccactggcacctaatacagctgggtgcc

SEQ ID NO: 642412 - DNA, 619 bp, Homo sapiens
ggcacccagctgtattaggtgccagtgggcccctactgggaggtgtctcccagttaggctactcgggttcagggacctacttgaggagggagtctgtccgttctcagatctcaaagtccatgctgggagaaccactgctctcttcaaagctgtcagacagggacatttaagtctgcagaagttcctgctgccttttgttcacctatgccctgcccccagaggcggagtctacagaggtaggcagacctcactgagctgtggtaggctccacccagtttgagcttcccagctgctttgtttacctgttaaagcctcagcaatggcggacccccctccagcctcgctgctgcctggcaattcgatcttggactgcagttctagcagtaagcaaggctctgtgggcggggacccagtgagtcakgcgtgggatataatctcctggtgtgccctttgctaagaccattggaaaagctcagtattagggcaggagtgtcccaattttccaggaagccgtctgtcacagcttccgttggctaggaaagagaattctctgaccccttgtgtatcccaggcaaggtgatgcctcaccctgctttggctcacacttcttgggctgcac

SEQ ID NO: 642413 - DNA, 619 bp, Homo sapiens
ggcacccagctgtattaggtgccagtgggcccctactgggaggtgtctcccagttaggctactcgggttcagggacctacttgaggagggagtctgtccgttctcagatctcaaagtccatgctgggagaaccactgctctcttcaaagctgtcagacagggacatttaagtctgcagaagttcctgctgccttttgttcacctatgccctgcccccagaggcggagtctacagaggtaggcagacctcactgagctgtggtaggctccacccagtttgagcttcccagctgctttgtttacctgttaaagcctcagcaatggyggacccccctccagcctcgctgctgcctggcaattcgatcttggactgcagttctagcagtaagcaaggctctgtgggcggggacccagtgagtcaggcgtgggatataatctcctggtgtgccctttgctaagaccattggaaaagctcagtattagggcaggagtgtcccaattttccaggaagccgtctgtcacagcttccgttggctaggaaagagaattctctgaccccttgtgtatcccaggcaaggtgatgcctcaccctgctttggctcacacttcttgggctgcac

SEQ ID NO: 642414 - DNA, 582 bp, Homo sapiens
gacatcctaggttcatgtggcttttacaagcaacaccaaggacactttgtggaaggcatggctagcctccaagcagcactctaaaaaaaattaaaacatttattctatcccctttcacacccccaaatcctccattgccagtttttttattgacctattaaacagttattatctrtctaagagtgtcttaaagatctcctttttttgtattttatttaatttttatttttcatagagacggtctcactgtgttccccaggctcgtgtggaactcctgggctcaaggaatcctcctgccttggcctcccaaagtgctaggattacaggcatgacccactgcacctggtcatttttgtattttatactgaaaatgtggtctatggaccagcactagcatcaacatcattgggagcttgttatacatgcaggttcttggtcttcaggttcaagcgattctcctgcctcagcctctccagtagctgggactacaggcatgtgccaccatgcccggctaattttttatattttcgatagagatggggtttactgagaatatgcattttaatgagatttctgggttat

SEQ ID NO: 642415 - DNA, 582 bp, Homo sapiens
gacatcctaggttcatgtggcttttacaagcaacaccaaggacactttgtggaaggcatggctagcctccaagcagcactctaaaaaaaattaaaacatttattctatcccctttcacacccccaaatcctccattgccagtttttttattgacctattaaacagttattatctgtctaagagtgtcttaaagatctcctttttttgtattttatttaatttttatttttcatagagacggtctcactgtgttccccaggctcgtgtggaactcctgggctcaaggaatcctcctgccttggcctcccaaagtgctaggattacaggcatgacccactgcacctggtcatttttgtattttatactgaaaatgtggtctatggaccagcaytagcatcaacatcattgggagcttgttatacatgcaggttcttggtcttcaggttcaagcgattctcctgcctcagcctctccagtagctgggactacaggcatgtgccaccatgcccggctaattttttatattttcgatagagatggggtttactgagaatatgcattttaatgagatttctgggttat

SEQ ID NO: 642416 - DNA, 602 bp, Homo sapiens
ggcctgccactttctgagtcaaatgcagagattctgattaaagaaggcagtgtcaattggagatataatccatataataataatcgtaaacaaatcttaaaccttaattctaaaatatgtccttaaaaaactttgtctttggaatgtttatttaatcatacaacagattctccctcactccaaaaggaagtaggaagggaggaagagatgcgtctcctgtattccagcttgggtagctaggactcagactttaagatttcaaggggaacatcagggatacaaaagacttctcactcttgagctgtctggagcccagcagcaggctgagcttgcagattacctaaatgcaagggctttggtcatagtcatgtacctggttgcttttcatgggtgcactgctgcattttaactaatgcgtgtttgtttttgctacaactgaatatatataattctctctctctctmtatatatatatatatagttttagggatatggatattggtttaggacatggtatagggttgggtgcaatgtgttgcaagaaagaagaggcacagttagataccaaactggtaccaaaggaagagtggcactgattgcat

SEQ ID NO: 642417 - DNA, 622 bp, Homo sapiens
tctgtggaccatagaacaattacacgaagattagaattgcaggaaaagaatctaggctaactccattgccacctcctctttcagaagaaccacactttcctttgcatggtttttccgttactgtcaagtgcctgagtaatcccttttgccttgctcaggaaagtttgatgtgtgartacatagaggcctggccacacaccatggatgcttgattttccttctcctatgatctctcatgaagaaaccttaatcagagttgttgccaggtgatgagatattcacattccctctagcagctgctatttgtgtatggtgtctggtggtgtttaaacacctggttcaatatttacctgtgagggcttcattttgccctctgacctttcttgcagaatggagctgtccagaaaatgataccttggagagtactattaagtatccccaaaagcggagcactcctttccagaaacattctcccaggtagcaagttctgggatgagggccactgccatctttccttggacccttgaagctgtgagtactaggaacatgatggcttaattaaaataagcaggtcccaagtttgtggggaacagaaagaaacaagaaaatgaagtgttttgtt

SEQ ID NO: 642418 - DNA, 632 bp, Homo sapiens
tgttgccaggtgatgagatattcacattccctctagcagctgctatttgtgtatggtgtctggtggtgtttaaacacctggttcaatatttacctgtgagggcttcattttgccctctgacctttcttgcagaatggagctgtccagaaaatgataccttggagagtactattaagtatccccaaaagcggagcactcctttccagaaacattctcccaggtagcaagttctgggatgagggccactgccatctttccttggacccttgaagctgtgagtactaggaacatgatggcttaattaaaataagcaggtcccaagtttgtggggaacagaaagaaacaagaaaatgaagtgttttgtttcctttcactatacccttatatgggttaagagaaaaaacaaaacataacaaggtcctggattctgtaactcttcttttgctctcgtrcttgcaaagtcacattgttatagcacctagcaataaatagtgtttgcagatccaccctttcactccagcaaccccaggctgcttggattcaaccccaatcagcacatggctgatgttattatcctcatttgttgaggaataaatggatgtctagaggagttatttactgggccaagtcat

SEQ ID NO: 642419 - DNA, 579 bp, Homo sapiens
gttaccattaactcattttacagaggagaaaacatggttactaatcatggcttgatttgcccaattatatcaaatactttgaaggatgatggagaagatgcattatacattgttaaaataaaatattctatggtaggaagtgtgtcatggaatttgagaackaggatgtggattcaaataaccctgtctttgaatccttgcttcattatgggcaagtgacttaactcatctggttctgatactagttgctaatcactatgtgagttcctggtcattctgtgcctccgcttctgattttgtaaatggaaattaataattttaaatgatcactgctgtaagaactgaagttaacagcatgtctggcatgtggttagagactcaatgctgccttatccactgggaagtttgttgtcagtgtttacaattccagaacggctctcatagcatattggtttgtctgtatcttggctgggcctctgggagttgaggagaaagaagaactggcttgaagcaaatcacccctgcacgtacgtagtcctggcctgctggccaggtctgagtcctgtgtaattacaatga

SEQ ID NO: 642420 - DNA, 462 bp, Homo sapiens
ccatgagacccagtggcctataccatagcaaataatttgcaatgtttcctatattaccttgaaatgaaatccgtaggtaatagaacctacttacacacacacataactwaaaaaaaaaaaaacctaatgttatcctctaatagtaatatatgtaagaaattactaaaaagatatgtaaaccctagtgtatgattacggtggaagatataatgaagtagtcaagttctttacccttagtcagaatcatcataaatgtggcataaaaatgttgactgatacaagtgtgatatagtggtgactcaaatatgagtggcatttgtgaagagaacaatgattgataaagtttttaaaaatgaagtgatatatgatgtccacagaggacaccaaaaagtcatgcaagagacaagaagagtcttcactgtgtgggtcatccactcattgcagaatatctagcaaccctgc

SEQ ID NO: 642421 - DNA, 603 bp, Homo sapiens
tttttttttctagttctgtgaaaaatgatattggtagcttgatagtaacagcgctgaatccatagatttctttgggcagtatggccatattattgacattgattcttgtaatccataaacaggaaatatttttccaattgtttgtgtcatttatgctttatttcatcagtgttttgtaattctccttrtagagatctttcacctccttgaataaatgtattcctaggtattttatttttttgtggctattacaagtgtgattatattctaaatgggagtaggcagagctaaggaaaaccatcacagattagtaacatactgcaatgggttgaatggcaactttcttcacaatatgtccatgtcttgatctctagaactgtgactatttacttaagtggaagaagagtgaatataagtatggtattcacttaaataccattaaacatggtaacagatgtaattaaattaagaaatttgagataaatagatcatctgagattagtcaggtgaatcctaaatgcattcacaagttaccttataagaaagaaacaaaaggagataacacaaacagaaggggaggaggcaatttacagacgaaggtag

SEQ ID NO: 642422 - DNA, 465 bp, Homo sapiens
ttctcttcttggttggtgttgcccctgaaacccttcctccattactgccaggccttctggttgagcttaaggcctatggaaagaaaacaaacagaagaartcattgctttgagtttcaaaaaattctatcttaaaattagtagctacactttcaactcatataggtaggatttaatatattttataccaatgtccagaatcttgattatagagaaaataaaagagtaacaaagaggatccaagggcaaggtccacagtccccagcagttggtcatagcatgattctcaaaaggccagatggtactagctgtacttaataccagattctggtgaagaacaaccagtggccagttaggctaagctctactctagtgaatactgcaaggacctgaaaatacatcaaaaggcccattttcccccatgtaatgccatgagactgttaccattggagaatttaagagcagc

SEQ ID NO: 642423 - DNA, 465 bp, Homo sapiens
ttctcttcttggttggtgttgcccctgaaacccttcctccattactgccaggccttctggttgagcttaaggcctatggaaagaaaacaaacagaagaaatcattgctttgagtttcaaaaaattctatcttaaaattagtagctacactttcaactcatataggtaggatttaatatattttataccaatgtccagaatcttgattatagagaaaataaaagagtaacaaagaggatccaagggcaaggtccacagtccccagcagttggtcatagcatgattctcaaaaggccagatggtactagctgtacytaataccagattctggtgaagaacaaccagtggccagttaggctaagctctactctagtgaatactgcaaggacctgaaaatacatcaaaaggcccattttcccccatgtaatgccatgagactgttaccattggagaatttaagagcagc

SEQ ID NO: 642424 - DNA, 465 bp, Homo sapiens
ttctcttcttggttggtgttgcccctgaaacccttcctccattactgccaggccttctggttgagcttaaggcctatggaaagaaaacaaacagaagaaatcattgctttgagtttcaaaaaattctatcttaaaattagtagctacactttcaactcatataggtaggatttaatatattttataccaatgtccagaatcttgattatagagaaaataaaagagtaacaaagaggatccaagggcaaggtccacagtccccagcagttggtcatagcatgattctcaaaaggccagatggtactagctgtacttaataccagattctggtgaagaacaaccagtggccagttaggctragctctactctagtgaatactgcaaggacctgaaaatacatcaaaaggcccattttcccccatgtaatgccatgagactgttaccattggagaatttaagagcagc

SEQ ID NO: 642425 - DNA, 618 bp, Homo sapiens
accttcagtctagattaggctttactttgattgaaccactttaggtcttggtagtcattggtttgattgtgctttgtctttaggatgatactggtaaagccatgttttatctcctgttataattcttcaaagaatgctgcaggatcttaatactactttttaaaaaattttgttaaaagctctactgttttctgcagctgatccagatgcaacatttttggcacccattgaatggaaagtttgttcaactgtaatttttctgtcagaattgtgtaagttgaagcaattcagatgtttatggtggtcactattgtttctgctgttaatcatcagtcttctccaattagggcaagaataagattaatttttgttcttgcaaactgatgtggatggtttgccastgtgggctttgtctttcatatcattttatcccttcttaaaatgaattatccatttgtaaagtgctgactttggggggactttgtcccaataaaccttttgtaaatcatcaatgatttcaccaatcttccatccaagtttcacaatatatttgctgttcattcttgcttcaagtttagcagaattcatgttgctcaataggggctgttttcaaactgg

SEQ ID NO: 642426 - DNA, 534 bp, Homo sapiens
ggttgaccaattatcttagcaccatttgttgagtaggctgtcctttctccactttatctttttgtttgctttgtcaaagatcagttggctgtaagtatttggctttatttctgggttctcaattctgtttcattggtcaatgtgcctattttaataccatgatgatttggtaactatagcctcgtagtatagtttgaagtcaggtaacatgtctttggatttgttctttcagcttagacttacttcggctacgcaggttatttttttgtttcatataattttagaattttttttctagttctgtaaggagtaacgatggtattttgacgggaattgcattgamtttatagattatttttggcagtatggtcatactaacaatattgattctacctatccatgagattggggtgtttttccgtttctttgtgtcgcctatgatttctttcagcagtgttttgaagtattccttgtagagatattttacctttttggttaggtatatttctaaatgttttatttttttgcagctgt

SEQ ID NO: 642427 - DNA, 442 bp, Homo sapiens
ggaccaatagacttctcttgttccatcagcatgaaaacagtttgaaggcatgctctgaatgtgctttcaccatttttttcaacctgcagtgatggaaaagtacaaaagraaagagagatattgaattcactttcatgtagtggaaacaagaacataaccaacagtaagaactttggtagataaaaaactaactaacaagccatcaactcacgtacacacccaatttatgattatacaaacatctaatttaagtgtgtgattaaacagaaagttataatttttcttatcagatttaccacaattaaaatagttgattgtcttttagcactgccaatggtgtgaggaatgtatttgtctactgttgatataaattggtacaattatttggaggaggaattgtggtcaatttagcagcatacattgaaatgttaagtgcacatgc

SEQ ID NO: 642428 - DNA, 585 bp, Homo sapiens
tcctaaaaattagatgaatcttatacaccagagaaaaggccacccactcctatttgctaggcatcgaccacccaaactgctggttcagagggttactgagacctagagaattctcaacaatgataattcagtcttcagtcttcttgaaaattaactgtcaaagaacacagtcttaagaaccaaactctttgcttcaaaagccaaacatctttgtttagatggatgtttaggtagcagcaggggttccttatcttgctaaattccttgtattctggggttatttccttctaattacagtaaaggcagaatggcattaatcagcagtgaattgtcatcatctccctcagaggatttatgtggcagggccagccctcattgaacctcacaactgtgaggttcatggtcctgtcactcgttggtaaagcagtatcatccagtggcccattcttggaccactgcactctactgggaaaaaatcctactcttgggacaaaaacagcccaaaatagagaaaggtaactattcaaagagttttttwaaaattaaagaaagaaaagaaagaataggagttaaagaaaaccaatc

SEQ ID NO: 642429 - DNA, 553 bp, Homo sapiens
tgtgtgccccacacctcagtgatgctaagcagtatggagctcccactgttggaacctaaagaagtttactaaggaagtgaagtgacaacctaaaactcagtcccagctttaacttggcttatctttgcatctaagtgaagatcatctctaagactgggatatctacactgaacaagggcttcccaccttcctctgttttcagcctaggtgcaaccatgaaaggaaaggagcaaatgtaatctgtatyataatatattctatttgaacatgattaaattaaaactaattgataatgtcgattaaataataaacactaattaaatactaattgtcagaatgtgtctcctacttttattcactctttataagttttaattactaagttaatgatcaagaatggtactatgttgggctgaaacctaggatttggaatatacccattcattcatctaccaaataatgtttaaattgaatttaaaaactaaggctgaataattatagagcacctgttatatgtctaacactgtgctgaaaaaaaatatatgaagatgcc

SEQ ID NO: 642430 - DNA, 605 bp, Homo sapiens
aaccttcctgtctcagcctcctgagtagccgagactacaggcatgctacaccacacttgctattttttttttttaagtagtagagaggtctcactgtgttgcccaagctggtctcaaactcctgggctccagtgatcctccacctcagcctctcaaagtgttgggattacaggcgtgggccactgcacctggcccatggtgcactttttatcttatttttytttttaactttttaaaggcagggcagtgtggctagaatgagagttgggctgtgcattggacaaaagtatgtgtttgatatgcatgttatctctgtagtattcatttcattgcatttaccagcccctggaaaaggattcactgttctaccaaacacccccaaattttcttagctaaacagaagaaccctgactctcaggagttacagtgcaaccagtcttgagttcccacctgctactgctcctggcctcagccgtggtctttacccctggccaccctgccgctggggagattccacctcagaatctgctaagaggaaagatatgttttttgcattaacagcaaggtaccccacccagctctgctaggacatctggcacatacgg

SEQ ID NO: 642431 - DNA, 643 bp, Homo sapiens
cattattggtaggaatgcaaactagtacagccactatggagaacagtatgtgtgtagtcctgttaagtaagcaacaatgaggaggggtcccagctggggaggacccaggtgaggaagaacaatgaacaactgttctgagacatagctaatcaaacaacctgagggcacaatgacttctatgggcacaatgacttctttcacaggtagccccctccagcaccaccctataaaacttcccttcagcccctgcctctttgcagacagtgccttctctgctgtgctgcccattacaaccttgcaacatgttttcataccttctctaataaatctgcctttctttcctatgactgtcttggtaaatacatttgctgccggtgacatcggccctagctagtcactacccrcaacattttggtgatccaaaaggggattgcttggggacctctcccctactctgtcccttgcctctccaactccactatctcagtgaacagcatccaagtttggagacagctgaaggtcctggccagggctgctccctgtggaccagaaggtcctggtgagaagtcaccacccaatcagagtttgctttccttttcagttttcaactgaaacaaactctagtatccctctggtgacttat

SEQ ID NO: 642432 - DNA, 599 bp, Homo sapiens
taagtaactctgtaaatatataattacatataatttgcattttatattcagtaagatttttcattaacatgaattataaatcatttgggagagcctttcccacaacctcctctattttcttctttggaaaatgtaatcacacaataaggattcttcactttaaacaaaatcagacgcaagcccttgtattaaatatgtgctgattgcctagaatgttataagtacatgattaatgtaagagatattacagaatagtgaaaagtgagcaccttgaaagcagcagaaaaggatttatattctggtttgaccatttatataactattggggccggtttctctatttaaaaaatgtgggtacaccttattatatcacatagttgtagatttgacataatatatctaaggcttagtacttataagttatccacaarttattattttggagacatgctgactttcaagacaattcttaagcataaagactccactgttctaacttctggaaagtgtaacacaatatgtgtaagtcaatcagacaataaatttgacaataaatcattatgtcatttgatatatagaaacatgggtaagtacaaaat

SEQ ID NO: 642433 - DNA, 599 bp, Homo sapiens
taagtaactctgtaaatatataattacatataatttgcattttatattcagtaagatttttcattaacatgaattataaatcatttgggagagcctttcccacaacctcctctattttcttctttggaaaatgtaatcacacaataaggattcttcactttaaacaaaatcagacgcaagcccttgtattaaatatgtgctgattgcctagaatgttataagtacatgattaatgtaagagatattacagaatagtgaaaagtgagcaccttgaaagcagcagaaaaggatttatattctggtttgaccatttatataaytattggggccggtttctctatttaaaaaatgtgggtacaccttattatatcacatagttgtagatttgacataatatatctaaggcttagtacttataagttatccacaagttattattttggagacatgctgactttcaagacaattcttaagcataaagactccactgttctaacttctggaaagtgtaacacaatatgtgtaagtcaatcagacaataaatttgacaataaatcattatgtcatttgatatatagaaacatgggtaagtacaaaat

SEQ ID NO: 642434 - DNA, 599 bp, Homo sapiens
taagtaactctgtaaatatataattacatataatttgcattttatattcagtaagatttttcattaacatgaattataaatcatttgggagagcctttcccacaacctcctctattttcttctttggaaaatgtaatcacacaataaggattcttcactttaaacaaaatcagacgcaagcccttgtattaaatatgtgctgattgcctagaatgttataagtacatgattaatgtaagagataytacagaatagtgaaaagtgagcaccttgaaagcagcagaaaaggatttatattctggtttgaccatttatataactattggggccggtttctctatttaaaaaatgtgggtacaccttattatatcacatagttgtagatttgacataatatatctaaggcttagtacttataagttatccacaagttattattttggagacatgctgactttcaagacaattcttaagcataaagactccactgttctaacttctggaaagtgtaacacaatatgtgtaagtcaatcagacaataaatttgacaataaatcattatgtcatttgatatatagaaacatgggtaagtacaaaat

SEQ ID NO: 642435 - DNA, 599 bp, Homo sapiens
taagtaactctgtaaatatataattacatataatttgcattttatattcagtaagatttttcattaacatgaattataaatcatttgggagagcctttcccacaacctcctctattttcttctttggaaaatgtaatcacacaataaggattcttcactttaaacaaaatcagacgcaagcccttgtattaaatatgtgctgattgcctagaatgtyataagtacatgattaatgtaagagatattacagaatagtgaaaagtgagcaccttgaaagcagcagaaaaggatttatattctggtttgaccatttatataactattggggccggtttctctatttaaaaaatgtgggtacaccttattatatcacatagttgtagatttgacataatatatctaaggcttagtacttataagttatccacaagttattattttggagacatgctgactttcaagacaattcttaagcataaagactccactgttctaacttctggaaagtgtaacacaatatgtgtaagtcaatcagacaataaatttgacaataaatcattatgtcatttgatatatagaaacatgggtaagtacaaaat

SEQ ID NO: 642436 - DNA, 568 bp, Homo sapiens
ttatcctaaattacgttcttatgtcttatttatgcagggatttgaaaactaaaccaagtgcaaatacctgtctcttcaacctgagaaatagcccaaaaaaagaaaggttattatcaaaactgcaagtgaaatctaaaagtctacattatttggttatggccagaaaatgttgtatacctaagagtgcaattttgaactcagcattggctcagatccatgatgtgaagaagtttaccatatattctgtacagaaataagaactgttatttgagatactgtttcaatgagtagctctggccaagataaagaacagaaacacaaaaagactttttttaataggtaaataatagtatcrccaaattgaaaagttcttgggatatatctcttgcaaatatccacagatcaactttcattctcttgtctcttctgcattatgcaattgcaaatgaaatgttctttcattaggcaaatttgttttgttttattttattagtgcattgccacctttttgttctttcatttatacactcatttgtatgtttttataaatatacactaaatacttaat

SEQ ID NO: 642437 - DNA, 612 bp, Homo sapiens
agagcgcctgcattacaggaactcacaacctgagaaaaacacacagtcatatccatcactatattcctgtgtgacaaatggtacgttctgtggagatctatgaaatggaagtaagttctttacaagtaaaaatatgaactttgtttccaccaatattttagtataaaactccttcaaaatctttgccccatattcatgctactcttacttccttgtcttttctgttttatctggccagaaaaaccatctcagctctctcttggcaaggttctgtacacccccaaggccttgtaatatcactctttctgctatggaactttctcttaagctttcaggcagaattttctgttgtgcataacataagttcatgtgcatttacaaaggatagcacttagtctrttttattatggtcttaagcgaagtcttatttgttcactatttcccccattaagctgggggcctctgaagggctggctccttcacttctgaggactataaatatctgtgcattttacctaatgcatatttgcagggaaggcctacataataaatggaggaatttgtgagttttaccaagacttttgtggaaggataaggaggcgaagtgtagac

SEQ ID NO: 642438 - DNA, 584 bp, Homo sapiens
tcagaggttttgataaaggccatcatccagaataatcagctgcagttatgatgtaatatgcaactatgatacaaaacatgcagccaaaatggtggcatgtggttaattgacttagagattttgcaaaattatgtcatatcaagggttcaggtttttgagtaggaaacatgggttcaaatatagttactggtcttacatttatttatttttttaattttatttttattattattttttttgacacagagtcttgctctgtcacccagactggtgtgcmgtggcactatctcagctcactgtaacctctgcctcctgcctcagcctcccgagtagctggaattacaggtcttacaatttttattgccagcatcaagatgaagtagaaagcatcatccctactttgcaaataaggaaaccaaggctcagagaatttgaatattcgaggtcaagatcacacagccaatttaagtctatacttaaaaaaaatatcgagaacatagtgttctttttgtaaatcaggtactgtcctaagggtgttataattatataatctttatgacaattctacaaggtacatatgaatg

SEQ ID NO: 642439 - DNA, 598 bp, Homo sapiens
agtataaagtactcataatgccttgtatatagtagccacttaatatataactttccttcatttctttccaattatattttattttgtgatttggaaatcattcagctgtctcccaagttttgaaccaatcgtaaccccctatatatagcatagagaacgagttactaatttctgttaagctatccctgactctcagcttcaacaggcttaatctctgttgctctatcaaagaataagtagctactgccatggtgatagcttttcaagttgaaggaaaaaaaaggaatgtgctctaatattcttctaagggtttagaagaataattctaagaagggtttagaagaatattagagcatatttctttgaaaagagacaaatctctaagtcatgtgtatctttgaggggttctcctttgttttagaataaagctcatcctccctggcatcttatcaaccttttaagtatctggttccacaaatctctatctgctcatctttagcaagtcccaccactctgggctacttgtattcaccacagyctctcagtctttgcatttttacttttttctctttatctagaactcacttcccatcctctt

SEQ ID NO: 642440 - DNA, 625 bp, Homo sapiens
gaactgagtgtggaaaatactacagtmaactcaaattcttttagatgtttaaaaataaaattacaaaaaaatccttacactcttatttaatagtagcataaagattattttttggatgtaagtatgctcatttgtttatatacaaatgaggataggcataagaatgttctgttctaagaaacactgcatattgttgtgttaaaattgcctacagtattcagtacagtaacatgttttacagtttgtagcctaggaacaataggctatacaatatagcctaggtatattggaggctataccatctaggtttgtgtaaggatactctatgataattgcaaaaggacaaaaatgcctaaggattcttttctcagaacccaaccccattgttaagtgacacataactgtgtttatctatcaaaatacttatagttaaataaataccaggttatcagttctttacctcaatatatttgtcagtaatggtagaggagtaatcatttcctaaaaggaaaatatatttgaagaaggtattaatttggatagactaggttatgatacagtaataaatttgaccctaaatttcaatggcttaatacagcaagtatttcttgctcaatcacagtac

SEQ ID NO: 642441 - DNA, 673 bp, Homo sapiens
gacaacaatttacacaaatatttaatgaaatacagtkgcccagtgagctacaaagtacagggtgctctaaaaggggagggctggaggacttaaccttgtctgatatattcgccaagtttccagagggagtgactctaaggccgagatcccaggaagtagcaatgggcacatttggtagggctatgggccacgggaagccccctgaaaggtttcacatcacaagttacacattggtttcctaagggttttcttgggaaatttgttccaattttctggtaaactccttaatccacgccttggccttatgtttcttcagatttatattgtcccacacaatgaccaatgggtagcgggtcattggatatccaagaaatgttcattttatgaggaagcagaaacgtctgaccacacaactcgctagttgtcaaactttgcatgtaaattttcaggaatgcaaaggccacagtggttctttcctcagcaacttcaaacttagctataagtacctaactggcagtggtgtggattgccgtaaataatgaaggattctctcctacattatcctacctcaaactcaaaatattagttgttttgtaactagatttgtccactagcaacagccagaagaagaattaaaagaggaatgataattgaacttctactcttatagcag

SEQ ID NO: 642442 - DNA, 673 bp, Homo sapiens
gacaacaatttacacaaatatttaatgaaatacagtggcccagtgagctacaaagtacagggtgctctaaaagkggagggctggaggacttaaccttgtctgatatattcgccaagtttccagagggagtgactctaaggccgagatcccaggaagtagcaatgggcacatttggtagggctatgggccacgggaagccccctgaaaggtttcacatcacaagttacacattggtttcctaagggttttcttgggaaatttgttccaattttctggtaaactccttaatccacgccttggccttatgtttcttcagatttatattgtcccacacaatgaccaatgggtagcgggtcattggatatccaagaaatgttcattttatgaggaagcagaaacgtctgaccacacaactcgctagttgtcaaactttgcatgtaaattttcaggaatgcaaaggccacagtggttctttcctcagcaacttcaaacttagctataagtacctaactggcagtggtgtggattgccgtaaataatgaaggattctctcctacattatcctacctcaaactcaaaatattagttgttttgtaactagatttgtccactagcaacagccagaagaagaattaaaagaggaatgataattgaacttctactcttatagcag

SEQ ID NO: 642443 - DNA, 673 bp, Homo sapiens
gacaacaatttacacaaatatttaatgaaatacagtggcccagtgagctacaaagtacagggtgctctaaaaggggagggctggaggacttaaccttgtctgatatattcgccaagtttccagagggagtgactctaaggccgagatcccaggaagtagcaatgggcacatttggtagggctwtgggccacgggaagccccctgaaaggtttcacatcacaagttacacattggtttcctaagggttttcttgggaaatttgttccaattttctggtaaactccttaatccacgccttggccttatgtttcttcagatttatattgtcccacacaatgaccaatgggtagcgggtcattggatatccaagaaatgttcattttatgaggaagcagaaacgtctgaccacacaactcgctagttgtcaaactttgcatgtaaattttcaggaatgcaaaggccacagtggttctttcctcagcaacttcaaacttagctataagtacctaactggcagtggtgtggattgccgtaaataatgaaggattctctcctacattatcctacctcaaactcaaaatattagttgttttgtaactagatttgtccactagcaacagccagaagaagaattaaaagaggaatgataattgaacttctactcttatagcag

SEQ ID NO: 642444 - DNA, 483 bp, Homo sapiens
gtcctgactgaaagagctgagcttagtctctatttggaaaggtcagacattaggaaaggaatatggactctgatggttcctaaatccccatttgccacctcctggagtggaaaacattttctgaggctgaaatgggattacaggtgtgaaggggagaygggtccctgataaggaagaagcactggaaaataacatctaaggttgggatatcagggggacggtgagggagatggagtaggcataattgaaagtgaaggaggtctgtcaggggaagaagacctgacaatcaatccagcaaggtgaagagaacaggagagtaaaagaaataaaagaagggtattctaaaatgtcaagagtcagtagggccaaagaatttggccaagcccattcaatgggtttgacagagattaggatcccaagagagagtcatgaattcctggacatagggaacttcagaccacttagaagagttgcaacaggagg

SEQ ID NO: 642445 - DNA, 483 bp, Homo sapiens
gtcctgactgaaagagctgagcttagtctctatttggaaaggtcagacattaggaaaggaatatggactctgatggttcctaaatccccatttgccacctcctggagtggaaaacattttctgaggctgaaatgggattacaggtgtgaaggggagatgggtccctgataaggaagaagcactggaaaataacatctaaggttgggatatcagggggacggtgagggagatggagtaggcataattgaaagtgaaggaggtctgtcaggggaagaagacctgacaatcaatccagcaaggtgaagagaacaggagagtaaaagaaataaaagaagggtattctaaaatgtcaagagtcagtagggccaaagaatttggccaagcmcattcaatgggtttgacagagattaggatcccaagagagagtcatgaattcctggacatagggaacttcagaccacttagaagagttgcaacaggagg

SEQ ID NO: 642446 - DNA, 602 bp, Homo sapiens
ctttaaaaataattgtataacaaccacgtagctataattaataatagttcacatattcaaatggattatattattcaaattggcatttgctttttagtatttttagagatggttactcaaacatcccaaaagtcatctttgaaagagatctcactttaggagccagaaactttcatttcagagaagagtaattattaaaaagttttcttattaataataagcagactgctgccttcctataatttctatgaattatatttaattatgatttttagaactatcaagtgtgattagatgtttctccccacatgaggtcatttcagatagctcaaggtatttatttttttttacccacatatcctaaaatacacttccctatagcccaaagagctctcytcctcttcttctaatatagctggagtttagagacactgtttcatctgaatgtccataaggttattagctccatgaggaacagaccctctgttggcatcattttatctcaaatatctagtagaatatctgacatattttagaggctcagtaaatatttgtaacagaaatgaataaatgtctgcctctcttgtcttaaacccataaaa

SEQ ID NO: 642447 - DNA, 569 bp, Homo sapiens
atgaggaacagaccctctgttggcatcattttatctcaaatatctagtagaatatctgacatattttagaggctcagtaaatatttgtaacagaaatgaataaatgtctgcctctcttgtcttaaacccataaaaatgggaaaaaaaaaactccatgagctcctgagtgacctgatcagttttaaatataatttactcatttactcactcatttaacaattatttttgagtgcttaaactaggattccaggacacattctctgtcctgctgaatatagtgatgaataagagagacaaggctcctgcctcaaagagaccacatctcccatcattttgtcattatggttctcttaatggagtcaaaatttatagatatctattaatcctactttattactcaagtcaaccaaatccataactatttttcttgccatagctatttttttttttkgaaactggctctgttgcctaagctggacaacagtggcatgatcatagctcacaagtgatcctcctgcctcagcctcccaagactataggagcaaaccaccacacctagctaatgtgct

SEQ ID NO: 642448 - DNA, 569 bp, Homo sapiens
atgaggaacagaccctctgttggcatcattttatctcaaatatctagtagaatatctgacatattttagaggctcagtaaatatttgtaacagaaatgaataaatgtctgcctctcttgtcttaaacccataaaaatgggaaaaaaaaaactccatgagctcctgagtgacctgatcagttttaaatataatttactcatttactcactcatttaacaattatttttgagtgcttaaactaggattccaggacacattctctgtcctgctgaatatagtgatgaataagagagacaaggctcctgcctcaaagagaccacatctcccatcattttgtcattatggttctcttaatggagtcaaaatttatagatatctattaatcctactttattactcaagtcaaccaaatccataactatttttcttgccatagctatttttttttttggaaactkgctctgttgcctaagctggacaacagtggcatgatcatagctcacaagtgatcctcctgcctcagcctcccaagactataggagcaaaccaccacacctagctaatgtgct

SEQ ID NO: 642449 - DNA, 603 bp, Homo sapiens
acttattgttgttattaaaccaacatggaaattgagctcagaaatatcaggggacatgtccaaggtatmaaaacttgatagcaatgaggcttcaatctggtattataattcaaaatcaatagtctatctgctatttattaaaattgaattaattagtttctcttttctcttctcctatgacaacatatgaaatattttatcctctacatggttccacaaagtttcttttaattgcctatggaaatgagtctgaataattgattgggatttcagtttttatttctactgctaaaattgtgttaaatactgaattactgaggtgaaacattattgttctactgttaaataatagaaatatgcatgttttaggtggttgatatactttgtgtgtgtgcaaatgtatatttctcagtcaaaaattcataatggtttttatgttagaataaaatgaaaatttaccagtgtgcagattcccaggctgcaatcaagaactgctggatctctgttttcaagagagaacttcatcatgttaaaggttattgttttatcaatatctggtaagatttatttcgcttgatttttttttaacaaaaatgtttataa

SEQ ID NO: 642450 - DNA, 552 bp, Homo sapiens
ggttatgtggtaaaagtggagagaacacatttggattggagcataaaagctgaattatttagtgcatatattaagttgaactacagaaaactgttattgtggtggacaaagatggtctaattttggtaatttcatatggttcaacctaatttaaaatataacatacatcccaattggtttgccatgaatgtgtgtcacgagaagtatagagttcttatgcttttaaaggtctcttttgactcttctgtatttgcatctgaagtgatgcaaagaattccagcttcaaagtcagactggcaatagatttcaatcctgattctataaattaccttggtcaaatcgcttaatgcccctaaactcagtttatttaattacaaaatgagaatcatagcactaacttyacagtttgtggagattaaatgagataatcacatataaaatttctacccatgtctaacataaaatcggtcttcagaaaatgttagctgtagcattgtagcagaagttccaatcgtgattgaaaaagtttttgacagaaaaattgaacaagtc

SEQ ID NO: 642451 - DNA, 629 bp, Homo sapiens
ctctgtgcacaatgctcttggttaaactacactgtaattgacaatatattagtcataatccataaatttgaaataaagtctttgaactttaaacttaattcaacaatataggtttagacaaatacactgttctctgaggagacagtttgactgaatatttayttaaatatacattattcacttttgaagcagccctggtttctaggcaaaaactttttgaaatttctttgatgttgtagattgattctacataagaaacagtaattcagcaacaacagacttgattgtattatatatattatggatataaagatacataagaaaataaaatataactttacactcaaagtgatagccattttgtaggcaaaaaaagaaatacttaccaaggctaacaaaatcccctctctgtggctcctgattcccttctcattgctcagcacacttttccctcttaaatttcttctttaatccaatcaccagtcttgattacctttcaccagctttcagtgtacagatcattcttagaacagtggctctcaaactttggatctcagaacaagtttatgcttttaacatttttgaggggagaggcttcaagatggctgactagaggcatccagtcgtca

SEQ ID NO: 642452 - DNA, 403 bp, Homo sapiens
acaaagaacactggaatttagcaaggaagtgataatgaacttgtaaggcatgaaaggagggagaagtgaggcagccaactggccaagatttactgggagctcagagaggcttcacaatgtggggaaagggtaagtgagagatacccagtggtctacagttccattacagactcctgtaatcctagccacaggagagctccttggtcctctagtgcccttagacttgtatagagagctgcctagatctgtgtaacagcatttttccaaagagggagttcatgctggatcytacacactacctggacctaaagagctgcagcatggcaccatttggagaggacagccctcactatactacattttaccctgggtaccctggggcccaatataccctattttaccc

SEQ ID NO: 642453 - DNA, 403 bp, Homo sapiens
acaaagaacactggaatttagcaaggaagtgataatgaacttgtaaggcatgaaaggagggagaagtgaggcagccaactggccaagatttactgggagctcagagaggcttcacaatgtggggaaagggtaagtgagagatacccagtggtctacagttccattacagactcctgtaatcctagccacaggagagctccttggtcctctagtgcccttagacttgtatagagagctgcctagatctgtgtaacagcatttttccaaagagggagttcatgctggatcctacacactacctggacytaaagagctgcagcatggcaccatttggagaggacagccctcactatactacattttaccctgggtaccctggggcccaatataccctattttaccc

SEQ ID NO: 642454 - DNA, 584 bp, Homo sapiens
cagttctagtgtttgatagaacaatagaatgactacagttaacagcaatatatattctgttttaaagtagaagagaagatttgaaatgttttgaatgtaaagaaataataaatgtttgagattatggatatcctgaatacctgacttgatcattacacattccatgcatgtatcagaatatcacatgtactccataaatgtgtacaaatactatatatcgctttcaaaaatgtaactaaaaataataattgagggaaccctaaagagcttttggttatatgagttacaaagttttgtgatagagctgattttgtactaactcatcagagctgctttttaaaatttcaggaaattttgttagaagtttgttcaacaaccaggtcacaaattacattctatacaattacaattaagtaaattttattaatacaaaaaccccacaaaatattccaaaaatagtaagatgatgtcatatatgctggggtacaaaaaaaaaaccccagkgttttctatgagtttagaagagggccagctaaatcagcagagacatgaggtgatcaaaaaccttttttcaaagcagtggg

SEQ ID NO: 642455 - DNA, 643 bp, Homo sapiens
gatcttattttaagtttatttggaatttgttgttttatggtatgaggtagggattaaatgctttttatttgaatactggttaaccaactgtcatagcaccatttattgaataaactatcatttctcaagtaaattcaaattgtccttggtacttataattctttggctatttccatagaaataagttgagagatggattaggtgggtgaataggcccatgtgttatatttgaaaggttaaattgggtctttgatatccaagttgagctagatctttgatttatatatcaaataggaaagctgaaagtatatcacctgtgctagcagataattgtaaaatctatggcaatttcactggaagtgtaccctgatgtattaccatatccaaagtttggagatgagatgcttagctctttyaactaggaaacaaagggtgtcaacagctagttttttacagttcgctgtacgtcctgaagcctgagaagactttgtgtcacctgtgagtcctaagaatgagtaaatctacaagatgccccttcttgtattttagtgccagctgtttgcagaacatttgtgcaacctccagtctttatcatccttttagatcacctgaaaataagggcattttaggtattttagaggtg

SEQ ID NO: 642456 - DNA, 551 bp, Homo sapiens
tgagaaatgtaggtctatcatttgaaccctagtctcactgtttatgattgtgtcctacatctaaagcttaatttccttatgaaaaatgaagagtaacgtcacccatttttttgttgtgaagtttaagagagacaataaaaggcctggtgcggtggctcactcctgtaatcccagcactttgggaggccgaggcgggtggatcacgaagtcaggagatcgagaccatcctggctaacatggtgaaaccccgtctctactaaaaatacaaaaaaaaattagccgggcatggtggcgagcacctgtagtcccagctactctggagactgaggcaggagaatggtgtgaaccaagaggtggagctttcagtgagctgagatcatgccacagcactccagcctaggcaacagagcgagacactgtctcaaagaaaaaaaaaagagagagagagagacaataaaaagcctgaagcacagtgcaaaatatctgttagctctttttkgtatacctagactatgcattcttagtttgtcccagcttcaaagccactgcca

SEQ ID NO: 642457 - DNA, 609 bp, Homo sapiens
taagtaggaagaaaaatagtgactatcttggatggaatctgtgtgttaggcraggcaacctcaattatatttaatatttggaagtgaacaacttaagattccctagggttaatgtgtcatgaacactgctatactatcagaatgtaggaccaaatgtaatgcatagattggtgcagaaaaatcttacggagagaaattaattaggacactgctccagtaattcctaggagagaagaatctgagtcatcagtgagattgaaatgaaggcagtgttgggaggagcagaaagcctggaagaggtgttgaaatatttggtaaactgattggatgtgaagcaatggagacagaaaggagtcaaagatgactgaggtttaatatatgagtgctgactttgcctagagaagaacacaatcctttacaccaaaaccgtgttcacttagcctttttaatggagcagtgataacatttagaataacgttcactgaatacttacaaggtactagttcttcagacatgttatcctattttcttcctccaaaatcataaaaagtgatatcttctaattttagaaaggagaaaaccctatggtacagtaatttcctgaagaac

SEQ ID NO: 642458 - DNA, 609 bp, Homo sapiens
taagtaggaagaaaaatagtgactatcttggatggaatctgtgtgttaggcgaggcaacctcaattatatttaatatttggaagtgaacaacttaagattccctagggttaatgtgtcatgaacactgctatactatcagaatgtaggaccaaatgtaatgcatagattggtgcagaaaaatcttacggagagaaattaattaggacactgctccagtaattcctaggagagaagaatctgagtcatcagtgagattgaaatgaaggcagtgttgggaggagcagaaagcctggaagaggtgttgaaatatttggtaaactgattggatgtgaagcaatggagacagaaaggagtcaaagatgactgaggtttaatatatgastgctgactttgcctagagaagaacacaatcctttacaccaaaaccgtgttcacttagcctttttaatggagcagtgataacatttagaataacgttcactgaatacttacaaggtactagttcttcagacatgttatcctattttcttcctccaaaatcataaaaagtgatatcttctaattttagaaaggagaaaaccctatggtacagtaatttcctgaagaac

SEQ ID NO: 642459 - DNA, 592 bp, Homo sapiens
atgtggtcaaaggtggaattaagagtttccacagttcacattttgagtaaaatttatattttttaacctgtaaatatgtaagaaatttaaataattgaaaaatgtatgctttagattttatgtactttcacttcttttccatcagcatctaatccaccagactgtcagaaatagaaatcacctaaaaatcatttaaagtaatgcatacttataaaaatagaaacctataaattgaccctctctgaaaagaagaatatagatttatatttgtttatatttacatgtagaaataattggatacacaaaaataaaaaatatttacatatgataactaattatatcagttgtttctccctgagtcataaacattatcacmaaaacagctgttatttcttttttgtgtgtttatgtgcatacatataatgcatgtttatatgtgtatatgtggagagagattatacatatacatatataatctaaataattatatgcatattatttttcctgaaaaatatttatattaggtattgtttttctcttaattatattatgaaaataattccatgaaaatacttccaaggcagtgaagaat

SEQ ID NO: 642460 - DNA, 505 bp, Homo sapiens
cactatgtgaacctgcagtcctacttctgggtatttatctaaaggaaatgaaatcaatatgtttaagagatatctgcacccccatctttattgtagcactattcacaatcgacaaggtatggaatcaacctaagtgtctatcaacagatgaacaaagaaaatgtggtatatatacacaataaagtactattcagtaataagaaaaagaatgaagtcttgttatttatggtaacatgaatgaacctgaaatattcaggtttttaataatattcatgaataatattaatgatcgaaccatgaatagtaagttaagtgaaataagccagatacagaaagaaaaatactacatgrtctcaatcattagtaaaatctaaaaaaagctgatcttggagaagtagagtagaataatggttactagaggctgaggggggcagaggagaggggatgatgagattttcattgttattattggcactgttatcataggagatgacaactccatgtt

SEQ ID NO: 642461 - DNA, 606 bp, Homo sapiens
tttatgagaaataaagtgagattattaatatgctttttctgtacatttgacacatagttaatgttcaaaaaatatgcttattatattactaatttttcctgacgggtgtcatcaaatatttttagtcatttatcatgattgagagaggctttgtgccaagggaaaaaatctttccttccttcctccctcccgccctctctctttctttcttttctttctgcctgtctcactctgtcaccaggctggagggcagtggcacaatctcggctcaccacaacctccgcctcctgagctcaaccgtgtctcctgtgtctcctgcctgagcctaccaagtagctgggactacaggcgcgtgccaccacgcccrgctatttttttatatttttagtagagacggggtttcaccatgttgtccaggatagtctcgatctcctgacttcgtgatccatccccgtcagcctcccacagtgctgagattacaggagtgcactaccgcgcccgacctcccggtttcttatatgtcactttttagggagaaagatattatcttggtccacttggactactgtaacaaaataccttagactggatggcttctaaacaacg

SEQ ID NO: 642462 - DNA, 639 bp, Homo sapiens
ttatgatttgctcttggcctttctctgggacacaatatgtggctcatagttctgaattagaggagaaagatggttttagcattatagttgcaaatataaagcatttctctggatttagcctgttctttaccagggagcttgaagtacctaaggaggaagtcattacatattaaactcagaataaaacacctaaattccaggacatgactaaagtgtgttggtgacaaaaacttctggaaaactaactctgccaattcagaaaatgttactggcctcataaagtaatggtacagatctatagacaatttaaattgccaaggtgagcaaagattacatttgagagtttggggatgactgggcatggtggctcacgcctgtaataccagcactttrggaaggcaaggtgggcaaatcacctgaagtcaggagttgaagaccagcctggccaacatgatgaaaccctgtctctactaaaaatacaaaaattaactgggcatggtggcgggcacctgtaatcccagcaagagtgaaactccatctcaaaaaaccaaaaaaaaaaaaaaaaaaaaaaaaaaatttgggaaatttgggggaaattttttattgttggttaccccagtgatgtaaaagtttcatttt

SEQ ID NO: 642463 - DNA, 578 bp, Homo sapiens
ctcactgaagccataacatgctgatattctaaccacaagcmaactcagggcccagacctttgattctaatattaattgctaaaaaaaaaaaggaactgaggcaacttggtaaaatatcaaatttctggtgtggagaatgtaatagacaagataatactagagtatcttagagtatcttatagctccagaaagtaagaaatgattttaaaaatcccataatgatgggtgtatcaaaaagggacataagtgttctcaatggccaaagctggagcaatttgtgcaacagactaagtaaaactttagtgttataacacaaagtataaaataaatataaattagtccagttatatttaactgtttattaaacagttcatttatattaaatagatttgattaaagtatactgaatttaattacatttgatttaaatttatattaaataaataggagcaaacagacaaacatccaatgcaaaagaattccaaataaatttgatactccactctcaagaaatggagcatgactctccactcctttagtgtgggttgtgcatggtgacttttctcccaagaggacag

SEQ ID NO: 642464 - DNA, 578 bp, Homo sapiens
ctcactgaagccataacatgctgatattctaaccacaagccaactcagkgcccagacctttgattctaatattaattgctaaaaaaaaaaaggaactgaggcaacttggtaaaatatcaaatttctggtgtggagaatgtaatagacaagataatactagagtatcttagagtatcttatagctccagaaagtaagaaatgattttaaaaatcccataatgatgggtgtatcaaaaagggacataagtgttctcaatggccaaagctggagcaatttgtgcaacagactaagtaaaactttagtgttataacacaaagtataaaataaatataaattagtccagttatatttaactgtttattaaacagttcatttatattaaatagatttgattaaagtatactgaatttaattacatttgatttaaatttatattaaataaataggagcaaacagacaaacatccaatgcaaaagaattccaaataaatttgatactccactctcaagaaatggagcatgactctccactcctttagtgtgggttgtgcatggtgacttttctcccaagaggacag

SEQ ID NO: 642465 - DNA, 533 bp, Homo sapiens
ttgtgtcattatcttataagatttgactgtaaaaatattggactgcttatgcaaattaataacactgtattttggagataacctttgtagaaaaatcctataaggcagaaagaacataaagtatggggattggttgataagtggaattgtattgttttaaaattgttctgttctttgttaaatagcgtataacttgaaagtaggcagtgataatgaagattcacattgtattctaaaaagcaacacacaagcaaatatatgcacatacaggcatacacaagtacacatacacaacagtagagttaraatacggaagatacaatagaaaagtaaaaactatgagatttacctagtagaaaagagcaaaggagaaaaagaaaaaaatatgatcccataggatgaatagaaaacaatccccaatatgagagacttaaccatgtcaataattacactaattataaatcaactgaacttctaacaaatgcaaaaatcatcagactgagtcaaaatgcaagatcttcattctttcctgt

SEQ ID NO: 642466 - DNA, 479 bp, Homo sapiens
tcggggctgtctcagaatccctgacataacattgtccaggttagctgggtagtctggttggagggatcctcaaatgaaaacaaatactgggagttgaggtataatggtatgcaaaggaaggcatcctttaggtccaggactgtgaaccatttagtcccctcaggtatttgagctagtagagcatatggagtgggaaccactgggtgaactggaaccacagcctcattaatgaagtggaggtcctggaccagtctccattccttcttgggcttttatactcccaatatctgggtattacaagggctatagcagggtttgaggaggcccttcaaccttaaatatcgatgatggcttccattcctttcctaagttctggtttcaggagatactgtwtctggttaggaaaggaggtgggatccttatgatggatccagaccactatggcagttgtgtgtggctcggccaattttccctcgaat

SEQ ID NO: 642467 - DNA, 504 bp, Homo sapiens
acagtggtcacaaaagcttataatggagcacaaaaattcctatggcctagtaatgttgtagctactgtaacatcacagcgcaacacatcactcatgttttggagtgatgctggtgtacataaacctaccacactgctagtcatatacaagtatagcacatacaattatttatgaggactataaggcatattaaagtattgagatattatttgatacatttacataaaaactactaatatctcacataacacagagtaaactttggtaaaccttgtcctcagagaagtcatacagtgtcttccatttgctcttctgaatatagaatccatgctgcaggcatcaatattctattaatttatagtggcactagaagtaattgtaaaataagtgctataggtcattctggtaatatakttctgttcaaagtcaagaacactgactaatgatgaaatgcctaaagcaaacatatattgttaaaaatcatttaagttttagaaaatgaca

SEQ ID NO: 642468 - DNA, 608 bp, Homo sapiens
tgttaatattgaggcctctcatatattttctgtcctgctcagagctgattgtaaactgggaaggacagagcctaattatcaccctagtcacttaaaaaaaaaaagttaatcatgacaataattkgataaataatagatatcaaccttgtgaaattatacttaaaagcataaaaataagcatcatcctaattttagcacctagaagtaattattttgacttttttagtccttttttgtacaaatatatgtacatgaagttgggacaatagcatatagggcattttatgtcttttacatttaatgttacactaatagcatttatccatatcataacattgaacatttttggaaaatattttagtggctatgaatattccatgattgggaacttatttaagcagatcttcattcaaatctaggctatcttcaatttcctgctttgaataatgctgtaatggatgtgcatgtgtataaacccttgcctttttttttttttctaactgtttcattaggattgattttataaatgaaactgttgagtacaagggtatggacatttttaagtctctggatacaaattgtcaagctgttttggagaacaatgctat

SEQ ID NO: 642469 - DNA, 608 bp, Homo sapiens
tgttaatattgaggcctctcatatattttctgtcctgctcagagctgattgtaaactgggaaggacagagcctaattatcaccctagtcacttaaaaaaaaaaagttaatcatgacaataattggataaataatagatatcaaccttgtgaaattatacttaaaagcataaaaataagcatcatcctaattttagcacctagaagtaattattttgacttttttagtccttttttgtacaaatatatgtacatgaagttgggacaatagcatatagggcattttatgtcttttacatttaatgttacactaatagcatttatccatatcataacattgaacatttttggaaaatattttagtggctatgaatattccatgattkggaacttatttaagcagatcttcattcaaatctaggctatcttcaatttcctgctttgaataatgctgtaatggatgtgcatgtgtataaacccttgcctttttttttttttctaactgtttcattaggattgattttataaatgaaactgttgagtacaagggtatggacatttttaagtctctggatacaaattgtcaagctgttttggagaacaatgctat

SEQ ID NO: 642470 - DNA, 599 bp, Homo sapiens
gtggtttgtggcagaactagagttagaactcctggcttctccagggtctgcttctgtcttctacatcttatttcctttaatatgctctttatttgtttttggcatatgactcttttctctttgactttgcaataaaactggtctcatgcattggtaaggccaactgctgctttgaaccctttagacaggaaactgaaaactagaaagcttaagtgactttcccaaggtaacacagctggtaaataagctatagggtgccatgaaaaagactaatggtaacttgtagtcatagcaaaaactttttggtgaaatatttccaactttaagtcgggaatttattcattcaacttagaattatttattaaatgtcagctacatgccagatgctatatgggtctgggatgtaaaattgaatgaaatagaatctctgaattcgaaaagctcaatgtctagtcacagtggaaaacataagacaagtaaataagcaattgcatttttgaatcctgctcctaatgaaatgcaaaattagcataagcttctagtctcctctctcaaagtcaactctgggtggaaayctaagtgggaataaaaaaattata

SEQ ID NO: 642471 - DNA, 588 bp, Homo sapiens
gactaagcttttggtatttatgagtagaattctttacagtcttctgattcagagctgtatgtccaaaagaaggaaaaaataagaaagaactaagtgaaaaaaaaaaaaaaaaaaraaaatcgaaacaaaacatttttgccattttggcaagttgtaataaagtccttatatatccgatttgaggagatgagagggatgttgtattttacatgtcagagacagaggtttattttcctacttaacatgtgtctctatggataatgtctccctgtagactgaatgctattctttccttatatgagttgtttaattggactgattataaaattgcataaaatcaccattaaacagaatattaagtaaatctatacttatgtgcctgacagcaaagattcctccaaagtctattatttcatagctgttttgccatctttttctcttctgctgcttattttctgttaaagttagttcttatcctctggaaaaaattgttacaatattattgcgtaactaatatttattgaatactctgtgttcacagcatgtaaaaagcaaatctgagaggccaatagagtcaatttgtagcat

SEQ ID NO: 642472 - DNA, 493 bp, Homo sapiens
gcctggtacacagtattgttggaagatatgttaatcaaagaatatcatagctaccatttactatgttttatataactgttcaaccacatggagtacttacacatgtaaattttataggtgaagaaggtgaggtttagagaagttaagtaacttgcataaggtcacacatttagtaagtagcagagccagggccattttgtttgacttcagagcttgtgcttttatctccaagtaattatactacctcacatatgccctaatgatctgatcttctacctcttccaagcccattctgcactgtatacttcatttccctcttcgaggtctctttcctgtagatttttttttttwacaaatgttactggatatttctcagttccatacttatcactaacacctcctagtcaccttaccatttttcaaagtggtgtatttcaatgtaatttcaaatatacagaaaagttataagaatagtagtcactttacccagatt

SEQ ID NO: 642473 - DNA, 575 bp, Homo sapiens
ctgcttcgtcactgtgggtgacagagatataattaattgaggctgactgattctacactgacacatggagttgccagtgagattaaggtactagcttgttaatgcatcctttattagctaccttaccttccctgccttttttccttactgcccttctgatgctttctgggatcatctctgaaaaaaaccatttaaacataaatgtgaatacttgtttgggggcctcttcttggggaacataaactagacagaattgttaagcccttataatattcattgttactgactttaatagtaatacatttagtgttaacaattccatgaagcatgacatagaatgtgatttcagatagattttcaaaatagctttaaggaaacattcttttaatttagttttatcacatagtttttttgtttttccctatccttctgagctttttttttkggttcagagttggtacattgtttaaccaccatgtatcaccaaaaaattataaaggtgcttccatctcctagagaggattagaattatagacgggggcaagaaagaatgccagtcatactttaatctggga

SEQ ID NO: 642474 - DNA, 618 bp, Homo sapiens
aagtgagatcatacagtatttgtctttctgtgtctggcttatttcacttaacataatgctttccagattcattcatgtcgttgtaaatggcagaatgtccttcttttattatagctgaatagtattctattgtgtatatatgctgcattttccttacccattcatctatcagaggagacataggtggtttctgtatcttggctattgtgaataaggctgcagtaaacatgggaattccagtatcactgatgatttcatttccagactggtgtttttaacctttgctgttgctctgtggggccttacataaaggagcagactcactcaacctccactgccctgcaytggggtccccaccctgctaggccgtagtgagggaggagttaacataaggacgaaaaacactgtaacgtaagacatgcaaataaatgatagcagtgccacagtaagcttagaaggagtataacaagcactaaggaccacagagaaaggaattattcacttttggaggagaggggaaggctccccaagacaagatgatatttgaggggttaataacagctatctttgctggaatctgtctagctcagctcactgttgccttgaagtaacaataaa

SEQ ID NO: 642475 - DNA, 607 bp, Homo sapiens
gcaacattcaagatttatggctttagtgaaaacaggaaggcttatgtgattcgcatagactcaacttcagaaattgaggagaagggaattatcagtccagcgggttacaggtgtcacatcctgaacaaatccaccatggttagaggttgggtcatgtaagaacacagcatctcatgtggaactgcatgaattggagggagggaagtatggctctcctagaagggcagcacactgttgagatgacaatgctatagttctctgmcacagcccctggaataggtgcagcagatccacatgcagggccttctgagggacagttgctgcgttttcctccacacggccatactttctgtctgcagatgattgtgcattgtgcattgtccaaaggccagcacatccctatacttcataggtcatgcactggtccaaaaggaaatcatgggctaaatcaaattcttttctaggaagtttggaattgggaaacttggagattgacggagtaagcagcggagcagaggcagaaggggtgctttgggagatgacaccaggtagacttgggctcagcagggtagccaaagccacacatagctcagacatgggaggaggc

SEQ ID NO: 642476 - DNA, 537 bp, Homo sapiens
ttcacagaacaagcatttcagtagtccctaatctacaccaagcattcattacacctcggctcccaaagtgctgggactataggtgagactccgcgcttggccttgttttctctactttgtatactgtcttctccactggtgcttgccctccttgcctcctaaatgcattgagtctctcttttctaaaataagagrggaaagaaggagaagtcacggtcatcaacatctgtgggccttgtttcctcagtggcactatggttttccctcttgtaagagtagcttttacttccagtttccatttcttaccgaatgatctctgtgacaaacactgagtggccacccagcctccccctgttccttcctgacaggattcctaactggttcaggattcaggtatcaggtatccatctgcttcaaggcagactggttcctcccaggcccaggcatgaatcttgtttctttaagcgagcaattcccaaactttttggtctcaggacttcaactcttcagaataccctcttcaatgaccttttgttt

SEQ ID NO: 642477 - DNA, 179 bp, Homo sapiens
aaaggaagctgctcagtggcatgagcctggaacctgtggatacagagacagaggccagctgtcatgatagaagggagggtgagasggggtggggtcagagatatgatccttatgaaagggagcagccactagttcccagggcttcctggattcctgctggcattctcagtctcattctg

SEQ ID NO: 642478 - DNA, 609 bp, Homo sapiens
catttcccttggcaaagggccaggctgatcttccacctataaaaccctgaagacagcccaatggataagggtctaaaaagaaggatcaaaagttctcgattaataaattgtcatatccaactcttactgccaataatgatgccctttccatccaaggccagcagcctatcgaagttttctttcccacttacagacacagatacatctggggatctttccatgtttaacttttctggaacctcttagtttatctcacattcccatctccgctcttctgctttggttatatatttttgggggttgtttgtttaccatttttattgccaaactcactttcaaaacccatcttaaaagttatttttcttgttgactcttgctcatcccctcccactcccagaactggtctcatctggaatttaggccagttaaagacaccaragaacttgtgcatagggtgagtgtgtccgccatcacccaaatctgaatacatttgaaactgaagggaggtgctatttataattaacttaggacctcggaagcaaattgagactgccttagacaactcagaaaagatggtcaccctcttacatggagatgcttactactatt

SEQ ID NO: 642479 - DNA, 562 bp, Homo sapiens
tccaccactgcactccggcctgggcaacagagagagaccctgtctccaaaacaaacaaacaaacaaaaaagattgctccctctttttgacagacctaaaaataattttactcctttaccctatccctttcttctcacaagagtcattattacgtgactgttttttccattcccaaaatcasgatgagattggggattggaggtctgtgccagaaacagactagcgtggaaccacagtggaccacgtggggtcagcaaagacctaatgttggatcccctttttaagcatccagcaggcttgtaggcttctcggggaagtgctgcaggtggagttgggggaggggagtgtgtagcccaggaactgaagggacaaatgggaccagctagaaaggagtagagcaagaagatggaaaggcaggactgagtgggagcagagcctcgctggaataccctcactgtcagcaaagtggcttttcagaggagcagcatgcgagggacaggctggaaggtcaggtcgggagggagtagccacaaaggagtctcactgaggaagagaggtgagt

SEQ ID NO: 642480 - DNA, 555 bp, Homo sapiens
gatctctcttcttcagccccttttccccacttctgcctgacaactagtgaccctctaagagtcagctcctgcacccagcccctctctcccccttcagaatggatcctgtctctgtgctcccccagcactctctcggaaggcctggaggacaatgatcctgttttatttatcttcacatttctagcatctagctcaacgtcttaaataatcagttttaataaatattcaagtgactaaatgaaactccattaaagaatttagcacattgtccaagagctgttagatggtttctctcactagactgctacattctgaagaattatgtctgttttcctctatccctaggaacttagcacagtgcctggtccatagtgggtgctcagtaaataatttggagttaattaatgaatgtaggctacatgcattttcacctgcaggctggattctttcaatgttggaaatggcttcgacttcygctgctgctgtcctcggtacttagccaaagattgtctgaagccacattgttgatccatgtcctgacagccccacggtgaa

SEQ ID NO: 642481 - DNA, 629 bp, Homo sapiens
attgctttaatattcaaaaatcagtcaatatgatccatcatattaacaaaatccagaagaaaaactgtgtattatatcaatatataatcatcttaaaaattatttgkggccaagtgcagtggctcacctctgtaaccccagcacttcgagagacggaggcaggtggatcgcttgaggtcaggagttcaagaccagcctggccaatgtgataaaactctgtctctactaaaaatacaaaaattagccaggcatggtggtgtacccctgtaatcccagctactcgggaggctgtggcaggagaattgtttgaacccatgaggcagaggttgcagtgaaccaagattgtgccactgcactccagtgggaaacagagcaagacaccatctcaaaaaaaaaaaaaaaaaaaaaattggcaaaactcaacacccattcatagttgaaactctaagcaaagtagaaatagacagaacttcttcttaatgtgataaaggacatctacaaaaagccccctgattaacatacttaataatgaaatattgaactccttcccctttctttcataaacgaagtgtgaatgttccttttaactaaatctatcctacattatactgctaaccagtaaaataaag

SEQ ID NO: 642482 - DNA, 553 bp, Homo sapiens
acacaactctgctattatagcatgaaagcagcacagataacacaagaatgaatgggcgtggctgtgtttcaatacaatggaacgttataaaaaatgatgatgggctgtatttggcccatgggacatagcttgctgactcatggtttagacccttcacatgtaaagtaaatattgtcatagtcaagtttaaatcactcactttgttgtttgttttcagtttgactcatgtgttattcatttcctaccatcccctgccaccttccatatcctttggattgtgtatttttaggattccattttatctccatttttcaatgtattatctgtacctctttgtgttattattaaatgattgctctgtggtttactatatacataccacagtctaccttaatattacagcactttatagatagtaaaagaatcttaaatactttcacccccccagcattttatgtgattttttgtcatacatttactttatttaaattataagacctccartgcattgccactacttttgtttgatgcaatcagttatcttttttaagac

SEQ ID NO: 642483 - DNA, 302 bp, Homo sapiens
aaggtcttgagaggcaggcctgggtataaaggaactgaaagaacacaatgcaataacttaaatagagtatcttgggagcacagagaggaacacagccaacattttytaggaggacagtcagaaaaggcctcagagcacaaccaaattcagcatcttcctgagaaacaaagagttaaccgaggtagattcagagctgaaaataacatttattctaccaaaaaaaaaaaaaaaaaaataggacagtaaatgggtgacaaattgctccatgtttatttctttaaaaatggaaatattataagcca

SEQ ID NO: 642484 - DNA, 561 bp, Homo sapiens
ttcaagtgaataaatccctccagtgtcagagacataagacgttgtcaagctgcctgtgagacaatgtgatcataaagtcttagaaccgaaatacctccagtcaccttggtaagaaaataatccgctctcaagtgatgctttgaagtttaatggagttgctccctatccagtaaatgaaatctggtgttgttctgagayggtagtgtgctgttgcaagagtggagcaggcaggctcctttctctctcactcccagtcctccccaggctgaccccaatctgcttttatagccccatttcccataactgtcctccacaaagcacatgcctcagccaaaccatctactcagcctgtccaggaaggccatgaagaagaattcaggccaggggacctgccagggtggggcagggagtgccttcttcccttgaacgtggttttggccaaacaggcaggataaagtcaaaacaaaggccagactagatttggttatgtagtcagagttagagtcaataatcagctctgcatctggccaggtgagcaggggtagaagtcttgtagaaatg

SEQ ID NO: 642485 - DNA, 561 bp, Homo sapiens
ttcaagtgaataaatccctccagtgtcagagacataagacgttgtcaagctgcctgtgagacaatgtgatcataaagtcttagaaccgaaatacctccagtcaccttggtaagaaaataatccgctctcaagtgatgctttgaagtttaatggagttgctccctatccagtaaatgaaatctggtgttgttctgagatggtagtgtgctgttgcaagagtggagcaggcaggctcctttctctctcactcccagtcctccccaggctgaccccaatctgcttttatagccccatttcccataactgtcctccacaaagcacatgcctcagccaaaccatctactcagcctgyccaggaaggccatgaagaagaattcaggccaggggacctgccagggtggggcagggagtgccttcttcccttgaacgtggttttggccaaacaggcaggataaagtcaaaacaaaggccagactagatttggttatgtagtcagagttagagtcaataatcagctctgcatctggccaggtgagcaggggtagaagtcttgtagaaatg

SEQ ID NO: 642486 - DNA, 561 bp, Homo sapiens
ttcaagtgaataaatccctccagtgtcagagacataagacgttgtcaagctgcctgtgagacaatgtgatcataaagtcttagaaccgaaatacctccagtcaccttggtaagaaaataatccgctctcaagtgatgctttgaagtttaatggagttgctccctatccagtaaatgaaatctggtgttgttctgagatggtagtgtgctgttgcaagagtggagcaggcaggctcctttctctctcactcccagtcctccccaggctgaccccaatctgcttttatagccccatttcccataactgtcctccacaaagcacatgcctcagccaaaccatctactcagcctgtccaggaaggccatgaagaagaattcaggccaggggacctgccagggyggggcagggagtgccttcttcccttgaacgtggttttggccaaacaggcaggataaagtcaaaacaaaggccagactagatttggttatgtagtcagagttagagtcaataatcagctctgcatctggccaggtgagcaggggtagaagtcttgtagaaatg

SEQ ID NO: 642487 - DNA, 490 bp, Homo sapiens
gacctgccagggtggggcagggagtgccttcttcccttgaacgtggttttggccaaacaggcaggataaagtcaaaacaaaggccagactagatttggttatgtagtcagagttagagtcaataatcagctctgcatctggccaggtgagcaggggtagaagtcttgtagaaatgtctatcctaacagcaaggatctggcaatgtcatggctgaatccatgagggtgcagaaaacaggataggacatatatggtgattagtttgaggtcaggaaaggaggctcagaggctggagctggggtatcagccmgtgcaaaggccatgaagtcataggatttacccctggaaaaaggagtttccctgaaagagcttgcaacccaatgccatttcattataggatcaatctagacagggctgagtctcattaagacaaccttctttgcagaagggaagggcacacccaggcctcttgtttctgcatgctggaattc

SEQ ID NO: 642488 - DNA, 490 bp, Homo sapiens
gacctgccagggtggggcagggagtgccttcttcccttgaacgtggttttggccaaacaggcaggataaagtcaaaacaaaggccagactagatttggttatgtagtcagagttagagtcaataatcagctctgcatctggccaggtgagcaggggtagaagtcttgtagaaatgtctatcctaacagcaaggatctggcaatgtcatggctgaatccatgagggtgcagaaaacaggataggacatatatggtgattagtttgaggtcaggaaaggaggctcagaggctggagctggggtatcagccagygcaaaggccatgaagtcataggatttacccctggaaaaaggagtttccctgaaagagcttgcaacccaatgccatttcattataggatcaatctagacagggctgagtctcattaagacaaccttctttgcagaagggaagggcacacccaggcctcttgtttctgcatgctggaattc

SEQ ID NO: 642489 - DNA, 475 bp, Homo sapiens
cattgctgttctttcagcagcgtgctctgctctgccccctcccaccatgggctttttattctgtctgtaygagatgatttttttcttccccttactgccttccagtattggctcaagcactgattcttcttaaaaaaatctctatcttcccctccaacatagggcagatctctctcttctatgatctcagggcacagtagaaatttcaccttcattggatgaaatattacatacattacacacgtttgattagtatttatctcctctaatagaccttaagatccatgaggccaggggctatgtctttatttgtttgcaattttgtctcaatagattcacaaaaagtatttgtgccagtgagtaaaattgagctctgcaggggcccagtgaatataattttcctatgtgattcatcttggggggatgtggctctgggcctggtcaatttaacaatttctttagaacacagtgattg

SEQ ID NO: 642490 - DNA, 559 bp, Homo sapiens
gaattctatctctgctggctgcagctcttcccatgtttggacgacaatgattaaaggcccatgcgtttccagcgawgtgttgacgattggctggcaggcttgaaaacacccacttttccagaggttggtaagcattggggaaatatttttcatgctgagcaggactatgtaaattgcccagcatctggaacaaattgctgtatggatacctgggctgtggaggatcaggtgagaaaaggctgctattctttgaaaaaataaaaataaaaataaacagcatcctgacttgcaggcgagggaagggcagccacaggatcctgggatgctgtggggcttccctgttcagttgtggggagcagcattcccctggtagtgttgggaggagaagcccccttgctagaaacccagaaagcagagttttgcagggaaaatggaaaaatgttcactgtgaagagggaagtggggctcactatggactccagagcatgtgaatcacgctgtggctccaagtcccagacagtagtcattatttcattttattttatttatttatttttag

SEQ ID NO: 642491 - DNA, 517 bp, Homo sapiens
taaaacatggaagttctcaaaatgaaagaattgatttgagatagcaaactaggggaatctcacacacacacacatacactctctctctccagaagagaaggagcctgggaccatcatgcaaggccaaattgatgtagatgattttcacgttgagatttctaagggtgctctcccatgattgaactgaggcattgtatgtggggatggtagcattgtgtctccatgggtcaatgccttttaatgtcctacccttcacctcacagaccacagatccacaccatcatccctgcccttccagttgactgaagaaataaaccagcaagaggcacagagcagggattccaggaagatgggatgggaggcagcagggacacctgacggcttctcccaaagcctgggctgggaggtccagagttaagggcagtagtgcagtcattcattcaacagatatttttggagtcccaagtttcagttatatgtgggacacaargtgcagaaaaatgatccatgacaatgg

SEQ ID NO: 642492 - DNA, 556 bp, Homo sapiens
aacacaatggtatacatttgaagcacatgaaaggctgtgtggcagcaatactaaagagacatgattttcctrcagaacaggggcagaggaagagcagaaacccaatcagccaatacgattgtggcagagaaacagatctggtcctgtaaagggagaggggggagaaagcttattttttatgaattaatctccagttggttttcataagttgttcagaaacaagtgagcacatgaataatacatactgtacacaggcccaaaaacacagagctatctccagttgagattgtgaaaatgaagacattttgagaaagataattgagtaaatcgaccagaaggaaggcatcttaaggtagaggcatgagtagcagcagggaacagacaccccaaggggaaaatgtatatttctaatttccccaattagcttgcagattcctggagagctgggataatcttttcaactttaacagaattatatgttcccaggttatataaaataacactttgcctgtagtaggtgctaaaaatattaatagataaattaattcaatgttga

SEQ ID NO: 642493 - DNA, 457 bp, Homo sapiens
ctattggttctttctctggagaaccctgactaagacataaggaaccctgattttgttgtaatgatcagagtattcaccaagtgccttccatgttctaggaataggggtgagactagaaagggtgactaacatgcagctccttctgttagggagcttgggatcttgcagaagagacaaaccatcatccattcacaaccatgcccatctcctctgaccctgatcataggctgtgttccttctgaagtagagcccaggtgtgacccagcaggatcttttcactccacccactccaacgctacatttcatgtgcctcctttgcatggatcatttcctctattcctaagccaagcagccttgggcccmaaccatgcccactgtgagtgcatgagggaagctctgtgcatcttctccactgaggcagccccctcctgcaagctgttttcaacgcagaggcccc

SEQ ID NO: 642494 - DNA, 626 bp, Homo sapiens
caggtgtgacccagcaggatcttttcactccacccactccaacgctacatttcatgtgcctcctttgcatggatcatttcctctattcctaagccaagcagccttgggccccaaccatgcccactgtgagtgcatgaggkaagctctgtgcatcttctccactgaggcagccccctcctgcaagctgttttcaacgcagaggccccagaacaattgttactgttattcacagatctctcagattttctcacaccatagctactggacagagaaacatgaagtgtctttccacaactcaaagtggatacgagggtcttctccggggaactctggctgccaaagttctctggaaatggtcacattgacgctgttgtgtagctactttcagagcgaaacctcacaatgaatgagcctatactcttgagtctctaacagcagcctgggctatggtaggtgaggttgctattattttcttactgtggagaagttatcttgagtatcagtaacagagggctgagcccatggagcatgtagagtatgccatcagccaatgagattagatgattccagtactgcacttactctccagtacgtggcaatgcagtcttgatggctactgagtgctt

SEQ ID NO: 642495 - DNA, 563 bp, Homo sapiens
tttctcacaccatagctactggacagagaaacatgaagtgtctttccacaactcaaagtggatacgagggtcttctccggggaactctggctgccaaagttctctggaaatggtcacattgacgctgttgtgtagctactttcagagcgaaacctcacaatgaatgagcctatactcttgagtctctaacagcagcctgggctatggtaggtgaggttgctattattttcttactgtggagaagttatcttgagtatcagtaacagagggctgagcccatggagcatgtagagtatgccatcagccaatgagattagatgattccagtactgcacttactctccagtacgtggcaatgcagtcttgatggctaytgagtgcttgctgccatataaaatgagactgacacatccatgcagagggcagccactgcttctcctccgggaggtttgtagtgatggggaggagtctgctgcttctattaaagttagttattttcatttctggcccatttcttcattatctcccactacacacccacacacatctgctgtacacttcca

SEQ ID NO: 642496 - DNA, 590 bp, Homo sapiens
atgcctctctgcctctgaggcctggggagaattcacacacccatctaaccagggatatacctcaggaaatggagactgtgtcttggtggaatttcaaacacacttgagcttgaagaagatgtttatatatgctagagatgtttcaaaaatcttgccacaaaaatgtaaagggaccrtcagactccatcttactctattccatacaattgtatccacctttccaatcgctggtccaaagatgaaataacaatatttgccaacaagattttagagccttgccaattaacagagaacactacctaaccccatatgaagacacttctctcttagatgtaagctaaatttataaatgtcaaggtcttcaaaatgttaaaaccattagagatagagagttggggaactgggggggaaggagaatgtaaatttggtgaaaaattagaatatcatgcaatatttatttttgtagtgcaatttacatatctaaaatcattttgctaagaagaaacataaaatgtattatgtataacttgatttgctcataaaattatcatttaggtaaaattagagacatgaagaactggaaagacaaa

SEQ ID NO: 642497 - DNA, 620 bp, Homo sapiens
gtataacttgatttgctcataaaattatcatttaggtaaaattagagacatgaagaactggaaagacaaaatggaaaaaataggaaagaacagatttttttttaactgattcattttctttatatatttatttaacaaaaacatgaaggggggcatgggtaaagttccttctgaaatactttctttctctttctttctttccttccttccatctttctactttccctcttcttctttttctttttccttccttccttccttgcttcccttcccttccttccatctttccactttccctcttcttccttttctttctttttccttccttccttccttgcttcccttyccttccttctttcctttacttctccccctgcctctcttccttcctcagttccctccttccttccttcccttccttcccttccttccttccctccttccttccttcccttccttctttcctttccttctccccctgcgtctcttctttcctcaatgccttccttccttccttcctttgttcccctccacctcttaggtctttacttaaatcattccctttttgatctaagccccctttgttgttaaggccctgcagtgagaatagctagctgccc

SEQ ID NO: 642498 - DNA, 598 bp, Homo sapiens
gggggcatgggtaaagttccttctgaaatactttctttctctttctttctttccttccttccatctttctactttccctcttcttctttttctttttccttccttccttccttgcttcccttcccttccttccatctttccactttccctcttcttccttttctttctttttccttccttccttccttgcttcccttcccttccttctttcctttacttctccccctgcctctcttccttcctcagttccctccttccttccttcccttccttcccttccttccttccctccttccttccttcccttccttctttcctttccttctccccctgcgtctcttctttcctcaatgccttccttccttccttcctttgttcccctccacctcttaggtctttacttaaatcattccctttttgatctaagccccctttgttgttaaggccctgcagtgagaatagctagctgcccttttccttaaaccacaccctcwagttagagtgcttttgagacttctcaggtgtctctcttttacagcagagcattgcaaattcttccccactccatgcctggtcaactccttcaatttcttgccag

SEQ ID NO: 642499 - DNA, 556 bp, Homo sapiens
aatctcccccaaactctaacattgcaatgctataattattctatttcatggataaaatgtgggttatggaaaattaaatcacttgcctgaggtcacacagctggtaaactgctaagccaggcccttaagcctgcattcagacccagcctgcttgactccagtgtctggcctgaaaagccacccaatagtgccttaacaaccaccagcggcttctatttccccagggctttatggctgaaaatgtctcacacacactgacttatgtgattcctgtgcaacaaggttaataaggaagatatgggamaactagtgttcccattttagagatgtgtggacagtcagaggtcaaagtccctactcagagtcatatagtaaacggtgttaaagcaggtattctgaccaaaaatctattttcttctccacacaacgttgggtatgaacaaagggaactgtctttggaacgatgtgcacacacccgtatgcaaacttttcagacctgatgctagtgcgtggggctgagggagggtaggaaggctggcccagctgagggaatgtc

SEQ ID NO: 642500 - DNA, 556 bp, Homo sapiens
aatctcccccaaactctaacattgcaatgctataattattctatttcatggataaaatgtgggttatggaaaattaaatcacttgcctgaggtcacacagctggtaaactgctaagccaggcccttaagcctgcattcagacccagcctgcttgactccagtgtctggcctgaaaagccacccaatagtgccttaacaaccaccagcggcttctatttccccagggctttatggctgaaaatgtctcacacacactgacttatgtgattcctgtgcaacaaggttaataaggaagatatgggacaactagtgttcccattttagagatgtgtggacagtcagaggtcaaagtccctactcagagtcatatagtaaacggygttaaagcaggtattctgaccaaaaatctattttcttctccacacaacgttgggtatgaacaaagggaactgtctttggaacgatgtgcacacacccgtatgcaaacttttcagacctgatgctagtgcgtggggctgagggagggtaggaaggctggcccagctgagggaatgtc

SEQ ID NO: 642501 - DNA, 552 bp, Homo sapiens
ctctctggtagagccacaaatatacccctgtgtagctcctgggaagaggatccctattgctcatctgctgccatgtcttgagcgcctactgcgtgtgaagcatgtgctaaatggtgtggataggccatctcyaaccttcacaacagtgctatccccagttacagatgaggaagggaaaatgcagaaagttaactcattggtgtaggattataatcagaaacagcccagttcaggattcaagctcatactttcagactccagagccatggtctgtcccccactggttgtgaccaggcctaaacaataggtaggatgagtttctacctattggttattatataagaaaagtcaagcagggaaggtgaagtcacagcccaactgcccactggaacagtgacatcttgatcactgtttcagatcactacccaggaaaagctgtaactcatgggataaatcaggctccaatcttcccctgaggctctgggaagccttaagccaaggacttgcacttaccgtctaggggatcaagggtgcaagatagtgtagaaaaca

SEQ ID NO: 642502 - DNA, 552 bp, Homo sapiens
ctctctggtagagccacaaatatacccctgtgtagctcctgggaagaggatccctattgctcatctgctgccatgtcttgagcgcctactgcgtgtgaagcatgtgctaaatggtgtggataggccatctctaaccttcacaacagtgctatccccagttacagatgaggaagggaaaatgcagraagttaactcattggtgtaggattataatcagaaacagcccagttcaggattcaagctcatactttcagactccagagccatggtctgtcccccactggttgtgaccaggcctaaacaataggtaggatgagtttctacctattggttattatataagaaaagtcaagcagggaaggtgaagtcacagcccaactgcccactggaacagtgacatcttgatcactgtttcagatcactacccaggaaaagctgtaactcatgggataaatcaggctccaatcttcccctgaggctctgggaagccttaagccaaggacttgcacttaccgtctaggggatcaagggtgcaagatagtgtagaaaaca

SEQ ID NO: 642503 - DNA, 552 bp, Homo sapiens
ctctctggtagagccacaaatatacccctgtgtagctcctgggaagaggatccctattgctcatctgctgccatgtcttgagcgcctactgcgtgtgaagcatgtgctaaatggtgtggataggccatctctaaccttcacaacagtgctatccccagttacagatgaggaagggaaaatgcagaaagttaactcattggtgtaggattataatcagaaacagsccagttcaggattcaagctcatactttcagactccagagccatggtctgtcccccactggttgtgaccaggcctaaacaataggtaggatgagtttctacctattggttattatataagaaaagtcaagcagggaaggtgaagtcacagcccaactgcccactggaacagtgacatcttgatcactgtttcagatcactacccaggaaaagctgtaactcatgggataaatcaggctccaatcttcccctgaggctctgggaagccttaagccaaggacttgcacttaccgtctaggggatcaagggtgcaagatagtgtagaaaaca

SEQ ID NO: 642504 - DNA, 602 bp, Homo sapiens
ttatttgtattgtttttctgtattctcttatatcacactcagcttccttagtaccaaaatttcgaattctctttccagaacttcataaatttctttttgattgaaatctgtcgttggagagttgttgcaatcctttattgcctttggtggtgtcctatttccttgccttttcatgtttcctgtgcccttatattgacatctatgcatctagtatagtggttgcttctttcaattctttgaattgggttttgcaagggaggaattttgcctgaagaagtacctatggcattggttgggtagggcacattggctttgactctggttgcatgtrgtactatattctccttctgattttttcatctgtaagccatgtcagtggtatctgtgatttcctctggtttagggtgcaattgttagtgaaggctgtaggaaagttttactggggatgaggataccaggtgggcctgtctttgggtccccagtggtagcagcagtggcccaagcttgcctgtccttggatgctagggtggcatatgctggcactgctgctactgggtccaggaatcctaatctcggacctccaggtaatttgctcatgttgg

SEQ ID NO: 642505 - DNA, 623 bp, Homo sapiens
atataggtagtgcgtgatcaycaccaaacagttagaaaatacaggcaatgcttctggatataaaaatcagctctattctaccacctgttgatgtttcagtggttctcctcctgagccctttttctacaatacaggccttttagaggccctacttgcaggggtacctgcaaaagccagggcaagagggttgggagtaggggtggactatgggcacatgctcaggtatggacaggcaatgatgtggctgcctacagcctgactctgaccccacactcccacttccttcggccttgtcagcacagtaggggcccaggctggccatctatcttgtgggatcgagctgccagaacaaccatccatgttatattctattgtctaacagctggatgcctctgaactcgcatttcccttctcttcgtctcctttcccagactttctggtgctgtctttgcctgccgtaggaggtcccagacatggcaccttgcctacacatctgacattgctccatctcagtctcagaacataagtatctgccttctctggagacttcacaggcttgactaatttacctactagaatgttactacttaattgactgaacctacaaaaaacaaacccatact

SEQ ID NO: 642506 - DNA, 602 bp, Homo sapiens
ttatttgtattgtttttctgtattctcttatatcacactcagcttccttagtaccaaaatttcgaattctctttccagaacttcataaatttctttttgattgaaatctgtcgttggagagttgttgcaatcctttattgcctttggtggtgtcctatttccttgccttttcatgtttcctgtgcccttatattgacatctatgcatctagtatagtggttgcttctttcaattctttgaattgggttttgcaagggaggaattttgcctgaagaagtacctatggcattggttgggtagggcacattggctttgactctggttgcatgtagtactatattctccttctgattttttcatctgtaagccatgtcagtggtatctgtgatttcctctggtttagggtgcaattgttagtgaaggctgtaggaaagttttactggggatgaggataccaggtgggcctgtctttgggtccccagtggtagcagcagtggcccaagcttgcctgtccttggatgctagggtggcatatgctggcactgctgctastgggtccaggaatcctaatctcggacctccaggtaatttgctcatgttgg

SEQ ID NO: 642507 - DNA, 534 bp, Homo sapiens
tcagtggtatctgtgatttcctctggtttagggtgcaattgttagtgaaggctgtaggaaagttttactggggatgaggataccaggtgggcctgtctttgggtccccagtggtagcagcagtggcccaagcttgcctgtccttggatgctagggtggcatatgctggcactgctgctactgggtccaggaatcctaatctcggacctccaggtaatttgctcatgttggtagtgacggcaatgggctggtgaatgggcaggttcttgggcccttgggcagagggtgtgatgtgaataacatcagtagcagtggtgagccaaccctctggctcccaagcagaccatgctggtgttgcagtgcctgcaatgggtttagtgagccagtctccaagcccacaggtggcacatgcaggtgtatgccagcwgtggtggtaacagcaggttggatgggcctggcctgcagccctcaggagaagtgctcaggtgccaattgtggtggactaggttgggtggtctccaagcccacagatcat

SEQ ID NO: 642508 - DNA, 592 bp, Homo sapiens
taagcatggagttagtagacctggtttcagatgctggccctgtcacttgtagcatgtcatttgatctccctgctcccagcttcctgagatataaatacaggataataatacccacctcagagctgctgcaaagattgacttggatgatacmatgcatgccaaagcatttaatagaattcttagaatatactaatgctggataagcatgtgctagatgagaatttaaatgagtttttaggaacacaagtatgaatatgaaggtttccaaaaataccttcactcacagccccttgtaaaaaaaaatgtctaaaattgcaccattagcgatacagacctcagatttctagaaggactgccagccattgggaattcccatcaaaatacacttcagaacctcaaaccaatattactgaagacctcagcaggaagtaattgctatgggtaagcagccaaggttctgcagaaataagagaagggtggagaagtgggagaaatagggaagtgagttgtgctgaatggtccctggaaggcttcacacacaggagacgtttgagtccaattctcgactttcctttggccaaaagtatgtgaa

SEQ ID NO: 642509 - DNA, 595 bp, Homo sapiens
ccgcctataagcagaattcatgagaaaagaactgtaagcatggagttagtagacctggtttcagatgctggccctgtcacttgtagcatgtcatttgatctccctgctcccagcttcctgagatataaatacaggataataatacccacctcagagctgctgcaaagattgacttggatgataccatgcatgccaaagcrtttaatagaattcttagaatatactaatgctggataagcatgtgctagatgagaatttaaatgagtttttaggaacacaagtatgaatatgaaggtttccaaaaataccttcactcacagccccttgtaaaaaaaaatgtctaaaattgcaccattagcgatacagacctcagatttctagaaggactgccagccattgggaattcccatcaaaatacacttcagaacctcaaaccaatattactgaagacctcagcaggaagtaattgctatgggtaagcagccaaggttctgcagaaataagagaagggtggagaagtgggagaaatagggaagtgagttgtgctgaatggtccctggaaggcttcacacacaggagacgtttgagtccaatt

SEQ ID NO: 642510 - DNA, 584 bp, Homo sapiens
agctaactagtagcaacaatgttgtattgtggaaagggctcaggttctgaagtctttgaagtagaattgggtctaaatttgacacctgctgctcatggctataggacttctcttcgaaagtcagtttcttcataaamaaacactggtgaaacaatatctacctcaactatttatcgtttaattctcagatagttaaaaatagatacaatgtgcctagcacaatgcgcaacacaaagaaggtgtgcaacataaatgtgatccttcagcagctcaggagtgtggccaaagcgagaagagagagcatcaagagcaacccttagctggggcctctgtcttcctcaggttagttctctgaagaagggatggttgatccactgtacggtcctgagtgcatggcctgacactctcaactctccatggtttgtcacccttctcaggggctcactcatcttcctaatcaacttggattcatattcagagctatatctgcttacaatgggagcgctccatgtctttgtccctctgtcactccttcaagagcacttgttaaagtccagcttcctgcttactgcatgtatgtgtgg

SEQ ID NO: 642511 - DNA, 584 bp, Homo sapiens
agctaactagtagcaacaatgttgtattgtggaaagggctcaggttctgaagtctttgaagtagaattgggtctaaatttgacacctgctgctcatggctataggacttctcttcgaaagtcagtttcttcataaacaaacactggtgaaacaatatctacctcaactatttatcgtttaattctcagatagttaaaaatagatacaatgtgcctagcacaatgcgcaacacaaagaaggtgtgcaacataaatgtgatccttcagcagctcaggagtgtggccaaagcgagaagagagagcatcaagagcaacccttagctggggcctctgtcttcctcaggttagttctctgaagaagggatggttgatccactgtacggtcctgagtgcatggcctgacactctcaactctccatggtttgtcacccttctcaggggctcactcatcttcctaatcaacttggattcatattcasagctatatctgcttacaatgggagcgctccatgtctttgtccctctgtcactccttcaagagcacttgttaaagtccagcttcctgcttactgcatgtatgtgtgg

SEQ ID NO: 642512 - DNA, 535 bp, Homo sapiens
gaaggtacagactgggccaatatggtctccgagtcctattaacctgagcccaatctgcaaaatctctgcaccccatacagaaggctctgggtcttctgggaagaaaattctttcttgaagagtctgattggagctttatcgcagcccctaggaaggagggtgcctagggaaaaataagaaatcactgggtctatagagcaaaacatgctgtattcaagtgtgttctactgagtagcttttcttagcacagattctgggaacatgactttgacgatgatgacagwggtctgggctaaatgaggtacacatggagtggacttgggtttgttcacatgaaactagctgatctcctgggatggagtgaagtgggaactgaagaaagctgggcaggtgatgtgagggagacagaacctaggagttgggagaactccagctgggaggggaggcagttggcctctgggcaaccagcagtggagtttctcattgtctctgaagtcattcatagggtcccaccatgggccaaacttcctcagtc

SEQ ID NO: 642513 - DNA, 683 bp, Homo sapiens
tacagtaattgcctgggagggagctgggccaaactaataagggtcacttcatgatttttctactgggctctcagtggtcaccaggaagaaaactcagccgggacctagaagtcctgctttatttaccatgtccgttttcagacaacacttgggaggcatcttccagctgtctcttacctaaccatgaatccacagagtattgtagtctgcagtttttctactagaacaatcagtgaaaggataaaagaagataggttggggagggagctgagggcaagattacagcagwgccagataataagaatgccaataacgcattgtgatagaatcacatttgcattacagccttgtcaataaaagctcttcccatcctcactgaaaaaattaaaaggcgacaaccaattcactcttcctatcagtgacttgtccgggtctcttctctcagatgggatccagttgagcaaatagcaggggtgtattttaaggatgcagagtcctgagaaagggaagggggaagcaggcatatggcctccacattggcccactcctggcccaaagagcagctcaagactgaagatgatggctgttgaataaaagggcagaattcgtggctaggtgaggatgaatgatagcttaggaaaggacaaaagggagctcctggtatttagtaatagctgaaaagt

SEQ ID NO: 642514 - DNA, 683 bp, Homo sapiens
tacagtaattgcctgggagggagctgggccaaactaataagggtcacttcatgatttttctactgggctctcagtggtcaccaggaagaaaactcagccgggacctagaagtcctgctttatttaccatgtccgttttcagacaacacttgggaggcatcttccagctgtctcttacctaaccatgaatccacagagtattgtagtctgcagtttttctactagaacaatcagtgaaaggataaaagaagataggttggggagggagctgagggcaagattacagcagagccagataataagaatgccaataacgcattgtgatagaatcacatttgcattacagccttgtcaataaaagctcttcccatcctcactgaaaaaattaaaaggcgacaaccaattcactcttmctatcagtgacttgtccgggtctcttctctcagatgggatccagttgagcaaatagcaggggtgtattttaaggatgcagagtcctgagaaagggaagggggaagcaggcatatggcctccacattggcccactcctggcccaaagagcagctcaagactgaagatgatggctgttgaataaaagggcagaattcgtggctaggtgaggatgaatgatagcttaggaaaggacaaaagggagctcctggtatttagtaatagctgaaaagt

SEQ ID NO: 642515 - DNA, 622 bp, Homo sapiens
aaaataaaggagaagaaggaagaaatccatgataaatccacctttcacggacagtggagaaagataaactctctttctaaccgttaaagatggcttttccttctttccgtttttcaagttcattggaagtgacactaagttggtgctttgcttcccactttgccccctttactgcagactttctgatctttcctatgggggtccccctcaaggtcttttttatgtccatgttcacatgtgtgggaaattacggtgtagaacagctcatgctggttacaatctgaagttagtgcagggaaggactaaytggttcttccaaggaccagctcagcccttatgcctggtgtactccttctgaaatgccagcccagcgtttatgcaaatcactagtctgtctctcttactctctcccttgtacttttaatgtcttcattatttttctgtaagtgtttacaattcaacttccactgtaacagtgagtttacatttgtactatttgctttacatgccatgaaggtatgaattatctacattgtattggtgagaaacctaaggttcagagtatttagttaggattaaagtcagcttgcaagtaacatttatttatctctcattttaaata

SEQ ID NO: 642516 - DNA, 628 bp, Homo sapiens
tgaatgcattgccctaaaaatacagaggtgggagcaagcaacacttttgcatctggggattgaggtggctcagggcttccttagcagatgatgtcatctggggatgagtaagtaggaatttgatggaagggaagccgaggaggaaggcagtctacggtrtgaactcagagacccagaggatctaagctgtcttgtaccaagagaatgcatatctagattttgatgttgagtatacaggctgtgaggatttgggtgctggtaatatgagatccatataatcacgcctaggattttctgggtgcgtggggagggtggctaccaaggacagtggtagttgaaagtgggtagaggagagaagcccagatatacctctaatactaagcagcagaaatttgaccttaggagacaggctgtctgcgcctcagaggtcaacttcacatttcagcttcctcttcctgaaaactgggcttgatatttgataaataaatcatgcaatcttcccttcacaccctgccccaaatgaaaacattcactgttaccaccacttcacaaccggccacggtggcccctgacaatcaattacccaccggagatgaaattattgtttaatggctcctggaatgggctc

SEQ ID NO: 642517 - DNA, 441 bp, Homo sapiens
cattacagccccttccaggatattcctggggtctcttccatctctactaacccctgactacaaacagcctccacctatttcacctgacattgtactttatgaaagcagcagttctcagatggggctattttgccycctggggacattaggcaatatctggagacactgggggttgtctctacttggggggagttgtgttactgcatccagtgagtccagggatccagggatgtcgctcaacatcctaaaatgcatagggaacccccacacatacaacagagaaattgctgagccgaaatgtcagcagcgtcacagctgacaccctgacatacacacaatcacacagtatctgctctttcgtgctcaggatttctgtcattctaatcatttcataggaaacagaaatgtcatttggaggtaggtagagtccaaaacaaagaa

SEQ ID NO: 642518 - DNA, 441 bp, Homo sapiens
cattacagccccttccaggatattcctggggtctcttccatctctactaacccctgactacaaacagcctccacctatttcacctgacattgtactttatgaaagcagcagttctcagatggggctattttgcctcctggggacattaggcaatatctggagacactgggggttgtctctacttggggggagttgtgttactgcatccagtgagtccagggatccagggatgycgctcaacatcctaaaatgcatagggaacccccacacatacaacagagaaattgctgagccgaaatgtcagcagcgtcacagctgacaccctgacatacacacaatcacacagtatctgctctttcgtgctcaggatttctgtcattctaatcatttcataggaaacagaaatgtcatttggaggtaggtagagtccaaaacaaagaa

SEQ ID NO: 642519 - DNA, 441 bp, Homo sapiens
cattacagccccttccaggatattcctggggtctcttccatctctactaacccctgactacaaacagcctccacctatttcacctgacattgtactttatgaaagcagcagttctcagatggggctattttgcctcctggggacattaggcaatatctggagacactgggggttgtctctacttggggggagttgtgttactgcatccagtgagtccagggatccagggatgtcgctcaacatcctaaaatgcayagggaacccccacacatacaacagagaaattgctgagccgaaatgtcagcagcgtcacagctgacaccctgacatacacacaatcacacagtatctgctctttcgtgctcaggatttctgtcattctaatcatttcataggaaacagaaatgtcatttggaggtaggtagagtccaaaacaaagaa

SEQ ID NO: 642520 - DNA, 603 bp, Homo sapiens
gaaaaatattaagatgttttatatatatgtagaagtctttacagttgactgatcatctcaggaaaaatttgtacagtcactgcatataaagtcattacaaaatctttactccttttgctttttgccagcactgacattggcctttgcagtctctggacttcattctgcacttgcattccttttgctgttttcttgaggtcatcttcttctcatgccatctgtgtcttgcaagtctatgtttgagttcatttttctttgcataattcaaagaaacagatagcatgccaaagctcattgtttaaccaccaccaacatgggttctgagtccaacgattaatatgaagatgacacctattgtggtcttgtacattttgttgcctttccrgggtgaaggacattggtgaccatgtgtttcccctggagtggtcgattggtcatgaacttcctggtccagatagttactgtgtcattcatcatggtggttgatcctcaggtagttacggaggaaaataaacaagaagttatatatttaaaaccacatttcaattttagacctgattaattgacttaataaagggcatcagcacttctacttcctacagt

SEQ ID NO: 642521 - DNA, 603 bp, Homo sapiens
gaaaaatattaagatgttttatatatatgtagaagtctttacagttgactgatcatctcaggaaaaatttgtacagtcactgcatataaagtcattacaaaatctttactccttttgctttttgccagcactgacattggcctttgcagtctctggacttcattctgcacttgcattccttttgctgttttcttgaggtcatcttcttctcatgccatctgtgtcttgcaagtctatgtttgagttcatttttctttgcataattcaaagaaacagatagcatgccaaagctcattgtttaaccaccaccaacatgggttctgagtccaacgattaatatgaagatgacacctattgtggtcttgtacattttgttgcctttccagggtgaaggacattggtgaccatgtgtttcccctggagtggtcgattggtcatgaacttcctggtccagatagttactgtgtcrttcatcatggtggttgatcctcaggtagttacggaggaaaataaacaagaagttatatatttaaaaccacatttcaattttagacctgattaattgacttaataaagggcatcagcacttctacttcctacagt

SEQ ID NO: 642522 - DNA, 603 bp, Homo sapiens
gaaaaatattaagatgttttatatatatgtagaagtctttacagttgactgatcatctcaggaaaaatttgtacagtcactgcatataaagtcattacaaaatctttactccttttgctttttgccagcactgacattggcctttgcagtctctggacttcattctgcacttgcattccttttgctgttttcttgaggtcatcttcttctcatgccatctgtgtcttgcaagtctatgtttgagttcatttttctttgcataattcaaagaaacagatagcatgccaaagctcattgtttaaccaccaccaacatgggttctgagtccaacgattaatatgaagatgacacctattgtggtcttgtacattttgttgcctttccagggtgaaggacattggtgaccatgtgtttcccctggagtggtcgattggtcatgaacttcctggtccagatagttactgtgtcattcatcatggtggttgatcctcaggtagttasggaggaaaataaacaagaagttatatatttaaaaccacatttcaattttagacctgattaattgacttaataaagggcatcagcacttctacttcctacagt

SEQ ID NO: 642523 - DNA, 371 bp, Homo sapiens
tcaaatataatcaggtaaaaagagcaaattctctgtgactttacctttttgttttgttcaggtcttcagtggattggatgaggctcacccacattggggaggacaatctgctttattcagtctaccaattaaatgttatcctcatccagaatacctcagagacacacccagaataatgtgtagccaaatatttgggcaccccacagcccagtcaaattgatacataacactaactatcakgtcttgcttctactctctccccattactgcatggccaaatccttcccttatttcaaggcttagttcaaatgttacctcttaactaagccttccctgctaaccccaaatattaatagaattggtgtctccct

SEQ ID NO: 642524 - DNA, 578 bp, Homo sapiens
tgaattcatagcagtagcctgtgcataggaaatacgcatattgtaagttttcctttctgataaatcatgctgggggaaccacaatgtaacttttttttttttggaaaaggagtctcactctgttgcccaggtgggagggcaggggcatgatctcagctcattgcaaactccacctccctggttcaagcgattctcctgcctcagcctcctgagtagctgtgattacaggcgcacaagacggggtttcaccatgttggtcaggttggtctcgaactcctgacctctgatctgcccacctcagcctctcaaattgctgggattacaggcgtgagccaccggctcacgtatactgtgattgtatattgaaagtttctctttttttcaaataattaacaggtttamcagaatgtatctcctgatctattcctttcactgcagacatctatggccttttcagcctagcagccctcccctctgtagagactcacacttcctactccagtcatgtggctcccatgggggctgccatgttctcaaatgactccacccctctggcctcagttgattggtccagggat

SEQ ID NO: 642525 - DNA, 591 bp, Homo sapiens
tgaattcatagcagtagcctgtgcataggaaatacgcatattgtaagttttcctttctgataaatcatgctgggggaaccacaatgtaacttttttttttttggaaaaggagtctcactctgttgcccaggtgggagggcaggggcatgatctcagctcattgcaaactccacctccctggttcaagcgattctcctgcctcagcctcctgagtagctgtgattacaggcgcacaagacggggtttcaccatgttggtcaggttggtctcgaactcctgacctctgatctgcccacctcagcctctcaaattgctgggattacaggcgtgagccaccggctcacgtatactgtgattgtatattgaaagtttctctttttttcaaataattaacaggtttaccagaatgtatctcctgatctattcctttcactgcagacatctatkgccttttcagcctagcagccctcccctctgtagagactcacacttcctactccagtcatgtggctcccatgggggctgccatgttctcaaatgactccacccctctggcctcagttgattggtccagggatgagcatctggcct

SEQ ID NO: 642526 - DNA, 473 bp, Homo sapiens
cctgggcgtcaagagtgaaagtccgtctcaaaaaaaacagtcccttaaatctgctctatgcctatcaacctcagggacttcactatactgttcctcaccctgaaatgctgttcctcatttctccacatagtgaactcatcccacccctaggcctctccttaagtgtcatctcttcaaggaagattttacttttttaatataactattaaaatataattcggtaccatatcatttgcccatttaaagtaaacaaatcwatggtttcagtgcattcacagagctcggcaaccaccaccatgatcaattttaaaacattttcatcaccccaaaagaaaccctgtatccatgagcaggtacctgccatttcctcctcccactaagccctgacaatctactttttttgagatagagtctctgtcacaggctggagtgcagtggcacaatctcggctcactgcaacctctgcctcctgg

SEQ ID NO: 642527 - DNA, 473 bp, Homo sapiens
cctgggcgtcaagagtgaaagtccgtctcaaaaaaaacagtcccttaaatctgctctatgcctatcaacctcagggacttcactatactgttcctcaccctgaaatgctgttcctcatttctccacatagtgaactcatcccacccctaggcctctccttaagtgtcatctcttcaaggaagattttacttttttaatataactattaaaatataattcggtaccatatcatttgcccatttaaagtaaacaaatcaatggtttcagtgcattcacagagctyggcaaccaccaccatgatcaattttaaaacattttcatcaccccaaaagaaaccctgtatccatgagcaggtacctgccatttcctcctcccactaagccctgacaatctactttttttgagatagagtctctgtcacaggctggagtgcagtggcacaatctcggctcactgcaacctctgcctcctgg

SEQ ID NO: 642528 - DNA, 473 bp, Homo sapiens
cctgggcgtcaagagtgaaagtccgtctcaaaaaaaacagtcccttaaatctgctctatgcctatcaacctcagggacttcactatactgttcctcaccctgaaatgctgttcctcatttctccacatagtgaactcatcccacccctaggcctctccttaagtgtcatctcttcaaggaagattttacttttttaatataactattaaaatataattcggtaccatatcatttgcccatttaaagtaaacaaatcaatggtttcagtgcattcacagagctcggcarccaccaccatgatcaattttaaaacattttcatcaccccaaaagaaaccctgtatccatgagcaggtacctgccatttcctcctcccactaagccctgacaatctactttttttgagatagagtctctgtcacaggctggagtgcagtggcacaatctcggctcactgcaacctctgcctcctgg

SEQ ID NO: 642529 - DNA, 473 bp, Homo sapiens
cctgggcgtcaagagtgaaagtccgtctcaaaaaaaacagtcccttaaatctgctctatgcctatcaacctcagggacttcactatactgttcctcaccctgaaatgctgttcctcatttctccacatagtgaactcatcccacccctaggcctctccttaagtgtcatctcttcaaggaagattttacttttttaatataactattaaaatataattcggtaccatatcatttgcccatttaaagtaaacaaatcaatggtttcagtgcattcacagagctcggcaaccaccaycatgatcaattttaaaacattttcatcaccccaaaagaaaccctgtatccatgagcaggtacctgccatttcctcctcccactaagccctgacaatctactttttttgagatagagtctctgtcacaggctggagtgcagtggcacaatctcggctcactgcaacctctgcctcctgg

SEQ ID NO: 642530 - DNA, 370 bp, Homo sapiens
tctcctgcctcccgagtagctgggattacaaggatatgccaccacgcccatctaattttgtatttttagtagagacagggtttctgtcttcatagatttgygtgttctggacattttatataaatgaaatcttataatatgtgaccttttgtgactggtttcttccacttggcataatattctcatggttcatccgtgttgtagcacgtgttagtacttcattccttttgatgactgaataatattccattgcatagtcaaaccatgttctatttctccactcatcagtagacaagcatttgtgttgttttcactttggcgctattatgaataatgctgctatgaacatttgtgtacaagtttctgcacg

SEQ ID NO: 642531 - DNA, 649 bp, Homo sapiens
actttgtcaaaactgttcagaaataaaatcagccaatcgttgccccttggggacgcaggacaaagcaaatcagccatgaccaatgtggagtcggccgtacacaattacatgcagacctgcaggacatcgagtccctgctatggtccctccccagtcaggcccccattgcctgggctgcagccagaagcattcaggcacaagtgcattcaacaaatacttatttaattgtattggtggttagagggctgttgttgattaaggtacattaatggatccatgtcctccctgtatccaagactctgccatttgtctctgcakttcctcccactgaagaatcggagtatatttctccagcccctaatgttgggtttagtcatgtgtctagctttggccactggaatattaatctgtatgaccaaaaacatggaaagtatgcattcatttgtgctcactcactcctgctatcaccctgagaacaagcccaggccagcctgctgcttccagcagaagataagagacaccaagagcaaagtagagcttcccagacatgctcatgctagattaaccaacctcagctgacccatagatccatgaaaataaatgactgttgtattaagccactgagatttggagtgacttgttatgcagc

SEQ ID NO: 642532 - DNA, 559 bp, Homo sapiens
aaaataattaatgatctgaatgagaaattcaacagggatagacagcataacaaagaaccaaacacaaatcctggaagagatgaaatcattgaaagaaatacaaaagataattgacagctttaacaatagactagatcaagcaaaacaaagaatttctgaacctgaagactagtcttttaaaataatccagtcagacaaaaagaaagaaaaaagaatgaagcaaggctatgtgacatatgggacacatatgtgaccaaaaactgaaattctgggagttctggatggagatgagatgggtaaaggcatagaaaacctatttaataaaataataactgaaaacttcctgaragcttccaaatgcaggaagctcaaagattaccaaataaatacaactcaaaaaggtcttctccaaggcacattatggtaaaattgtcaaaagacaaagagaaaatgctaaaaacagcaagagaaaagcatcaagtcacttataagagaatcttcatcaggctaacaggggatttctcagcagaaacctttcagtctaggagaaaaggggatg

SEQ ID NO: 642533 - DNA, 580 bp, Homo sapiens
ccttttctacatcttttccaatgttgtctggaatcaatttattaaccacttctttcaagtcatttgtctgcacctctcaggtcatgatttccatcatcttcttctggatttggcagactgttggtgctaagcataagaggtcttcagtatcagattgttgtgttttttagtaaaaccaacacaaaacataagaaagaagtaaccatcggtagtcttgacatcaacatgagcttcratcattgttgaacatttttcaaccttggaacatattttgtcacaggtaagacccatgccatagaagttagtcaggcaatttttgccctgaacatcttcagtaatcagcttgaattttctaaatgcaacttcatcattctgcaaatctgcaagactcatttcaaacacaagacccttgagaccatcagatgcaatttgggttccttgggtcctggtgaccaagtctttccaatatttcttatattgaacatagcaggtgctttcacatcatactgatctttcttagagaatggaccaactactttcttcttaactccctttttgccacctttcataaggcacttgt

SEQ ID NO: 642534 - DNA, 580 bp, Homo sapiens
ccttttctacatcttttccaatgttgtctggaatcaatttattaaccacttctttcaagtcatttgtctgcacctctcaggtcatgatttccatcatcttcttctggatttggcagactgttggtgctaagcataagaggtcttcagtatcagattgttgtgttttttagtaaaaccaacacaaaacataagaaagaagtaaccatcggtagtcttgacatcaacatgagcttcgatcattgttgaacatttttcaaccttggaacatattttgtcacaggtaagacccatgccatagaagttagtcaggcartttttgccctgaacatcttcagtaatcagcttgaattttctaaatgcaacttcatcattctgcaaatctgcaagactcatttcaaacacaagacccttgagaccatcagatgcaatttgggttccttgggtcctggtgaccaagtctttccaatatttcttatattgaacatagcaggtgctttcacatcatactgatctttcttagagaatggaccaactactttcttcttaactccctttttgccacctttcataaggcacttgt

SEQ ID NO: 642535 - DNA, 619 bp, Homo sapiens
taatattcgactccttgttacttatgcaaatttctgcagtgggcttgaatttctcctcagaaaatgggattttcttttctattgcattgttaggctgcaaattttccaaacttttattctctgcttcacttgtaaaactgaatgcctttaacagcacccaagtaacatcttgaatggtttgctgcttasaaatttctctgccagagtgagccgagatcacgccactgcactccagcctgggcaacagcgagactccatctcaaaaaaaaaaaaaaaaaagaaagaaatttctctgccagataccataaatcatctctctcacgttcaaagttccacaaatctcttaggcaggggcaaaatgctaccagtctctttgctaaaacataacaagagttacctttgctctagtttccccaaaattcttcatttccatctgagaccacctcagcctggactttattgtccatattgctatcaacattttgggcaaagccattcaacaagtctctaggaagttttaaactttgccacgttttcctgtcttctcctgagccctccaaactgttccaacctctgcatgttacccagttccaaagttgcttatacatttttgggtatc

SEQ ID NO: 642536 - DNA, 572 bp, Homo sapiens
gatgacagggcaagaaaaagcttgattaggagtactttttagagcaaatcaaatccaaagatagccatttaaaagttacattgacaatacataatttaatcaggtttaggcatcagtcctgatatcaaatttaaaataagctctacataaacacaatcattctgcaggtaatttagtatttaggtgaaggtggattaataaaagagcttttagtgggtacagaagagatgctgacttttaaatatctaatagctgtaccaatattgagcccaaactgttttttaaaatatagctttaagacaaataggaaattcaagtgaagaaaatcaacccagaagagacattgatcatcttacaacagtgaccgcaaagttatttatttgtctgtctgttggttggtttytgaacaaacgcatatagaaagcaaagctccacaagaacaaagatttttgtccatttttcactgctgattaattctttgtgtatagatgatattcagcacatcctgggcactctagaaatatttgttaagctaatgaatccattggttttataattataatatttatttt

SEQ ID NO: 642537 - DNA, 550 bp, Homo sapiens
ttatagaaatgtcattggtataaagaaaaaatgaagtcatgttatctcctccacatcgtgaggcatcttgcttcttttcctgttgctttcttacttccatagcatttttctatttcccttatgaagacctaatggatcttaaacgttaatggatcctccctgctccccactttcaaaggcttttcttggggaaaaaatatgataaatttattcattcycagttgcaaatgactgataaggggaaatatgcaacctttcctaaggataggtgaattttcataaaggagaaatccctgtttgaagagctcctcctaaagaaagttcaaatagtagaattccaaaaatcagcacacctggaattagatgctaaattgagacagagtgaagggcgtgatgttccactcgcttctagttgtgtggtcttctagtcaccacacaacccaagtgactaagtgcacacacatattgctttaattttgcttagttatgtaaccccttgcacattcttaagttgccataaaaaattgtaagctacaactgaaaaggatga

SEQ ID NO: 642538 - DNA, 550 bp, Homo sapiens
ttatagaaatgtcattggtataaagaaaaaatgaagtcatgttatctcctccacatcgtgaggcatcttgcttcttttcctgttgctttcttacttccatagcatttttctatttcccttatgaagacctaatggatcttaaacgttaatggatcctccctgctccccactttcaaaggcttttcttggggaaaaaatatgataaatttattcattcccagttgcaaatgactgataaggggaaatatgcaacctttcctaaggataggtgaattttcataaaggagaaatccctgtttgaagagctcctcctaaagaaagttcaaatagtagaattccaaaaatcagcacacctggaattagatgctaaattgagacagagtgaagggcgtgatgttccastcgcttctagttgtgtggtcttctagtcaccacacaacccaagtgactaagtgcacacacatattgctttaattttgcttagttatgtaaccccttgcacattcttaagttgccataaaaaattgtaagctacaactgaaaaggatga

SEQ ID NO: 642539 - DNA, 585 bp, Homo sapiens
tcaccacacaacccaagtgactaagtgcacacacatattgctttaattttgcttagttatgtaaccccttgcacattcttaagttgccataaaaaattgtaagctacaaytgaaaaggatgatttttttggcctctagaacatattcacatttaaaaatttttttaagtcacacaattcctgtgtgtgtgtgtgtgtgtgtgtgtgtatttgttcagtagaatttaaatatcacagtgattaacactcctgattatctgctttcaaaattcaggaactaactctttttctaaaagtcataacacgtgcattgttcctttttaaactggaacttgtttttccactatatatcttctgcagaaaaatgtactttatgcttgaaggtcttttattgatcacctaccatatttatttgcaaccaaaaatatacagagattgaaatttaaatttcttttatgtcctatgaccataaaactttaagcaataatatatttcttaaatgaatgatcattacaaatataaaattgatagaacataaatatagagcacatttcgttaagcaataattaaacatgaaaaagcaaac

SEQ ID NO: 642540 - DNA, 573 bp, Homo sapiens
ggaagtgaacgagctcctaaatattcgggatatagcagagcaggcagctcatccaggaaccacacccctgggagaaatgtctttcggcaggctcactgctgcaccagtctttttcacgctctcacactcacacagccacacacatcttctcacacacagtagacttcatggtctgtggctgcatttcagtcactgtcctcctacttccagggagaggaagctagagatgatttcttcagagccatgctgcttcatgccaaggcttctgaacctgtggttcagcatgccagccgcttctttccaactacccaaaaagagccgtctcataagaccatgttccatgaaactcaccagcacaagtcttcagtggagacaaactatagtgtacaaacgattaaaatactgttaatgatgatatcaaggtacttgaggctctatcagggaaactttgagaatgagacattaccagaagctctggagccttaagcacttgtcagttgatgttttgaaaaaktgcattagctttatccagcatccatgtaacctttctcctctcccttgctctgtttccct

SEQ ID NO: 642541 - DNA, 430 bp, Homo sapiens
gaattctcttagatacaacctcttttaagatcaccaaattttatttgggaaatgcctatcccatcatcaatgccattctgaagattttacctgtgaatatagattgaatttgagagaaagatttgtttttctctcytcatttcaactagagagaattaacatgtgttaggcattcccctatgttttcaagattctacatttcgggtagaccttgtcctacataagcagctcattcgtggggagagaagggactgtgatgaagaaagtaagacagacacacaagcggtataacatgaagacacgtcagtgcagaggcccgcagagggacggaagaggaaggtgtcactgccactcactgctatggagcctcaagcaaggcctattttctcaggcttcagtctcaaaggttattaaacgaagcgttggctag

SEQ ID NO: 642542 - DNA, 425 bp, Homo sapiens
cttttaagatcaccaaattttatttgggaaatgcctatcccatcatcaatgccattctgaagattttacctgtgaatatagattgaatttgagagaaagatttgtttttctctcttcatttcaactagagagaattaacatgtgttaggcattcccctatgttttcaagattctacatttcgggtagaccttgtcctacataagcagctcattcgtggggagagaagggactgtgatgaagaaagtaagacagacacacaagcggtataacatgaagacacgtcagtgcagaggcccgcagagggacggaagaggaaggtgtcactgccactcactgctatggagcctcaagcaaggcctattttctcaggcttcagtctcaaaggttattaaacgaagmgttggctagaggtcactcagaattc

SEQ ID NO: 642543 - DNA, 559 bp, Homo sapiens
ttatttatttttatgtggagacagagtctcactcttgcccaggctggagtgccatggtgcgatctcagctcactgtaacctctgcctccagggttcaagtgattctcctgcctcagcctcccgagtagctgggattacaggtgcctgccaccatgcctggttaatttttgtatttttagtaaagacggggttttgccccaacactttggcaagccgaggtgggcagatcacctgaggtcaggggttcaagaccagcctaaccattgaatgtattatggtagaagtcatcagtgtcattgttaagggaattttggtaaaataatagatatgtgtcatgractaaatacttatattttctaaaatttatatattgaaaacttaaccaccaatgggctggaatggaagtaaattatataatataaagctattagcatgtgtatgtctgctgatagaaatagtccaatagaaaaagacagctgaggaagtaggaagggacaaccacaggaggcaggaaacaggatccagagcacaggtggaggctcaatctatacaaaccaag

SEQ ID NO: 642544 - DNA, 451 bp, Homo sapiens
ggtctaatcaacccacatgcacacacagtatttaaaaggcrtgcgatactacagaacaatgcttctctagagacaggatgttggcaacaaacaagatgctaaatagttgaaccaaaggacccacagacacaaaagcaggcttgggtgtgatcaagcatgacatgtgcatggggaggagtgtttttgtgcagtttggatgatagattggttgtgctaattaattgtgtattttgaagtttgttgccacttcacaccaagcatccccttaaaataaataaaaaaaaaaaattaaaagagagagagagagaagcaaaacaaaaaacctaatctaatattcaacaaacattctgcacccaaacagcacatctttgtctgaaaccttagttccaggaaccacttacaggctttcatcaacacattataatattaatcaagactcataatgcagagt

SEQ ID NO: 642545 - DNA, 501 bp, Homo sapiens
atgttggcaacaaacaagatgctaaatagttgaaccaaaggacccacagacacaaaagcaggcttgggtgtgatcaagcatgacatgtgcatggggaggagtgtttttgtgcagtttggatgatagattggttgtgctaattaattgtgtattttgaagtttgttgccacttcacaccaagcatccccttaaaataaataaaaaaaaaaaattaaaagagagagagagagaagcaaaacaaaaaacctaatctaatattcaacaaacattctgcacccaaacagcacatctttgtctgaaaccttagttccaggaaccacttacaggctttcatcaacacattataatattaatcaagactcataatgcagagtgatttgcatgccaacaaatatatttacactgtaaattgtttgttgaggagccttggagagaaatgcmattcactgccatagaactgaatcataagggaaatcccccactaaaatccagagaaaataa

SEQ ID NO: 642546 - DNA, 501 bp, Homo sapiens
atgttggcaacaaacaagatgctaaatagttgaaccaaaggacccacagacacaaaagcaggcttgggtgtgatcaagcatgacatgtgcatggggaggagtgtttttgtgcagtttggatgatagattggttgtgctaattaattgtgtattttgaagtttgttgccacttcacaccaagcatccccttaaaataaataaaaaaaaaaaattaaaagagagagagagagaagcaaaacaaaaaacctaatctaatattcaacaaacattctgcacccaaacagcacatctttgtctgaaaccttagttccaggaaccacttacaggctttcatcaacacattataatattaatcaagactcataatgcagagtgatttgcatgccaacaaatatatttacactgtaaattgtttgttgaggagccttggagagaaatgccattcactgccatagaactgaatcataaggraaatcccccactaaaatccagagaaaataa

SEQ ID NO: 642547 - DNA, 573 bp, Homo sapiens
gaagagaggtgaatgattcaaaaaatatttaagacaaaaatctaccttccccaatgacaactaagtcatacacctaagtgggggataaatgaaaggaaaattcgtggacaaatcccaggtttctgacaagacttgctaagagagattgtggtgttgttaagggagaaaggggttatagacraagtagtaaatggggaggtattgatgggtttatcttgagggtattgagtctgaggttcctgcttgagatatttccatgcatacatcttgagagagtggtcttcactggagatgtggctataacagtcatcatcatgaaacggtagttaaaatgatgatgataaagatgaattctcagggaggatgaaagagaacagtgaggaaaaaagctggcaccctataaccccagtgtgtaaggggaggcttcagggagagaaatccagaaaggagacctgaaagaaaggccccaaatggacagcaaaccaagagagattgttaggttataagaaagcaggagacagagaacaattgaactgcatgaaataaagcagaaaagtcttgaatgacacaggt

SEQ ID NO: 642548 - DNA, 573 bp, Homo sapiens
gaagagaggtgaatgattcaaaaaatatttaagacaaaaatctaccttccccaatgacaactaagtcatacacctaagtgggggataaatgaaaggaaaattcgtggacaaatcccaggtttctgacaagacttgctaagagagattgtggtgttgttaagggagaaaggggttatagacgaagtagtaaatggggaggtattgatgggtttatcttgagggtattgagtctgaggttcctgcttsagatatttccatgcatacatcttgagagagtggtcttcactggagatgtggctataacagtcatcatcatgaaacggtagttaaaatgatgatgataaagatgaattctcagggaggatgaaagagaacagtgaggaaaaaagctggcaccctataaccccagtgtgtaaggggaggcttcagggagagaaatccagaaaggagacctgaaagaaaggccccaaatggacagcaaaccaagagagattgttaggttataagaaagcaggagacagagaacaattgaactgcatgaaataaagcagaaaagtcttgaatgacacaggt

SEQ ID NO: 642549 - DNA, 573 bp, Homo sapiens
gaagagaggtgaatgattcaaaaaatatttaagacaaaaatctaccttccccaatgacaactaagtcatacacctaagtgggggataaatgaaaggaaaattcgtggacaaatcccaggtttctgacaagacttgctaagagagattgtggtgttgttaagggagaaaggggttatagacgaagtagtaaatggggaggtattgatgggtttatcttgagggtattgagtctgaggttcctgcttgagatatttccatgcrtacatcttgagagagtggtcttcactggagatgtggctataacagtcatcatcatgaaacggtagttaaaatgatgatgataaagatgaattctcagggaggatgaaagagaacagtgaggaaaaaagctggcaccctataaccccagtgtgtaaggggaggcttcagggagagaaatccagaaaggagacctgaaagaaaggccccaaatggacagcaaaccaagagagattgttaggttataagaaagcaggagacagagaacaattgaactgcatgaaataaagcagaaaagtcttgaatgacacaggt

SEQ ID NO: 642550 - DNA, 573 bp, Homo sapiens
gaagagaggtgaatgattcaaaaaatatttaagacaaaaatctaccttccccaatgacaactaagtcatacacctaagtgggggataaatgaaaggaaaattcgtggacaaatcccaggtttctgacaagacttgctaagagagattgtggtgttgttaagggagaaaggggttatagacgaagtagtaaatggggaggtattgatgggtttatcttgagggtattgagtctgaggttcctgcttgagatatttccatgcatacatcttgagagagtggtcttcactggagatgtggctataacagtcatcatcatgaaacggtagttaaaatgatgatgataaagatgaattctcagggaggatgaaagagaacagtgaggaaaaaagctggcaccctayaaccccagtgtgtaaggggaggcttcagggagagaaatccagaaaggagacctgaaagaaaggccccaaatggacagcaaaccaagagagattgttaggttataagaaagcaggagacagagaacaattgaactgcatgaaataaagcagaaaagtcttgaatgacacaggt

SEQ ID NO: 642551 - DNA, 489 bp, Homo sapiens
caataatacatgctgtcttgattagtgtagctttatagtaattcttgaagccaggtactgtcagttctccaactttattattttactccaatattgtgttggttattctgggtctttttcctgtccacataaactttagaatcagtgtctcgatatccacaaaataactttcatagctttcagggattttaattggaattccattgaatctagagctaaagttcagaagaactgaaatcttgacaatattgagtcttcctgtttgtgaacatggaacacctcttcatttagttggttcatctttcattttgttcatcagttttayagtttttcttatattaatcttgcacatactttgttagatttatatctaagtatctcattttgggagtgctaatatcaatggtactgtgtttttaatttcagtctccacatatttcttgggggcatatatgaaagtgattgacttttatatactaactttgtatc

SEQ ID NO: 642552 - DNA, 591 bp, Homo sapiens
tcattgtgtgtgaggggttgtgtctccaagatttttgtaaataaaagtgaaatcttttatatatgcagataagtttgtttttatttaaattcacaatgaaagatatatacatatataacgttttatatatatatatgtaaagttatatatatatatatayacacacacacacacacacacacacacacatacatatatatgggctgtcatacttctaggcatggcaaaatccgaaccactgaattgcaccttctagttgcttcctaatgtgactcacctgtctagatggcctgtctttctgtaggatattctatttaatgacacagggaaatttactcatgtgaacaaggaacatatgaatagtagctgatttaaaaacggtaagtggaaaagcttattcacaaaatgacataacttagagtggataatatagttttcttcatcttcatgaaggactgccatgaagaagcagcactggatttatttctgctacaaggaagaactagaaccagtggatgtgccttagagagggatattgcaactcagcaatgagaaggtctttcaaataccctacctgttccaccttagagt

SEQ ID NO: 642553 - DNA, 616 bp, Homo sapiens
tagtctaggtgtgagcaggaaaaggagaatgagagaccccagctggactgatggcaagggcaatgtgaggtcaagttataagagcacagacagcagatctgttgagtgccaaatagggaagtgttacaaaagaatcattacagaataacaggaatctgtagtcagtgtgctgaggaagtgcataataatttcaatagtcacttgagcagaacacaattaaggtggtgtattggctgtaaagtacagagtaaattatacattttctacayatgcatttctaaagatttatttcttctcgttttcttttttctcttttttttcttccttttctctctccttctctttctttctcaacttatttatttaaaatccatgataaggaaactcgactttccctacttataatgaaaatttgggttttcatgccagagcttcttaaacccttacaagtttctatggaaggatcctcctctacagagagtcccacaagctcagtctttcttagtgtcttgcccacatgttgagtgctgtttcatacatatgagtaaaatggagaaggctggagaaattcaggttaccttcgggtcagactccctgttattttggttgcctcgga

SEQ ID NO: 642554 - DNA, 561 bp, Homo sapiens
ttttatcattcttgcctcaaaagacacttttcttctatacccaaaagctcattgcttcagaaatggctttgccttgtactgtagcaccaccatttaagtgagtcacgatggaagaaggtrgacataaaggtgttccaaagccagactgtgactctaaaagaagagatgacaataccctagcagcttgctcagtgcatttttctgtggagataccatttgctaaaatctgtggttactcatctttcctaagatgcagccccattactgactccaaaaaactgcttcactagctaatggtgtcaccttgggttgggagtaagacccttagaataattttcccttttcccttttccatggtgcccagcagtatctgtgcagtgaatgtctccttagggaattggatgtgtttctctgaagctccttaacccattcacctgtgatctgattcccatcactccatgtccctcatctccttcagcgctgacacatggttggcatctgacttcaggaatgcctcaatctgcttgagaatggttcttctagactgagcagtatcctgtt

SEQ ID NO: 642555 - DNA, 561 bp, Homo sapiens
ttttatcattcttgcctcaaaagacacttttcttctatacccaaaagctcattgcttcagaaatggctttgccttgtactgtagcaccaccatttaagtgagtcacgatggaagaaggtagacataaaggtgttccaaagccagactgtgactctaaaagaagagatgacaataccckagcagcttgctcagtgcatttttctgtggagataccatttgctaaaatctgtggttactcatctttcctaagatgcagccccattactgactccaaaaaactgcttcactagctaatggtgtcaccttgggttgggagtaagacccttagaataattttcccttttcccttttccatggtgcccagcagtatctgtgcagtgaatgtctccttagggaattggatgtgtttctctgaagctccttaacccattcacctgtgatctgattcccatcactccatgtccctcatctccttcagcgctgacacatggttggcatctgacttcaggaatgcctcaatctgcttgagaatggttcttctagactgagcagtatcctgtt

SEQ ID NO: 642556 - DNA, 532 bp, Homo sapiens
cggcctgttcctactgtgttctcagctcctaggaagttatctcatgcaccttaggcactcactccatatctgttgaatgaatcttggcactttttttttttttttttgcatttycaaagacaaaatataaaaacaaaagtaaagaacacaaaaaagttaaagccaattgattttaattttcagtgattatttgattaaaattccaacctgtcactgcctcatttctttaaggcagtgagtggttctccaggaggagtccccagagccgcagtatccgggaacttgttgaaaatgcacattcttggtccctccagacccatgaaccaaaagctctttgggggctggcttcagcaatctgtttttgatgcacagaaaaggttgaaaaccactgctttaaggcatggatttccctaagttcacctcttcctctgaaaacaaaacaaaacgaccctgaatcttaaccccacggtacatattcagaaacatctctgccttctgatgtctgtcaggcatttctttgctcttccagact

SEQ ID NO: 642557 - DNA, 502 bp, Homo sapiens
ttcccctgggagatgctaaagaagacactgggagtctcggggatagtttatatttatcaggtaaagtactgtctgctcactaataagcttcataaatatttttcccttctcttgaacttaaagaagatccagatttgcaatctaaaaaaagagaaaaaaagaaacaaatttcaaaggttctaatacgttagtagaaaaatgtatctgcattactagctgctttgttggcgagactgtttgartatcatttatgtaatcctgacttcattgacacgccatcaactagccaagcatttaatcaccaagatagatgactaggtcaggcgcatactacctatttatatattttttacttctgtagttgttaaacctagaaaaggaattagattttttttttttttaactgaatttgaagctgaatttttctggcgactctttctgggtgaaaatatcagtccacaagatgttacacaacagtcccttactgatgatttctccctat

SEQ ID NO: 642558 - DNA, 587 bp, Homo sapiens
ggatggctgtcatcgacagtagctaggcctggggagcatttactcactagaggcagaaaatcactgcaaggcaatagtttctgaggcaaatgtgagcatctcctaaattgcatgaggcccagaaattgttttccccttcctaacgttagagaagtctataaaacttctcttgctacagccacaataggtactttgttgctgatgtttcacctagaaacctcagaagaacctgctcaccctggcagagttgccctgccagcattccacagacttccacagcaagaaatgggaggagaaagagcgaggcaggatgcatatcccggagcctgagcaaacccacaacaatgagcacatcatctctaacgaaaggcaatgagcagtgtgggtgggactgcaaacatcagtgcgtggcttggtaggatggaagcaaaaattaggaaccccgggataagcacaagaggagagtcttcacatctcctaaatcaagaatttacttasagccaagggagaaaggattggtcattagcatcagccacacattgcagttacccacgcctgtaaaatatgggagttgtagtttatttgtt

SEQ ID NO: 642559 - DNA, 629 bp, Homo sapiens
agttctctccaaccaaatattgtcatttctyttatcatgaaatacttattgattactcattacatgccagacgcattcaataagcatttttgagcgtctaatctatgtgagttctgtgccttagggataaacatttctgttcatatagagggaaagactttgttcccatcctcagagtggatacattttggtggtgaagacagtgtaatgtgtaacgcagtagttacggtgtggtgtgatagagccacacccaggagtttggcaagtgggaaagcctgagctcatatgacaccttcaggtatttagaagagagagccctgaaccaagcaggcagaagtagggcgctgcagggtgcactaaagggcagggagagggtggggatcgccccaggcctgccatgacatgaccatcagggcacactgcacctcctgggaaggccctgagtaggacaacttctgcctggcataagcattgtgtgttgtggaccttctcaggagaaggcaagctgtccattaagggattgttccagtatcctctggtctctccctctaagcaggtggcatgtctacacaccaggggcctacacctgcaactctaggcagcaggcatcacctggacaggatctggtg

SEQ ID NO: 642560 - DNA, 576 bp, Homo sapiens
tcctggaatcttggatggattaattaatgaatcggcaaataaagcacgtgatgaattacgaagcgtcgtgtcattataatttcatgataaagtgtcttgttctggatgacattacattttgagattgaaataataactggctccctcaaaattttaaaggagctcccaagctctttcagatggaagagaggaaacaaaggggatagggatctatgagggggaaaaagcaggcgcctgtgttggggtgtggaaagcgccctcggagcccaccctggctagcagaggtcaactttgtgtaaacgcagcccactgctacagaggcctgagcatcgcctgctccagtgatgaagagcgatgaggcttaagccgacgtgggctagcaaaakttttaaatgtactttataattattttatgacctttctttctttgtaaactgcatgtcatttcccctctccttccctgaccaccaggctgccccgtgccagagctctgcctcaaaactggaaaccttgccagaagcgagagctgaaattgctttttggtgggtccgatttcatgctgagtgggaagcggca

SEQ ID NO: 642561 - DNA, 600 bp, Homo sapiens
acagcttgtcagaaaattccagagaagagaaatgacaactggtgaaatwccctttaagtttattaaatacctgcctttcttcttttaaagaaagtgaaactccgtgacccatgagactaaaaataaaaaacttgagacaagggactgagggacggccattccatttaaatatgctcagtatgaaatgagcattctttaacaagaaatcattttgttaaagtgctaagcctttttcattatcgtttaatatctggtgacactggtagccataatgtatgtgtaaagaaaagattttattgtttgtgtctgatttttagagctatctgcaactgctttattctgattcactgagaaaatttcttagcttcactcccttctccaattaatgaactttcagtgtttctcaaggagcaaagatcatattaatctctctggtcctttctatcagagtctgagtaaatcacttatactctaatgacaccaatagggtaagaaggatccagcggcgtttgacctgtgttacctacttggtctgattttcagttcttttgttaatatagaagccctttgattatagctgagtataaagtaataataagg

SEQ ID NO: 642562 - DNA, 593 bp, Homo sapiens
tatctgcaactgctttattctgattcactgagaaaatttcttagcttcactcccttctccaattaatgaactttcagtgtttctcaaggagcaaagatcatattaatctctctggtyctttctatcagagtctgagtaaatcacttatactctaatgacaccaatagggtaagaaggatccagcggcgtttgacctgtgttacctacttggtctgattttcagttcttttgttaatatagaagccctttgattatagctgagtataaagtaataataaggattgttcttccatcccaaattgcatcctaactagaaagaactccacatatggaagtgttattgacatttgagagtttctttccattattcttgacacttctgtgcaaatagggtactcccttacatttgggggattacaaagagaagaaagaaagtgtatgtatgttgggaaaaaaagaaaatgttaattcctctaggcaaactcattagccctgtgattgtgaggattgtaggttatagagttatagttacataactgtacaatagaaagacctagagttttacagtctatccattcagcataggaatcatt

SEQ ID NO: 642563 - DNA, 593 bp, Homo sapiens
tatctgcaactgctttattctgattcactgagaaaatttcttagcttcactcccttctccaattaatgaactttcagtgtttctcaaggagcaaagatcatattaatctctctggtcctttctatcagagtctgagtaaatcacttatactctaatgacaccaatagggtaagaaggatccagcggcgtttgacctgtgttacctacttggtctgattttcagttcttttgttaatatagaagccctttgattatagctgagtataaagtaataataaggattgttcttccatcccaaattgcatcctaactagaaagawctccacatatggaagtgttattgacatttgagagtttctttccattattcttgacacttctgtgcaaatagggtactcccttacatttgggggattacaaagagaagaaagaaagtgtatgtatgttgggaaaaaaagaaaatgttaattcctctaggcaaactcattagccctgtgattgtgaggattgtaggttatagagttatagttacataactgtacaatagaaagacctagagttttacagtctatccattcagcataggaatcatt

SEQ ID NO: 642564 - DNA, 594 bp, Homo sapiens
agggtactctacattttgggaaattacaagttctttaattagcaatatggctgttagttgggctctgctattcagtaagttactgctcaaagtttagcatgtgtaccagggggaaattgttcagccttgtgttattgaactggctaatgatgtgggatcaatggctaatctgcacaggacactcctaagaggaatcctgccacatgcagtattgcaatcttttcatttctagtcaagaggaagtactaaagtgtaaaacatctctttacctttttagtcatgtttcaaacatgaatgcttgtgggttaagcacatacaagtactttattttacttttaagatcccattatttttttttcatcataaaaccagtcatttttcaaaaaaatcaaataaatgaagatttaccaagatagtgttgtggatttggtctctgagccttattacttattgttccctgattcacagagggatcrtcaaactactagaactctaggtttctttaaccttcagttggaaggaggttactgatataatagaggatgcacatttggaatttttgcttgttacccttcaaaggtacacccagttaag

SEQ ID NO: 642565 - DNA, 565 bp, Homo sapiens
ccagcaggtataagtaactaactgggagcctctccattcttccctaaatacacctgcagacttgatcgtgtgtgctgccgtgcatgtgaacttagccttccagattaccagaaacttttcaagttcctctgtgactatctcattccctaaatccctctattaagtttttgcctggtctcttgcttgccccagcatcagagactgaatcaactgagacatcaactttctccaattatttgccaccaactgctactcactgggtgaggatactctccatgggacttctgagcagatgagccctgatggagttgtcgaggtgcacgttaaaggaacrtgcatcccattgttcttaccaagattcagtagttactttcccataaatgtttttcaatttgttttatgcctttggttaattttcagagatctgaaatgattggtatggggaattgggggctttatattattgctcttggagaagaatttactaaggtacccctttaccattccagaagttacaccttacttgcactgaattttaaaccatgagtgacaagtttccaggtag

SEQ ID NO: 642566 - DNA, 634 bp, Homo sapiens
gaattcaggtttattgaaagataagaccaaagaaagagggaacagtacagagacttttaatattctcagtgagaaataatgaaatttaaactagggctagggaatgtggaggtcaataaatattagaaatgtttaaatatttagaggatggtattgttaaacctattctctagaagtgaaagctgagcttatgtaataaaataaatacagggtgctaagatgcatctcaggttctggcaagataaactgactgcatggtactaacattctctctcttatacaaatctcaataaacattttagraaaaatcaaatgaatatggtaactttaaaatgggtgcacagttttcaataaatataaatattttcattcagtacacattcatttttcccatgaatatccaatctcttctgaatttttttatatttaataaatttgttattaaaatttcaaaaggtgaaatatactaattttaaacctgaatataataaatccgtccagtcaggaattaatttgttcattcagtcagccaacaagtatttgaatatacagaaaatgtggatacatgatgaatatctgtatctgtattctgtccttgaataggttattttaatataaaacaggttaagataga

SEQ ID NO: 642567 - DNA, 495 bp, Homo sapiens
ttatcagttaaactccagataggccaatactacctttcaaccaaagaataaaaacacaagttttttctttcctaattaataatgctaatttcaagagtcatttatatcctgcatctaagtcactaaagatgtagccgatatcagcagttaatggttagtttgctctttaggacggtgatgaaactcaaagcaaatgaatagtttcaaaagctgtatgctaattatgttaacaaattatttggaaggattgatactggtaaaagctgtgaatacatttataatgatcaaaattagtatctaagttacaattgaacttccatgtagtggggagagctattgaatggttttcattaaatttattgtagacacactacactgttttgaatctccctatttccaaaatattggcaattgttccacaatatcatagstattttaatagacattatttcttaaagtccatggaaacaataggcctgtattgacgaagcatta

SEQ ID NO: 642568 - DNA, 556 bp, Homo sapiens
taaaaattaaaacaattgaattcatgaagatacagtagaatgaaggttaccagagactgagaagggtagtgggtggtgaggaaatagagttggttaatcattagaaaaatatagttagaatgaataagatcgtgtttttgataacacaacgtcgtgactgccgtccataatttattgcaccttttaaagtaactaaaagattattgaaatgtttataacacaaagaaatgataaatgcttgagatgatgcataccccatttaccttgaagtgatcattatgtattttttacctgtatcaaaatatctcatacaccccataaatacattcacccactatgtaccccaaaaattaattataaaaaaaaaaagaaataaatgaacaactacagagcttcaggtgaatacattgaattcatgaattcaatggctatttaaatttgatcttatttaatcactcagaatcatkgtttaataaaattaaatttaaaaacaattgtctaaatcttaccatgttttactcttcattggtccacatctcattgataaaataaatca

SEQ ID NO: 642569 - DNA, 556 bp, Homo sapiens
taaaaattaaaacaattgaattcatgaagatacagtagaatgaaggttaccagagactgagaagggtagtgggtggtgaggaaatagagttggttaatcattagaaaaatatagttagaatgaataagatcgtgtttttgataacacaacgtcgtgactgccgtccataatttattgcaccttttaaagtaactaaaagattattgaaatgtttataacacaaagaaatgataaatgcttgagatgatgcataccccatttaccttgaagtgatcattatgtattttttacctgtatcaaaatatctcatacaccccataaatacattcacccactatgtaccccaaaaattaattataaaaaaaaaaagaaataaatgaacaactacagagcttcaggtgaatacattgaattcatgaattcaatggctatttaaatttgatcttatttaatcactcagaatcatggtttaataaaattaaatttaaaaacaattgtctaaatcttaccatgttttactcttcattkgtccacatctcattgataaaataaatca

SEQ ID NO: 642570 - DNA, 620 bp, Homo sapiens
tcattcaccacaaaggctgctcattcattcaccaaatatttcatcattgtgcatgcactgttcttggccgtgagggtacaagagtacacaagatagatgaagtcactatttccatggacattataaaaatagtataacaaataaatgaatatgtatgtatcttagttttaggtggagatgagctctgaagagaaataaagcaaagtaaggagtgtaaatgggcataaggttgggtgggtggagtgacttggayaaggtggtcagggaaggctgctctgaagagttaacctttaagcaaagacctgaatgaacagagaatgaaggtctgtggaaagagcagtcctcagacaggggaaataatagaacattccttgagacaggaacatgcttggcatgttttttaaatgcaagaaagctggtatgactagagaagagtgaccaaggggaagactgtaggacacctgaggtgtgataagtaaccaaagccagatcatgcagggccactgtagaccatgagatgccactgggggagtttgggtgagatagtaatataatctggtttgcattttaaaactattattcctgctgctagctaaaaagacatgggaaagaggtgaagt

SEQ ID NO: 642571 - DNA, 613 bp, Homo sapiens
tgcctctcttcatgactagaatcatgagttgtgttagcattgaactgtatctcctaatcaactcagcttctgcctatttgtctttcctagtcagcgtatgatgagtttggccaaacttccaaagatagaatatgccattaacattgattttttaaaatctgtaatagggtattgtgttggcgttccttcattgaaattctaagtatgtggattaatcataaaatcatattcttcagaaccattggaagtataatattcatatgttttcatatatcaaaaccacgtttgtgctgtgtcttcctatttgatttttctctttttcctcttgtaatatgataaattgcaagaggcaattcctggttgttgcttatgaaaatttcaagacaaaatctagatatgctttttctagggcattgtttcaagacagttgcatagttagttatcttcctgccaccaggacataaattaagctattcattaaccaactaatattgttaaawgtctactataagaaggccttcagggaatacaaaaagatgctaatattttgttctcaaagaactcataatttagatgagaagaaaatgctcagtcaaatgaaaaatcagttaat

SEQ ID NO: 642572 - DNA, 575 bp, Homo sapiens
ctgctcctctgtaaaatggcatctgactgtgtggtagaggaagcaatgtttaaatgactttggagatttaatacaaaaacaggaactcatagtgcgaggatcttcgggaaccacacaaattatgatatttgaggtgtttgtcttgtctaaaaactgaatcagtgattgataggctgcaatttgttctccctgactctttggattaagattgtgggtggttagagatgacatactagtacctatcatactggtcatatctatgccctcagggcagatagaatcttttggggttcctgcacactacgtaatagttgatagccaggacctctgttccaggcccacgtgtttggatccctcctaccaatgagtctatgctattttagaagtggttcctttcagacctccctacaagcttacagcccccttgctagtatcccaagagaagcatgacacaagtccaatrttctgagctactccatctctcagcgcatatttccccaaaattgatcaattaccaagtagcagtgcttttgaagttcatgcctaaaaaggcaaatttaaatctttttcttctt

SEQ ID NO: 642573 - DNA, 493 bp, Homo sapiens
ttttggggttcctgcacactacgtaatagttgatagccaggacctctgttccaggcccacgtgtttggatccctcctaccaatgagtctatgctattttagaagtggttcctttcagacctccctacaagcttacagcccccttgctagtatcccaagagaagcatgacacaagtccaatgttctgagctactccatctctcagcgcatatttccccaaaattgatcaattaccaagtagcagtgcttttgaagttcatgcctaaaaaggcaaatttaaatcttttycttcttctatcatatattcttactactcttaaacagaaaaccttgtaactgtcattggtaaaagggatatcttctctagaactacagaagaaattctataatctaggtctttagacttggttcatattattttagagaaattcgcaaagtttgtttgctgtccaaatctaataataaagcctagtattttgatgtacaatcttatt

SEQ ID NO: 642574 - DNA, 314 bp, Homo sapiens
ctgcacaacacccccttacattagcgtttgagtagctaggtgccacagcttagcctagttgaaaaatgawaatcacagagcctacattaaattggtgataactggaagggaataaaagggatcaattatgaacaaacaaataactagataaaacaggcaaaggtaacaaagcgctaagaataatgtgaaaggtttactttggtaactgcgaaagtggtgtacatgtaaaaaaacaataagtagcttatttggagaagacgttaactaattcagttttagatgctaatgaatgtgagttaaataatcaaattatt

SEQ ID NO: 642575 - DNA, 490 bp, Homo sapiens
ctagggcagaaggtgactctgcaatctaccagtggagtttcttttttccttgggaaaacctcaattttgctcttaaagatcagcctttcaactaattggatgatctcatttacttaatgtcaactaactgtagatattaatcacttcacaaaataactgcacaacacccccttacattagcgtttgagtagctaggtgccacagcttagcctagttgaaaaatgataatcacagagcctacattaaattggtgataactggaagggaataaaagggatcaattatgaacaaacaaataactagataaaacaggcaaaggtaacaaagcrctaagaataatgtgaaaggtttactttggtaactgcgaaagtggtgtacatgtaaaaaaacaataagtagcttatttggagaagacgttaactaattcagttttagatgctaatgaatgtgagttaaataatcaaattattggaggtattttgcccaatca

SEQ ID NO: 642576 - DNA, 314 bp, Homo sapiens
ctgcacaacacccccttacattagcgtttgagtagctaggtgccacagcttagcctagttgaaaaatgataatcacagagcctacattaaattggtgataactggaagggaataaaagggatcaattatgaacaaacaaataactagataaaacaggcaaaggtaacaaagcgctaagaataatgtgaaaggtttactttggtaactgcgaaagtggtgtacrtgtaaaaaaacaataagtagcttatttggagaagacgttaactaattcagttttagatgctaatgaatgtgagttaaataatcaaattatt

SEQ ID NO: 642577 - DNA, 572 bp, Homo sapiens
gtgccctgtgtcctagccatggctaaaaggggccaaggtacagttcaggccatggcttcagagggtgcaagccccaagcttyggcagcttccacttggtgttgaacctgcgggtgcacagaagtcaagaattgaggtttgggaatctccacctagatttcagaagatgtatggaaatgcctggatgtccaggcagaggtctgtggcaggggtggcgctctcatggagaacctctgctagggcaatatgaaagggaaatctggggttggagccccacacagagtcctggagcactgcctagtggagctgtgagataaggaccactgtccttcagatcctagaatggtagaaccactgatagtttgcactgtgtgcctggaaaagccggacagacaatccagcctgtgaaagcagctgggagggagactgtatcctgcaaagccacagggcagagctgcccaagaccatgagaatccacctcttgatcagcgtgatctggatatgagacattgagtcaaaggagatcattttgaagctttaagatttgactgccctgctggatttcagacttgc

SEQ ID NO: 642578 - DNA, 455 bp, Homo sapiens
atttgaaccatgtaataaacactgcttagggctaaaaatgcaatcatgcggaaactagaagttagagatgctaggagcaagaagataatatctaaggtcaattgtatcatctaatcaaagtttgtattacaataaaataattgtgttcttatttttaaatmaaatataagaagcaacactggcctctatttcacgctataagaaattgcattttatgtgtaaatttgaaattatcaacataaaatctgttttcctgacttagttgaaagtatgtttctaaacgctttactgtacctttgtgtcagattcaaaataaaattgagaattgattttccccaaatcttttgttgaacaagcaggtggggttgtggtaaaggaggtaagaaaataaacacaaattatccaaaagcaggtgccaagccacaaactccagcaaaaataattgatagagtttt

SEQ ID NO: 642579 - DNA, 549 bp, Homo sapiens
tttaatattaattcctataaaaagtctttttaaaagaagcatctctgcactgacaattttaaatggmatattctataaaaattcatttttaggtcaatatatttatttgactatgactttgctagagttagtgatatcatatcaggttaatgggaaaaataataagtactatggggtaagcaagtctgaggagaaatgcactttagacacattgaactgtattatgcttatgtcatgaaagctgctaaaaatacagtatgtacatccaaggtaataggaaggcctctaagacgtgggctttaggaactgctaagcagttaaaaataaatcataacagtgttgtacttttttttttagacaaggtctcttttgcccaggctggagtgcagtgactggcatgctcatagctcactacaaccacaaactctaggctcaagcaatcctctcacccccacagtagctgggactacagacacacactatcacgccctgctaaatgttttgtttggttttggtttgggggtttttgtttgtttctttggtttttag

SEQ ID NO: 642580 - DNA, 549 bp, Homo sapiens
tttaatattaattcctataaaaagtctttttaaaagaagcatctctgcactgacaattttaaatggaatattctataaaaattcatttttaggtcaatatatttatttgactatgactttgctagagttagtgatatcatatcaggttaatgggaaaaataataagtactatggggtaagcaagtctgaggagaaatgcactttagacacattgaactgtattatgcttatgtcatgaaagctgctaaaaatacagtatrtacatccaaggtaataggaaggcctctaagacgtgggctttaggaactgctaagcagttaaaaataaatcataacagtgttgtacttttttttttagacaaggtctcttttgcccaggctggagtgcagtgactggcatgctcatagctcactacaaccacaaactctaggctcaagcaatcctctcacccccacagtagctgggactacagacacacactatcacgccctgctaaatgttttgtttggttttggtttgggggtttttgtttgtttctttggtttttag

SEQ ID NO: 642581 - DNA, 549 bp, Homo sapiens
tttaatattaattcctataaaaagtctttttaaaagaagcatctctgcactgacaattttaaatggaatattctataaaaattcatttttaggtcaatatatttatttgactatgactttgctagagttagtgatatcatatcaggttaatgggaaaaataataagtactatggggtaagcaagtctgaggagaaatgcactttagacacattgaactgtattatgcttatgtcatgaaagctgctaaaaatacagtatgtacatccaaggtaataggaaggcctctaagacgtgggctttaggaactgctaagcagttaaaaataaatcataacagtgttgtacttttttttttagacaaggtctcttttgcccaggctggagtgcagtgactggcatgctcatagctcactacaaccacaaactctrggctcaagcaatcctctcacccccacagtagctgggactacagacacacactatcacgccctgctaaatgttttgtttggttttggtttgggggtttttgtttgtttctttggtttttag

SEQ ID NO: 642582 - DNA, 379 bp, Homo sapiens
ttctccctcttatgttcatgtcacagacacttgcgctattggtagtccatcaggggagayagcaaaggaattgaaacatttgaatcacacagtgtttaatatttaaataaatattttactccattccctaaatatttattataaagagcaaacgctccaaaacaacctaaattgcctattatttatcacgaattctgctattagcctagaagatgatctacagatgcatgaattggttctattggtaggaaataggccttttccactacaatttcctgtagccccaagcagaaagcaccaatttgtgatttttctaatactctctgaatactacttactaaagatgcatgttggttgaggtaaattctgagcactaagc

SEQ ID NO: 642583 - DNA, 625 bp, Homo sapiens
acttaaatatttagtaattgcacaaaatatatctaagtcctgatggcacaaaacctgactccctgctgtgagatgtgagcttgtccagttgtgaagaaagaccataatacagtcatagattctctaaagagaaaaatataggcaagaagtatacaaagcatttggaagatgaattgatttaatttgttcatttggttagcattataggtgaaaattgtaccttaaccatctgatattaggtgtatcacaatggccaagrcagtcaatacctcaatctccttgtagtttaatgtccatctacagtaaaaaaaacaatgacaacacacatcattttagaagaaaaaatgaagtatcatagaagtctcagaggaaaaggcagacagtttttcaggaaggtaaaggaatgaattattctaagactatctggtgtcaatatgaatgaattgaaatttacagatagataacattcttcatttttaaagaaaagtattatttcccaagtattattctagttgtttccactgtcttccaagaatttacagtatgaatggctgctgttttttctttgagagctgtccttttcttaagaaccagaagcctccatcaatagaggctgctgttttaa

SEQ ID NO: 642584 - DNA, 474 bp, Homo sapiens
cacgaggtcaggagatcgagaccatcctagttaacacggtgaaaccccgtctctactgaaaatacaaaaaattagccaggcgtggtggcaggcgcctgtagtcccagttactcgggaggttgaggcaggagaatggcgtgaaccagggaggtggaggttgcagtgagccgagatcgcgccactgcactccagcctgggcgacagagagactcaaaaaaaaaaaacaaaaacaaaaacaaaacaaaacaaaaaaaaccagagggaaaacattagtttkgctagggatattagggtggaggaaatatacagaaaaaactttaaagacttggcagaataatagcaaattatacagtggaaaaggacgggaatggtaattgtcttagatcaggttctctggaagcatagcttaaggcaaagattcaagtacatatgatttattaatgaagagctccccaggaaaccctgtaagacagg

SEQ ID NO: 642585 - DNA, 474 bp, Homo sapiens
cacgaggtcaggagatcgagaccatcctagttaacacggtgaaaccccgtctctactgaaaatacaaaaaattagccaggcgtggtggcaggcgcctgtagtcccagttactcgggaggttgaggcaggagaatggcgtgaaccagggaggtggaggttgcagtgagccgagatcgcgccactgcactccagcctgggcgacagagagactcaaaaaaaaaaaacaaaaacaaaaacaaaacaaaacaaaaaaaaccagagggaaaacattagtttggctagggatattagggtggaggaaatatacagaaaaaactttaaagacttkgcagaataatagcaaattatacagtggaaaaggacgggaatggtaattgtcttagatcaggttctctggaagcatagcttaaggcaaagattcaagtacatatgatttattaatgaagagctccccaggaaaccctgtaagacagg

SEQ ID NO: 642586 - DNA, 418 bp, Homo sapiens
aaaggttggcttcaggcttacaagacaaatctcctcccttcatacactgtcactgaagaggaaaagtatgaatagtcttattgctcttgaccagctatatttataattccacataaaccaaaccacaaaaaggctgcttaaattagataactaaatgcatttttaaaaagaatttaaaatttgaaaggaggaaaaaaaagctaaaggttatcaaaatctaaaaaaagggtaagattaaagttctccagtctccrtattaaaaatctgaaaggcaaaagttagcacatctaaattgaataaagaaacataaaatatattttttcagaccaagtataaactagaactactttaaccttttcattgactttcttttctataagaatgtaagttaaatattttttattttggtgaagaattc

SEQ ID NO: 642587 - DNA, 539 bp, Homo sapiens
atctgacatgaaagcaagaatcctgcagggcttataaacaggatggaagaaaatactgccagaagtgcatactaaagccattgtttccagtccttttcagtaaggggtttctgcctcactctggagtgcaggcctagtgcaatgacatataaatctctatatctagaatattttaagtgtatatatatatatatatatawaataaatttaatagaacattaagacgatgcatagaataagcagcagagtttaatagagagcttgaagacaggaaaatacatttaaaaaattatttaggttgcaaagatgtgaaaatataaaagagtatttaaaaatcagagaagagagagttaaaagttgcaacacatgtcttttcagagtttcagaatgatttaagagtgagaatggggagatggaatatttgaggtgaaacagcaatcagaaacctaggacgccccctaaatctcaatgattaataaaagagaatccagcttagacatcaacattgatactgtattgcacaaagtaaaaaagagatt

SEQ ID NO: 642588 - DNA, 585 bp, Homo sapiens
gatggacccacccaggctacagagttatcttgcagaagattttttaaaattaatatctgcatcatgaaacacttctaaactgtacagcattggtacattctatgatttccttgggaaaccaatttccccacataccatctatgcatgcaaaacagttatgtggcgtaaagccacagtcactggccaagacttaccttttacattgtggtagtttgtcactacaggtaaacagagagcagtgctacagaatcagctgctatctgggaggyctgtcttagacagtttttgagaaagaatattgcacccagttcactgttatatgaagagcacacttttaacattgtggaaccagttactagatgttacgggttggattgtgtcccctgacacttcaaattcatgtcttcattacatagtattctgtttgtatggatatttcagaataaatgattctgctcaacttagtaaacaattttttcagtataggtgttaattcttcgcttcattctattggccatcttatttcataggacaacagaatagttaacaatttataatttggagtcatacggacctgagtacaaa

SEQ ID NO: 642589 - DNA, 585 bp, Homo sapiens
gatggacccacccaggctacagagttatcttgcagaagattttttaaaattaatatctgcatcatgaaacacttctaaactgtacagcattggtacattctatgatttccttgggaaaccaatttccccacataccatctatgcatgcaaaacagttatgtggcgtaaagccacagtcactggccaagacttaccttttacattgtggtagtttgtcactacaggtaaacagagagcagtgctacagaatcagctgctatctgggaggcctgtcttagacagtttttgagaaagaatattgcacccagttcactgttatatgaagagcacacttttaacattgtggraccagttactagatgttacgggttggattgtgtcccctgacacttcaaattcatgtcttcattacatagtattctgtttgtatggatatttcagaataaatgattctgctcaacttagtaaacaattttttcagtataggtgttaattcttcgcttcattctattggccatcttatttcataggacaacagaatagttaacaatttataatttggagtcatacggacctgagtacaaa

SEQ ID NO: 642590 - DNA, 528 bp, Homo sapiens
tgccccttcttcactcagtgagcagtgttaaacataagctggctaccactctctgcagcacttccctcaggtttattttaaacctttagaactgccttccagccacttctctttcctcacctgctttcatttaatttagtacttgcctcctcytggattatgcatcttatttctgtctcacatttaaatggctgtctgatgaaaaaccctcactacttctgcctccttcatttacatttacatctctgtccattacctttctttcagtataggatataagctccagtggccttcaacttaattgtttctccttcttttgcgtctttttagacatttctccaatttctatgttaaaactaatttctttttgtgccatctccctgaggaattccatttgtaatcaaaatcttacccataaactccatgcatataatggccaaatcaactccacacctattctttggcgctgacttcagtcattcagctccagtcatgcattggtttcatgtcaaaactaatattaccttt

SEQ ID NO: 642591 - DNA, 608 bp, Homo sapiens
ccttgggattcaggtcagccttcccagacctaacctctaggcctagacatgcacacccagcatccaatagggttctagctgacataggctccaggctggtccccaagtctctaggctccaggccagtcccaatgactccagkcatcaggtctacacctgcaatcataggctccagaccaagacccacatacccagtctttgaaccagttccagcaccaacttgaccccaggcatgaggccagtgcccatgggtccaggctccagaggaccccagggcccaagcctgttctatcatacctaaagtccagacccaccaaatagacaccagtgccatgttggaacccataaactgaggctcctagaccaccctggcaaaccagggtccaggctacgtcctgtggactcaggatttaggcttatccaagtggccctaagaacaaagtccattgccagggcacgttcaggacctgtgaaaccaggcttcaggctggtacccatggacacagggtccaagcctgccttgtggacccaatatttaggccaattcccacaaacccaattaaaaagtccactccagtgaatccagacttcaggacctagacaccagg

SEQ ID NO: 642592 - DNA, 564 bp, Homo sapiens
tgaaccagttccagcaccaacttgaccccaggcatgaggccagtgcccatgggtccaggctccagaggaccccagggcccaagcctgttctatcatacctaaagtccagacccaccaaatagacaccagtgccatgttggaacccataractgaggctcctagaccaccctggcaaaccagggtccaggctacgtcctgtggactcaggatttaggcttatccaagtggccctaagaacaaagtccattgccagggcacgttcaggacctgtgaaaccaggcttcaggctggtacccatggacacagggtccaagcctgccttgtggacccaatatttaggccaattcccacaaacccaattaaaaagtccactccagtgaatccagacttcaggacctagacaccaggcctttatatctgattatctgtgtgccaaatccagtttggctaaggactccatcagcaagccagccctgaatcacaccaataacttgctaagaatttctagacaagtagaagactggtaaaggtctttttcaccaaagaacagtctgcaaagagta

SEQ ID NO: 642593 - DNA, 564 bp, Homo sapiens
tgaaccagttccagcaccaacttgaccccaggcatgaggccagtgcccatgggtccaggctccagaggaccccagggcccaagcctgttctatcatacctaaagtccagacccaccaaatagacaccagtgccatgttggaacccataaactgaggctcctagaccaccctggcaaaccagggtccaggctacgtcctgtggactcaggatttaggcttatccaagtggccctaagaacaaagtccattgccagggcacgttcaggacctgtgaaaccaggcttcaggctggtacccatggacacagggtccaagcctgccttgtggacccaatatttaggccaattcccacaaacccaattaaaaagtccactccagtgaatccagacttcaggacctagacaccaggcctttatatctgattatctgtgtgccaaatccagtttggctaaggactccatcagcaagccagccctgaatcayaccaataacttgctaagaatttctagacaagtagaagactggtaaaggtctttttcaccaaagaacagtctgcaaagagta

SEQ ID NO: 642594 - DNA, 639 bp, Homo sapiens
aaatttagggaactttaattagttcagttaataatcttagttttaaaaatgtttaaagattcttttcttctcaaataattatcttttcttcttctcctttgatttatcctatgctttattatattgaccattatttcctggataacgtcttaaaaatgttttaaaaacggtggtaacagacggctttttttttttttcgggatcttagggaaaaggcaatttgtgttccactgttaagcatgctatkgactatcggtttaaaacagtctttggagttaatatgtatttaatgcctttctaaagtcaattcaacatattttaacttctgaatcactggatctgctattctatattaatatatttcctagcattaaaatagaaattcacttctaagataaatcctatttagacgagatagggcgcttttagggtgatatggctatagacaataaaccctattttgtagttctaagttattctgttaactaaatctctgtaattcctttgtgtataaccttgtcacttatttttaccaaagtaaaaatatttattttgtggttatcttttcaggttttgactttaagactataccatatccagaacataaattattgagttttctgctactcctttactttg

SEQ ID NO: 642595 - DNA, 639 bp, Homo sapiens
aaatttagggaactttaattagttcagttaataatcttagttttaaaaatgtttaaagattcttttcttctcaaataattatcttttcttcttctcctttgatttatcctatgctttattatattgaccattatttcctggataacgtcttaaaaatgttttaaaaacggtggtaacagacggctttttttttttttcgggatcttagggaaaaggcaatttgtgttccactgttaagcatgctatggactatcggtttaaaacagtctttkgagttaatatgtatttaatgcctttctaaagtcaattcaacatattttaacttctgaatcactggatctgctattctatattaatatatttcctagcattaaaatagaaattcacttctaagataaatcctatttagacgagatagggcgcttttagggtgatatggctatagacaataaaccctattttgtagttctaagttattctgttaactaaatctctgtaattcctttgtgtataaccttgtcacttatttttaccaaagtaaaaatatttattttgtggttatcttttcaggttttgactttaagactataccatatccagaacataaattattgagttttctgctactcctttactttg

SEQ ID NO: 642596 - DNA, 639 bp, Homo sapiens
aaatttagggaactttaattagttcagttaataatcttagttttaaaaatgtttaaagattcttttcttctcaaataattatcttttcttcttctcctttgatttatcctatgctttattatattgaccattatttcctggataacgtcttaaaaatgttttaaaaacggtggtaacagacggctttttttttttttcgggatcttagggaaaaggcaatttgtgttccactgttaagcatgctatggactatcggtttaaaacagtctttggagttaatatgtatttaatgcctttctaaagtcaattcaacatattttaacttctgaatcactkgatctgctattctatattaatatatttcctagcattaaaatagaaattcacttctaagataaatcctatttagacgagatagggcgcttttagggtgatatggctatagacaataaaccctattttgtagttctaagttattctgttaactaaatctctgtaattcctttgtgtataaccttgtcacttatttttaccaaagtaaaaatatttattttgtggttatcttttcaggttttgactttaagactataccatatccagaacataaattattgagttttctgctactcctttactttg

SEQ ID NO: 642597 - DNA, 569 bp, Homo sapiens
tatgacaaacccacagctattattgcattcaataatgaaaagtagaaagctttttctataggctctggaacacaacaaggattctcaatcttgcaacttcaagcatagtacttaaagtcctagtcagaaaaattaggcattagaaagaaataaaagacatcaagattggaaaggaagaaataaattgtttctgtttgcagatatcatggtctcatatataaaamtcactaaaaatgctaccaagaaactgtcaggataactaataagcaaattcagtgattcttcaaaatagaagatgaacatatagacttggggtggagcaagatggtggaatagaaggctttaccaattgttcccaccacaaagacaccaatttaaccatgatctacacacaaaaaagcacctttacaaaaaacaaaagtcagatgagcaatcacagtacctggttttaacttcctatcactgaaagaagcactgaagagataggaaaaacagtcttgactcactgatcctacccctcccccacaccctggcagcagtggcatgatgcggagagcatttctgtgata

SEQ ID NO: 642598 - DNA, 438 bp, Homo sapiens
tcctagctgtggtggctacaggaagagactccctccacttgagaaaaagtgaaaaaaataaagggaactttgtgttgccaccttaggtaccagccctgcgccagtgggacagagcaacaagcagactcttggggtccccaattccaggatctgactctttgatgacatttctggacctgccctrcaccaaactggagcccactgccctaaagggtaagtctcagtccaggcagcattcaccacaaggtgacagagcccttgggcattaagggaacatcagcagtagtctggcagtactccccgtgggcctgtggtggcagtggtcatggggtgagcctcctctgcctttggaaaggagaagaaggaataggaaagactgcatgctgtggtttgaatgcaagctctgctgtagcacaagagtccaagggaggtgcctgt

SEQ ID NO: 642599 - DNA, 552 bp, Homo sapiens
cctaaaatctgcaagatattttatgtacatatttatttaactttcaaaatgatgttacatggcaggtgttgtttaatttccaaatatttgtagattttccaaatttccttctggtattcattttcaatttcattctgctgtttaatttacatttaattaattctattttagtcaaagaatatgcatggataatttaagttctttaaaacttcttgacgcattttatggwctcttgacaatatttcatgtgcacttgagaacagtatattctgttattattgagtaaattgtttaatagatgtaaacttggtctagctgtgggacagtgagtgctcttcaaatcttccatattcaggctcatcttctgactggttgttctcttaattattgagaatggtgtattgatgtctgtaactactattgaggaattgtctatttctccctttaattctgtcaatctttccttcatgttctttcaggctctcgttaggtgaatgtttttataaatattgaactttcctgatgaactgacacatttattattataaaatg

SEQ ID NO: 642600 - DNA, 561 bp, Homo sapiens
ctgaacattagtccggtgggtctattagtaagaagggaaacagaaagacccattgagaacatcagaggagcataattcttcaatatttggttcttaatggctccactgatggggaaagcttaygtaatatttatgaagaatatcttgattggcttggaccaataggaagcagggttggaggatgcatattctactgtaaaattggcaaatagagagattgggggaaaaaagatgtaggaaccatatagcatgaattaatccatgcttatgcaaaaacagctttttcacattttctaattcaaaaatttatagaggacttatattttaagtgtaaaataaataatagtttgacttcacagaccttttaattgaacaagaagtgtatgcattattttagtcataatgagaaaagcttactggtcgttaatgatgttttgcacactgcctatttatttatttactaatcttttcgatttggcaaaatagaacccaaattccttcatgataattaaaattctaataatttattttagccaagtgcaacttagtgaaaataaatat

SEQ ID NO: 642601 - DNA, 561 bp, Homo sapiens
ctgaacattagtccggtgggtctattagtaagaagggaaacagaaagacccattgagaacatcagaggagcataattcttcaatatttggttcttaatggctccactgatggggaaagcttatgtaatatttatgaagaatatcttgattgkcttggaccaataggaagcagggttggaggatgcatattctactgtaaaattggcaaatagagagattgggggaaaaaagatgtaggaaccatatagcatgaattaatccatgcttatgcaaaaacagctttttcacattttctaattcaaaaatttatagaggacttatattttaagtgtaaaataaataatagtttgacttcacagaccttttaattgaacaagaagtgtatgcattattttagtcataatgagaaaagcttactggtcgttaatgatgttttgcacactgcctatttatttatttactaatcttttcgatttggcaaaatagaacccaaattccttcatgataattaaaattctaataatttattttagccaagtgcaacttagtgaaaataaatat

SEQ ID NO: 642602 - DNA, 561 bp, Homo sapiens
ctgaacattagtccggtgggtctattagtaagaagggaaacagaaagacccattgagaacatcagaggagcataattcttcaatatttggttcttaatggctccactgatggggaaagcttatgtaatatttatgaagaatatcttgattggcttggaccaataggaagcagggttggaggatgcatattctactgtaaaattggcaaatagagagatwgggggaaaaaagatgtaggaaccatatagcatgaattaatccatgcttatgcaaaaacagctttttcacattttctaattcaaaaatttatagaggacttatattttaagtgtaaaataaataatagtttgacttcacagaccttttaattgaacaagaagtgtatgcattattttagtcataatgagaaaagcttactggtcgttaatgatgttttgcacactgcctatttatttatttactaatcttttcgatttggcaaaatagaacccaaattccttcatgataattaaaattctaataatttattttagccaagtgcaacttagtgaaaataaatat

SEQ ID NO: 642603 - DNA, 482 bp, Homo sapiens
ttttacatcttattttcattaagactccatttccaaattctcaaagatagttttctttagattttttcattgctacttcatattcactgctaagaagttaatgccagtaaactaattgccattatgaaagtttccgtttttttaatcactgatccaaaaataccataaaatatataactattggaccaatgttttctttgtagcatcttattgtaaattttaagtaagccctgttgtttctgtgtttttaaatgaagacaagggtcctactattacaaatatgttcacttattgaattacttacacattcggtatttatttacttacctattacgtatttctatataatgtctttaattasattttttttttttttgagatggagtctcactctgtcgcccaggctggagtacagtagtgcaatggtgggtttaagctattctcctgcttcagtctcccgagtagctgggactacaggcatg

SEQ ID NO: 642604 - DNA, 414 bp, Homo sapiens
taacattcttattttatagacaaagaaactgaggcctggagaagtgcaatgaattgtctgaaatcagagtttgctgtgaatagagcaagcatgagaactcagaattctcttaataccaagtttgctatttttctctgccttaacacaaaggctcagaaactacatgtttcagcagtaacactgcaattccagataggggacttctccaatatccagggaggctggatcagcagtaacactgcagttccagataggggacttctccaatatccagggaggctggatcagcagtaacactgcaattccagataggagacttctccartatccaggaaggctggattctcccacacatttatcaggaaacacataaaagccttatcctctagcaacttgccttgggggaggtctgga

SEQ ID NO: 642605 - DNA, 511 bp, Homo sapiens
ctctctgcttgctctcttcctcttgctccagccatgtaagatgtgccagcttcctcttcaccttctgccrtgatagtaagtttcctgaggctccccagctatgcttcctgtacagcctgtggaaccgtgagccaattaaaactcttttctctagaaactatccagtctcaggtagctctttatagcaatgcaagaagagactaacaaagaaaattggtaccaggaagggggtattgctataaagatactaaaaaatgtggaagcagctatggaactaggtaatgggcagagggtggaatagtttgaagggctcagaagaagaaaggaagatgagggcaaatttggaaattcctagagacctgttgaatggttgtgaccaaaatgctgattgtgaaatggacagtgaagtccaggctgagaaggtctcggagatgaggaacttattggcaactagtgtaaaggttacttgtgctatgctttagcaaacagactgggggcattgtgcccctgc

SEQ ID NO: 642606 - DNA, 498 bp, Homo sapiens
atagtcttacttgagagcagcatagaattctactgttaaatgaccttaggtgaaactcttaactgagattttacatccttatgcttttaagtgtkgaaagaaattagtatagtatgccttgtaaaaagagaataaattattttgcctacttaaaaagaagactgacctggtaataaaatcatcttagttgatgatgtgaagataagaaagtttaatcactaagcaaactgcaaagcactgaaagcactgcttcttaccctaaatgaagcccactctgctgtgggaacaaattaatatatattatgtatggaaacccaatccccacaaagtcctcaagaattaagcatcaggaactattaaccatatgttagttatcctgacagactgttccatgggcctggtctgagggagtttgggacagaaataagtgcaagaaaacatttgtctatgaccccagatcaagtccccgatcttgctcggttctatccaaataagcga

SEQ ID NO: 642607 - DNA, 498 bp, Homo sapiens
atagtcttacttgagagcagcatagaattctactgttaaatgaccttaggtgaaactcttaactgagattttacatccttatgcttttaagtgttgaaagaaattagtatagtatgccttgtaaaaagagaataaattattttgcctacttaaaaagaagactgacctggtaataaaatcatcttagttgatgatgtgaagataagaaagtttaatcactaagcaaactgcaaagcactgaaagcactgcttcttaccctaaatgaagcccactctgctgtgggaacaaattaatatatattatgtatggaaacccaatccccacaaagtcctcaagaattaagcatcaggaactattaaccatatgttagttatcctgacagactgttccatgggcctggtctgagggagtttgggacrgaaataagtgcaagaaaacatttgtctatgaccccagatcaagtccccgatcttgctcggttctatccaaataagcga

SEQ ID NO: 642608 - DNA, 562 bp, Homo sapiens
ttaacagcatcagtcttaataaacttacatgttctttgaataatttctcctgcattttattcttgttgagaaaatagtgccgtgcccattcgcctgaagtcaaacatttgaaggctttctccaagtgttcatctttcttaaaacgttcaattacttcctttagttcttcctgccttcctttaataggcctaaatctgaaagaaatcaaaagaatgaatgggttatctgccacaatccttgcgccactgatccatcttaacagatcttgagaaagagctaataccctaaaaacagccatggttatcagagcaaagatctaagagaagagaacaacaatcaatagtcttgattactactattcaagtaatactgatcacctggatacgcaagttctcttttttcaatctgttattttartatttttatttcactgttatctcagtaacttctcttttttcaatctgttattttaattatttttatttcactgttatctcattaactgtgaggtgagcagacgattcaaacaaaagctgtctgattcagacttacactagtcgtc

SEQ ID NO: 642609 - DNA, 613 bp, Homo sapiens
acaaggaaacatcagataacacacacagaaggacattctgcaagtcaagaccacaaaaagcaaagcaagactgaggcaccaaaagacaggacaactaaacacatcctgtgatcttggactggctgctggactgggggaaaagcatgtatcaaattatagtatkgtatggctggtgagtttccagattctgacaactacaaaagtgattatgtaagagaacaaccatttgggaaatatacactgaagtactcaggggtgcagaggtggggtgtttctaacataacctcacgattcaaatcatcttcattattcttggattctgtatttgtgggttcacctctagctaaatttatttgtaaccccaaaatcaatacttgggcctttctgtgggtatttgaaagccggtgcatacacagagtggtgaaaaattgatgtctccagagactaaagtcacccgctgaggtgaagcagtcagcactcatctccctgtttcagctctccgacccgtaaacaagtgtccttttcacagtctatttagtgtcatgtttttcacagttttgtgcttcttgttggtgatttcaccattcaaaatggcccccgtgcagtgctgagg

SEQ ID NO: 642610 - DNA, 613 bp, Homo sapiens
acaaggaaacatcagataacacacacagaaggacattctgcaagtcaagaccacaaaaagcaaagcaagactgaggcaccaaaagacaggacaactaaacacatcctgtgatcttggactggctgctggactgggggaaaagcatgtatcaaattatagtatggtatkgctggtgagtttccagattctgacaactacaaaagtgattatgtaagagaacaaccatttgggaaatatacactgaagtactcaggggtgcagaggtggggtgtttctaacataacctcacgattcaaatcatcttcattattcttggattctgtatttgtgggttcacctctagctaaatttatttgtaaccccaaaatcaatacttgggcctttctgtgggtatttgaaagccggtgcatacacagagtggtgaaaaattgatgtctccagagactaaagtcacccgctgaggtgaagcagtcagcactcatctccctgtttcagctctccgacccgtaaacaagtgtccttttcacagtctatttagtgtcatgtttttcacagttttgtgcttcttgttggtgatttcaccattcaaaatggcccccgtgcagtgctgagg

SEQ ID NO: 642611 - DNA, 613 bp, Homo sapiens
acaaggaaacatcagataacacacacagaaggacattctgcaagtcaagaccacaaaaagcaaagcaagactgaggcaccaaaagacaggacaactaaacacatcctgtgatcttggactggctgctggactgggggaaaagcatgtatcaaattatagtatggtatggctggtgagtttccagattctgacaactacaaaagtgattatgtaagagaacaaccatttkggaaatatacactgaagtactcaggggtgcagaggtggggtgtttctaacataacctcacgattcaaatcatcttcattattcttggattctgtatttgtgggttcacctctagctaaatttatttgtaaccccaaaatcaatacttgggcctttctgtgggtatttgaaagccggtgcatacacagagtggtgaaaaattgatgtctccagagactaaagtcacccgctgaggtgaagcagtcagcactcatctccctgtttcagctctccgacccgtaaacaagtgtccttttcacagtctatttagtgtcatgtttttcacagttttgtgcttcttgttggtgatttcaccattcaaaatggcccccgtgcagtgctgagg

SEQ ID NO: 642612 - DNA, 602 bp, Homo sapiens
ccttactgcctgtcaggaaggaaagtaccgcagagtctccccagggctgtcagctcygctgtcagccttacctgggcccatggctgccctggaaactacctgtggggttgtctggacgcggaggccgcccccatccccactctgccctctctccatcctgcccaataggctgggtgaggcagaatggtctcacatcctcctgccattcccctcctcctacctccagcctgtgcccactgccctgtgtcaggtcacccagctggggtctcaggtagagggtgacacgcccgggtctggctccacccccaccttgccttcccagcacggggccaatgggagcctgtgagtcacctgaaggaagtgctcggccccaaacaggaagtggctcttcaagcagaaaacccctgcaggatcccccagtgccctggagcagatggcttagtagtggaagctggtgaaggaagggaagctgattgggacacagcaacatctactcagattttacctgacattcaaacttgggactcaccctccactttttgctgcctggcctgaggacttttctgctgtggactggctgtatgccttaggtacatcagtac

SEQ ID NO: 642613 - DNA, 536 bp, Homo sapiens
ctcttttgtggtttcacataaattttagaatagtttttctaattctgtaaaaaaaaatggtattggtagtttgatagaaatagcactgaatttgtagattgcttcagatagtatggccattttaatgatattgattattcttatccatgagcatggactgctttttcatttgtttgtrtcattctgatttctttgggcaatattttgtaattctctttgtagagatatttcatctccttggttagttgtattcctaggtattttattttatttttttggtggctattgtaaatgggattgtgttcttaaatttggctttcaggttgaactttattggtgtatgaaaatgctactaatttttgtatattgattttgtaacttaaaactttactaacgtcatttatcagtttcaggagccttttggcagagtctggagttttctagatatagaatcatattctccacaaagagagttagtttgattctttttctatttggatgccttttgtttctttctcttgtctggttactctact

SEQ ID NO: 642614 - DNA, 427 bp, Homo sapiens
taggttggtttagtataaaatattttgtttcatctatgttgaaggtgttttcagatcaaataaatgctacaaggaaaatggccaactactcaagcatttcaaacatgcctaacaagtgggtagtgctgggtttctcaggcttcatttagatggaacattttgcagtagaaaggaaataggtagccctggttttgaattattgtctcaccagttaatacaaaaaaggatagaactccctgtagccccacttgctttctctgtacaatggggatcacagaacttatctagaagttaattgatgttcattagattgtttatagtataagtaatatgcatatcatgtacaatataatgttatgtaacgtawtttaaattaattaagaacaactttctaatagcaaaattggaagatagaattgtataaatt

SEQ ID NO: 642615 - DNA, 585 bp, Homo sapiens
ccagatgtcccggctccccacagaggccatagacaaacctgagactgttattcagaaggcagcagagacgacacagggagaaaagcaggcacagcagcaaccaggcaacctcgttcatgagccaaggtaggaaaattggactctatgtactgtcttagtggttggaggtcaagtgtgtgtaactgagatgtatcttagatacaaagtgagtgcagagttttgttctcctacaagggaaatggccagagatggatgaagcgattctcagagtgtgcaaaaaatctccagtagkgggggttgagtacacaaggaaaagttcagacacagagactgaccaaaaatgggaaacagaaattctaggcctaggggacaaaggaaagagggagtcaaagagaattcctctgacattttcctggatactcctttggggataatgctgcaggtttggagggacaaccctcaaaccagggacaaggaaaagcaaaagatgataaagtattcctgtcttatctggctcaaagtcctcattcataagccttcagtgttttggcccaaatttggctcagatgaggattgggtgtgcca

SEQ ID NO: 642616 - DNA, 582 bp, Homo sapiens
aataacatcacataataataaaagtgctaatctatcaagaagaaatagcaatcytaaatgtgtaggcaccagacaagtaaactacaacatatataaaggaaaaactgaaaacaaattgaattgaggtaaaggccaatctataattaaaattgggattttaatattcctttctcaacaatttgtaggactatatggaaaatcagcaagggtatagaagaactcaacaccatcagcaaacaggatatcagtgatagttatagaacagtccatctcacaggactagaatacatatttgttccagcacttgtagaacatatatcaagatagattatacataatctatataattttagaagaatggaattcacacagtgtgtgttcctgaccacaatgaaattgaacgagatataaacaacagacacgtaacaggaaactctccagacagttggaaacaaaacaatgcatttataaacaatccttgggtcaaagaggtagtcacaagggtaatacaaaacattgaactgaatgaaaatacgacacttaaaatttatggggtgcagctaaagcagtgtttagtgggca

SEQ ID NO: 642617 - DNA, 500 bp, Homo sapiens
ctgaatgaaaatacgacacttaaaatttatggggtgcagctaaagcagtgtttagtgggcatcccatagcactaaatgcttacattaaaaagagaaaaagcctcaaatcattaatataatcttctacttgaaaaatattgaaaatgaagaacaaaataagtttaaaatatgtagaataataaatctaaaaacaraattcaatgaattggacaaagaaaaacaattaaaaatactatgaaacaaaaagcgggttttgaagaaaatcaataaaactaacctgcacattgtgcacatgtaccctaaaacttaaagtataataataataaattaaaaaaagacagacaaacaaacaaacaaacaaacaaaaaaaaaactgacaaacctccagaaggtctggcaaagataaaagagagaagatacaaattactaagtcaggaaaaacaggggtatcactacagactctgcagacagaaaaaaatgataataagagaatactacaa

SEQ ID NO: 642618 - DNA, 545 bp, Homo sapiens
gctaaagaagctataacacaaatggagctgaaacatgccccttacttgccatgttgtgggtgaagagaaggaaagaagaggttcagcctctttgggagcacagacttaggagcttcctgagccaaggctgtgccttcctttatggggtcctgtggtgcctggcatctccaagcttccaggtgccactawgttccctggtgccagccaggaaagctgcctgtagtgtgcctggtccagacacagcctcacagagagccagttcctgtgccagcacctagagcttcctgctttgctgtggcagccagcatatctgactgtgcagttgctggaccctacgcttgctcacacacccctcaccactccatgcctgacttgcccttggcaggagtgggatccaggctggtagtgtaagctgagtgcagcctgccagaccgagttggtggaatgagcccagtgggcccaagcaaaactcaggcaaaggtgccactagccagaggtttcaggccagaaaagcaacaccccaaggatcctgtaacaatataatg

SEQ ID NO: 642619 - DNA, 648 bp, Homo sapiens
gacacaaaaatgggaacaataaacactagggactactagcgtgcaaggaagcaagtggggcaaggatttaaaaaccaactgttgggtactatactcactgcctgggtgacaggattgttcttatcccaaacttcagcgtcatgcaatatacaaacttgtacatgaacttctgaatctaaaataaaagttgaaattataaaaaacaaaataaagaacatatctacatcataaaccaatgcacttctttccatagataagctcttacattttggaaaatataacagaaatatttcctggagctgaaaaatgcttcacaggaaatattgacaatacacagttttaaagtttctgacttcaccattacagcaaaaagaaattaaatgaaaacactctytctgtaaagatagtttagggagatgcctgattaaacaggaaatgttgtagtatctttcttgctatctgatggttaatttttttctttattggctctgaaagatggtgtgatccatcctgccacgaggaaagatgaacattcccaccaacacagaacataaaggtgagcaatccaacttgctcagcattggatccccaacatccagcatatttagcacactgtagttgatcaataaacatttgttggctggacat

SEQ ID NO: 642620 - DNA, 551 bp, Homo sapiens
atatttagcacactgtagttgatcaataaacatttgttggctggacatggtggctcacacctgtaatgccagcactttaggakgttgaggtgggtgaatcgcctgaggtcaggagtttgagatcagcctagccaatatgatgaaaacctgtctctactaaaaatacaaaaaattagccaggcatggtggtgtgtgcctgtagtcccagctactcaggagtctgatgcaggaggatcacttgagccagggaggcagaggttgcagtgagccaagattgtcactgcactccagcctggaccacagagcgagactctgtctaaaagagtaaattaattaaataaataaataaataaacaaacaaacaaacatatgttgaaggaataaatggacaaaagaaagcagaaaggaaagatcagaaatctagacagaggactctcagtagagttgagaggagtcagctgcagtccagtgcagctgtttctgggttgaaaagtgaagcagcaacaagagctttgccaagcttactgggtgaagcaactacttgtaacaac

SEQ ID NO: 642621 - DNA, 527 bp, Homo sapiens
aggccaaaccaaatatattatttttcacctatacaaatagcaaattttagccaggcacagtggctcatgcctgtaatctcacactttgggaggctgaggcaagtggatcacttgaggttaggagttcgggaccagcctggccaatatgttgaaacccagtccctactaaaaatacaaaaattagccagacatggaggcacatgcctgtagtcccagctatttgggaggctgagccaggagaatcccttgaaccygggaggcagaggctgctgtgagcagagatcacaccactgaactcaagcctgggctcagagctagactttgtctcaaaaaaaaaaaaaaagcaaaatttgataaagttttgtcacagtctggtagaatttagagaaacagtcactagatttggtagaagtggtataaattggaagagcctctggagggtagctgggcaataagtatcaaaagttatcattattataccatttactcagtattctctccaaaatacctattaatcctacagatgt

SEQ ID NO: 642622 - DNA, 627 bp, Homo sapiens
actaccattttcatcagcaatgtatgagtgatccagttactctgcatctttccagcatttgttattgtcactgtttttcttttttttcattttagccattctgtagtgatatgtcatttgtagtgtagtgatatctcatcttgttcttattttgsatttccccaattgttaatgatgttggacatcttttcgtgtgcttattcacaactcatatagccttttttaataaaatgtctattcgtttcttccacttgttttctaatttaatttttttttttagtttgaaagttcttatattttctaaatacatgttctttatcagatactgtatttgaaaatgttttcctccagtctgtagcatgctttttcatcctcttaactaggtctttaacagagcaaaagtttaattttaatgacatccaattgtggaaattttttctttttggatagtgcttttgatgtcatatctaagaactcttcacaaaacctatcctaaaaattttgccctgaagattttgtcttagattactctctaagagttttaaggttttctattttacatttaaagctatgattcattttgagttaattttcatataaggtatgaggtttaggtaggggttcttt

SEQ ID NO: 642623 - DNA, 627 bp, Homo sapiens
actaccattttcatcagcaatgtatgagtgatccagttactctgcatctttccagcatttgttattgtcactgtttttcttttttttcattttagccattctgtagtgatatgtcatttgtagtgtagtgatatctcatcttgttcttattttggatttcccmaattgttaatgatgttggacatcttttcgtgtgcttattcacaactcatatagccttttttaataaaatgtctattcgtttcttccacttgttttctaatttaatttttttttttagtttgaaagttcttatattttctaaatacatgttctttatcagatactgtatttgaaaatgttttcctccagtctgtagcatgctttttcatcctcttaactaggtctttaacagagcaaaagtttaattttaatgacatccaattgtggaaattttttctttttggatagtgcttttgatgtcatatctaagaactcttcacaaaacctatcctaaaaattttgccctgaagattttgtcttagattactctctaagagttttaaggttttctattttacatttaaagctatgattcattttgagttaattttcatataaggtatgaggtttaggtaggggttcttt

SEQ ID NO: 642624 - DNA, 589 bp, Homo sapiens
gcaagattggttgaaaatgtgcaaatcacaaaatgttattcactacctaaacagcatttaaaacaaaaaccatatgatctcagtagatgcagaaaaagccttcaataaaatgttaccttcttttataataaaaattctcaacaaaatagggatcaaagcaacatacctcaaaataaatgccagctatgcaaaattcacagccaacatcatgaatgggcaaaaactgaaagcattcccctttgagaactggaacaagacaaggatgcccaytctcaccactgctcttcaagatagttctaaaagtcgtaagcaaaccaacgaggtaagagaaagaaccaaaaggcacccaaataggaaaagaagaagtcaaactatctctttttgtggactatatgattctatatctagataactctaaaaactctgccaaaaggctcctggagctgataaatgaatttactaaatttttaggtaacaaaatcaaagtacaaaagttagtagcacttctaaaccccaataatattaagctgagagccaaatcacaaatgcaatccaatttacaatagctaccaaaaataataaaaatatt

SEQ ID NO: 642625 - DNA, 452 bp, Homo sapiens
aaagtactttctcaaaaggttatagcaatttctatttaaaacagaggtatatgacagcattaaatattgtaatattgcataatkttttcttgatgaaattttttgttttaatttgaatcatttagtttcagaacaagtttatttaactaatttcttttaaaatttattttcctttgcctacttattcattgggggttttcagttagccttctcactggttcatctgcagtttcatttatgggccagttctgaattattccacaggaattgtatttcaatttaaaatataaatgctatggtataatttatttatttatatttataaattttaaaataccagctctgagatccatagttgataaggtttatgcaaagtctaatatccaaatctttctgcctctctccccatcccttgagtggtatcaaagtcctggggcttaccacaagacagc

SEQ ID NO: 642626 - DNA, 578 bp, Homo sapiens
agccttctcactggttcatctgcagtttcatttatgggccagttctgaattattccacaggaattgtatttcaatttaaaatataaatgctatggtataatttatttatttatatttataaattttaaaataccagctctgagatccatagttgataaggtttatgcaaagtctaatatccaaatctttctgcctctctccccatcccttgagtggtatcaaagtcctggggcttaccacaagacagcaaaaatagcgtggtggtggtaagaagaaactctggtcatcaaaatgacactggtcactctggtcatattactttcattagacagtgcctcagtcaagcactggtccctagctactttttggaattgctcttccaggcattttacagaaatatccctcacaacaggcttttgcactgaccacmggcatggcttggaaccctaaccattgttcccaagactgagatgcttactggctagcttccatgatcatccttgcagccatcccccatttgtgatcttcgtctgccaggatgtagtgttgtaaatcaggcacaagtctcagtaccaatg

SEQ ID NO: 642627 - DNA, 322 bp, Homo sapiens
  misc_feature 1, 2, 3, 4, 5, 6, 7, 8: n = A,T,C or G
nnnnnnnnagaggacttctcagtgaaaagaaatgggttggcttttctgatgccattgagcaaggactagcccaaggggtatgggattaccctcctttttacagataggatggcagagaaatggacctagatgtctctaagaaacttaggccttttcctcaccttctttcctttagatttttttttttttaagagggtattgggagagatgggcattaaataccgagggcggcatctcckgtctctaagctgatggaagcttcttcaggaacaggatccaggtctgcagggctaaaggccttcccttgaaaggcagagtatgg

SEQ ID NO: 642628 - DNA, 322 bp, Homo sapiens
  misc_feature 1, 2, 3, 4, 5, 6, 7, 8: n = A,T,C or G
nnnnnnnnagaggacttctcagtgaaaagaaatgggttggcttttctgatgccattgagcaaggactagcccaaggggtatgggattaccctcctttttacagataggatggcagagaaatggacctagatgtctctaagaaacttaggccttttcctcaccttctttcctttagatttttttttttttaagagggtattgggagagatgggcattaaataccgagggcggcatctccggtctctaagctgatkgaagcttcttcaggaacaggatccaggtctgcagggctaaaggccttcccttgaaaggcagagtatgg

SEQ ID NO: 642629 - DNA, 566 bp, Homo sapiens
ttccctgtataaaaaataacccctacgtgtgccgtagaagaggactgttagggagaggcctaagctgtgtacgccatcaagccagtacctagggggagcagactaataacgtctgttcacacatttagatgcttcaaagctaggattccttcccccacaagtcacaaactggaaaagtttgtgcttactcctagaatgtaaccctgtaaggttccaaatcaaagtgtgttgtgtttacgagattaccttctcccctgtagccctgtgaagtttacaagagcttcctgtacctcagccaatccttctagrgaaaaattaccccaaatgctacactatcactggatttccttccttatttagatcttggcttcatagttcttcactgtctggtagatatctgatgctttcatttagatttttcaaaacattttgtctagcttttctagttgttccccttagctagaaagagcagaattttttggtagggtaaccgtaactctctcttttcccctctgtgtgtgttgtttctccatttcaaactgtgcgagggttcctagggcctccac

SEQ ID NO: 642630 - DNA, 439 bp, Homo sapiens
agtacaacttatatgttttttctattatggatcatgcttttggtgttatacctaacaaatctttgcctaaagcagggacacagatttcgtctatgttttcttctgtaagttttatagctttaggttttatttattcatttagagacaaggtctcattctgtcacccagaatggagtatagtggccccatcatggcttgctgcagcctcaacctcccagctcaagtgatcctcttgcctcagcctcctgagtagctgggactacaggtgtgcgccaccacatctgtctaatttttgtattttctgtagagatgggctcccactatgttgcccaggctggtctcaaaytcctgggctcaagtgatcctctagcctcagcctcccaaagtgctgggattacaggcatgacctgccacacctggccagctttagatttatatt

SEQ ID NO: 642631 - DNA, 591 bp, Homo sapiens
taatctatacattttttttctttttaaagtgctttattaagatgtttctcacaaattagagaaaaggtttttttaatcaatggcaataaaatacaaattcctattttataacaaaatagtgaaaagcaccaaagaaaatttgcacctataactctaacaaactcaagggttcttggttctcagttcttttaaagtatagtctgatagagtactcaaagcttttagaaagagtaccaaatttattacttcctgaaatgttgtatgaatagcacttttattcatcatatgttcatacatatatactaatataccatctccactgccttaaatacaaaaatattcatcacaggcaagttttctactgcaaataggcaagaatattaaatataatctgtgatactgtctactttttkgaaaacaagatactagaaccaaaacactgtagaacacaaatgttactaatttaagattactaatgttactaatttaaggttactaacttcagatagcatcaattgttcaacaatattttaaaggtgtttctatataaatttatccaccggtttgggttttctttattacagaaatgta

SEQ ID NO: 642632 - DNA, 524 bp, Homo sapiens
aagacatggagcataaactggagcagtatatagggcctagaaaagttttaaaatgtcagaatggatcatcttctgattttagaatcactttatctatatcttttcttaagaaagctaacgcaattcttttctttaaattctattttgagaggattgtagattcacatgggtttgtaagaaatacagagagatcctatatacccttagcccatttcccctaatagtaacatcttgcataactatactatactatcacaacaaggaaactgacactgataaaatctgtgacctcattcagatttcattcgttttacatgaacttatttgtatatttagttctatatttagtttacatgaacttatttgtatattttgttaattttatcacatgtgcagacatatcaccaccaccatagtcaagatacagaaaagtaaatatacaagaagagttttgtgttaccttttaaagtgggagccacttctctgcctccttcrcccctggaaaccactgatttttctccatc

SEQ ID NO: 642633 - DNA, 606 bp, Homo sapiens
taacaagtatttacaaggatgtggagaaattagaactctcatacactgctggtggaaatgtaaaatggtacagcccctttagaaaacagtcaggtagttcctcaaaaagttaaacatagagttagcacatgaccctgcaattctactcctaaatatatacttaaaggtaaatgaaaatatatatctacacaaaaaatgtacataaatgttcatagtagcattagtcgcagccaaaaaatggaaacaacccaaatatccatgaactgataaaggaataaataaaatgtggcatatccatacaacagaattcagcagtaaatacaattacatagataaacagaattccatacaatagaatatttttcagcaaaaaaatactgccaaatattatttagcaataaaatgaaaaacacacattacaacatccatgtttcttttaggaggacaaaatattctttttcttttttttttkggagaggggatggggtatggctatgtcacccccaggctgggagagcagtggaactatcatggcccacctgtaacctcaacctccggggctcaagcgatcttcccacctcagcctcccaagtagctgaaaccaca

SEQ ID NO: 642634 - DNA, 606 bp, Homo sapiens
taacaagtatttacaaggatgtggagaaattagaactctcatacactgctggtggaaatgtaaaatggtacagcccctttagaaaacagtcaggtagttcctcaaaaagttaaacatagagttagcacatgaccctgcaattctactcctaaatatatacttaaaggtaaatgaaaatatatatctacacaaaaaatgtacataaatgttcatagtagcattagtcgcagccaaaaaatggaaacaacccaaatatccatgaactgataaaggaataaataaaatgtggcatatccatacaacagaattcagcagtaaatacaattacatagataaacagaattccatacaatagaatatttttcagcaaaaaaatactgccaaatattatttagcaataaaatgaaaaacacacattacaacatccatgtttcttttaggaggacaaaatattctttttcttttttttttgggagaggggatggggtatggctatgtcacccccaggctgggagagcagtggaactatcatggcccacctgtaacctcaacctcckgggctcaagcgatcttcccacctcagcctcccaagtagctgaaaccaca

SEQ ID NO: 642635 - DNA, 593 bp, Homo sapiens
tgacctggttcgaatgcaagaactccagagcctgcagacactattgaagtggtgtgggcagggggagaaagaaaggacatacatataatacagaagacttaatagaaaatccactaattcaacctcttcactttaaaataaaggaagtaaggccccagtgagtaaaaggacttgccccaaatcaatcgcagagccagatctagaaacaagtcttccatctcctagctaaacattcttttaacactccatgctgcctttcaccttaaaacagtttttttaagtaaaggagttcctccaatgtaattttttttctaattagatccttggtaaaggacctaaggcccaagagaaattactgaagaaaaatggaaaggatcttataatgacagacyagaggaaaacaacaaataagggtcatatttgaggaagcagacatatggaagtgatactagaagcagtaagttagcaggataatcttatttgggtgaggagatatttgtactattttggatatgctgaatttgatatctgaagacaaatgtctggtaggcaacttaatttatgataaattatggtaaatatttacaagtcat

SEQ ID NO: 642636 - DNA, 593 bp, Homo sapiens
tgacctggttcgaatgcaagaactccagagcctgcagacactattgaagtggtgtgggcagggggagaaagaaaggacatacatataatacagaagacttaatagaaaatccactaattcaacctcttcactttaaaataaaggaagtaaggccccagtgagtaaaaggacttgccccaaatcaatcgcagagccagatctagaaacaagtcttccatctcctagctaaacattcttttaacactccatgctgcctttcaccttaaaacagtttttttaagtaaaggagttcctccaatgtaattttttttctaattagatccttggtaaaggacctaaggcccaagagaaattactgaagaaaaatggaaaggatcttataatgacagaccrgaggaaaacaacaaataagggtcatatttgaggaagcagacatatggaagtgatactagaagcagtaagttagcaggataatcttatttgggtgaggagatatttgtactattttggatatgctgaatttgatatctgaagacaaatgtctggtaggcaacttaatttatgataaattatggtaaatatttacaagtcat

SEQ ID NO: 642637 - DNA, 593 bp, Homo sapiens
tgacctggttcgaatgcaagaactccagagcctgcagacactattgaagtggtgtgggcagggggagaaagaaaggacatacatataatacagaagacttaatagaaaatccactaattcaacctcttcactttaaaataaaggaagtaaggccccagtgagtaaaaggacttgccccaaatcaatcgcagagccagatctagaaacaagtcttccatctcctagctaaacattcttttaacactccatgctgcctttcaccttaaaacagtttttttaagtaaaggagttcctccaatgtaattttttttctaattagatccttggtaaaggacctaaggcccaagagaaattactgaagaaaaatggaaaggatcttataatgacagaccagaggaaaacaacaaataagggtcatatttgaggaagcagacatatggaagtgatactagaagcagtaagttagcaggataatcttatttgggtgaggagatatttgtactattttggatatgctgaatttgayatctgaagacaaatgtctggtaggcaacttaatttatgataaattatggtaaatatttacaagtcat

SEQ ID NO: 642638 - DNA, 428 bp, Homo sapiens
tattttctagggcagtattgatttcacattttatttttcttaacactgattaaatatataactacataatttcagcagtatgccttcagctcttgcaccatcaaacccccatcatactattatactcatctccacaaaattctgaacctcatctcatcttctatgcttcccctaatttcctaacttttctactaggttggtgcaaaagcaatkgtggttttggtatttttttttttttaagtaatggcaaaaaccgcaattacttttgcattattgggccatcagaaagtccagtctgtcatcagcaaaacacccaatatcctcaatgtctctgaatattcccttcatctttttgctctaatggaaatgaaatgtggttattccctgaggacactgtccaggctttctggagggcttttcttcctcct

SEQ ID NO: 642639 - DNA, 644 bp, Homo sapiens
ttattatagagtcattcagttgattcataattaatgcttcaatataattagttgctcataaattgttaggttccctgagcctctggggcattggtaaaatgtgatcgctctgtctttctctctgtctgttgtattcatttgttgtccaggatggatagaatggtgctatctgagctgttataatgttggcctcatgcctagctttatattgcagcacgtctgaggcattggtttttcatccttccaaacttttggtctacagagactattagaagattaaggtgtgtatactcactttattcaaaagttgagcatgtttgttgttttggacctgttttcctgtaaacaaagtttaaaatggtacaggttttaaaatgtgctaattattttgatgagtgtagatatacaaaatgaccattggaggatcaatgagggtaaaaagaggaaagacttgtggagaacctataagaaagggcttgttggagggctgcagggaagctggaaagtagtatagaaaccttaagyaagttcagaaggaagtgattaagaaagcacaaaattgtgttctgtgagtatagttgaaggtcctggaaatgtttggcattgagaaaatagatttgggaggtctcaaaagagtatttcag

SEQ ID NO: 642640 - DNA, 539 bp, Homo sapiens
ttctgtgtctatatgtctttctgggctttcatgagaatgagatcatacagcacatggtcttttgtgactggcatttttcacttagcagaatttattcaaggttcatctatgatgtggcatatatcagtacatataagctccttgagttacaatggaggcatgtcctgataatccccttgtaaattggaaatatcgtgaagtcaaaatgtatttaayatacctaaccaccaaatatcatcatttagcatagcctacattaaatgtgtttagaacacttaaattagcctccagttgggcaaaatcatccggcaacacagcacactgtagggtatcatttgtttgctctcatgagcacgtacctgaccagaagctttgactcactgctgctgcccagcatggggagaaaatattgtacagcatattcactagcttgggaaaagatcaagaatcaaaattcaaagtacaggttctactgtttgtgtatcattcattttttcattattttaaagtcaaaaaattgaaaagctgtaagtcaaatc

SEQ ID NO: 642641 - DNA, 539 bp, Homo sapiens
ttctgtgtctatatgtctttctgggctttcatgagaatgagatcatacagcacatggtcttttgtgactggcatttttcacttagcagaatttattcaaggttcatctatgatgtggcatatatcagtacatataagctccttgagttacaatggaggcatgtcctgataatccccttgtaaattggaaatatcgtgaagtcaaaatgtatttaacatacctaaccaccaaatatcatcatttagcatagcctacattaaatgtgtttagaacacttaaattagcctccagttgggcaaaatcatccggcaacacagcayactgtagggtatcatttgtttgctctcatgagcacgtacctgaccagaagctttgactcactgctgctgcccagcatggggagaaaatattgtacagcatattcactagcttgggaaaagatcaagaatcaaaattcaaagtacaggttctactgtttgtgtatcattcattttttcattattttaaagtcaaaaaattgaaaagctgtaagtcaaatc

SEQ ID NO: 642642 - DNA, 539 bp, Homo sapiens
ttctgtgtctatatgtctttctgggctttcatgagaatgagatcatacagcacatggtcttttgtgactggcatttttcacttagcagaatttattcaaggttcatctatgatgtggcatatatcagtacatataagctccttgagttacaatggaggcatgtcctgataatccccttgtaaattggaaatatcgtgaagtcaaaatgtatttaacatacctaaccaccaaatatcatcatttagcatagcctacattaaatgtgtttagaacacttaaattagcctccagttgggcaaaatcatccggcaacacagcacactgtagggtatcatttgtttgctctcatgagcacgtacctgaccagaagctttgactcactgctgctgcccagcatggggagaaaatattgtayagcatattcactagcttgggaaaagatcaagaatcaaaattcaaagtacaggttctactgtttgtgtatcattcattttttcattattttaaagtcaaaaaattgaaaagctgtaagtcaaatc

SEQ ID NO: 642643 - DNA, 596 bp, Homo sapiens
acatcgtatgttctcactcatatgtgggagttaagctatgaggatgcaaaggcataagaatgatacmatggactttggggacaggatgggaagggagtgagggataaaagactataaattcagttccgtgtgtactactcaggtgatgagtgcaccaaaatctcacaaatcatcactaaagaacttactcacgtaaccaaataccacctgtttcccaaaaacctatggaaattaaaaagaaaatagctacatttaagactttaaaaaaaaaactagcaagaataaaaagaatcaactgtgttagatttctgtatatgtgttaagggtttttgcctaagtgcttatcttcttttggtgccatctttcgtaagagtcatgtagagtcccagatagtgatgattccttaggagacacttttacagttttcctgggctgggtcttttgtatttcaagagacctagaccagtattgaggtgagtttctcagctcagactttccccacctcaatattattgtgaatttgggccttaaatcttctcataatacagaaaacagattctgatttcccatgagtggttctatttccatctgtggtc

SEQ ID NO: 642644 - DNA, 563 bp, Homo sapiens
caagctctgtaaacctgaagttctgaagcccatgcttaggaatttcttcaccctgaaatatcaattattaaaagtacatggcatggtcttcgtatgaggctgtaagattgtcctttgctgaagacagaacaggtagccagcatcagaggaaagtagaaaatatttgtgggtgagattaaattaaccacatgctgtgttgttaatttattgtagtcatcaataatatcgaaacggaggaatgtaaaattctctactggggggcaatacataactatttcataaggtttgatcaatgtttctcctgaggataagaamataccatgaagactgaagacattataaatctccaggtacttccaatccataaagcaaacaatttgtgaacatttatattaatgacattttactaacataaaattattctttgatctaacaactcttcccacataggtatctggacagggtacataggtagtaaagaagactattttctacctcttgttgagagaaaactaaatgtacaaagatcaattataattttaacagaatgaaagcctaattct

SEQ ID NO: 642645 - DNA, 603 bp, Homo sapiens
tatattcttctaagtttatttccaatatctccaacattatttaatatatttcccagtgattttgagacatatttatcacatattaatttctcatgtactttcagatttctttttagactctattctctaacactaatttatttgccccttccagtgccaaaatgtttgctttacagcttgtactgacccacatttacactctcatctgacctttagaattaatttgcatgattagtgccaatatctattccccagggtgaaaagtaattgccttcttgttataattgctatacaagtttggaaaaaaaaaaaaaccagaaaaaaatagcgatkgaagcatcaacatgtataaggatgtttaatctcagaggcagtatcaaggcagagactcatagatcatcccaaccccaatgtatttatacctatagcaaaatgcacattttttggcattgaagctgaatgaatttgcattaaaaacataagtctgccattgaatatgaaacatacttgatttctctgaggctcaattttttcctctgtaaaatcagaaagataatacctttcaggattggtgtttaaatgtgctgtgtatctagcatagca

SEQ ID NO: 642646 - DNA, 536 bp, Homo sapiens
aatatttcacatttatgtactgagaggtaaaggctttcttcacttacagatatacagagagcccatggcttcagttctataacttcagacatgagtcaaagtaaacacaaaaacacactcaccgggctggatctcaaagatttgttatcmtttttggaagacatacaatatttatttgagctcatgggtagacaaaaagacaaacaaaaattaattaaccacattatctactgtttctcaccttagagagactagattcttgttatccaagagatcaccaaatggacagatgacaaaaccagattctcaatcattgttgccgtctatggggaataccacatcagccacagataaatcatacccagagccaaacttggtcaagtaaagaaacaaaagtgaaaatacaaaatcaggagaaaaagaccagaaaaagtcaagacaggtgaagttgtaggtgccacttgggaatcactccaggaacccaaaaaagacatttcaggactttaacaatttgtgagatgtacttttaggcaaca

SEQ ID NO: 642647 - DNA, 596 bp, Homo sapiens
ttgattccaacatcctcagaaaaagtatgattgtgtaatgaacccatcttcataccaaccaccatttggcataagcctgtgccatgtggagcctcaccaaaatgagatgtggttcaagagcgagggacagagagtcccccagaaatgagggaatatgcttattaagagaagattgaatggatacatgggaacataagttgcagttgctcactagcagcgagttagtctggagatgaccgaggagtgtctgtgtggaagatacggtgtctctgtaagtgaaggatgtgtaggagctgyttacattttagagatggtgaagagaatcccaggctgaagaaacagtgtgtgtgtgaagattgctggggactgtggtaggaaagaacatcaggccaccattatcaaaaactgattaagagagggagacggatagaagaggagattggagatatagacaggtgccaggttatatatctggacttgtaggttctagtacagcctttattcttcatttaaatctagccaaaaggatcaagggatggtagagaagggattatgtaaaaataaaaattgaaggaagttcacctgggtgacaataa

SEQ ID NO: 642648 - DNA, 585 bp, Homo sapiens
accagtccactggctgttgggcaaaagcctgctgagaaatccaatgccttggccaaagatgctttgaagaaatagtaagtgaggcagctctgacctcttcttatagaactccctgattcataaaatcaaacagcaaagactcctagagaccactgagtccaagcctcttcattttatagaagagaaactgaggtccatagaagcccatttttttatagaatgagaaggaaagtgacttgcccagggctcctgcttacagtagagttgggactggcatttacatctccttatcctttacttagtcctcttcgtaataaacagcgaaacactcaggggtccttccttcctctttccaaaccctggaggagctgagggggagacaygggggctttactcctcgtgttgtttcagactcagacttctcagcttccacattgagagactatttgcaattgcttctccttgttgcccaaattcctggctggcattccagactgacaccagagacttccttcccagggacatccatcctgggcaggtcagcagtttgcatcttccctggggcagaagtggcagagtctcaga

SEQ ID NO: 642649 - DNA, 585 bp, Homo sapiens
accagtccactggctgttgggcaaaagcctgctgagaaatccaatgccttggccaaagatgctttgaagaaatagtaagtgaggcagctctgacctcttcttatagaactccctgattcataaaatcaaacagcaaagactcctagagaccactgagtccaagcctcttcattttatagaagagaaactgaggtccatagaagcccatttttttatagaatgagaaggaaagtgacttgcccagggctcctgcttacagtagagttgggactggcatttacatctccttatcctttacttagtcctcttcgtaataaacagcgaaacactcaggggtccttccttcctctttccaaaccctggaggagctgagggggagacatrggggctttactcctcgtgttgtttcagactcagacttctcagcttccacattgagagactatttgcaattgcttctccttgttgcccaaattcctggctggcattccagactgacaccagagacttccttcccagggacatccatcctgggcaggtcagcagtttgcatcttccctggggcagaagtggcagagtctcaga

SEQ ID NO: 642650 - DNA, 512 bp, Homo sapiens
cactgccaggaccatgcaagtggagaacacttctctgccmaaatgtgaccagaaaaaaaaaagggataatggactccctttgtgtctctccagggagatcttaagtatggaggaacacagagctagagtgctatgttaatagagagaaaggacaatgggtgtaagatgtagtggttaaaaatggatggtatcacaagtaggaaaagaactttaaaaataagacaaaaatcaagagggactggcaggtaaagagaaagagacataaacatttatgtccctgggttaatgtttcagcatttacaaaatagagtctccccaactctcaacccactcccagctcatgcgcactttgttgagagtgcaccacaactgtacaccattagtctaaaaataatcaaagcacctatcaatttgataatgatttcttctcatctttgtgccttctgaaattctgtcctcattccaaagcccagggaggattcctggtacatttaaaaatctctctacttaag

SEQ ID NO: 642651 - DNA, 616 bp, Homo sapiens
gaaaagttcaagaaccttttcagcatagctttgcttcagttccctaatctggtttctctgtttgacggcaccagcaaaattattttatgtctcccagtgatctgttgggggattctgtccttctgtcttctaccttatggtctatgggtttatctgtttaccatctaatttgtgagggaagtaggatggtaccttaatgttgaaaatccagcattatgaaatttggtattattataaagatttgactaaaatttatgtttcggacaattctcaatttttttttacaaagatactcagctataactgaggtgtaagwggacatagtttgttacatgtaggcacagattttggggaaagaaatgggaggtaattatactaccaataatgttaaaagccactatttatttagtgtcaaacttgtgccaaaaactatgtgtactaccttcacaacagccctagaaaatagatattgctacttctggtttacaaatgagaaaaccagagcctgtcattaataacttgatccaaagtcatgagtttaatgaggggctgagctagggttgttgactctaaattctttccactatactgtgctgtattcacagtagtctccaaa

SEQ ID NO: 642652 - DNA, 616 bp, Homo sapiens
gaaaagttcaagaaccttttcagcatagctttgcttcagttccctaatctggtttctctgtttgacggcaccagcaaaattattttatgtctcccagtgatctgttgggggattctgtccttctgtcttctaccttatggtctatgggtttatctgtttaccatctaatttgtgagggaagtaggatggtaccttaatgttgaaaatccagcattatgaaatttggtattattataaagatttgactaaaatttatgtttcggacaattctcaatttttttttacaaagatactcagctataactgaggtgtaagaggacatagtttgttacatgtaggcacagattttggggaaagaaatgggaggtaattatactaccaataatgttaaaagccactatttatttagtgtcaaacttgtgccaaaaactatgtgtactaccttcacaacagccctagaaaatagatattgctacttctggtttacaaatgagaaaaccagagcctgtcattaayaacttgatccaaagtcatgagtttaatgaggggctgagctagggttgttgactctaaattctttccactatactgtgctgtattcacagtagtctccaaa

SEQ ID NO: 642653 - DNA, 419 bp, Homo sapiens
attgttattttgctattgagtcgtttgagtcccttatatatcccggttagtaatccattgtcagatggatagtttgcaaatattactctcattctgtaagttgtcttttcactctgattgtttccttcctgtgcagaagatttttagcttgatgtaaccctatttgtttttgcttttgttgcttctgatttttgcctataaaatctttgcccagaccaatgttctgaagcatttccctgatgttttcatctcgtagtttcatagtttcaggttttacatttaagtctttaatccccaagatctgaacatttttaagtgcggatatgataccmaaagtggaacattccacacctgacctcatgtgaagggtcgaagtcaaaacacagttaaaactttttttacataaaaaaattgtttaa

SEQ ID NO: 642654 - DNA, 613 bp, Homo sapiens
aacctacatctagattttttcaaaaaactcaataaacatctcaattataaaaatgcaaaaaaaaatkgtatagatattttattaagacttgtggatgggaaagaagcacataaaaatgtaggtgtcattaggaatatcagaactgcaatgagaatatcaatatataaagatcagttgtatttctgtataatagcaatgaatcctagtatatggcactcacagtacccaaaatgaaattaagaacttaattccacttataatagcattgaaaagaatgaagtagatgggaataaatttaacaaaaggagatcaagacttgtgcactgagagctacacaacatcattgaaagaaattaaagactacttaagtaaatggaaaaccatcctttgtttagggggaaatggagaatgactgcatggatccagagtattttgggggattgataaaaatattctggaattagtggttatgcttgtacaaccttgtgaatatattaaaacccactaaatcatacactctagagaggtgactttgatggtatattaattatatatcagtaaaaacaattttttaaaatcacaatgagctagccctgcacactagcttgattgg

SEQ ID NO: 642655 - DNA, 620 bp, Homo sapiens
aagttttataaatcaaaaataacaaccctcaagtagtaattacagtgataccattcaagagaattaaagaagaatatgagtccagcataagataaagatggaaaagatgaaagaagagttaaaaaattgagaaaatgtaaggaaaaggtatgtgtagctgtacttatattcatatgcacacatacacacacccactccccctccaacacacaaaagcacatacatgtatatattggagtaactgaagaagaaaatagagaaaatgagacctagctgataccattcaggacataggcatgggcaaagatttcatgacaaagatgtcaaaagcaattgcaacaaaagcaaaaattgacaaatgagacccgattaaactaaagagcttctgcacagcagaagaaactatcaacagagtaaacagaccacctatagaatgagagaaaatgtttgcaaacaatgcatctaataaaggwctaatatctagcatctattaggttggtgcagaaatgattgcagtttttgccattagaagtaattacttttttcaaaaaacacagttttgcaccaacctaatacaaagaacttaaatttaaaagaaaaaccattttaaaagggggcaa

SEQ ID NO: 642656 - DNA, 531 bp, Homo sapiens
tgaggaacataatggctgcttttaaatatcttaagcaccctatgtgaaagaattcaagtacataggaagaagtaggacaakttttagggacaagtatgtgaagaaaagtctcagtggtcaacttgccttgtcaggcattaagattcccatcacaggaggagttaaagcagaagatgggtggccacttagtgaaaaagtcacaggggcgatccaaggattctgaagcgggaagtatgcaagagtcgaggcagatgatcttaaagtggaggtagcaaaccagcagttcgtggccaaatacagtctacgagatgccataacacaggtggatttagttatcaacatttatgaatcaatagattcccataaacatctgaaatttcttttttctcagggaaaaatatgaaaatatggtagcactgcattcccttttggcaacaattggtgatgctaaaaatagattgtttcttttaaacagatcaagtagcctatagtttaccacagtcccaatattcccacccatttaggctctag

SEQ ID NO: 642657 - DNA, 531 bp, Homo sapiens
tgaggaacataatggctgcttttaaatatcttaagcaccctatgtgaaagaattcaagtacataggaagaagtaggacaagttttagggacaagtatgtgaagaaaagtytcagtggtcaacttgccttgtcaggcattaagattcccatcacaggaggagttaaagcagaagatgggtggccacttagtgaaaaagtcacaggggcgatccaaggattctgaagcgggaagtatgcaagagtcgaggcagatgatcttaaagtggaggtagcaaaccagcagttcgtggccaaatacagtctacgagatgccataacacaggtggatttagttatcaacatttatgaatcaatagattcccataaacatctgaaatttcttttttctcagggaaaaatatgaaaatatggtagcactgcattcccttttggcaacaattggtgatgctaaaaatagattgtttcttttaaacagatcaagtagcctatagtttaccacagtcccaatattcccacccatttaggctctag

SEQ ID NO: 642658 - DNA, 629 bp, Homo sapiens
tggcagcttctcttgaactgttacttgaactttagtaataacagtttaaggacaaattcaaaaaagatagggtaacaaggcattccagacagaagtagcagcatatgtaaatatatgcagatagaaaagagcttaggatattctgggaacagcaagtattgtacatctggagggtatagttcatatggaagaatggtgggggatgcggccagaaaggaaggccaagaccaagtatgagaagctgagtagccatgccagagtttagaccaccttatgatcagtaggaagccatcaagaatttagaacagggccaggcacggtggctcacacctgtaatcccatcactttgggaggccaaggcaggagaatcacttgagcccaggagttagagcctggcttgggcaacatagcaagaccccatctttattaaataaaaaaagaattaaaaaaattttttttaaagaattgagaacaggagtatggtaagatcagatttgtagttttagaaaatcggtctagcagtgagtggttggataatagattggcacactgtgagatacaattatactggcgtctcataacaatcctatgrgtttggtacagcaaattttctatttttctgatgaaag

SEQ ID NO: 642659 - DNA, 494 bp, Homo sapiens
cttatgatgatctgctaaaactttttwaaatacacaatatttataatttgctttttaaagaaaacaatatgtaaaatagttatcttctacatgttagaacatagactttaaaacataatttaaaatatacggcaaaaattacaaaggtgcaaatgccaaatgctttatcttactgaataatcactaagagaatgtaccattttagtagaaattaataggttgtattgattaattgaaccccttttaaagccaacatatctattggttatacatttctgtgtattctaacatgcaagctggtaacactaaatggctcttcaattttttaaaccagggagtccttcagcaatatggcaaaaatgctagtggatcctgtgtcttttaataattttcaaaactgtttaatcattttgaaatcattttttgatcactgaccaccttaaaaattgaagaggaaggatgtactttcttaaaatatgttcatacatatacat

SEQ ID NO: 642660 - DNA, 494 bp, Homo sapiens
cttatgatgatctgctaaaactttttaaaatacacaatatttataatttgctttttaaagaaaacaatatgtaaaatagttatcttctacatgttagaacatagactttaaaacataatttaaaatatacrgcaaaaattacaaaggtgcaaatgccaaatgctttatcttactgaataatcactaagagaatgtaccattttagtagaaattaataggttgtattgattaattgaaccccttttaaagccaacatatctattggttatacatttctgtgtattctaacatgcaagctggtaacactaaatggctcttcaattttttaaaccagggagtccttcagcaatatggcaaaaatgctagtggatcctgtgtcttttaataattttcaaaactgtttaatcattttgaaatcattttttgatcactgaccaccttaaaaattgaagaggaaggatgtactttcttaaaatatgttcatacatatacat

SEQ ID NO: 642661 - DNA, 387 bp, Homo sapiens
aagtgaattcagcaccttcaactgaaatatccatgttctcgcattggaaatgacaaggcaaagaactcacagagaacaaagaamagcagtgtggggtaatggcccacctgggagtggcatggagccaaaggaacccccatccccagccaagggaagcagtgagtgattgttcgaccccacctgggaaaccacatttctcccacacatctttgcaacccatagatgaggatatcccctcatgagcccacaccaccagggccttgggtccgaaacacagagctgtgtggagtctgcacagcagctgctcaggtacacacacacaggcccaggagttttacatactccagtcctgtgctacccagcaaggaaagagtccacctgtatata

SEQ ID NO: 642662 - DNA, 509 bp, Homo sapiens
aactgtcagtctcctgcatccccaggtcacacagaggaggagaaggattcttgcatccaccatcaaactttgctaccagtgaggagcattcacctattccctcctcctttcaccctcacctctcaagtctcctggtaaaaacaatgactcagagaaaggacaagtcatctatctgtgatgacatggaccagtgctagcaaatgtcttatttyccctaaaggacaattctatattcctaagggaagccatgtttctaacaactacccaaccaccaccaccatccttccccaaactattttctgctattctgtttcctgcttcccctgacatcttcttcccagtttcttttgcagcaaaacataaaagaatacttcacctaatattcatggccttggattttgcaatcagagtcttcctcttatctttgggaaataaagaaggcaaagaagagtgaatggtttatgtaaattttctggataacttgaaaagcccacacattcttagtgtaa

SEQ ID NO: 642663 - DNA, 509 bp, Homo sapiens
aactgtcagtctcctgcatccccaggtcacacagaggaggagaaggattcttgcatccaccatcaaactttgctaccagtgaggagcattcacctattccctcctcctttcaccctcacctctcaagtctcctggtaaaaacaatgactcagagaaaggacaagtcatctatctgtgatgacatggaccagtgctagcaaatgtcttatttcccctaaaggacaattctatattcctaagggaagccatgtttctaacaactacccaaccaccaccaccatccttccccaaactattttctgctattctgtttcctgcttcccctgacatcttcttcccagtttcttttgcagcaaaacataaaagaatacttcacctaatattcatkgccttggattttgcaatcagagtcttcctcttatctttgggaaataaagaaggcaaagaagagtgaatggtttatgtaaattttctggataacttgaaaagcccacacattcttagtgtaa

SEQ ID NO: 642664 - DNA, 462 bp, Homo sapiens
tatgcaaaacggcccccactctcaagtagcctacagcagcgttgggggaatggaaggcgaagtcgcgagtgaacacctaacaacgcaagagaagatacagagaatgtggagatgataaacactaaagagttttagcaaagtgtgtccgagcgttgcaggaagttctcacataggaggtcacaggcaccatagcacatcaggaaaagcatgggaagcaacagcaggcagtgagtgtatctggaggaccacacagagaagccacacagagacagaggggagaggccaggccactgtgctgggcttctaattctagtttaggatatttggactttaacctctaaggaccacagacttacaaacaggaaagtagcagatcagaagggatatttaatgagttcaaaaygattgcaggatgcagacaggatggccctagggagaagaggcttggacgcacttgtggaa

SEQ ID NO: 642665 - DNA, 643 bp, Homo sapiens
ggactgggcctagattttcattcgggacccatttcctgtccatctcaagccctgtgttttgggaggagctgattctactcccacttcctttcagagacagatgtgaggcccaggcctagttaggcagaatggtcctccccgctcaccacacagagtggtaaacaggccccatctcaacgtggccccgtgggagtcagctcttgtgtttttccaggaaccattggctaggaagcatgttcttggcatggaggatgctgggtgggggtgaaagccgagagaagcaggtggcctcttgcawtgctggggaaagaggaatgacactggaacagggcatggcgggcaagatttccaaagtgacagagcccctggattcagccgtgtctgatatgtgctctggagaaaaacactcaaaccaagtaaagaggctgcagataaccagacatgttgaggaacagtgctctgagaaggtgacattggccgtctttctcatcttctctccttgggagctctctgtctaacccagctggtctctagtgaaggacactaaggagcgagagctacgggggtgtgcagcaagagggaagagctgagcgcagcccttggccaggcgtgctcacgatgcctgagggacagcaggaaggcc

SEQ ID NO: 642666 - DNA, 643 bp, Homo sapiens
ggactgggcctagattttcattcgggacccatttcctgtccatctcaagccctgtgttttgggaggagctgattctactcccacttcctttcagagacagatgtgaggcccaggcctagttaggcagaatggtcctccccgctcaccacacagagtggtaaacaggccccatctcaacgtggccccgtgggagtcagctcttgtgtttttccaggaaccattggctaggaagcatgttcttggcatggaggatgctgggtgggggtgaaagccgagagaagcaggtggcctcttgcaatgctggggaaagaggaatgacactggaacagggcatggcgggcaagatttccaaagtgacagagcccctggattcagccgtgtctgatatgtgctctggagaaaaacactcaaaccaagtaaagaggctgcagataaccagacatgttgaggaacagtgctctgagaaggtgacattggccgtctttcycatcttctctccttgggagctctctgtctaacccagctggtctctagtgaaggacactaaggagcgagagctacgggggtgtgcagcaagagggaagagctgagcgcagcccttggccaggcgtgctcacgatgcctgagggacagcaggaaggcc

SEQ ID NO: 642667 - DNA, 643 bp, Homo sapiens
ggactgggcctagattttcattcgggacccatttcctgtccatctcaagccctgtgttttgggaggagctgattctactcccacttcctttcagagacagatgtgaggcccaggcctagttaggcagaatggtcctccccgctcaccacacagagtggtaaacaggccccatctcaacgtggccccgtgggagtcagctcttgtgtttttccaggaaccattggctaggaagcatgttcttggcatggaggatgctgggtgggggtgaaagccgagagaagcaggtggcctcttgcaatgctggggaaagaggaatgacactggaacagggcatggcgggcaagatttccaaagtgacagagcccctggattcagccgtgtctgatatgtgctctggagaaaaacactcaaaccaagtaaagaggctgcagataaccagacatgttgaggaacagtgctctgagaaggtgacattggccgtctttctcatcttctctccttgggagctctctgtctaacccagctggtctctagtgaaggacactaaggagcgagagctacgggggtgtgcagcaagagggaagagctgagygcagcccttggccaggcgtgctcacgatgcctgagggacagcaggaaggcc

SEQ ID NO: 642668 - DNA, 611 bp, Homo sapiens
aagcttagtttccatttctcatctccagaaaagttgaaagtaatactacttagaagtggtctgtggactggggccaagccacaaaacgtgagctacatgtacaaaccaaaaataagcatttagaaattttcataaaaatgtttgtaactttatgtctattccttttaatctaatcataaagaatttggactagtactttacacatcttttaagattttgtttcatattcctgataacttatttctctttcttttcttttcctttctctttctttctttctttctttttctttctttcttttcttctttctttcttcctttctttttctctctctttcttttttgattttacaaaagtatttgatccacaatggattgggggracaaaaagaaaaaaacatcttggccctccctgtattatttgatttttttgcaatttcttatgaatctataattatttcaaataagaagtaaaaacaaaaccaaaataggacaaaagaaaatgtaaataaaaagctggtccttgaccacagatagttagagaatcagtagccttggacccaatcagctacacgtgggaagagcaacttataaaggagaaaaaacatctta

SEQ ID NO: 642669 - DNA, 589 bp, Homo sapiens
aaaagcaaataaacacacaaagccctgtggcatcaaacaatagacattcatttacctcactggcaactcttctgggctggagtctcatgtctctgcagtcagctagtggctctctgggaggaactggtctaggatggcctctcatgaattgtctggccccagtccctgtggtctcctattctccagcagacaagcttggccttgttcttatgaccgtcacagggttccaagagagcacacagaggaatgcaaggcctctcgaggcctgggcttggaactgggatgcagtcattcttactgcaggaccagactggattctaggagtrgaggagtgggctccacttgaaagggcaatggataaagaaagggaaaggattggggccattttgaaacagctgaccaggacctggctcattgtttgagcttccacattctctgcgatatcagggtgatctcagattccagatgctagtgcttgtcatccctaccctaaggactgctgatgaaatattgcccctttccttcaagtaaccaaaatagacacaattaattgattcgtgtactctgctcattaactcgaatgtggctt

SEQ ID NO: 642670 - DNA, 484 bp, Homo sapiens
ccatcttctctgaagatgagtgtgcttggtgtgttcagagcctgggttttcatgcttcttctgcaaacccacagagaatctgctcctcttcccactgccagactcacttcaaaccctgctgggtactgagcccgaatcccaggcagagaattscagtcattagatctcacaaaagctttttattttgatcatgtttccatttatcttgtttttgtcacttactcttttattcccagtcctatagatgaccaggtcactgtattgccatcttcaatagctgagttctatttctctttgagttattttttatggttggatttgccggttttagggggaaaatagaatcatttcagttttgcccctatttgaacttattttgtgcctacgtacctcccactgaagcagggggaggatgtgcggtgcttgacattcagaacgaccttgtgtcgatggagagctcctattggccccagggtgattgtgt

SEQ ID NO: 642671 - DNA, 484 bp, Homo sapiens
ccatcttctctgaagatgagtgtgcttggtgtgttcagagcctgggttttcatgcttcttctgcaaacccacagagaatctgctcctcttcccactgccagactcacttcaaaccctgctgggtactgagcccgaatcccaggcagagaattgcagtcattagatctcacaaaagctttttattttgatcatgtttccatttaycttgtttttgtcacttactcttttattcccagtcctatagatgaccaggtcactgtattgccatcttcaatagctgagttctatttctctttgagttattttttatggttggatttgccggttttagggggaaaatagaatcatttcagttttgcccctatttgaacttattttgtgcctacgtacctcccactgaagcagggggaggatgtgcggtgcttgacattcagaacgaccttgtgtcgatggagagctcctattggccccagggtgattgtgt

SEQ ID NO: 642672 - DNA, 599 bp, Homo sapiens
cttctctgcgtttctcaaacatgccaagtgtattctatgttgtagggtgaggcagcagttgcccagaatattctctcctgggtttttctattgcggactccctgtcatccaggttttggtttgaacgcggtggtgtgccggtaaatgtttaacaggcagctgtcccgggaaaaaggaagccatgatgtggggcatttaccaatttgtgtaaatattccaccatggcctaaagatacgggagtgatgtcaatcagctcaccaacttgtggaaattttaataattcattcttctgagctgttagctgcctccagtttagcagtgcttgagatgatgtttttcctctgaagtaagctcyaatgatggttaaacctgtttgtttgttttaaatttctgtcttaaccatatcactagcatagaatcttttcttcttcatttacttacttacttacttgactattgaatgattcctgcacccccactcaaccaacacacacacacacgcgcacacacacacacacccctacctaagtttcatgaaagcaaggaccttgtctgttttttcagtgctttatttcctgtgttcacattggtattttgg

SEQ ID NO: 642673 - DNA, 531 bp, Homo sapiens
tgcctctgtgactttgttgtctagcaggaattgtaaggaattgtaatcgcrctctctccctccctgcttgccctaacctgactgcagggactgcgagctctaaggaggagaaacatcatggggagtgatatgtgagcctcggaaggcttcatcattcactctgaaatgctggcaccgagtcaagttagttcttatgtgacattaaaaacctcacttcagtgaggaaaacaaacagataaagaatagcagctaatgactttggaaggctagagagcatctgaagtattgtttttttaaatgcaatagattttaaaaggcatttccaataatgaatatgtcatccaattactgcactcttctcattctgaacacctgtcccagtgattctcaatccccaaagtgacttttatttttaacgatatttattatcatgagtgttatcacattagatgaaatcagctggagatagaggctgcattcactgatggcatggaggcaccgtgccctggggaggctgtttttcatcctcct

SEQ ID NO: 642674 - DNA, 632 bp, Homo sapiens
tggctgggaagcttgaactgggtggagcccaccacagctcaatgaggcctgcctgcctctgtagactacaccttttggggcagggcatagctgaacaaaaggcagcagaaacttctgcaaacttgaaggaccctgtctgacagctctgaagagagcagtggttctcccagaatggtgtttgaaccctgagaatggacagactgcctcctcaagtgggtccctgacccctgtgtagcctaactcggagacacctcccagtaggggctgactgacacctcatacagccgggtgtccctctgagacaaagcttccagaggaaggatcaggcaccaatatttgctgttcggcaatatctgctgttctgcagcctctgctggtgatacccaggaaaacagcgtctggagtggacctccagcaaactccaayggacctgcagctgagagacctgactgtgagaaggaaaactaacaaatagaaaggaatagcatcaacatcaacaaaaaggacatccacaccaaaaccccatctgtaggtcaccatcatcaaagaccaaaggtagataaaaccacaaaaatggggagaaaccagagcagaaaagctgaaaattctaaaaaccagagtgcctcttttcc

SEQ ID NO: 642675 - DNA, 585 bp, Homo sapiens
ggtggttggtactagggaggaaaaaaatgggggagtagtgtttctattttgcatatggcattggsttgtgaagctacttccacccctaatccctttgacccttttgtagctcagctgaccaacaggggaatacttatttatagtgtcccttcccctcctctaactgagatcaatgcattttatttaattggcgtcaccccatcatattagaacatttagaatttgtctttatggccttctttataccccaggaagggctcttgagggcaacgcaaaagggcagctttgggtgttgaacggggtctccattaatttgggatgaactgagtgtcagaaaattgagtttcaagggcagcctaggaaacttgtcaatttcaagctgtctgctgtggagccaaagcatccttagttgctggattttggaggcttgtttacgttggtttatgtaatagctacagtcccccaggttgattaagtaatttcttcatttagaacatcctaaattgcatgacatttgagagatttccttgaccttgtcaagggcagatgctcactttattgcttttccttattctttgcttaaag

SEQ ID NO: 642676 - DNA, 522 bp, Homo sapiens
accaacaggggaatacttatttatagtgtcccttcccctcctctaactgagatcaatgcattttatttaattggcgtcaccccatcatattagaacatttagaatttgtctttatggccttctttataccccaggaagggctcttgagggcaacgcaaaagggcagctttgggtgttgaacggggtctccattaattkgggatgaactgagtgtcagaaaattgagtttcaagggcagcctaggaaacttgtcaatttcaagctgtctgctgtggagccaaagcatccttagttgctggattttggaggcttgtttacgttggtttatgtaatagctacagtcccccaggttgattaagtaatttcttcatttagaacatcctaaattgcatgacatttgagagatttccttgaccttgtcaagggcagatgctcactttattgcttttccttattctttgcttaaagaaaacagactgctttctccctcacggcaactagaggtgagtggaaatgaccaca

SEQ ID NO: 642677 - DNA, 557 bp, Homo sapiens
agctgcctgcatgccacttccagtgccacccatgacttaataagcccttccttgctcctgtcaccaacgtcatcaatggaagttgtacatgcttcaggactcaggacacattcctccccagtgcctctttcttgtcttcttgggccgacagctggctggttatcacaatcatctgagtgcacccaccttctagggcagtctcctaggctatatttggttagcttatttatgaggatgtcacataggcagaatcaacaaccttcctgttcttgagctctaatatgtttattgkgtcatcacttctacaagaatcatcttcctctttgagacaggagtaacctgggtgggtcagacacaatgtgcttctttcaaagccacactggtatttcccagcactctgcggtttgtctgtctcccaattgattctcttttgatttgccctgagagtctttctcataggaaaatcaggttttgttatcaatctctaactttccaagtcgccttcctgcctttttaaaacatacattgcatttatttgtttcttgtgtttggaaacc

SEQ ID NO: 642678 - DNA, 574 bp, Homo sapiens
tttctttgttattttcctccagattttgtgactcacttgaatcatgtctttttccattgcctctctggcatcttgatagttgtaggtgattttcttatgaaagaccagtgcccactgtgaggccatgggacacagccygaagccctttagctcctggataactagctaatagttccctagaaggaatgccctcaggcttcctgaggactggaatgactccttggcagaggtgaagcattttttaatctatctgagttatttaaagtttaagacagggataacctacacgagagactattttcttgaagaatacagacttggggtccaggctctgctatttgctagatttacaactttggagaaattaacctctttggttttccatttctttttcagttaaactgtggtgaaaaaatacctatcaaatagggttatggtgagtgttaagaaaaccgatgtgtgcaaagcacatatatattttgtttttatttttattttgtctgtttcatgttttcagaaaccatgatcaaagcattcataagttctccaaaagggttccattggtcctcaaagc

SEQ ID NO: 642679 - DNA, 599 bp, Homo sapiens
acattaagttggtctaaaaagcttgaaatctcacattttattcaatattttaaaaggtttttccttatagtattgtaatctctacctgtatgtgaagaaaatcctgacaggctcatgacatttttgctcactgttaagcaggtatacacactggccagtcagaatgaacacaggcagtaggcaatctctgtgacagtactgtggctggctggttcaataccagattagttcttaagcaacagatcttctatttaagttacaaatgcaatctgagtttggaaattagaatatgcagtctaggattttcatcaccattctgaactgaatttaacattaaatcaaccctgcaccagtgtgacagtaaccttcctcccaacccmcttggaacttgaagacagcctctgatggggctgggcagaggaacctaggaggaaggatggtcacaggaataggggcgtccttcccttccccgtagagcaatcaggccctggcagctgaggaaaggtgcatgttcatggcaaaacaacaacatgaggtcccacggatcctccttgccattgtatttctctcacactctggcgggagccttcttgggcaag

SEQ ID NO: 642680 - DNA, 538 bp, Homo sapiens
atatagctgtagtttgtttattcttgtgtagtatttcattccatagataaaatttaatggagcattgcagtgttaatagacatttgggttatttccaatttgtgtctactatgaatcctacttttatgaaaaccatcatgcatattttttggtgcctatatgcacacatttcttttggtcatctacctagaagagaaatttctgggtcatacatctaccttcagtacatattgtacatactgcaaaatcrtgttccagagtggttgtgacaacttatactcccacaatcagtgtatgacagttccagttgctccgtctcttcaatgacacttggtattggtctttttgatgtaagatgtagtcatatttcattattttaagtcatagttctgtgattgctaatgaaactaagcactttatgattatttggtatttagagttcttattttgtgaaagtcctattcaaatctttttagacagaactttcagaaagttagaattagattatctgatatcacccaatgttatctaacatttg

SEQ ID NO: 642681 - DNA, 492 bp, Homo sapiens
cacaaatgctgcctcatggttggcaccaaggtgatttgcagagccttctctgtggagctaatacctgtggctgaaagatcagagttccctcaaaagagcagtgcaagatcttgaggctaatcatctgtcatcaccctcctggggaataagtgagtgttcttttttttttttttttctgagaccaagtcttgctctgtcacccagctggagtgcagtggcgyaatctcggctcactgcaaagtctgcctctcctgggttcaagtgattctcctgcctcagcctacagagtagctgggattacaggtgcatgccaccatgcctggctaagttttgtatttttagtagagatgaggtgtcactatgttggccaggctggtatcaaactcctgacctcaagtgatctgcccacctcggcctcccaaattgttgggattacaggtgcaagccaccatgcctggccaggtattcatatttttatccaaacttggagat

SEQ ID NO: 642682 - DNA, 500 bp, Homo sapiens
ctacacttatcctacactgggaaacttatgaatctacagagaggaaactttcaacaaacattatgaattactagaggaatgcctttctcaccggcaggagattttattgaaatatttgccaagtgacttgaaacaacttagatgaaagccagtccaccttcacctctagagctcagaagtaccaaaatctgtcttgctgggaaatcaagctgggaatttctttaagaattgtaygcacattgtatcaaaatgtgcaaatatgcttccaacacaggagagtagtctctcaaaaccaaattgcagcctgtaagtgtctccctgggccaaagtcccatggcaactcaattgctgactttatttaaaaaaacaggtaaacttatatagcagaagaagcatttaataaagtattaggacacacacaaacacacacacacagggatacccgtgtttcagaatagctcttcttgctgggttaatattctctgctgtagttggtaaca

SEQ ID NO: 642683 - DNA, 500 bp, Homo sapiens
ctacacttatcctacactgggaaacttatgaatctacagagaggaaactttcaacaaacattatgaattactagaggaatgcctttctcaccggcaggagattttattgaaatatttgccaagtgacttgaaacaacttagatgaaagccagtccaccttcacctctagagctcagaagtaccaaaatctgtcttgctgggaaatcaagctgggaatttctttaagaattgtacgcacattgtatcaaaatgtgcaaatatgcttccaacacaggagagtagtctctcaaaaccaaattgcagcctgtaagtgtctccctgggccaaagtcccatggcaactcaattgctgactttatttaaaaaaacaggtaaacttatatagcagaagaagcatttaataaagtattaggacacacacaaacacacacacacagggatacccrtgtttcagaatagctcttcttgctgggttaatattctctgctgtagttggtaaca

SEQ ID NO: 642684 - DNA, 576 bp, Homo sapiens
ggattcactggaaaattctgaaagtccatgtgcaaatctggggaatgccaatcacttcctctgaatctcatagatgtacacctcggctcacactcacattctccagccatcctgcctagtgctggcttttgctcatggtaggcttcacacagcacgttcctcacccgaggaggaacagtgtcattctggaaggcatggtgacatggcttggctgtgtccccacccaaatctcatcttgaattgtagctcctataatcctcatgtgttgtgggagggacctggtgggaggtaattgaatcaygaggggcaggtttttcccatgtggttcttctgatagtgaataagtctcatgggatctgatggtttaataaagggcagtttccctgcacaccctctcttgcctgtagctgtgtaaaacatgcctttgttcctccttcatcttccgccatgattgtgaggcctccctacctatgtggaactgtgagtgcattaaacttctttataaattacccagtctggggtatttcttcacagttgtatgaaaatggactaatagaaatgggcttgaaatcagac

SEQ ID NO: 642685 - DNA, 623 bp, Homo sapiens
caaggaaaacacacatgagctatgcattgtctttcttaattaacttgtaacccgtttacctgtcgctcaagactgctcacagctgggctttctataaagccatctatatactctggagctgggtagcaagcttccattgtcccctgctccatctcttacacatgtcattcacaggctggtaggttcagagtyggtgtccttgtccctttttcttactgcttgtacagcttctctgttctccattatggctcattatttgagtggatctttctttccatttcttggtggttgggtcattatccatatcagtcattgtaacctacactaatgcctttaaattcttactgtatgtcagatattaatacatttccaaatgctttaaatgaatcgtctaatgtaatactcacgggaatttgattccttgtttttggatgaagatatggaggctttggaggtactacactgactgtccccacaggaggttaatggcacagctgtgagggaggcacacccagtcttttctctattttcctgcttgcagagagactgtagtaaatccctcaactttgatgtgcctgtgagttttattacaatgcagattctgggatctgggatgggctgag

SEQ ID NO: 642686 - DNA, 528 bp, Homo sapiens
gagaactgaccaaaggcagagtccagagaaacaaagggagggagagaagttcctacgcatatactagttctatttgctgtaaagtactccctgtctacccaaccccatcctaacctaaagaactactattcaacctttgagagttaagtaagtcatcacctctcagaagcctttcccaacatccccagttaggtcttgtaatctaaggacctgacatagtgcttagaatactagcgcctgcctaataagtgttcgatatttgtcgacagataaataagtgactaagcaaaagtctagagctgtgttgtgcaacagaattcttgcaataatagggatgtactttaatctgtgttgtccagagcagcagccagcagcaacatgtggctttggctgttgtataggacaacacatgtctggatacctggtgctttctgtgctcccgccattgctgccatcagaaaactcattaaccacraaggctgtgggggccaatcaggcccagctgattctgcacttgagtaaatccag

SEQ ID NO: 642687 - DNA, 452 bp, Homo sapiens
ttaggtgtaagggagatagagtgtgggaggctgagacagccctgtgggtgattctgggatgccaggcagagctgggtctcactctgtctctgaattctgcccctaactccccacagtggggccacatayattttccatcatggagcactcctgttctccccactttcctattccaggccccctttcctcttgagatgcaaatacacttttcctttccagtctgagcagtacaagattctctaaattagggtgctgactctaggaagaaatgcttagtgaatgatggctcatggttgctaagcaaatctgagctgcctgacttctgcatggagttctcaggattctccatggagtgactaagaacggaacaaatcatttggcccagagtagtgggtttctgtgctattagtcgaggcagcttagtgtaacagaaaaagcagttttttctttta

SEQ ID NO: 642688 - DNA, 454 bp, Homo sapiens
ggatattaggtgtaagggagatagagtgtgggaggctgagacagccctgtgggtgattctgggatgccaggcagagctgggtctcactctgtctctgaattctgcccctaactccccacagtggggccacatacattttccatcatggagcactcctgttctccccactttcctattccaggccccctttcctcttgagatgcaaatacacttttcctttccagtctgagyagtacaagattctctaaattagggtgctgactctaggaagaaatgcttagtgaatgatggctcatggttgctaagcaaatctgagctgcctgacttctgcatggagttctcaggattctccatggagtgactaagaacggaacaaatcatttggcccagagtagtgggtttctgtgctattagtcgaggcagcttagtgtaacagaaaaagcagttttttctt

SEQ ID NO: 642689 - DNA, 564 bp, Homo sapiens
gcttttgcttaggcctcagtaaacgtgacaccttgtttggaagaaagtttaaatttccttgctatgtagtcacacacacacacacacacacacacacacacacacatacacacatacacacacacacacacaactcatgaagagaaaaagtacatagttctacactgactcattattctccctgaaaaaatatgtttttattatgataattyccccagagtgattgattgaatactttaatactatgaagaatatgatttttaaaaattatctttctaacttaattttactatttaatttaaatgtagcatttgttgcatagtcagtacctgtggtgggtcaaatggtggcccctgaaaagatatgcccatgtcctaatacccagaacctgtggctgtgaccttctttggaaaaagagtcttttcagaggtagttaaattaaagatcttaagaagagatcatcctgatcatctggatgggccctacatccaatgctagtgtcctggtaagagagaagagaagtcagaggcacagagaggtgaagatggaagcagagattgcagg

SEQ ID NO: 642690 - DNA, 564 bp, Homo sapiens
gcttttgcttaggcctcagtaaacgtgacaccttgtttggaagaaagtttaaatttccttgctatgtagtcacacacacacacacacacacacacacacacacacatacacacatacacacacacacacacaactcatgaagagaaaaagtacatagttctacactgactcattattctccctgaaaaaatatgtttttattatgataattcycccagagtgattgattgaatactttaatactatgaagaatatgatttttaaaaattatctttctaacttaattttactatttaatttaaatgtagcatttgttgcatagtcagtacctgtggtgggtcaaatggtggcccctgaaaagatatgcccatgtcctaatacccagaacctgtggctgtgaccttctttggaaaaagagtcttttcagaggtagttaaattaaagatcttaagaagagatcatcctgatcatctggatgggccctacatccaatgctagtgtcctggtaagagagaagagaagtcagaggcacagagaggtgaagatggaagcagagattgcagg

SEQ ID NO: 642691 - DNA, 383 bp, Homo sapiens
cattttcaatgcatgacattggtggtggtggtggtagtggtggatgtgtgtgtgcacatgtgtgtgtctgtgccctttttgcatgacatacattcttacctgatttggggggtaggcttggccaatgaatgaaatgacctgaaagccaaggtcctcgctaaatatacccaggaacctcactgggaattagtttgaaagattaggagcatgtaatttattccagttggaarttactgcaggattttatgcaagggaatgacatgttttccaaatttcttttggagtattggcataatcaaaatcccataatcaaaatgaaaaccagacccctaaagaatatctttgaaaggagagtctcatagtaggataggggttctggaacc

SEQ ID NO: 642692 - DNA, 529 bp, Homo sapiens
cgaatgcacactgatttttattttattttattttggtgtgttttttaatttttattttagattcagggggtacatgtgcaggtgcatcataagggtatgctctatggtactgaggtttgggtttctgttgacttggttacccagagagtgagcacagtacccagcaggaagtttttcagcccttgtcccactttcctccctgcatttggagtcaccagtgtcttttgttcccatctttatgtttgtgtgtacccactgttagctcccacttgtaagtgagaacatgtgatacttggttttctgtttctgcattaatttgcttaggataatggcctccaactgcacccacattgctgcaaaggacatgatttcattcatttttatggctgcatactattccatggtgtatacagaccacgttgtctttatctaatcaacctaaaattacrttattttcttcaggctttatttcttctgggtgggcttactgatttgaatgctgagactcatagcagtaggtacccattaa

SEQ ID NO: 642693 - DNA, 561 bp, Homo sapiens
gaattctatctctgctggctgcagctcttcccatgtttggacgacaatgattaaaggcccatgcgtttccagcgaagtgttgacgattggctggcaggcttgaaaacacccacttttccagaggttggtaagcattggggaaatatttttcatgctgagcaggactatgtaaattgcccagcatctggaacaaattgctgtatggatacctgggctgtggaggatcaggtgagaaaaggctgctattctttgaaaaaataaaaataaaaataaacagcatcctgacttgcaggygagggaagggcagccacaggatcctgggatgctgtggggcttccctgttcagttgtggggagcagcattcccctggtagtgttgggaggagaagcccccttgctagaaacccagaaagcagagttttgcagggaaaatggaaaaatgttcactgtgaagagggaagtggggctcactatggactccagagcatgtgaatcacgctgtggctccaagtcccagacagtagtcattatttcattttattttatttatttatttttagag

SEQ ID NO: 642694 - DNA, 574 bp, Homo sapiens
actttatgacctagaggagaccaaaacgtgtgtgtgtgtctctgtgtgtgtgtgtatatttatttagataaaaacaatatgtaaatatttaacaaataaataaatgaatgaaaccactacactgttgtatgcactagagatttcatttggtaaattaaatgaaccaaagggctctgataagatttaggggagtgggtggcacagtggacacaggatggccaaggaagcttctgttctgagaaagtgacattcaagctaagacytaaggggttgaagctaccaggcaggtatctttccaactcagatttcttctgattttgacagtgcccagtggggcacctgagaaatgtcttcgggttctaaaaggggtggtgaataagtgttggaaagggataaataataccagtattaattaacatattaagcacgtattgtcttctgggcaatgttttaaagaactttttatgaaataatttaatctttataataacttactgaagtaaggttctattactcccattttgtggaagataaaattgagacccagaggtcccacagctaggaaacagcagag

SEQ ID NO: 642695 - DNA, 574 bp, Homo sapiens
actttatgacctagaggagaccaaaacgtgtgtgtgtgtctctgtgtgtgtgtgtatatttatttagataaaaacaatatgtaaatatttaacaaataaataaatgaatgaaaccactacactgttgtatgcactagagatttcatttggtaaattaaatgaaccaaagggctctgataagatttaggggagtgggtggcacagtggacacaggatggccaaggaagcttctgttctgagaaagtgacattcaagctaagacctaaggggttgaagctaccaggcaggtatctttccaactcagatttcttctgattttgacagtgcccagtggggcacytgagaaatgtcttcgggttctaaaaggggtggtgaataagtgttggaaagggataaataataccagtattaattaacatattaagcacgtattgtcttctgggcaatgttttaaagaactttttatgaaataatttaatctttataataacttactgaagtaaggttctattactcccattttgtggaagataaaattgagacccagaggtcccacagctaggaaacagcagag

SEQ ID NO: 642696 - DNA, 466 bp, Homo sapiens
ctaccaggcaggtatctttccaactcagatttcttctgattttgacagtgcccagtggggcacctgagaaatgtcttcgggttctaaaaggggtggtgaataagtgttggaaagggataaataataccagtattaattaacatattaagcacgtattgtcttctgggcaatgttttaaagaactttttatgaaataatttaatctttataataacttactgaagtaaggttctattactcccattttgtggaagataaaattgagacccagaggtcccacagctaggaaacagcagagacacgattcagactcaggaagtctgatgcaagaggtattcgccatttcctgaagtagataggaagtattttactatttytaaagcacatagaaatcccaagatatgggtacgtattatcattattattattgatataaatatatttttaaaatacataaaactcagta

SEQ ID NO: 642697 - DNA, 555 bp, Homo sapiens
gctcacaggcagcaaggctgggaagcgaccccaggggctcttggctgcagagtttgtacttgacagacttgaagatggtgtcgcttaaaaaaagacaaaaggaggacttgtctttctgtgcctggcttctttcactaagcatggtgtcctccaacatgtttgttcatgttatcacgtgcggcaggattccttctttttgaaggctgaatcatattctatcgtatgcgtagaccacatgttaaaacccattcatgtgttgctgggcccttaggttatctccacatctcggctgtygtgagtagcgccgccatgaccatggcagtgcagataactctttcagatcctgatctctactcttttggagaaacaggcataagtggggttgctgaatcgtgtggtggttctgtgattccctagaggcatctaaaatagtcctactcctagaagcaagaatagaatggtggctgtagggtgggggtataaatgttagttatgcaagatgagtaagttctagaggtctgtcgggcaacaatatgcttacagataaccacgatg

SEQ ID NO: 642698 - DNA, 524 bp, Homo sapiens
aaacagaatttaggattattctaacatggtgcagttggctctttaaaaaattagtcttttattgatgagaatrgaatgtagagggtcatgaaaatgtgctccaagtgttgagtgcttttccatgtgcacggcatggagctaggttctggagatacacagatgagttgaggaaggtgggacacatgcttgcaagtgcagaatcaggacagataatggagaaccttgaaagatttatagaggaatataacttagatccaaaataataaggatccaccataggtttaaaaacaaggaactggagtttaaatctggatcacaatagagagtcaggaatcaaggatgccaaccacaaggctgccgtagaaagcagaggtgagatggtatgggttggaacttgtaagaaactgtggaaatgaataaagtaaggcagacataggagacactgaggaagactatgttacttggaacactggcctttaaacttggatgtgggcgataatacaactcttcttcacactagctat

SEQ ID NO: 642699 - DNA, 524 bp, Homo sapiens
aaacagaatttaggattattctaacatggtgcagttggctctttaaaaaattagtcttttattgatgagaatggaatgtagagggtcatgaaaatgtgctccaagtgttgagtgcttttccatgtgcacggcatggagctaggttctggagatacacagatgagttgaggaaggtgggacacatgcttgcaagtgcagaatcaggacagataatggagaaccttgaaagatttatagaggaatataacttagatccaaaataataaggatccaccataggtttaaaaacaaggaactggartttaaatctggatcacaatagagagtcaggaatcaaggatgccaaccacaaggctgccgtagaaagcagaggtgagatggtatgggttggaacttgtaagaaactgtggaaatgaataaagtaaggcagacataggagacactgaggaagactatgttacttggaacactggcctttaaacttggatgtgggcgataatacaactcttcttcacactagctat

SEQ ID NO: 642700 - DNA, 602 bp, Homo sapiens
agtaccttcttattgcaattttgcttttcaaggttacagtttcctgagatcaactgcggtctgaaaatcggtgagtacaacacaataagatactttgagagagagagagtgagagaggcactatattcacataacttttattagagtatrttggaacaattgttctgttcgattattagttattgttagtttcttaccatgcctaattgataaattaaactttatcacaggtatgtaagtatagaaaaaaaatacagtatagctggggctcagtactgtttgcagattcagacatccactaggggtcttgcaatgtatcctccttggatagaggaggactactatatatgagttttatcatgtaaacagtacattagtactttcttaaatttattttatgaacagggatcaaaagtattctgtcttgagatttaaaattgcatgaccttagagctgggaaagaaatttagagaacatctaatccaacttcctactttccacccactctggctaagctttctaggattatcctccaacctctggtcttctcttaaatgctgtgagtttgcaactttccaaaggtttgttttgttttgttttgt

SEQ ID NO: 642701 - DNA, 602 bp, Homo sapiens
agtaccttcttattgcaattttgcttttcaaggttacagtttcctgagatcaactgcggtctgaaaatcggtgagtacaacacaataagatactttgagagagagagagtgagagaggcactatattcacataacttttattagagtatgttggaacaattgttctgttcgattattagttattgttagtttcttaccatgcctaattgataaattaaactttatcacaggtatgtaagtatagaaaaaaaatacagtatagctggggctcagtactgtttgcagattcagacatccactaggggtcttgcaatgtatcctccttggatagaggaggactactatatatgagttttatcatgtaaacartacattagtactttcttaaatttattttatgaacagggatcaaaagtattctgtcttgagatttaaaattgcatgaccttagagctgggaaagaaatttagagaacatctaatccaacttcctactttccacccactctggctaagctttctaggattatcctccaacctctggtcttctcttaaatgctgtgagtttgcaactttccaaaggtttgttttgttttgttttgt

SEQ ID NO: 642702 - DNA, 557 bp, Homo sapiens
taactcacagctgtctctccagagagtcatccttggccaaaccttcatgtgggcagctaccacccaccacaccagcccctcttccagatcagacctcagcaaacctgactggcctagggatacagaagaccagcctcttgcgtccacgtgggaccaagtctgcagtgtgacttgtgctccagaactctcccacaggctcagcctgaagtcaggctccagcgaagcccatccmtgcctggcttctctccacagtcctattctgctgccctgactcctcttccctaagggctattgcccagcgaagcccatggtctcagactgggcttcaaagaaacctgactccatgttagcatcttctgcggagttttataaaaacacatacacctgaacttaaccacctagacttactgagccagaagctatagagcttcaagagtgggaaccagacaactgtatgctttaaagcctaatagatatttctaattcaccagtttatctctcaacttttcattttgaaaatgccaaacttacagaaataatgaaagtataatatagtg

SEQ ID NO: 642703 - DNA, 462 bp, Homo sapiens
tatgcaaaacggcccccactctcaagtagcctacagcagcgttgggggaatggaaggcgaagtcgcgagtgaacacctaacaacgcaagagaagatacagagaatgtggagatgataaacactaaagagttttagcaaagtgtgtccgagcgttgcaggaagttctcacataggaggtcacaggcaccatagcacatcaggaaaagcatgggaagcaacagcaggcagtgagtgtatctggaggaccacacagagaagccacacagagacagaggggagaggccaggccactgtgctgggcttctaatkctagtttaggatatttggactttaacctctaaggaccacagacttacaaacaggaaagtagcagatcagaagggatatttaatgagttcaaaatgattgcaggatgcagacaggatggccctagggagaagaggcttggacgcacttgtggaa

SEQ ID NO: 642704 - DNA, 471 bp, Homo sapiens
aaaaatgccaataatcctcttgagtaagaaagacacagtaaaggcttrtgtggaatggagaaaattggaaatagccgctatagagaatgggaggaatagaaaaacagggacagaggactgtcattttttttggtaggtctgggtgaggtgagagatcatgaatttgtgaaagcaccactgtatagaaatatatgattttccccaacagcagcaagtgtaaactcttaagatgtgaattttttctggagtggagtttttccaggagaatgtgataggaggacagtggggtaaggaggttgaagagtctgacagtgatagatgaagccatgcattgccacatctaggctggatggggaagaaggggaagaaagtgaagaaagggtgtagctaagggattgaggaaaagtagggcattcaaggagctttaggttccagtgaggtcaaagaagagaaataactcaagctgggaag

SEQ ID NO: 642705 - DNA, 596 bp, Homo sapiens
gtcccctctttacagatgggtaactgtgtccctgtactataggacactcccctcagatgcatcctccagactgagaaaagttaatttccaaaacctgrcactggttggcttagaattgagctcaggggaagagaacccagaagcctgacacactgacaaaagggtaaaatattttttacctgttggacttttggcccctctctccctgtgcaaaccagtaaaaggaatgataaggatcactgtttatatttactgtaaagttttgattaatgaaaaagaatatatgagactgggcttaagctgtagctaatctggtgtgcttttagcgtcttaattgaggcttgttggtttcacctgtgaggtcacgtttggtaaagttcaaaagccagaaacattggacacatggtgcggctaacatcgggtaataagggacttaaaaggactttcttaaacagcactcagcttaattaaaagggggtatccaagttataggtatatttaaaaggcctttatgtttttctcttcttggatcttgttttgctggagaaaagtttttttttcctcaatcgactgaattacctttctccaccttgtct

SEQ ID NO: 642706 - DNA, 596 bp, Homo sapiens
gtcccctctttacagatgggtaactgtgtccctgtactataggacactcccctcagatgcatcctccagactgagaaaagttaatttccaaaacctggcactggttggcttagaattgagctcaggggaagagaacccagaagcctgacacactgacaaaagggtaaaatattttttacctgttggacttttggcccctctctccctgtgcaaaccagtaaaaggaatgataaggatcactgtttatatttactgtaaagttttgattaatgaaaaagaatataygagactgggcttaagctgtagctaatctggtgtgcttttagcgtcttaattgaggcttgttggtttcacctgtgaggtcacgtttggtaaagttcaaaagccagaaacattggacacatggtgcggctaacatcgggtaataagggacttaaaaggactttcttaaacagcactcagcttaattaaaagggggtatccaagttataggtatatttaaaaggcctttatgtttttctcttcttggatcttgttttgctggagaaaagtttttttttcctcaatcgactgaattacctttctccaccttgtct

SEQ ID NO: 642707 - DNA, 596 bp, Homo sapiens
gtcccctctttacagatgggtaactgtgtccctgtactataggacactcccctcagatgcatcctccagactgagaaaagttaatttccaaaacctggcactggttggcttagaattgagctcaggggaagagaacccagaagcctgacacactgacaaaagggtaaaatattttttacctgttggacttttggcccctctctccctgtgcaaaccagtaaaaggaatgataaggatcactgtttatatttactgtaaagttttgattaatgaaaaagaatatatgagactgggcttaagctgtagctaatctggtgtgcttttagcgtcttaattgaggcttgttggtttcacctgtgaggtcacgtttggtaaagttcaaaagccagaaacattggacacatggtgyggctaacatcgggtaataagggacttaaaaggactttcttaaacagcactcagcttaattaaaagggggtatccaagttataggtatatttaaaaggcctttatgtttttctcttcttggatcttgttttgctggagaaaagtttttttttcctcaatcgactgaattacctttctccaccttgtct

SEQ ID NO: 642708 - DNA, 542 bp, Homo sapiens
gggttggctggcggcaatgactgatattctagtagggtaagggaaagtgtgaatattaaacactgatttctcaagtcagcttaatgtgaagaaagcagtttcaacttgtcagtgacttagagaaatcctcttctagggaatatgaagggaaagaattgcagttcacacaatcccgtttaaagattctgttatgttttggaaaaaaagacttcaaagaaaacatgagacacaataaagagatgggwaataaaaatgatgacaagaccaatattgataagatataataaatttgtaattggctttgctgttttacagaagacccttcataaagcttatctgatcttcaatgtagccctatgcaataagtattgatattaattattttataaatagaaaaaatgaggttgagagattccttagaaaaatgttggtgtgggactcaaaaacatggatgcatgttcaaactcccatattaccccctacaaattatgtcctcttaagtcttaagtcgttctttaccaaatcatcttttcttcccatag

SEQ ID NO: 642709 - DNA, 507 bp, Homo sapiens
aaagtcaccaaaataaaacagtttattttcactggatccccttcacaaatagaaaagtccccattttggctcctcgttgttaatacagaggacacttagtttggaaacccttagcctagagaactgccaaattctgttttctgatgccagtgacacaaagccccagcagcccacaggacagaaggagctagcacatctccaagctgagggactccgtggctgcaggctgtgtgcaaatggacccagctcataagccagcctcatttttcacaaatgacaccatctttggatctgcacgcatctggccatagagtaactttcaaagagtgtttgtcaaaagyttattctctcaggagagttcccaggagaaaacccctattcctctcagcagtcaaatcaaaaggcccctctccctgaaaccccacacacaggcaccacagtgaggaggaatcacaaccgtaaaataaggggccagagtcccgcagaggcccctgtgcctctctcccg

SEQ ID NO: 642710 - DNA, 507 bp, Homo sapiens
aaagtcaccaaaataaaacagtttattttcactggatccccttcacaaatagaaaagtccccattttggctcctcgttgttaatacagaggacacttagtttggaaacccttagcctagagaactgccaaattctgttttctgatgccagtgacacaaagccccagcagcccacaggacagaaggagctagcacatctccaagctgagggactccgtggctgcaggctgtgtgcaaatggacccagctcataagccagcctcatttttcacaaatgacaccatctttggatctgcacgcatctggccatagagtaactttcaaagagtgtttgtcaaaagtttattctctcagragagttcccaggagaaaacccctattcctctcagcagtcaaatcaaaaggcccctctccctgaaaccccacacacaggcaccacagtgaggaggaatcacaaccgtaaaataaggggccagagtcccgcagaggcccctgtgcctctctcccg

SEQ ID NO: 642711 - DNA, 562 bp, Homo sapiens
atatggtgtgtgtttggtggaggaggttggggtgggggtaatttacagatgcaattaagttaaggatccatagatgggaagattattctggagtatctgagtgggtcctaaatgcaatgcaattaattcataacagagcaagaaagaagcaaatttgaacatatatagaagagaaagcaatgtgaatatgcatcagagagaaatttgaaaatgttggccttgaagaatgagataatgtatcaatccaaagaataccggaagccactggaagaaagaagagatgagaaatagattatcccctacgctcctgcggctctgccaatgtcttgatgtggggccagtgaagttgagtttggacttctgggctccagaactgtgagagaatacacttctggttgttttaagtcayccagtttgtggtaatttgttacagcaagcatgggaaactaacacagatcctacagaaaactaaaatgagaaagtcatcagtctccatcataaaaatttatgaatcaacctatagaagggtccagatgaatatccagctagctctaatacaggg

SEQ ID NO: 642712 - DNA, 621 bp, Homo sapiens
gctattggcatcagacggatgtgaattcaaatgaagcaagtccacgtgctcacagataagtttctgtacctttctgagtttaatgtaagcaataaagataagagcacctgcttcacccaattgttacgatgaactaatgtatgtcacatgcctacacagttctttaaacttaaccaagtacccaataacagaaagtaagcaagtaggaaaagtcaggattagaacccatgatttatcatctttcatttttccactaccaggctagaaaagttaggttccaatcagaatttaaattcttgaatggcatgtcaagggtttctaactttatgagttttaattcatagaataattataaaatacgagatactgtaacctagatctgtcttctaaacatcattatctagtggtagaaagatatgaacaatcatatgaacaagatatgaagtgagaagagagacagtgtggaatctggtgcaggagattctagtaatgagatgaggaagccctggttaactctgctataagaagcatattctacmcgctgtgcctttttgccctgagatgatgtttgaggaggcagaaaactagccaagcacaaatgattactcaacagcaggaaaa

SEQ ID NO: 642713 - DNA, 606 bp, Homo sapiens
gcctcctcctctcttcctcacactgcttttccaacatgatgtccctcctcactttcccttgttgagttagcttttagagggaatggtgtggtgcccacgtgctaaagtacacagcaccctgctccttaactttgtgttgctttgtgggtcatgttaagtgtgttttaacagattctgactctctggagagttgactaaaagcttagagagggtgaagatggtgagaggagctggcttatcacaagtgctatgtctgcctctttttgtagaggagatgaagtggagacagactcacataccaggattcctaattgtgttccctctccaggcaggggaaagaaggacacgtctgtccattccttactgctcttgagccaaagaacaaagagaatctggacaaagagcaattccacctcagtccttccacatcagtattaaacttgtaaaatgattgaagtctaagtctgaaataacwgcacaattagggcaccggagggtggggacacacacgattccagtagcttttcaggctctgctggctcagtgcatctctgaacagggtactgtaaaattggaatccaccactattttgattattccttatct

SEQ ID NO: 642714 - DNA, 606 bp, Homo sapiens
gcctcctcctctcttcctcacactgcttttccaacatgatgtccctcctcactttcccttgttgagttagcttttagagggaatggtgtggtgcccacgtgctaaagtacacagcaccctgctccttaactttgtgttgctttgtgggtcatgttaagtgtgttttaacagattctgactctctggagagttgactaaaagcttagagagggtgaagatggtgagaggagctggcttatcacaagtgctatgtctgcctctttttgtagaggagatgaagtggagacagactcacataccaggattcctaattgtgttccctctccaggcaggggaaagaaggacacgtctgtccattccttactgctcttgagccaaagaacaaagagaatctggacaaagagcaattccacctcagtccttccacatcagtattaaacttgtaaaatgattgaagtctaagtctgaaataacagcacaattagggcaccggagggtggggasacacacgattccagtagcttttcaggctctgctggctcagtgcatctctgaacagggtactgtaaaattggaatccaccactattttgattattccttatct

SEQ ID NO: 642715 - DNA, 571 bp, Homo sapiens
cactcctcttccatactcagctggaacatctttgaggcaggtttactgttactgacctcagggtaaattttttgcacctggggtggtaaattacttccaagtgaggcaaaaccagatggcctcaactttcctggagttgattagagtgactgtacctgcttcagaagtctaccaatcacacagcggagtttgatttaccatggtaactcctcagccagtggcttctgcatggttagtggaagatgttgaatctaccaattaaaactagcaaatgataccccctatctgatccacacacacacacgcactcacatcacttgttcctaagtgcccacacacagccagctgctgctgaacaaaagaaaatttttaaaaaaayctttaaaaaatggagctcctgcttggtgacatacagaataataaagcaggtttgtgacccttctggcacaatttcctgccacacaaatacagaagatgcttgaactgtataactgcctgaggtctcctgtgacattcatctccacttggcaaggatgcccaggaacataggagaagggcaattttcccactc

SEQ ID NO: 642716 - DNA, 573 bp, Homo sapiens
catggaccatcttaccatttgataataaaaataatcatactactactactaataataagtactactcatagcagccaakggttatggtgtgcttacttacattaggctctgcatcaagtgctttcaatatattgtatcatctaaacctcatactaatctcaggaggaaacattcaggcttaagtaaattaaactaatcacaaaaccctaggagagaacaccatcactcacattcagatctgactgaagccaacatcactgttattaactgggatgttagccacccccatatacgtaactgactggcttccatgtgaggaaacaaggcccctgagggctaaggcactaaataaattgaaaaaaatgaattccatggacagaccccagggccctgtgtcttacagatgttctattcactgtgaatgtttcataccagcgtgtatcatccctgcacccacctccctgccttcctttcttccttcttacaccaaccactttctgagtgtttctatgtgcctggttctctgtaggtgctgggatttcataaagacaggaagacagtcccggggagggg

SEQ ID NO: 642717 - DNA, 573 bp, Homo sapiens
catggaccatcttaccatttgataataaaaataatcatactactactactaataataagtactactcatagcagccaagggttatkgtgtgcttacttacattaggctctgcatcaagtgctttcaatatattgtatcatctaaacctcatactaatctcaggaggaaacattcaggcttaagtaaattaaactaatcacaaaaccctaggagagaacaccatcactcacattcagatctgactgaagccaacatcactgttattaactgggatgttagccacccccatatacgtaactgactggcttccatgtgaggaaacaaggcccctgagggctaaggcactaaataaattgaaaaaaatgaattccatggacagaccccagggccctgtgtcttacagatgttctattcactgtgaatgtttcataccagcgtgtatcatccctgcacccacctccctgccttcctttcttccttcttacaccaaccactttctgagtgtttctatgtgcctggttctctgtaggtgctgggatttcataaagacaggaagacagtcccggggagggg

SEQ ID NO: 642718 - DNA, 403 bp, Homo sapiens
cttggtatcccagggccttggagcagccctgtgtcctcatctgagcactcagccacttgcttgagctcctgctctgccttctagtctggggaaagataggttctcacaataaagctggagcttgcattgtgatcaccygggtcagaggagcttgaagactggaggctacagaaacggtctcattagggcattagcataagtggtacagaaggcaggtagggaggtctccagggaaggatttctcccttaattaagattcaactgcagtgaaatatcagcaaccttatacctcttgtatgtaccataaaaaagtgctaggattctcaaatatccttctctcctcccttttctgcctgcaaacagcatttgatagtgcaaccttcaggattacctcaggaataat

SEQ ID NO: 642719 - DNA, 526 bp, Homo sapiens
ccagtcatgaaaacaagctctgactcacatgccctaggagcaaatgaaattgggcaggagtctgaagagaagatggaatctcctccgtgctctaggaggtgcgttataaagccataggtcttgttaataagagggaccccaattcaatccaatgaccatttatttaggtgcatactaagtacaatgtatgttgggtgacacagaagacagacaaggaactgaccgtgccccccaaggatattagaatctgaaagggagatagggtagacaggtacttaagtaactgcagtgccatgtagaataataagggttataagtaatagcaaatgcaaagaagggagaggcaacaagaacaaattaaatattctcattcctttgtctttagaccagtaactttatttgagagctttgtttaactaattaattaattcaatcgctgtatgctaactggagaggttagaggactcacagaagtcactagctgcttagaggttagggrcacagtgcctaaggccccgccctgtac

SEQ ID NO: 642720 - DNA, 416 bp, Homo sapiens
gccttctcccatcagtcatttattttcataagtgcccagtgaattcatttctttggaaagaagggcaagaaaaggagatggatctgcacaatatgtacaattttctgcaaatgccgtcaccatcaggagtggctgggctttcactccgcataagctgaggccaagctgaagctcccgtgagcagaagcctgggaagcgggtagctggctgcrtgcagcccaggccagggacgatgaattggaatgtcctattatgataacacctgccctccctttacgatttaatacctcaactatttctcatctcatcaggtcaacaaataccactaaattccctgtacaggccccccaaaatgtactctttcctcaataagaggtttcctaaacacagacttttcttctgaagcagccaggcag

SEQ ID NO: 642721 - DNA, 598 bp, Homo sapiens
gaattctccgtgtggttgctggcctgtaagctccaagagggtagggggctgtgtctgaattttggttaattgctgcatccctagaaccctgaaaagtgtctagcacatagagtattctcatagctgttgacaaactggacagatacatgagtaatgaataggaacctgtgcattggacgggkacggtgccagctacagctgacccttccctcacagcatgcaacgttagcaatgaacttcttttttttctttttcttttttgagatggagttttgctcttgtcacccaggctggtgtggaatggcatgatctcagctcattgcaacctctgcctcctaggttcaagagattactctgcttcagcctcccaagtagcggggattaccggcgcctgctaccatgcccagctaatttttgtacctttagtagagatggggttgcactatattggccaggctagtctcaaactcctgaactcgggtgatccacccgccttggcctcataaagtgctgggattacaggtgtgagccactgtgcctggccagcaatgaacttctaagagaaatcagatcaagccctcaaacattaatttacagt

SEQ ID NO: 642722 - DNA, 511 bp, Homo sapiens
aattatgtgaataataaataccatcaaattgctggcccttgcaatattatattattaattgtgcaaactccccacacataaagcaggctgtctttttctggtccatgtcttgcaaatcagagtcctgaaaatttgtgccataggggaagagaaaatacatctgtgtgggggttgattggctccatcatttcatcattctgtcaggtgttctctcttgtgagtggccctctggctgaactaacattatgttcagcccacactcctaccgatcacataactggccccttgtgctggccctttccttgccrttaatgcaggcaaaagccagaacccattgctctatctgctaagatttcctctaactgcagataagggagtgtgaagagagccactgcctctcccttccaacccctgcttgcaggaatagcagctccttctgctcattaggaaagaccagctctatgccctgtcctcccttcctgcagactctccatctcaaccaacggcctgg

SEQ ID NO: 642723 - DNA, 511 bp, Homo sapiens
aattatgtgaataataaataccatcaaattgctggcccttgcaatattatattattaattgtgcaaactccccacacataaagcaggctgtctttttctggtccatgtcttgcaaatcagagtcctgaaaatttgtgccataggggaagagaaaatacatctgtgtgggggttgattggctccatcatttcatcattctgtcaggtgttctctcttgtgagtggccctctggctgaactaacattatgttcagcccacactcctaccgatcacataactggccccttgtgctggccctttccttgccattaatgcaggcaaaagccagaacccattgctctatctgctaagatttcctctaactgcagataagggagtgtgaagagagccactgcctctcccttccaacccctgcttgcaggaatagcagctcctkctgctcattaggaaagaccagctctatgccctgtcctcccttcctgcagactctccatctcaaccaacggcctgg

SEQ ID NO: 642724 - DNA, 581 bp, Homo sapiens
ctagcctgctgcatggttgcaaggactggggacggcttccccctactctcttttcctggtatatgagaaatacatgctcattgtagaaaaaaaaaaaaaaagaaaaactatagacaatccaaaagagcaaaatgaaaattatgccagccccctgacctccccacccagagataaatacatttaacatttcagtggatatcctacaccctttctagggttgtatattcatgagattcacatgcacatattttttctttttaattaaaatgggatcatattatacacsttgttctgtatcttgcttcttcacttaaaaatattttggaaactagtgcaagaggaggccaggggatttgtcttgaagttgtgtttgcgtagcaatcacccatttttatggagactgcatctttgaagaggggctaaatcagtgggaacatctttctatgtccataaatacacttccacaccatagcatttaatgtctacaagctatgcaactgtgaggttgtgctataatgtattaagccaatcctcaattgttggaatttgtattacttttatgtttttgctataacaacaat

SEQ ID NO: 642725 - DNA, 530 bp, Homo sapiens
cattaatttacagtcaagagacaatctctgaattcagccctccccrtcccccagcactggtattgacatactgcagaccttctattgttggtggcaaatatgagcaggttaaggcacttttcgggattagagaatcttcaaactcaatatgcataagaacaatttatcctgatgaccagatataatagattctgttcattaaggaaactgcttgccatttgctactatttaacccattctttctattgtgatcataagaagaagaaggccaaaggatcattaatttccttactttggaactttggggtccttaggatagcgctgtgtatatggcaggcactcattactattgttttgtagatgtggctggtgataataatgagaaggactgggggaaaacgaagtatgctctccaggctaaccgttggtggtttaggcagacggaactcctctcaggatttattcagattcagtgacagcacttcttgaactctgacaccactccacaattaatattgtccactgaacag

SEQ ID NO: 642726 - DNA, 530 bp, Homo sapiens
cattaatttacagtcaagagacaatctctgaattcagccctccccgtcccccagcactggtattgacatactgcagaccttctattgttggtggcaaatatgagcaggttaaggcacttttcgggattagagaatcttcaaactcaatatgcataagaacaatttatcctgatgaccagatataatagattctgttcattaaggaaactgcttgccatttgctactatttaacccattctttctattgtgatcataagaagaagaaggccaaaggatcattaatttccttactttggaactttggggyccttaggatagcgctgtgtatatggcaggcactcattactattgttttgtagatgtggctggtgataataatgagaaggactgggggaaaacgaagtatgctctccaggctaaccgttggtggtttaggcagacggaactcctctcaggatttattcagattcagtgacagcacttcttgaactctgacaccactccacaattaatattgtccactgaacag

SEQ ID NO: 642727 - DNA, 519 bp, Homo sapiens
tttaggctgcaggcaggaaaacagcacccatgcaggtgtctgcaagggagagtgaggcagcccagaggttagtaacagtaggcagccaatcccrggctagaggtacaaaggaaggaggtagtatttcctgaactcaggaatcaagaccacccagtgggaactgggaccacccagaagactcagctactctcttagaagtgatacggggcagagaaagagagatgcagtaccctacttctcccatcctctaccctctaaccccttgacagtgccttccgttggctgaacctacacggtagccagttggccaggaggtttgggaggtggagttcacagggaatagtggggaatggatctgagtgtgccaactggcaaatgaccaatataaaaaattcacaaaaagtctctggccctacttatttcacaggatatcagttagaatcaaatgaaatgatacatgtaaaagccctttgtaaattacagagagctatgcaaatgtacgctggtatattcacgttt

SEQ ID NO: 642728 - DNA, 519 bp, Homo sapiens
tttaggctgcaggcaggaaaacagcacccatgcaggtgtctgcaagggagagtgaggcagcccagaggttagtaacagtaggcagccaatcccaggctagaggtacaaaggaaggaggtagtatttcctgaactcaggaatcaagaccacccagtgggaactgggaccacccagaagactcagctactctcttagaagtgatacggggcagagaaagagagatgcagtaccctacttctcccatcctctaccctctaaccccttgacagtgccttccgttggctgaacctacacggtagccagttggccaggaggtttgggaggtggagttcacagggaatagtggggaatggatctgagtgtgccaactggcaaatgaccaatataaaaaattcacaaaaagtctctggccctacttatttcacaggatatcagttagaatcaaatgaaatgatacatgtaaaagccctytgtaaattacagagagctatgcaaatgtacgctggtatattcacgttt

SEQ ID NO: 642729 - DNA, 562 bp, Homo sapiens
tgcagcgaaccaccatggcacacgtatctatgtaacaaacctgcacatcctgcccatgtaccccagaacttaaaagttgagagaaaagaagaaagtaaaagaaataaaaaggtggattcctttaggtcaccttcttgcagttgtaccctaaatttagaggattcatcattgacatgcagaacacctaaacctgttgatccattcttttgggtgtaaagctttaaaaaaaagaaagtctcttacggtgttggcttatttaaaaacagatgacaaaagacacctggcttgcagttttgtctttattctccaggaccatgaggagcaattagcttttacaagttcatttccataacaacctttagcacacgatatttctggattgagttaaggatgggggcatcaagagatgacttggctctactcaagattccacgtggaaggaagggrcaagcctagtgaatgagtcacaccctgattctgttcttagctctcacttctcccactgtgtgacctgaggcacacaactgacttctctaaaccctcatcttatttctctgtaaca

SEQ ID NO: 642730 - DNA, 476 bp, Homo sapiens
catttccataacaacctttagcacacgatatttctggattgagttaaggatgggggcatcaagagatgacttggctctactcaagattccacgtggaaggaaggggcaagcctaktgaatgagtcacaccctgattctgttcttagctctcacttctcccactgtgtgacctgaggcacacaactgacttctctaaaccctcatcttatttctctgtaacacggggaaggatagccgctattttgtgaggttgtggaggggatgaatgggacaaattttgaaagcacacagtatctggcatgtagtagcatttcataaatgtgagctattataattttatttatttatttttttgaggcggagtctccctctgtcgcccaggctggagtgcagtggcgcgatctcggctcactgcaagctccgcctcccacgttcacgccattctcctgcctcagcctcccgagtagctgggacta

SEQ ID NO: 642731 - DNA, 476 bp, Homo sapiens
catttccataacaacctttagcacacgatatttctggattgagttaaggatgggggcatcaagagatgacttggctctactcaagattccacgtggaaggaaggggcaagcctagtgaatgagtcacacyctgattctgttcttagctctcacttctcccactgtgtgacctgaggcacacaactgacttctctaaaccctcatcttatttctctgtaacacggggaaggatagccgctattttgtgaggttgtggaggggatgaatgggacaaattttgaaagcacacagtatctggcatgtagtagcatttcataaatgtgagctattataattttatttatttatttttttgaggcggagtctccctctgtcgcccaggctggagtgcagtggcgcgatctcggctcactgcaagctccgcctcccacgttcacgccattctcctgcctcagcctcccgagtagctgggacta

SEQ ID NO: 642732 - DNA, 583 bp, Homo sapiens
gtcagcatattacaggcaaacaatcgaggccattgtgtgaaggtctttgctgtggtggaagtgtgttatctccctgaaacatccaggcgggttcctctgctgtcactgtacaatttgcatgcttcggtaatgttttatgtattacgctacttatacgctaaaatgtacatgcacgctcctgcaaatttaggtaaattatgaataaattaaatcttatctaaataaacaagtgtctttttgaaccaaaatgcaagctgtcatgaatatttaagtggacaaggatraatcctcttcctgctgcacttcgtacagagtgcattctatactcttgattgcaggaaggaaagtgtacacagctagagaaacataatcgacttctcactagggacatgaacgttgagaaatctggcctggcagagcgatacattaaaaaataagattcattatggaaattaagttatatgggtgtctcctgaccctggtaatctctgccttttcacactatattggagatgcagagtttgagcacagagttattattttgatctttcttttagtggaaagaggcatctcatgcatattt

SEQ ID NO: 642733 - DNA, 635 bp, Homo sapiens
aagtctaaatctctcagggttctgtaatgtaaatcctcttctatctactctgttctcagtggagagggctgacacctggccccttccttctcaccataagcatatatccactgcaagaccatgaccatattggggttcatcctcttctttttcagactaagtcccccaatatccttcatccaccttcacttgggacctcatcctaggaacacagtgctcatgtgggacagatggtcttgyctttgcagagcttcagggtcagacctggcttggcctacacgtgttggtttataaaatgaaactgaagacctcattcccactgcaggtgatatggaggtgatggagcaacaattaggggctgtaatgggccagttaatgttattggtaatgaggacacatttactcacagaaagtggactgccacctgccaaatggccaatgtccctttgagccctgtcatagacagaacactgggccgaccatgagtttgactcaatatcatatcctttcagtcagactgagagctggcctctccatcggagagaatatgggtcaagttcagaaggaccaagcatcacagatttttttttttctttctgtaaatgcagggcctttacttggtgctgtgaggaact

SEQ ID NO: 642734 - DNA, 635 bp, Homo sapiens
aagtctaaatctctcagggttctgtaatgtaaatcctcttctatctactctgttctcagtggagagggctgacacctggccccttccttctcaccataagcatatatccactgcaagaccatgaccatattggggttcatcctcttctttttcagactaagtcccccaatatccttcatccaccttcacttgggacctcatcctaggaacacagtgctcatgtgggacagatggtcttgtctttgyagagcttcagggtcagacctggcttggcctacacgtgttggtttataaaatgaaactgaagacctcattcccactgcaggtgatatggaggtgatggagcaacaattaggggctgtaatgggccagttaatgttattggtaatgaggacacatttactcacagaaagtggactgccacctgccaaatggccaatgtccctttgagccctgtcatagacagaacactgggccgaccatgagtttgactcaatatcatatcctttcagtcagactgagagctggcctctccatcggagagaatatgggtcaagttcagaaggaccaagcatcacagatttttttttttctttctgtaaatgcagggcctttacttggtgctgtgaggaact

SEQ ID NO: 642735 - DNA, 522 bp, Homo sapiens
atccttgctcagggtctgcctctggggattgatctgagactggtatttccttcatggtcatatgtcttaaagcagaagcagcatttccaggacttgaacttaggtcttccagacctcagagtcaaccgtttttctatcacagacccttccttgcctgattccaaaggaatcagccaatgcgtgtgggagaaaagtcttcaggctgtgkgggtggggtgggtgaggctgggccctctagctgcctgggatgtgaatggaaggaggactgcaggtggctgtgtgcagtgggaagctcatgaaggatgagaaacctaccgctatcctctgtatacacacaccttggggaaattcactgtgtcgtgcctcagccttgccccagacagccacagggctcagggcacaagctgcagatgaaagaagtaatgggcttaccactttaacatgctggcacccagccaggtccccacttaccgtgtgaactgcctcgccaaatgtgccaggagcctcctgtacgaaggccag

SEQ ID NO: 642736 - DNA, 608 bp, Homo sapiens
tttccaggacttgaacttaggtcttccagacctcagagtcaaccgtttttctatcacagacccttccttgcctgattccaaaggaatcagccaatgcgtgtgggagaaaagtcttcaggctgtgggggtggggtgggtgaggctgggccctctagctgcctgggatgtgaatggaaggaggactgcaggtggctgtgtgcagtgggaagctcatgaaggatgagaaacctaccgctatcctctgtatacacacaccttggggaaattcactgtgtcgtgcctcagccttgccccagacagccacagggctcagggcacaagctgcagatgaaagaagtaatgggcttaccactttaacatgctggcacccagccaggtccccacttaccgtgygaactgcctcgccaaatgtgccaggagcctcctgtacgaaggccagagaaatgtgactgtgggctcatgctgggaagcaatttggtccatttcaaccatcatgtcatggcagcagaatacacaaatatagactagacttgtccaggggagcttttctctcattaaccttgaaggatgacgcacatcccgttgacggctgctctggagcctgtgac

SEQ ID NO: 642737 - DNA, 445 bp, Homo sapiens
cagatgaaattgaggttgctaatcagctgaaattgagatgaggagagtatcctgggccatctcggtggcccaatgtaatcacaggagtccttataagtggaggagagggacagcagagttcaggtcagaatgacgcagggtgcaaaagatcccaccagccctagttggtttggaagatggagttaggggacatatgccaaggaatccaggcagcctctggaaggtggaaaaggcatggaagcaaattctccctagagtttccagaaggaacacagccctgcagacacmttgatttaattccagtgaaatgcattttggacttccgacctccagaactgtgaagatagttaattagtgttgttgtgagtcaccccatttgtggtgagttgttacagcaacaatgggaagcaaatgcagagttaatgagagaatgacatattacaat

SEQ ID NO: 642738 - DNA, 556 bp, Homo sapiens
gaagcgcttgggcataaaatgcctcttgaaattatgcttcatgtctgtgcacttgamctaggacaggaattttaaactttgacagcctggtgacgctatgacccccttctcagaataatgttttaaaatatgaatataaaacaaaatacctaggattacaaaagccagttattacattgaaatacaattataaaaatattaaaaaacaaatttgtggtatggtaatgtgccttcttctttattaatacagtgaataatgagatctagcaaaggtttaataatgactgtaatttcaagtagtgatgagcataaataacattttgagatttctgcaaaaacattaacatgatctgaatatacctgagattttaaatggtgataaaaatcacaggctactgctgttaccactgggtttgttgtctatacttacaaggaaagggaatactacattcctgttagaagttactgaaaataaaatgcgatctttttccaccatccaggttcattggtccctttgattcccttgggtcaagcactttatgtatttttacacatt

SEQ ID NO: 642739 - DNA, 556 bp, Homo sapiens
gaagcgcttgggcataaaatgcctcttgaaattatgcttcatgtctgtgcacttgacctaggacaggaattttaaactttgacagcctggtgacgctatgacccccttctcagaataatgttttaaaatatgaatataaaacaaaatacctaggattacaaaagccagttattacattgaaatacaattataaaaatattaaaaaacaaatttgtggtatggtaatgtgccttcttctttattaatacartgaataatgagatctagcaaaggtttaataatgactgtaatttcaagtagtgatgagcataaataacattttgagatttctgcaaaaacattaacatgatctgaatatacctgagattttaaatggtgataaaaatcacaggctactgctgttaccactgggtttgttgtctatacttacaaggaaagggaatactacattcctgttagaagttactgaaaataaaatgcgatctttttccaccatccaggttcattggtccctttgattcccttgggtcaagcactttatgtatttttacacatt

SEQ ID NO: 642740 - DNA, 556 bp, Homo sapiens
gaagcgcttgggcataaaatgcctcttgaaattatgcttcatgtctgtgcacttgacctaggacaggaattttaaactttgacagcctggtgacgctatgacccccttctcagaataatgttttaaaatatgaatataaaacaaaatacctaggattacaaaagccagttattacattgaaatacaattataaaaatattaaaaaacaaatttgtggtatggtaatgtgccttcttctttattaatacagtgaataatgagatctagcaaaggtttaataatgactgtaatttcaagtagtgatgagcataaataacattttgagatttctgcaaaaacattaacatgatctgaatatacctgagatttkaaatggtgataaaaatcacaggctactgctgttaccactgggtttgttgtctatacttacaaggaaagggaatactacattcctgttagaagttactgaaaataaaatgcgatctttttccaccatccaggttcattggtccctttgattcccttgggtcaagcactttatgtatttttacacatt

SEQ ID NO: 642741 - DNA, 434 bp, Homo sapiens
gtgataaaaatcacaggctactgctgttaccactgggtttgttgtctatacttacaaggaaagggaatactacattcctgttagaagttactgaaaataaaatgcgatctttttccaccatccaggttcattggtccctttgattcccttgggtcaagcactttatgtatttttacacatttaatccccacagcaacccartgaggtaggtacttccactatcctcgtttcacagataaaaaaactggggcacagagggattaagtaacttgcccaaggtcacacaaggccgccgagttgatacgttaatcaggttgtccttttctctccaaggggggattctgcaaccctcttgaggaataatcatatcaaggagaatcttccttttggatttttcccagttgggttcagccttttctagtcactccccttcc

SEQ ID NO: 642742 - DNA, 434 bp, Homo sapiens
gtgataaaaatcacaggctactgctgttaccactgggtttgttgtctatacttacaaggaaagggaatactacattcctgttagaagttactgaaaataaaatgcgatctttttccaccatccaggttcattggtccctttgattcccttgggtcaagcactttatgtatttttacacatttaatccccacagcaacccagtgaggtaggtacttccactatcctcgtttcacagataaaaaaactggggcacagagggattaagtaacttgcccaaggtcacacaaggccgccgagttgatacrttaatcaggttgtccttttctctccaaggggggattctgcaaccctcttgaggaataatcatatcaaggagaatcttccttttggatttttcccagttgggttcagccttttctagtcactccccttcc

SEQ ID NO: 642743 - DNA, 475 bp, Homo sapiens
agtgagatgggaaaccaggagaagccagcaggagagacagtattgaggccactgstgtgattcctctggacctctgaagaggtctacagaatgcctcccaaatttgtccctgaaggacaggaggctggagagcttgtctgcctgcaagtgttccctgagcagtaacttctggatacctggggaatatttgcatgaaggctgaggggacatccatggtgctggcgaaggctccaaggtgggaaggagcaagatggaaacaggaggaggagagcctgagctcctgcggagtgtccatcccagttcaggctaaaaatcagtggtggatcaacaggatctgtcacgggtgctaatggcaaagccaagagggtttttctgcatctcataaaaggtaaagggtaaaagttacaagacaaggaaatagatgtgaaaaagaatcaatttgcgggtacaccattcatgaatcaataacttttgc

SEQ ID NO: 642744 - DNA, 475 bp, Homo sapiens
agtgagatgggaaaccaggagaagccagcaggagagacagtattgaggccactgctgtgattcctctggacctctgaagaggtctacagaatgcctcccaaatttgtccctgaaggacaggaggctggagagcttgtctgcctgcaagtgttccctgagcagtaacttctggatacctggggaatatttgcatgaaggctgaggggacatccatggtgctggcgaaggctccaaggtgggaaggagcaagatggaaacaggaggaggagagcctgagctcctgyggagtgtccatcccagttcaggctaaaaatcagtggtggatcaacaggatctgtcacgggtgctaatggcaaagccaagagggtttttctgcatctcataaaaggtaaagggtaaaagttacaagacaaggaaatagatgtgaaaaagaatcaatttgcgggtacaccattcatgaatcaataacttttgc

SEQ ID NO: 642745 - DNA, 475 bp, Homo sapiens
agtgagatgggaaaccaggagaagccagcaggagagacagtattgaggccactgctgtgattcctctggacctctgaagaggtctacagaatgcctcccaaatttgtccctgaaggacaggaggctggagagcttgtctgcctgcaagtgttccctgagcagtaacttctggatacctggggaatatttgcatgaaggctgaggggacatccatggtgctggcgaaggctccaaggtgggaaggagcaagatggaaacaggaggaggagagcctgagctcctgcggagtgtccatcccagttcaggctaaaaatcagtggtggatcaacaggatctgtcacgggtgctaatggcaaagccaagagggtttttctgcatctcataaaaggtaaagggtaaaagttacaagacaaggaaatagatgtgaaaaagaatcaatttgcgggtacascattcatgaatcaataacttttgc

SEQ ID NO: 642746 - DNA, 474 bp, Homo sapiens
atcctcctgcttcataagtatgaacagcatcattaccaagtggcgcccacagaatggaacacaaaggcaacttggaaattttaatgaaaacagatgttgagaaatgccattatcccatgcacgctacaataaatagcattaacatttctaagtgacaggcctctgaattggactgcaaggagctcacatttacaattaaatgagggacttatccttttgcatccctggattctacaggtggctcggtgacagtcatctcttagtgtttcgattttagagcggctgttaagagccagctaagcagggattggacaggcaggcacttaggaaggtgttcgtgccagaygcattcattgtctaactgcctggatgcaaaactaacttagcatagcagctgaatgtgaaagctcttgaaatgatttcttctcaaatagtgcactccctgtgccaaggaggggtatcattgtttatgtc

SEQ ID NO: 642747 - DNA, 604 bp, Homo sapiens
agagacctattcattctgatggttcagttggcataactcacacaaagatgccacaggaaaactactcaatctgatacctttaaggttcctccctgatataaatcctgactccaatgaagccttgataaacagcctttgtgcccttaccaggattctaaagtatatgataagggtctgagccaagccaatatacggaagatgaacagagtgcctgaacttaaactaaacagttcaaaacatctttactgtattgacaatctggttaaaggtgcctacctgggactcctagaggataaagttctttttctttatcttatttaccaaatgaaacaatgtggtagcaagaaagccaactttytgttgtgcatatgacttgtggagagaagagaaaatgttgagaattttttccttaactcctcattgcagaatgagtcaataaaagagttatcatctcctagtgcacaaggtggacgttatccagggggatgaagcatgcaagtgttgcatggtgagatttgacatagggctgcatcctccaggaagctttccctgaacctggtggtcatggaagcctcacagatgttcgcatgacatcctgtgcctg

SEQ ID NO: 642748 - DNA, 617 bp, Homo sapiens
ttttctcctctgccctggggaaggcacagctcatgtaaatgcagcgtttgggtgcagagcgtgcaggccaaacccacgctcagccccaccgtttgcatactgcacgctcaagctgctccaggcctgggtgaaggcatgcacactgtcctgggtccaggtagcccagagcgtggatgaccaaagcaaaattccattaaagtcaaaccagatctcacccatagctctttgtttgtttatctgagaacaaagtcaaaggccaaggaggccccactctcctgccacgggggaaccagtgtgcaagctctaggcacctactagagggtacagaggtggcctccacagtggactcggagttytttcccccttcttcggcaatgaggggtttcttcctagggcctattttcctgcagggttagagttaggttttagagcccttttccttaaccctcttctctacttcctatcccaattcatttatttaaaaaaaaaaaaaaaaaaagctttactctctacttatttatgttgacatgaagattaaatacaagctcctacatgcaagtatccaacagagtggcagccacaaagaggtatttctcctccctcctttccttcagccc

SEQ ID NO: 642749 - DNA, 566 bp, Homo sapiens
tcactggggagattgttggccaagcaggtttctggccaaattatgaagatccagatgcagtaggtatggtgctggcattaggggcaaaggctcaaaaccaaggaatcagaggaagaaactcctcagggcaggaggaagcagaaggcaccacgatggcacccccagaggctgcagtgacttccctgctggcctgtggcctctccagagctttcaaggctgaggcagttagggggtgggcatgagtaccaggagagggatgctttttgacaaacatgagttagcaacttgtcacttgcctttgctctttcctgcccacgttgattctgctcatctgcccttcccactctgtgagccacattgactgactccggaggtgaaacacacatgtcacacacatgccatttcaggtcatcagaatagcagagttgtcaaaagctgttagaagccaagcggctgaagcatcctcctcccaaacgtctccctcaaattataagccatccccrcaccacgtggtgccgctgagcctggcattccacctgcatgcctgtcacttgctgttctctgtc

SEQ ID NO: 642750 - DNA, 542 bp, Homo sapiens
agtggcaggctcatggctcaggggacttcataagaaagtgtgagacgtccatgctgtttagaggaaggtggaaaggccacacagggatgaacacaactgagctgggccctgaaaatgaggaacagagatcaccaggcacagaattggagaagtggcattggaagtagaggaaaccgtgtgtacaaaagcagcaaggtatgagaggtgcattggagaggtgcctagtcgcatgaggactgggtgtcaacaaaggattggtgttaggaaactcttaccttccaaagaaaaaaatatatattctctcaatcatatatatgtattatacataaaaataaatatttattattgtacatgtataaataaatcccactgttagtagtgttaataaaatacacaaattatagtatttggctactgtagaatcagattgagattagctggaggaaatggcctcttaatgaaaagagggctcccaccccagaatgattgatctaactttccccacactcttccctcrggcaattgctggctgtcacctgtgc

SEQ ID NO: 642751 - DNA, 563 bp, Homo sapiens
gaacaaccaggagaccagactttatttatttgtttgtttgtttatttatttatttatttatttatgacagtctcactctgtcacccaagctggagtgcaatgytgtgacctcagctcactgcaacctctgcctccagggttccgtgattctcatgcctcaacatgcaactggtggtagccagttgcacaccaccatccccagctaacttttgtatttttagtagagatagggtttcaccatgttggccaggctagtcttcaactcctgacctcaggtgatctgcccccctcggcctcccaaagtgttgggattacaggcttgagccacctcacccagcccaaactatatttaattataggaaattcacaactagatatcagaaaatgagattgaaagcggggagcagcttcctagggagacttcttcccaagagagttcataggaatgaagataaaaccaagacaaactagtgcagctcataactcttctctagcccccaggggctgagtggggcccactggtctacttcataagatctggtgatatacacaaactacaccat

SEQ ID NO: 642752 - DNA, 563 bp, Homo sapiens
gaacaaccaggagaccagactttatttatttgtttgtttgtttatttatttatttatttatttatgacagtctcactctgtcacccaagctggagtgcaatgttgtgacctcagctcactgcaacctctgcctccagggttccgtgattctcatgcctcaacatgcaactggtggtagccagttgcacaccaccatccccagctaacttttgtatttttagtagagatagggtttcaccatgttggccaggctagtcttcaactcctgacctcaggtgatctgccccyctcggcctcccaaagtgttgggattacaggcttgagccacctcacccagcccaaactatatttaattataggaaattcacaactagatatcagaaaatgagattgaaagcggggagcagcttcctagggagacttcttcccaagagagttcataggaatgaagataaaaccaagacaaactagtgcagctcataactcttctctagcccccaggggctgagtggggcccactggtctacttcataagatctggtgatatacacaaactacaccat

SEQ ID NO: 642753 - DNA, 582 bp, Homo sapiens
ttccaagaggtctcattccattttgtaagggttaaaaaaataacagtatgccacacttcatatcggtcaaagctttttctgctacggaagcagttttgagggagaaattgtcatctagcgccacagctatgcaaatgcgatagttatttttgacactggtaaataatagttctgtatgcactgacactgtttccttaccttatcatgcaaggtctccagtcataatttagatgttcgtaagtgattagcattttggggcaatggcaagcaatttgtgcggtgtttcccatctatcttctaccttgaaaaggtgattagcactttggtggggagaggggagggaatgtctcacaaattgcttctttgatcaaggcaaatcaagatgtctgatgagatgactggctgacataggtatacaagccataccctgggctgtcccatgctcmgattggaattaacgagggctgcctttatcagaaattcatttgacttctcttcaaatggttggcaaataactacccctcaaaatagtactactacaaattacttgatgcagaacaaaaatagaatgaaaaatacaca

SEQ ID NO: 642754 - DNA, 543 bp, Homo sapiens
tgactttcctgggcccttgaaatacctttcccacattgcttaggaaatkcccaaagattttctttttctcccagaggtctgagctgaggccagtggtgtcagccatagcaaatttgtattatgaaacctctgcacttctgaattgttggggctggctttttcttttcttctcttttctttttttttttattttctttttccaattccctttgtaatcatctcaaagccaagtgctcatttccaccagaactttaaacattgtgcctttatgtagcacagcttttaattttcctccctaacagaagtgattgtttatgttgtaaatgccacattagtctccatgaaatggagatggaattgattttcatttcagagatttcacagcttgccccagaactttatgcttgattgccaatgctcagaaatgcatgggcttctgagaggttcagaaatgatgtgtgtaacatggcatataaaaatgtgagaattggagccgcatttgttggaagacagacccctgagtcttggtggatatgtctggcc

SEQ ID NO: 642755 - DNA, 658 bp, Homo sapiens
gaattgattttcatttcagagatttcacagcttgccccagaactttatgcttgattgccaatgctcagaaatgcatgggcttctgagaggttcagaaatgatgtgtgtaacatggcatataaaaatgtgagaattggagccgcatttgttggaagacagacccctgagtcttggtggatatgtctggccaggcactcaaagaaaccartgtcttgagtgcaggtggtgccttcgagaaatggacttctgtcccaagtcagcttacccacaataccaccaattttccccaccagtgaatttggcagggacgcagggatatactgcaaacgtaattcagagtatacactgctcaaagcaaaggaaggagaaagctgtgctggcacattgggagtggaggtggaatggagagcagatgtctgcttgacccaaaagaaaggctttacttctcccctgtctccctgctgacttcagagctgcatgcctcctccttggggaacctgttgcatgtaactactgaagccaagatgagcagatggctccactctcttccagggatgtgagatagcgccactggcattccaggggcctagaccaacaatacatctgtcctggtcctggtcaactgttggcctgatcatccagaagacatgccttctaa

SEQ ID NO: 642756 - DNA, 658 bp, Homo sapiens
gaattgattttcatttcagagatttcacagcttgccccagaactttatgcttgattgccaatgctcagaaatgcatgggcttctgagaggttcagaaatgatgtgtgtaacatggcatataaaaatgtgagaattggagccgcatttgttggaagacagacccctgagtcttggtggatatgtctggccaggcactcaaagaaaccagtgtcttgagtgcaggtggtgccttcgagaaatggacttctgtcccaagtcagcttacccacaataccaccaattttccccaccagtgaatttggcagggacrcagggatatactgcaaacgtaattcagagtatacactgctcaaagcaaaggaaggagaaagctgtgctggcacattgggagtggaggtggaatggagagcagatgtctgcttgacccaaaagaaaggctttacttctcccctgtctccctgctgacttcagagctgcatgcctcctccttggggaacctgttgcatgtaactactgaagccaagatgagcagatggctccactctcttccagggatgtgagatagcgccactggcattccaggggcctagaccaacaatacatctgtcctggtcctggtcaactgttggcctgatcatccagaagacatgccttctaa

SEQ ID NO: 642757 - DNA, 658 bp, Homo sapiens
gaattgattttcatttcagagatttcacagcttgccccagaactttatgcttgattgccaatgctcagaaatgcatgggcttctgagaggttcagaaatgatgtgtgtaacatggcatataaaaatgtgagaattggagccgcatttgttggaagacagacccctgagtcttggtggatatgtctggccaggcactcaaagaaaccagtgtcttgagtgcaggtggtgccttcgagaaatggacttctgtcccaagtcagcttacccacaataccaccaattttccccaccagtgaatttggcagggacgcagggatatactgcaaacgtaattcagagtatacactgctcaaagcaaaggaaggagaaagctgtgctggcacattgggagtggaggtggaatggagagcagatgtcwgcttgacccaaaagaaaggctttacttctcccctgtctccctgctgacttcagagctgcatgcctcctccttggggaacctgttgcatgtaactactgaagccaagatgagcagatggctccactctcttccagggatgtgagatagcgccactggcattccaggggcctagaccaacaatacatctgtcctggtcctggtcaactgttggcctgatcatccagaagacatgccttctaa

SEQ ID NO: 642758 - DNA, 604 bp, Homo sapiens
gcctagaccaacaatacatctgtcctggtcctggtcaactgttggcctgatcatccagaagacatgccttctaagggacctgccatactggcatgggccttgtactgaagccctcctggaagcccctttctctgcaagaattcctccaacaccagaggttttagaatacagatgacattcaatacaacacaatgaagacattcattattattctatttaccatttgttaaatttgacagcccaytttgaagggtgagaagaacaacatctcagcacatacaattctcacggcagtgttgggggtggagtcgtctgctggaagacatcatgggaatcttattttgaatgattatcatcattgttaattcgaacatttctacttaattatgtctggcttcatcgagttataaatatgtatatattaatgttaacaatatgagctttattggccaaatacataatcggtgattaaaacagaaatcttccaatatgtctaaagctgccactctcaatggatcataaagtataaaagagctcccattccattgctagtcaattaatgatacctgttcttatatcaagataacacctagatgtgattgaa

SEQ ID NO: 642759 - DNA, 604 bp, Homo sapiens
gcctagaccaacaatacatctgtcctggtcctggtcaactgttggcctgatcatccagaagacatgccttctaagggacctgccatactggcatgggccttgtactgaagccctcctggaagcccctttctctgcaagaattcctccaacaccagaggttttagaatacagatgacattcaatacaacacaatgaagacattcattattattctatttaccatttgttaaatttgacagcccattttgaagggtgagaagaacaacatctcagcacatacaattctcacggcagtgttgggggtggagtcgtctgctggaagacatcatgggaatcttattttgaatgattatcatcattgttaattygaacatttctacttaattatgtctggcttcatcgagttataaatatgtatatattaatgttaacaatatgagctttattggccaaatacataatcggtgattaaaacagaaatcttccaatatgtctaaagctgccactctcaatggatcataaagtataaaagagctcccattccattgctagtcaattaatgatacctgttcttatatcaagataacacctagatgtgattgaa

SEQ ID NO: 642760 - DNA, 447 bp, Homo sapiens
tgggggtggagtcgtctgctggaagacatcatgggaatcttattttgaatgattatcatcattgttaattcgaacatttctacttaattatgtctggcttcatcgagttataaatatgtatatattaatgttaacaatatgagctttattggccaaatacataatcggtgattaaaacagaaatcttccaatatgtctaaagcygccactctcaatggatcataaagtataaaagagctcccattccattgctagtcaattaatgatacctgttcttatatcaagataacacctagatgtgattgaaattacgagtgagtttccaaaattaggtgctgggtgctcagctcagtcttctctctctctctctctctctgttttttctctctccctctctccctctctctctctctctctctctctctctctctgcctgaatggcagatg

SEQ ID NO: 642761 - DNA, 593 bp, Homo sapiens
gattggagaggaagccatggagcccctctgaggcagctccagatgctctgtctgctctgagccaggttgctttgagtggtgaggcctcctctggtgtaaggagcgggcaaacaaacatctaccaagatttcatgccctggggaacttttagcctatttgtttctcctgtctttcctagagcaggatttattggacgagtgctggtcctcgagttcattcaccccatatccctaaatggtgacttgaggaaggtagaatatttgtggagggcttatgtctccatcatgatctttgtacccatgggtcacataaaaccccaaggtttctcagctaaaacaaagcaatattatcacaagagattctggaagagctcagaaaactgggttcatggcagcctgctaccacttccttcaacaaagggcacatgttttatacaaagaagagggcttttctccatcaacatttccgtgcctccaacaccacctttccagctccatttcctcctgaaattcccaaggaaacatgcaaaacsaattgtttttttccatgctcttcactttgggaaagttctcgctcaagggtacagctgggaa

SEQ ID NO: 642762 - DNA, 579 bp, Homo sapiens
ccatagacaactattggtttaagagaataatgggagctacaatgcttcaagaaacccccccaaccaacccacgctgagcctgggaaatcctttcaatacattagcttaccccgtcttcataactcagggacaggtatcatcattgttcctattttgcaaagaaaaagctgacacacaaggagatgaagcaactcagttgaagtcacacaccaaggcagagctggaatttgaagccagttctttcttactctaaactctacattctaagcttggcatggtggctcatgcctgtaatcccagcactttgggaggtcaagatgggaggatcgcttgaggccaggagtttgagatcagcctggtcaacatagcaaaaccccatctctaaaaatataaaaataaacaagaaataaactccacacttttatgataatattctactaccttggctaacagagaaatacmaattttggggtatggactatcttttttccctatttagcctctttcatttgactctttttctcctctatggttttcccttcccatattcagatagacaccaggatctagcaatagttc

SEQ ID NO: 642763 - DNA, 281 bp, Homo sapiens
tcaattctctggtaaattccacagcattgacataagataaaatacatttggtccaaatcatttaaattgattttcctgtccaaatcacatgtgtacacatccatatggataaattagacaagatcatattaagataataaacttaattggatttataaaaatctataaatgtgtttagcaccttagggagaggtgccctgcaaatcaawgccatccctaaagtgataactatcatgtgttttattagtactcatgaaaatggaaagaatatatgagcatca

SEQ ID NO: 642764 - DNA, 590 bp, Homo sapiens
cacccacacgtaggagcatcaaacatatttacaaccagagtgccatagttgagaacatcctcatgccaccttcaaggaacagaaatgtgttcaatggggtggctacggagaaggaagtaccatagtagaagtcccgaactgagaaataaaggccccaagttctggccccaggtttgacaaagtggctttgggcaggtggcttcactgctctgtgactcagtagcaatgattgtgtattctgtgcctactatgtgcaaggcacttatttattccatccattattttcaatatccacaaaaagcccccatttaagtagcacagcctgcattttacagatgaggaaactaaactgaagttcagtaaagtcaggaaacttcatccagaaccactcatttctagtaaacagatgagcagacctgaaaacccagaatgagtgrcatcaaaacgcgcactggtttctctacacagccctgattcggtctccacacgtagaaaatgaggttagacaacaatctctagggtcttccgtggccttgagagttgataaatctcattctggacttcctagcttcagcaggcagcctgaacat

SEQ ID NO: 642765 - DNA, 576 bp, Homo sapiens
taaagtcaggaaacttcatccagaaccactcatttctagtaaacagatgagcagacctgaaaacccagaatgagtggcatcaaaacgcgcactggtttctctacacagccctgattcggtctccacacgtagaaaatgaggttagacaacaatctctagggtcttccgtggccttgagagttgataaatctcattctggacttcctagcttcagcaggcagcctgaacatgttgagggtccggttatgaaaatgatcacagcagtcactttcaccttcctcacctccaccccttaatatttgtctcctttcccctgtaaagactgggtggacttttktattttcttctcggaagatgaatggctgactttttttttttaagagggactttttgctggggtggggagaacgaattgaaacagaagactttggtaaagaagtcacttgaaaaatgatcctatttcctttagagatgctcttgtaatataattatgagccatctgttaacctcctctccccttgcacgatctttctggttctcagcagatgatgtccccaggagcaaaccggcgaggat

SEQ ID NO: 642766 - DNA, 550 bp, Homo sapiens
cgggtatatatgatacaaacggtacaaatgaagaaactggctttcagagagaccaagtaacttgctcaaggccacacagctagaaattagcaggatggaaactccaatccagactgttctggctccaaagccaaacccttccwcccgttccgtgctattgttggagatgtgaattccactgatgtgaatttctagccttctgcatatgacttgcccacagagcattaggtgatacttatagtattaattcgactgccttttggcatggttatggggcttctctgcaaattgcttcatcctcctctgcataacacccttgtgtaggaggctgggtagacattactaaattactttcactttacagatggagacactgaggccctgagacatgaagggatctgggtaaagcaaaacagctcttgagtagtatttgctctgtcagtcagtgtgccaggtgcaggtagcgtcatgtgccctacctgggtcttaaggaatgatgagatccaggcagctggtgctgacagtggcctgttcatactcttcctgaagg

SEQ ID NO: 642767 - DNA, 637 bp, Homo sapiens
cttgactgtggctccaagggggaggtgctagtagaggggctctagtagggtgtcttgatggggcacaggggatggggctagggacagggagcacaaaaatggcctgaaagayaaatttgtatttttgcattgctgggctaaaatatatcctttccttgttgggagcagagagggtaatccttgttagatttacattaaaatgaggtcgtgcttcttggaaaaagccactcactgagaaagaagatatccattgttccatgagagtcccccatggtagagtgagtgacaaggttcttggaaatatcatcagatagtgcttactttggggctgagtgagaataggaaagtggcagaacagggaaaaggttccaccacaaggagctcattcctgcagacccggaatggaaaaccatctcctggcattacataacacaggccaactctctcttcttaacaacaggaagaggcaattcaggtcaaagacagactctcctttcctatgcagagggctcttgtcactttgttaatttctttgtttgtgcttcaccttctgttctccatttccacttttcccactcccttggagcacagatccaagttttaatccagatgcccataatgctgctcacccatcacc

SEQ ID NO: 642768 - DNA, 541 bp, Homo sapiens
aagaaatcagcagacagtggactttagaaccaggcaggcaaacacagcttcagggtgaggttaggcagctagaacgttattgatcaacaactttgccacatcactggcacattcgttgctgggcaacgtggctcctctctgaagaggcaagaaaaagattctgaagatgatggatctgcattaagcaaaacccaataaccaggcactttcaggtcaaaaacttggtttgctgtggtttggagtttctaggtcagctgcccaggggctgtcccctgctcagcttatctgagatgaggccrtcagtgaggacctcctcagagagaagagacaggaaaaccaatttaagattcccttagacagggcagatggagatatgggcttgttttctgcccaatgttagtattgtatcttatcttacagctaggttgaaattagagtagttggcaaacaaacaaacaaacaaacaaaaaaaacagcacaaagagatgacttggggatgggaggtgggtgctgctaaacaggggcaagtcatttactgcca

SEQ ID NO: 642769 - DNA, 495 bp, Homo sapiens
gccaccatggatagtgttaagtctattatgatttgttgttattgagatgaggtgagagatggggtggtgagaaaacagttctacctcactccttgctgtaaattttaataaagatggggaattaaattcagcacacgctcatgcctgcagtggttttttttttctttttctttttttgtgagacggagtctcgctctgtcactcagactgcattctcctgcctaagcctcccaagtagctgggattataggcacccaccaccacacctggctaattttkgtatttttagtagagacacggtttcactatgtgggccaggctggtcttgaactcctaacctcaagtgatccacccaccttggcctccccaagtgctaggattacaggtgtgagccacagcacctggccacagtggcccttttaaggacacaatatgttatctcttccaaatattccaatacccatatggggtctctgactattatgatccccacaa

SEQ ID NO: 642770 - DNA, 570 bp, Homo sapiens
tttttctttttttgtgagacggagtctcgctctgtcactcagactgcattctcctgcctaagcctcccaagtagctgggattataggcacccaccaccacacctggctaattttggtatttttagtagagacacggtttcactatgtkggccaggctggtcttgaactcctaacctcaagtgatccacccaccttggcctccccaagtgctaggattacaggtgtgagccacagcacctggccacagtggcccttttaaggacacaatatgttatctcttccaaatattccaatacccatatggggtctctgactattatgatccccacaaaatggatgaaaaacagtggctgggagagggagtggtttgtccagggcccagggtaatggagtagggagtggccactagagtgaattcttgagaaagtgcatggttaattgtaaatcactctgcaaactttgcttgttcttgttcttctcagaccagaagccaggatgagtggtaagaaataacaatggcaattgggcccgctgagtgagtaatagggttagaacaagactttggaaaag

SEQ ID NO: 642771 - DNA, 544 bp, Homo sapiens
tgttgctttcaccccagattatgaatatggctggaatagtctatcagctgggctggaatcctctgctttgtatgtacagatttagtcattcaatagctgttcattgaatatttattaagaaactactgagccaggccctgtgcacagatgaagtttttctctttctcaaaccttgtagttgcccactaattgctagagatggaaaatgaaaaaattcatgagataggtcccttgcactgaagggatttgaaagtgtaatatggataarttgagtggctttctaattttttctgtacctcccctcgctcaaatacacatccctcttccgttatggacaagtgcaggtggggaaatgggacatgtgcaaatttttggcattggagtcatatcctggctgggctgaggaaagtcattcactccaggggtggcacttttaaccactttcaggttaatcatctccagacatgttgaagtaactcattgtttgtagtcctcagggagtagtcagggaagttgccttggctgaagacgtaagaaacacatt

SEQ ID NO: 642772 - DNA, 559 bp, Homo sapiens
gtaaaaaaatcccaaagaatctacaaaaaaatcactagaactaataaatgaagtcagcaagttcacaagatcaatacacaaaattaatttggtttctacacacaagaaatcatccaaaaatggaattaagatatcaattccatttacaatagcataaatagcattaaaataatcaaattctagaaaggagtttaacaaaagaagtgaaatacttgtacaattcccaccaaaaaggaaaaaaaaaaaccaaaaacatggagagaaattaaagaagttctaaataaatggagagacattccattttaatggttaaaaaatgttaagatgacaattcttcccaaatcatctttaggttaaacacaatttctattaaaatctcaacaggcttttttctcccctaaaatkgacaatcaagttctaagatttacatggaaatgcaaaggatctggaaaagacaaaaaaaaaaaaaaatgcaaaagaacaaagttggagcatttaaatttcctggttttaaaacatactacaaagttacagtaatccacacagtgtggtgctgaca

SEQ ID NO: 642773 - DNA, 479 bp, Homo sapiens
tttcaaattaaaacaacaataagataccactacatacttattataatgaccaaaatccagaacacaggacaagagcaaatgctggcaaggatgtggagcaacaggccctctcattcactgctgctgggaaggcaaaatggcacagccacttggaagacagtgtggcagttaaaaaaaaaaaaaaaagaaaagaaacatactctcactatatgttccagcagttattctccttggtatttatccaaatgagttaaaaatgtaggtccacacaaaaacctgcacacagatgtttatagtattttcattcacggttgccaacacttggaagcaaccaagatgaccttcagcaggtgaatggaaaaataacctgtggtacatccagacaactggaakattatttggtgttaaaaagaactgagctattaagccataaaaggcatagaggaaactgaaatgcttattaccaagtgaaagaagcc

SEQ ID NO: 642774 - DNA, 503 bp, Homo sapiens
ttgtggcaatgcttcagaggggagagacatttcaagagactgggtcattccctggtttggcaaaaagggcgacatgatggttggtgtctatgaagacagctgtgtgtcatcaacagaaggttctcataccacacagctcagcttgcagaggaggaacggggcttgattccatggcttccctacttgaaggcagggcttggcttacttccaataagtcaccttccatggcaaggggagggtgggtgatattttttagtgaaggagatgcttcyggggggagctgcaagctgaggggctgcaccaggaatacaggattcctgggagttgatgggaaacttctaaccttcaactgccttcttttctcatttacacaacgctatcctggggtaaagagccctaaataattgcaatgcatcaacttggcagagggctacacattaggtaggtccttccataatgtctttctcattaagagtctaagcccataaggcaatttgtggcat

SEQ ID NO: 642775 - DNA, 503 bp, Homo sapiens
ttgtggcaatgcttcagaggggagagacatttcaagagactgggtcattccctggtttggcaaaaagggcgacatgatggttggtgtctatgaagacagctgtgtgtcatcaacagaaggttctcataccacacagctcagcttgcagaggaggaacggggcttgattccatggcttccctacttgaaggcagggcttggcttacttccaataagtcaccttccatggcaaggggagggtgggtgatattttttagtgaaggagatgcttccggggggagctgcaagctgaggggctgcaccaggaatacaggattcctgggagttgatgggaaacttctaaccttcaactgccttcttttctcatttacacaaygctatcctggggtaaagagccctaaataattgcaatgcatcaacttggcagagggctacacattaggtaggtccttccataatgtctttctcattaagagtctaagcccataaggcaatttgtggcat

SEQ ID NO: 642776 - DNA, 469 bp, Homo sapiens
aaatatctaattacttataatacataataaaaatatatgctatgtaaacagttacttaaatttgttatattatttaaagttgttatgttaaatttgtgttattttttattgttgatttgtatttttcaaatattgtctattcacttggttgaatcatctctgaaggtgcagaacccaggcgacacaggggsccaactgtaattgcaatctgaatgaccaccatgaagacataggtcaccatgaacatgaagtgtgggagacctaatttctcttctcaggcagggaaggaatggggtcggagagggaggagttcatgggaggtgtggcactaaaacccaggctccggcctgggactctttacattataagtgtgtggccctgggatcaactgtggacttcttcactagcctgagagttcctcaaggcaagagagcaaggacgcattgcactcatccttgcatatctgtag

SEQ ID NO: 642777 - DNA, 469 bp, Homo sapiens
aaatatctaattacttataatacataataaaaatatatgctatgtaaacagttacttaaatttgttatattatttaaagttgttatgttaaatttgtgttattttttattgttgatttgtatttttcaaatattgtctattcacttggttgaatcatctctgaaggtgcagaacccaggcgacacagggggmcaactgtaattgcaatctgaatgaccaccatgaagacataggtcaccatgaacatgaagtgtgggagacctaatttctcttctcaggcagggaaggaatggggtcggagagggaggagttcatgggaggtgtggcactaaaacccaggctccggcctgggactctttacattataagtgtgtggccctgggatcaactgtggacttcttcactagcctgagagttcctcaaggcaagagagcaaggacgcattgcactcatccttgcatatctgtag

SEQ ID NO: 642778 - DNA, 429 bp, Homo sapiens
ggctgtgctctctctacccatcagccaactcagcagtcttgtctctggactactagttgctgcctggaaccgcaattcaaatcagatccgtcttgatgagttagattaattgatcttcaggagttttgctctgtgcttgtcttttaaatcaaagtcttaagatcccaggsagtgagcactgggagaactttaaatataacctagggcctctttagaaaaactacgtttggttcagtgtcctcggctggatatctgaaaatgacaaaccccaaaacaaaaaccttctatagcagagtttgtcctatcccatggtaggtagttaggatattaaactaccctgctcttaagataactgcttgtttctgttttcctcatttcaaatttaatcaaggagaatttgccttttatttatttatggcaaacaaattg

SEQ ID NO: 642779 - DNA, 564 bp, Homo sapiens
gggcccccctgggccagaggatgggagttgggctcaaatggaggagcctcttatagacacttggccaatgtcagaaagagggtaattctatgtaactcacttaggatctgggctcctctggggacatctccatgtttccaatgtcctgtctttgtgcctaactaatggtcacaattacacaattattctttcatagtcacactcycagacatccttttattattattttttaaactgcaactactagaagaaatcagttaacatttgttgagtgtcaggcactgtgttgtacatacattatctcctttaactcttttagtaaccctttgttatagtgcaacaaagctacaatttcgatccacctgacctcatcagaatctgtaaggctttcaagatgatagaggatccccatttttcattgtgccttgaaaactgcaaagtaacacacaattgaacagtattatgactgaatggcacagcagcccttgagatagatggcaccctgaccattttacagaagagaaaacagaagttccttgagatgatttgttggtgaatggtaaa

SEQ ID NO: 642780 - DNA, 641 bp, Homo sapiens
gtgttcaggtggcaattgaaaatgagaactagtgaagcctggagaatacaaacgactatttcatagtgaaggggactgccatggagatggttggctcataaacgagaggagctaagttggaaaaggacactgtgagggagggagttattgattcagaaaacactggctttgactgacattttgaggatcatgaaaaccaagctgakgtaggcatgaaagttagcagttaggaacttgggttctagagcctagcggataagatttctggttctttctgccatttgcaagcagtgtgcctaggaagttatttaaccactcaatgcctgcacattcaatctctgtatggtgataccaaatgcctagttcaaggcccaccacaccctagttacacaataaatagtggttgaacaatgtacaatgatatctacttatatggttgtttcgtgaagataaattgcaacaaaacctgtgtagaacattcactctgttgcctgacatatgataagtacaaaattaataagagtagtgattattattacacctgttattaggatatccaagcattgaattttttgcagccatttaatcttattatgaagtaatgtccttcctgttatggatattgggacatattttatgag

SEQ ID NO: 642781 - DNA, 614 bp, Homo sapiens
gcgttgtgtaaatatgcttgtacactcctaatgggcaaagccatcacatctaggcaattctatttgtacaatgcaatctataaagggaacttcttttgatgatgtcagtgataatggtatcagattgttccgaggagggtagagaaatgctgtgattagttccaggagtaaggcgttccgtggtggagatggagtctccctccactcctccctggaacagggctttaactgtaattgagtgagtgagaagagagaaagaatgacggtgaatgttttaccatgggagctgcttaaggcccagaaacacctcaaaagccaatcctgagaccccaaagagaaggccccagtggagcaggagcagcacccaggcctatggcactgatgaaaacatttatcagaaatctgtgcaatcaagagcactgaagcagaggcttgtcccaagagactttgtctgcagtgggtggggattggagggaatatcttagaataaaatcttttaatgttcctctccacagtcatatagcctccttaatatgacaaatcagagctcctgacatactttactgcctgcatgttaacgagccgagcyttgcaacagagccatttggggctgt

SEQ ID NO: 642782 - DNA, 587 bp, Homo sapiens
atatggttgagaatactattattccaattttattaatgagtaaactaaggctcagagagattaataccttgattacagctatgaagctccaacaggtgcagggcttcatgggcgtacgctctattccagaagacttgagctgggaaggtaccacctgcccccacctttctttggccaaagcctggaaaactgaagtgacctctgcaaggccacaccactggaaaatgacagagctggtaaaggccagttcttctgaaccctgctcctttgttcttttcagactggcatactcattgtcacattgtcttgcagtttagagtgtcacagagttttatgtttaaggaacttgttgatggcttgcattgaataaagggcacaacagaactagaaaacctaaaaactagaaarcaagagggaaagttttgagcccactgaggagttagttacactgagatagatccctggaggcctaccatccttcccagggcacggcccctgatttggggatagcacccttcatccagcccactctgggaagactgcgagagttgcaagtattttgtactattccaggaatccttattcat

SEQ ID NO: 642783 - DNA, 344 bp, Homo sapiens
cttactgtgctcatccataaaatagagatagtaacactcagcctgcagagttgtaagaattagagaaaatatgccagtcaagtgcccagtgtcattagagccttgacaccacttggaacccaataggtggcttttgtggttgtggctgttattaactctgttattaaattcaggaaactgagtgcaagttgctggcattttgaygttggtttgatgggttgcagagtttttcaaagacttacaactttttgcatctgtgaagtgtgactaataattcctactttgccaggtaggtataggtttggcaacaacaaacagaaaacccaaccacaatggtataaaca

SEQ ID NO: 642784 - DNA, 587 bp, Homo sapiens
tcagaacctcgtagcagtgatctggaatcctatgtgagggacaaacactcagaatccagccacagtgtactggaatcctatctgagggcaaacattcagaacctcggagaagtgttctggaatcctatatgaggggcaaacactaagaaatatgcagcagtgctctggaatcctttgtgagaggcaaacaaacagaacccagtarcagtgttctacgatcctttgtaagggaaaacattcagaccctcgtagcagtgttctggaatcctatgtgaggtaaaacattcagaccctcatagcagtgttctggaatcctatatgagggacaaacactcagaacccagcagcagtgttctggaatcttttgggagggaaaaacattcacaccctcgtaacagtgttttggaatcctatgtgagtgaaaaatgttcagaccctcgtagcattgttctggaatccaatatgagggacaaacactcagaatccagtaacagtgttctggaaccctccgtgagggataaacattcagaccctcatagcagtgttctggaatcctatgtgagggacaaacactcagaacccagcag

SEQ ID NO: 642785 - DNA, 587 bp, Homo sapiens
tcagaacctcgtagcagtgatctggaatcctatgtgagggacaaacactcagaatccagccacagtgtactggaatcctatctgagggcaaacattcagaacctcggagaagtgttctggaatcctatatgaggggcaaacactaagaaatatgcagcagtgctctggaatcctttgtgagaggcaaacaaacagaacccagtagcagtgttctacgatcctttgtaagggaaaacattcagaccctcgtagcagtgttctggaatcctatgtgaggtaaaacattcagaccctcatagcagtgttctggaatcctatatgagggacaaacactcagaacccagcagcagtgttctggaatcttttgggagggaaaaacattcacaccctcgtaacagtgttttggaatcctatgtgagtgaaaaatrttcagaccctcgtagcattgttctggaatccaatatgagggacaaacactcagaatccagtaacagtgttctggaaccctccgtgagggataaacattcagaccctcatagcagtgttctggaatcctatgtgagggacaaacactcagaacccagcag

SEQ ID NO: 642786 - DNA, 527 bp, Homo sapiens
tctttacactgaaacatattgtgaaagaaatggaagaagtcacaaataaacgcaaaaagatttcatgtttatgaactggaagaataaatattataaagtgccatatgagtcaaagtgatctacagtttcaatgaactctctattaaaaatccggygacatttttcacggtaatggaaactacaattctaaaatttgcatgaaagtacaataggctttgaaaaaccaaagcaatctagaggaaaaggaacaaagcaaccaaacttcatactttatgatttcaaactatattttaagattgtagtacatgcaaaatatggacacaagaaaacaaagaaacagaatagagcccagaaacaaacccaggaatataaagtttactaatctttgacaagtgcaccagaaatacacaatgaacaatgtatagtctttttaatatttggttctgaaaaaactggatacctccaggcaaaagaataaaattaacttatttttcttacaccatgctaaaagttaaattacagactta

SEQ ID NO: 642787 - DNA, 302 bp, Homo sapiens
tctttgacaagtgcaccagaaatacacaatgaacaatgtatagtctttttaatatttggttctgaaaaaactggatacctccaggcaaaagaataaaattarcttatttttcttacaccatgctaaaagttaaattacagacttaaatatgaatccttaaaaaatctgaaagaaaaatacatggaaaatcctcatgatatggtcttaacaataatttgttagacataataccaaaagtacagcaacgaaagcaaatataaacaagctggactgcatcaaactaaaaaccttctgcacagaaa

SEQ ID NO: 642788 - DNA, 302 bp, Homo sapiens
tctttgacaagtgcaccagaaatacacaatgaacaatgtatagtctttttaatatttggttctgaaaaaactggatacctccaggcaaaagaataaaattaacttatttttcttacaccatgctaaaagttaaattacagacttaaatatgaatccttaaaaaatctgaaagaaaaatacatggaaaaycctcatgatatggtcttaacaataatttgttagacataataccaaaagtacagcaacgaaagcaaatataaacaagctggactgcatcaaactaaaaaccttctgcacagaaa

SEQ ID NO: 642789 - DNA, 302 bp, Homo sapiens
tctttgacaagtgcaccagaaatacacaatgaacaatgtatagtctttttaatatttggttctgaaaaaactggatacctccaggcaaaagaataaaattaacttatttttcttacaccatgctaaaagttaaattacagacttaaatatgaatccttaaaaaatctgaaagaaaaatacatggaaaatcctcatgatatggtcttaacaataatttgttagacataataccaaaagtacagcaacraaagcaaatataaacaagctggactgcatcaaactaaaaaccttctgcacagaaa

SEQ ID NO: 642790 - DNA, 601 bp, Homo sapiens
caaaaaactaaactgatatttgtccaatgaagacatacaaatggccaacasataagccataaagtactcaatatcaccaaatatcaggcaattgcaaatcaaaaccatgatgagtatcatttcaaacatgttagaatggataatataaaaagaagaaacataacaagtgttgacaacactttgaagaaaaaaaattctgtacattcttggagagttataaattgatggagtcattacaaaaaccaatagaggttatctgaaatacagaactactacacaacctagcaatagtagtattgtgtatataatactgtttatataacaaaaggaaatgaaataagtaacttgaagacatatctgtaccaccatatttgttgcagcattattcacaattgccaagatacaaaaaacctaaatgtttgtggatgctgaataaagaaaagctggtgtaaataaacaatagaatatcatttagcttgaaaaataacaaaatcttgccatttcaacaacatgggtagaactagaagacattatgccaagggaaataagccagacacagaaagagaaatactgcacattctcacttatatggggaatctaa

SEQ ID NO: 642791 - DNA, 601 bp, Homo sapiens
caaaaaactaaactgatatttgtccaatgaagacatacaaatggccaacagataagccataaagtactcaatatcaccaaatatcaggcaattgcaaatcaaaacyatgatgagtatcatttcaaacatgttagaatggataatataaaaagaagaaacataacaagtgttgacaacactttgaagaaaaaaaattctgtacattcttggagagttataaattgatggagtcattacaaaaaccaatagaggttatctgaaatacagaactactacacaacctagcaatagtagtattgtgtatataatactgtttatataacaaaaggaaatgaaataagtaacttgaagacatatctgtaccaccatatttgttgcagcattattcacaattgccaagatacaaaaaacctaaatgtttgtggatgctgaataaagaaaagctggtgtaaataaacaatagaatatcatttagcttgaaaaataacaaaatcttgccatttcaacaacatgggtagaactagaagacattatgccaagggaaataagccagacacagaaagagaaatactgcacattctcacttatatggggaatctaa

SEQ ID NO: 642792 - DNA, 601 bp, Homo sapiens
caaaaaactaaactgatatttgtccaatgaagacatacaaatggccaacagataagccataaagtactcaatatcaccaaatatcaggcaattgcaaatcaaaaccatgatgagtatcatttcaaacatgttagaatggataatrtaaaaagaagaaacataacaagtgttgacaacactttgaagaaaaaaaattctgtacattcttggagagttataaattgatggagtcattacaaaaaccaatagaggttatctgaaatacagaactactacacaacctagcaatagtagtattgtgtatataatactgtttatataacaaaaggaaatgaaataagtaacttgaagacatatctgtaccaccatatttgttgcagcattattcacaattgccaagatacaaaaaacctaaatgtttgtggatgctgaataaagaaaagctggtgtaaataaacaatagaatatcatttagcttgaaaaataacaaaatcttgccatttcaacaacatgggtagaactagaagacattatgccaagggaaataagccagacacagaaagagaaatactgcacattctcacttatatggggaatctaa

SEQ ID NO: 642793 - DNA, 423 bp, Homo sapiens
taagtagagaaaagaggacataatagaagattctasaaaattaattccaaaatactttttactgacagaacctttagcgtattcagaaagtacattaaatatgtgggtcctccgtttcactccccagtattactgaatcaaaaattggtggtggcaattgaattttaaggtgtggacaacattattttatgctgctaaatttctgaaattaccacttatctagggtgaataatatagataaactcaggaaaggggaaaattcaggtcaaaatgaaacaacctgaagaatttattttccacaccaaaaaatcctcaagattgtcttgaaaacagggatctgaaatttactcatgcaaagcagaaattaccaaaacacatcctacaaaggaagaaaatgaaacctttagggtaaattaggaattc

SEQ ID NO: 642794 - DNA, 423 bp, Homo sapiens
taagtagagaaaagaggacataatagaagattctacaaaattaattccaaartactttttactgacagaacctttagcgtattcagaaagtacattaaatatgtgggtcctccgtttcactccccagtattactgaatcaaaaattggtggtggcaattgaattttaaggtgtggacaacattattttatgctgctaaatttctgaaattaccacttatctagggtgaataatatagataaactcaggaaaggggaaaattcaggtcaaaatgaaacaacctgaagaatttattttccacaccaaaaaatcctcaagattgtcttgaaaacagggatctgaaatttactcatgcaaagcagaaattaccaaaacacatcctacaaaggaagaaaatgaaacctttagggtaaattaggaattc

SEQ ID NO: 642795 - DNA, 423 bp, Homo sapiens
taagtagagaaaagaggacataatagaagattctacaaaattaattccaaaatactttttactgacagaacctttagcrtattcagaaagtacattaaatatgtgggtcctccgtttcactccccagtattactgaatcaaaaattggtggtggcaattgaattttaaggtgtggacaacattattttatgctgctaaatttctgaaattaccacttatctagggtgaataatatagataaactcaggaaaggggaaaattcaggtcaaaatgaaacaacctgaagaatttattttccacaccaaaaaatcctcaagattgtcttgaaaacagggatctgaaatttactcatgcaaagcagaaattaccaaaacacatcctacaaaggaagaaaatgaaacctttagggtaaattaggaattc

SEQ ID NO: 642796 - DNA, 423 bp, Homo sapiens
taagtagagaaaagaggacataatagaagattctacaaaattaattccaaaatactttttactgacagaacctttagcgtattcagaaagtacattaaatatgtgggtcctcygtttcactccccagtattactgaatcaaaaattggtggtggcaattgaattttaaggtgtggacaacattattttatgctgctaaatttctgaaattaccacttatctagggtgaataatatagataaactcaggaaaggggaaaattcaggtcaaaatgaaacaacctgaagaatttattttccacaccaaaaaatcctcaagattgtcttgaaaacagggatctgaaatttactcatgcaaagcagaaattaccaaaacacatcctacaaaggaagaaaatgaaacctttagggtaaattaggaattc

SEQ ID NO: 642797 - DNA, 423 bp, Homo sapiens
taagtagagaaaagaggacataatagaagattctacaaaattaattccaaaatactttttactgacagaacctttagcgtattcagaaagtacattaaatatgtgggtcctccgtttcacwccccagtattactgaatcaaaaattggtggtggcaattgaattttaaggtgtggacaacattattttatgctgctaaatttctgaaattaccacttatctagggtgaataatatagataaactcaggaaaggggaaaattcaggtcaaaatgaaacaacctgaagaatttattttccacaccaaaaaatcctcaagattgtcttgaaaacagggatctgaaatttactcatgcaaagcagaaattaccaaaacacatcctacaaaggaagaaaatgaaacctttagggtaaattaggaattc

SEQ ID NO: 642798 - DNA, 437 bp, Homo sapiens
ctaatactgttctaagtagagaaaagaggacataatagaagattctacaaaattaattccaaaatactttttactgacagaacctttagcgtattcagaaagtacattaaatatgtgggtcctccgtttcactccccagtattactgaatcaaaaattggtggtggcaattgaattttaaggtgtggacaacattattttatgctgctaaatttctgaaattaccacttatctagggtgaataatatagataaactcaggaaaggggaaaattcaggtcaaaatgaaacracctgaagaatttattttccacaccaaaaaatcctcaagattgtcttgaaaacagggatctgaaatttactcatgcaaagcagaaattaccaaaacacatcctacaaaggaagaaaatgaaacctttagggtaaattaggaattcta

SEQ ID NO: 642799 - DNA, 549 bp, Homo sapiens
gactatcatgagaagaaaaagtgtttaaacaaacttatagggagaaatagcataaagtcaagaagtacaggtttgtaagttctaaacatatggcattccaggaggcagagtgaacactgctcctgatctgagacacagtcacctgagaaaaagccatttttctcttcatcatccttctctaggatttcttctcaggtgatattctctggacaagtcacacctgcatcttgggaatatgcctttaaagaaatcagcacaatctcttcacctgctaccaccacaaacacaggtagaaagatccaggcaggcagaaaatgtccacccatttatgttctttataacaggtgagattcaaggacagygagctcctccacaaagatcaaaatttatctttctcttttcctgccacagatgccacaatttctgctacagcaatggggatacgggccacactaacttgtccctaccaaatccaaccatagcaggccctgtgacctccctttggaataaagtttgaactcaactctcatgaatgtattttgaaatcct

SEQ ID NO: 642800 - DNA, 496 bp, Homo sapiens
cacattctttgctagctctttaacttcagagacaggagaaggcaacaacgtctgagtaagtctgcactgaaaaacaacatgtacacatatacttatgcaatgyttattaagcaggtactatgtgctcaggagtgtgttacagagcactgtgctgggaacatcacattatgtgatttaatcttcataacaacttgagagttgggtcctaagagttcaataattctcagaatttagatgaaggggccagcattgttttcttccctgtttatctcattgattttttttttctggacggagtttcactcttgttgcccaggctggaagtgcaatggcatgatctcagctcaccacaacatccgcctcctgggttcaaacgattctcctgtctcagcctcccgagtagttgggattacaggcatgcaccatgacactgagctaagtttctatttttagtagagacagggtttctccatgttggtcaggctggtctcgaact

SEQ ID NO: 642801 - DNA, 496 bp, Homo sapiens
cacattctttgctagctctttaacttcagagacaggagaaggcaacaacgtctgagtaagtctgcactgaaaaacaacatgtacacatatacttatgcaatgcttattaagcaggtactatgtgctcaggagtgtgttacagagcactgtgctgggaacatcacattatgtgatttaatcttcataacaacttgagagttgggtcctaagagttcaataattctcagaatttagatgaaggggccagcattgttttcttccctgtttatctcattgattttttttttctggacrgagtttcactcttgttgcccaggctggaagtgcaatggcatgatctcagctcaccacaacatccgcctcctgggttcaaacgattctcctgtctcagcctcccgagtagttgggattacaggcatgcaccatgacactgagctaagtttctatttttagtagagacagggtttctccatgttggtcaggctggtctcgaact

SEQ ID NO: 642802 - DNA, 496 bp, Homo sapiens
cacattctttgctagctctttaacttcagagacaggagaaggcaacaacgtctgagtaagtctgcactgaaaaacaacatgtacacatatacttatgcaatgcttattaagcaggtactatgtgctcaggagtgtgttacagagcactgtgctgggaacatcacattatgtgatttaatcttcataacaacttgagagttgggtcctaagagttcaataattctcagaatttagatgaaggggccagcattgttttcttccctgtttatctcattgattttttttttctggacggagtttcactcttgttgcccaggctggaagtgcaatggcatgatctcagctcaccacaacatccgcctcctgggttcaaacgattctcctgyctcagcctcccgagtagttgggattacaggcatgcaccatgacactgagctaagtttctatttttagtagagacagggtttctccatgttggtcaggctggtctcgaact

SEQ ID NO: 642803 - DNA, 313 bp, Homo sapiens
ctggagaaactctcgtccaggtaccaaccaaggagattctttctacaaaagaaggaacagacactgaatgactcatttcccttcctctaacatggaagcagaattaggcactcctgccagcctgacccaagtctgtacaggacatcctgaaatgtcttaaagattcccgggtgattgtgagaggattcctagtgaccatagactgatgaccatatgttgatccargtaggaaagactcaagctgattctaaatagaaaatggaactgccctggtagagctccagaatctggatctacgtgtgatatcacctgt

SEQ ID NO: 642804 - DNA, 313 bp, Homo sapiens
ctggagaaactctcgtccaggtaccaaccaaggagattctttctacaaaagaaggaacagacactgaatgactcatttcccttcctctaacatggaagcagaattaggcactcctgccagcctgacccaagtctgtacaggacatcctgaaatgtcttaaagattcccgggtgattgtgagaggattcctagtgaccatagactgatgaccatatgttgatccaagtaggaaagactcaagctgattctaaatagaaaatggaactgccctggtagagctccagaayctggatctacgtgtgatatcacctgt

SEQ ID NO: 642805 - DNA, 439 bp, Homo sapiens
ggtgttacagcaaggagagtaaaaaaaaaaaaaagtttccatcataaagtctgctctagcacatgatatgtcagcctaaaaagaaaaggctaaggcaacactcatttaagaagagagtttatttgggccaagcctgaggattgaamtctgggagcatagattcaagttgccttgaatgtatactttaattagcagcagttacaagtggatttacagagacaaaagagagggacagggagaggactgaaacaaagttgtttgtcagaaattcttcttgatctacagaaataacattgatgactaattggctatatatttttaagctgtgaggtattgcttataacatctagtgtggcattattaggttaatttatatctacttgtaggaatagcaaacagtttcaagaggtaaacacgtagctcaaaggaggcagtagaa

SEQ ID NO: 642806 - DNA, 439 bp, Homo sapiens
ggtgttacagcaaggagagtaaaaaaaaaaaaaagtttccatcataaagtctgctctagcacatgatatgtcagcctaaaaagaaaaggctaaggcaacactcatttaagaagagagtttatttgggccaagcctgaggattgaaatctgggagcatagattcaagttgccttgaatgtayactttaattagcagcagttacaagtggatttacagagacaaaagagagggacagggagaggactgaaacaaagttgtttgtcagaaattcttcttgatctacagaaataacattgatgactaattggctatatatttttaagctgtgaggtattgcttataacatctagtgtggcattattaggttaatttatatctacttgtaggaatagcaaacagtttcaagaggtaaacacgtagctcaaaggaggcagtagaa

SEQ ID NO: 642807 - DNA, 547 bp, Homo sapiens
tattgcttataacatctagtgtggcattattaggttaatttatatctacttgtaggaatagcaaacagtttcragaggtaaacacgtagctcaaaggaggcagtagaacataattatgttctcatttttatgtctctctgggcctgataaaactaaaaggacttgccttcctcagatcaaagttattctttttcctctaatctcaagaccgaggttcagaatttggtactgtagatttaggtcctggatggatggagaaatgacaggtattaactgcacatttatgggaattttgggaggagaagaaagaggaactttgagatactcacgtttactcaatgcacacatgtcaccctaattgttcttctggtcctaatagtctccaactcagtttcaggtctcaagacactatggtcactgaaagaggtgaaatggctgattactatcctgtgaattttgtcaaccacttgtagaaaggcttaacgtctctatgagtggttgtagaggactatagatgtgaaacaggcagagacacaagtctgcttgc

SEQ ID NO: 642808 - DNA, 547 bp, Homo sapiens
tattgcttataacatctagtgtggcattattaggttaatttatatctacttgtaggaatagcaaacagtttcaagaggtaaacacgtagctcaaaggaggcagtagaacataattatgttctcatttttatgtctctctgggcctgataaaactaaaaggacttgccytcctcagatcaaagttattctttttcctctaatctcaagaccgaggttcagaatttggtactgtagatttaggtcctggatggatggagaaatgacaggtattaactgcacatttatgggaattttgggaggagaagaaagaggaactttgagatactcacgtttactcaatgcacacatgtcaccctaattgttcttctggtcctaatagtctccaactcagtttcaggtctcaagacactatggtcactgaaagaggtgaaatggctgattactatcctgtgaattttgtcaaccacttgtagaaaggcttaacgtctctatgagtggttgtagaggactatagatgtgaaacaggcagagacacaagtctgcttgc

SEQ ID NO: 642809 - DNA, 493 bp, Homo sapiens
gaaagagttctcattgtgacagcccaactcactcggaaacaccatgagacacttttgggggtcccttctgaagacagacaccgaaagcattgaagagaaaaacagctctcagtctgaataaaattgtattaagrggttaaaagcatctgaaagaaaaattcagattacatataatattagccaagtcgaccagaaaatactcactcccctgagacagtttcctctctaaacacccaaaatgcacagccgctctcaacacaagaaacacagtgttatgaagaaagggggcatattctcagcagaatttcttaagattttccttccatctctgctgctctctcatctgctggccattggattgaggatctacactggaacacatcaggcaaccttcgccagcactttttgataaagaattggaatttgactctgtttacatagtagatactatatctgagattgcaacatatctaactgaagactattatgattc

SEQ ID NO: 642810 - DNA, 553 bp, Homo sapiens
gctcatgcttgtaattccagcactttgggaggccaaggaagacagattacctgaggtaaggagtttgagaccagcctggccaacatggcaaaacctcatctctactaaaaataaccaggtgcggtagcaggtgcctgtaatcccagctactcaggaggctaaggcaggagaattgcttgaaccagggaggcggggtttgcagtgagtcgagattgcggcactgcaatccagcctcagcgacagagcaagactccatctcaaaaagaaaaaaaatatacaaagaaagaagtataaaacaatattatgcctaacaaagaacaccccttaaaaatagcagggtacaaccattctcagtagctcacatacattctctttgataaactgcctgttaggccatgataaaaataaaaacttactaaatctttaaaaattgaaattgatagattactttttatgaccaaaatggaatgagagtagaaatcaacaaaaacaraactaaaaaatttacaaatacatgaaaattaaacaacacactcttcagcatgctcaaagg

SEQ ID NO: 642811 - DNA, 573 bp, Homo sapiens
tgtgagttggataatttaattttaaaatattgtcaagtttttttgcaaatagacaaacgtaccaattatattagaccctgaattcaagaatrcactttgtaataaaccagttaaaacacaatcagaccagatttttaaatagactctcttaaagtttttataatttatatttatatttcacatatgttgaaactaaataatggaaaagcatgcaatgcaaatattaaccaaaatatagctttagttgtacttctattcacattttaaaagttggacacagttaagtctcagtgatttttttacacaacggaggcaagctgtgcagttataactagtattatattatgctcttggcctgattacagaagggaaaggggcaatcataccagacaatggcagaatggagcaacaaggagtagagttacagaacatgatgctgtaactgggactggagttactcttttagagttaaagaataggaaactggacaaaatatatgaaactttttttgaagtactgaacatcaggcagcacagtactgtgctccgcaagagaagagaaggagccagaatg

SEQ ID NO: 642812 - DNA, 573 bp, Homo sapiens
tgtgagttggataatttaattttaaaatattgtcaagtttttttgcaaatagacaaacgtaccaattatattagaccctgaattcaagaatacactttgtaataaaccagttaaaacacaatcagaccagatttttaaatagactctcttaaagtttttataatttatatttatatttcacatatgttgaaactaaataatggaaaagcatgcaatgcaaatattaaccaaaatatagctttagttgtacttctattcacattttaaaagttggacacagttaagtctcagtgatttttttacacaacggaggcaagctgtgcagttataactagtattatattatgctcttggcctgattacagaagggaarggggcaatcataccagacaatggcagaatggagcaacaaggagtagagttacagaacatgatgctgtaactgggactggagttactcttttagagttaaagaataggaaactggacaaaatatatgaaactttttttgaagtactgaacatcaggcagcacagtactgtgctccgcaagagaagagaaggagccagaatg

SEQ ID NO: 642813 - DNA, 573 bp, Homo sapiens
tgtgagttggataatttaattttaaaatattgtcaagtttttttgcaaatagacaaacgtaccaattatattagaccctgaattcaagaatacactttgtaataaaccagttaaaacacaatcagaccagatttttaaatagactctcttaaagtttttataatttatatttatatttcacatatgttgaaactaaataatggaaaagcatgcaatgcaaatattaaccaaaatatagctttagttgtacttctattcacattttaaaagttggacacagttaagtctcagtgatttttttacacaacggaggcaagctgtgcagttataactagtattatattatgctcttggcctgattacagaagggaaaggggcaatcataccagacaatggcagaatggagcaacaaggagtagagttacagaacatgatgctgtaactgggactggagttactcttttagagttaaagaataggaaactggacaaaatatatgaaactttttttgargtactgaacatcaggcagcacagtactgtgctccgcaagagaagagaaggagccagaatg

SEQ ID NO: 642814 - DNA, 593 bp, Homo sapiens
gcaatgcaaatattaaccaaaatatagctttagttgtacttctattcacattttaaaagttggacacagttaagtctcagtgatttttttacacaacggaggcaagctgtgcagttataactagtattatattatgctcttggcctgattacagaagggaaaggggcaatcataccagacaatggcagaatggagcaacaaggagtagagttacagaacatgatgctgtaactgggactggagttactcttttagagttaaagaataggaaactggacaaaatatatgaaactttttttgaagtactgaacatcaggcagcacagtactgtgctccgcaagagaagagaaggagccagaatgagtcctgctttattcccaggttctccgtgacagcagtagagaggaatcccagggagagcagatattgtcattgcactgaggaaccagataaaaatcaaaaaagttaagcagctggaatgtgtagtagaagagaacgtttacagaaaaaggaaccaataatcagcctaaggtttctcccamgtccctaagtcaaatgtacataggatgaaattctaaggagctcagcaaagg

SEQ ID NO: 642815 - DNA, 407 bp, Homo sapiens
ttttagggtaatattttgagtatctttatctccatatgtacaataaatattattgtaatttttaatctttactcttctgtggagaaaacataggtgtgattgctagtgtagctgaacatcacgtttatttgacaatattgcacttgtgtgtgggtgtgcrtacagctactctttacattagttctcaggtaatgattagagattaacaattaattcagtaaaatgtatgttttgcaatatttctccatgttattatgttttaaattagtttaatcatgcccctataatgtgtatattttaacctttgactataggtctcaatcttactttggttcctgtatttgaatttatgctaataaggttctacagctaaaaagggttatataaacttatctacatttttacta

SEQ ID NO: 642816 - DNA, 407 bp, Homo sapiens
ttttagggtaatattttgagtatctttatctccatatgtacaataaatattattgtaatttttaatctttactcttctgtggagaaaacataggtgtgattgctagtgtagctgaacatcacgtttatttgacaatattgcacttgtgtgtgggtgtgcgtrcagctactctttacattagttctcaggtaatgattagagattaacaattaattcagtaaaatgtatgttttgcaatatttctccatgttattatgttttaaattagtttaatcatgcccctataatgtgtatattttaacctttgactataggtctcaatcttactttggttcctgtatttgaatttatgctaataaggttctacagctaaaaagggttatataaacttatctacatttttacta

SEQ ID NO: 642817 - DNA, 503 bp, Homo sapiens
ggattgattcctttgcaaagatgaatgcttgagaagtagatatttaatcataacatttcaaaatctactggataacctagaatggaaaaatagcctataggttgaaaaactcctgtagcgaagaaagaaaataactaatatacagtgacaatataaatactataagtatttattttattatcgccctgaaatttgataatacaaacatgtaatatctacatatcatccatatatccggtcataaaaaatcaatacattcttcaaaaatttagcataacagaaaatacactctctctccttgatggaattaagttacaaataaaagtaaaaataagtagrtaagtagatggaagtagatgtttaaaaacaaagaaaaatatttgttttggataacataaaaactcaattgactattccaatatttcaagaactttggctgtcaactggtggagagttttccccaggagacattttcaatgtctagggttattgtggggatgtca

SEQ ID NO: 642818 - DNA, 546 bp, Homo sapiens
ggcagcctcctacaacaaagaatcctctagtcctaaagataagtagcaccaaggttgagaaaccataatctagaaagtaaacactatgcagctattccaagtgctcaggaaaacacatcaatgccctcgaggggaaaagggtaaacattttaattgytgtacatggtgacacaaatccatgttgttaatgtaagtggaaggggctgaagcacaaaacgtaattcaaagagtttacttgatccaaaatgaggacagctacctggaagaaacagacccaagtatccttggatatgaactccatttggagctttgcaacaagcagtttcttaaaggcaaaaaagggtccagaagtgggatgatgcaaagaggtttgtcataaattctcattggcttatggaaataacatttattagtgactggttatacactgttacaccattattgggtgtggattatagtgtctggtgtgacattatttgttaatttatagctactgtggcaacagcaagcagcctagatgctcaaagaggagcaggacagaactgc

SEQ ID NO: 642819 - DNA, 546 bp, Homo sapiens
ggcagcctcctacaacaaagaatcctctagtcctaaagataagtagcaccaaggttgagaaaccataatctagaaagtaaacactatgcagctattccaagtgctcaggaaaacacatcaatgccctcgaggggaaaagggtaaacattttaattgctgtacatggtgacacaaatccatgttgttaatgtaagtggaaggggctgaagcacaaaacgtaattcaaagagtttacttgatccaaaatgaggacagctacctggaagaaacagacccaagtwtccttggatatgaactccatttggagctttgcaacaagcagtttcttaaaggcaaaaaagggtccagaagtgggatgatgcaaagaggtttgtcataaattctcattggcttatggaaataacatttattagtgactggttatacactgttacaccattattgggtgtggattatagtgtctggtgtgacattatttgttaatttatagctactgtggcaacagcaagcagcctagatgctcaaagaggagcaggacagaactgc

SEQ ID NO: 642820 - DNA, 543 bp, Homo sapiens
aactgaagttatgacatactaatattgttataactttaaaatgttttaygtaatctccaattacctagataattacaagtttatagaaagtatgcaatacaaaatgagaaaggaaacaaagcataacactacaaaatcaaaaaagcaaaaattaagacagtaaaataggaaattatggaaaacatctctacaagaaacacagaaaataataacaatcaaaatggtaatagtagcttcatttctctaaggaatcattttaaatgtaaattgattaaactaataataagaaattaaatggctgaatggaataagaacaaacaaaatcacacaatatgcaacaaatcacacaatattcttgtttgaacttggtgtactctgttaggacacataacaagccttattaagtttaagaagactaatcaggtatggtggctcacgtctgtagccccagcactttgagaggccaggactggaagatttcttgagaccaggatttcaagagactcactttaactttgattcaaataggttgaaagaaacaga

SEQ ID NO: 642821 - DNA, 543 bp, Homo sapiens
aactgaagttatgacatactaatattgttataactttaaaatgttttatrtaatctccaattacctagataattacaagtttatagaaagtatgcaatacaaaatgagaaaggaaacaaagcataacactacaaaatcaaaaaagcaaaaattaagacagtaaaataggaaattatggaaaacatctctacaagaaacacagaaaataataacaatcaaaatggtaatagtagcttcatttctctaaggaatcattttaaatgtaaattgattaaactaataataagaaattaaatggctgaatggaataagaacaaacaaaatcacacaatatgcaacaaatcacacaatattcttgtttgaacttggtgtactctgttaggacacataacaagccttattaagtttaagaagactaatcaggtatggtggctcacgtctgtagccccagcactttgagaggccaggactggaagatttcttgagaccaggatttcaagagactcactttaactttgattcaaataggttgaaagaaacaga

SEQ ID NO: 642822 - DNA, 543 bp, Homo sapiens
aactgaagttatgacatactaatattgttataactttaaaatgttttatgtaatctccaattacctagataattacaagtttatagaaagtatgcaatacaaaatgagaaaggaaacaaagcataacactacaaaatcaaaaaagcaaaaattaagacagtaaaataggaaattatggaaaacatctctacaagaaacacagaaaataataacaatcaaaatggtaatagtagcttcatttctctaaggaatcattttaaatgtaaattgattaaactaataataagaaattaaatggmtgaatggaataagaacaaacaaaatcacacaatatgcaacaaatcacacaatattcttgtttgaacttggtgtactctgttaggacacataacaagccttattaagtttaagaagactaatcaggtatggtggctcacgtctgtagccccagcactttgagaggccaggactggaagatttcttgagaccaggatttcaagagactcactttaactttgattcaaataggttgaaagaaacaga

SEQ ID NO: 642823 - DNA, 543 bp, Homo sapiens
aactgaagttatgacatactaatattgttataactttaaaatgttttatgtaatctccaattacctagataattacaagtttatagaaagtatgcaatacaaaatgagaaaggaaacaaagcataacactacaaaatcaaaaaagcaaaaattaagacagtaaaataggaaattatggaaaacatctctacaagaaacacagaaaataataacaatcaaaatggtaatagtagcttcatttctctaaggaatcattttaaatgtaaattgattaaactaataataagaaattaaatggctgaatggaataagaacaaacaaaatcacacaatatgcaacaaatcacacaatattcttgtttgaacttggtgtactctgttaggacacataacaagccttattaagtttaagaagactaatcaggtatggtggctcacgtctgtagccccagcactttgagaggccaggactggaagattkcttgagaccaggatttcaagagactcactttaactttgattcaaataggttgaaagaaacaga

SEQ ID NO: 642824 - DNA, 550 bp, Homo sapiens
ctatttttgcaagatctggaatgagttctgarttttcccatctctcactcttcttggccaccttaaaggagggatgtgggggaaggtagggaagaaaagaataggaagagggaacgccgtgcctgcaaggaccagtgacagtgacggcactccccacccaagaacaacttttcaccagaaagtgctgcgacatcctcctttggccaacagggggcgccagaggtcgcagtgccggagagagcaagacacccccaactcctgagcgctccacccctcatagaaatttcactcctaacacttcccagccttcatttcaacagcaatgtcgcccattttatagatgcagttggggctcagaccaaagcctcgtatccagttaggagcaggatcagaattcgaacccaaagccagctactccttgttctggtcaacacggttggtgctctcccgtgcaggatttcactcgtccatttagtgtaataagatggagagacgacagatggaggttcgattcgctacccgcatttacggccggcgtgctgtcaggagg

SEQ ID NO: 642825 - DNA, 606 bp, Homo sapiens
gtttgcgtggtttgtagggaaacagggggggctgtgcctttctgtgctgagatctagcataaagaagctgtttcaagctcctggcttgccacgccggatcagaattccaaggaggccctgtgtgttttgcttcagatctgcacatttcttttcaaaatactactcggcagtggctgatgctggtggaggtctgacatgaaggcagccgcacatggatttgggttgcgtggtgctgctgtggtgggsccatagggcagtggtgtgtggctttgttcctgcagggagccctcgttagccgagttagctggaaacagttctctggagtagagatgtggatgcagagccgtgagagttagtgaggcgatgtgtcaggggagttcactgcagtgctttgtgttaatgaggaggtgtaggctgccagggcacgagtggtctttggattggggctgggttgcagcaggaatgctgggttgttgaatgggtgataccaattcattcatttatcaattatttcttgagcatttattaaggaaaccttcaggggtttccttagttcctgtggtttgtttgttcagacatttgctagacaccaggaagacaacagtg

SEQ ID NO: 642826 - DNA, 606 bp, Homo sapiens
ccttctttctgcagggattcttttccttggaccagggagagaaggtggtgcagagagggktggaggagaacggggaggggcatgagtgtccctgggaggaagaggaggaggacagggaaggcttgtcatcataatagttactgcgcattatagaatagttcctgcatattgagcacttactgtatgccaagttttatgccagattactgcatcatctcaccaaatgcggtcaggattctcgtcacttggagctctgtgatctagcacctgcctacctctctgacctcatctcctccctctctctccctagctcactctactcccactactgaggctccacacaccaaactcatcccttcctcaaggtctgtgtacctcctaggtctcacagtcagctctttgtcatcattcaggtctcagaataaatgtcacttccttcctgaccaccttatggaaaagagagcccacacccaggccagtcaggattacattcccttgtttcattttcttcattaagatatcatttccaaaactattcgcttgctttgttatgtctccccgcttcccctgccaaaatgaaagccctatgaaagcagagacttcggc

SEQ ID NO: 642827 - DNA, 192 bp, Homo sapiens
tgtcatcaacctctctgagccttgttctcctcttctgtaaaatgcagatgataagcataactaatttcttggtaacagcagacgatactatgcacacaaaaggcctagcccagtgctcggacaggggaccatccagttaagccagttcccttccccctgcacatcrtgaggccccatctaccattcttcttt

SEQ ID NO: 642828 - DNA, 582 bp, Homo sapiens
ttaggaccatcccttgcaacattgtgccttatgcttttttagcaacagttttatcaacatacatttcacataccaggaaattcatctatttaaagtattattcaatggtttttagtgtattcacagagttacacaaccatcgccagaatcttagaacattcgtgacccccaratgaatcctatacctattaggaatcactccctatttcccctgaactctctatccctaggcaaccaaaaatctactttctgcctttatgatctatgttgcatattgcatataagtggaatcacacaatatgtgacctttcatgtcttacttcgtttacttagcatgttttcaaggttcatccatgttgtgtttcattcatttttatggctggatgatatacataaaaatattgataaaatacatcaatattgtattaatataccacactttatttatccattcatccattggtaaatttgggttgttttcacttttggctactgtgaacaatgctgctatgaacattcaggtacaagtgtttgagtggacatatgttttcacttttcttgggtatattcctaggtgcataa

SEQ ID NO: 642829 - DNA, 582 bp, Homo sapiens
ttaggaccatcccttgcaacattgtgccttatgcttttttagcaacagttttatcaacatacatttcacataccaggaaattcatctatttaaagtattattcaatggtttttagtgtattcacagagttacacaaccatcgccagaatcttagaacattcgtgacccccagatgaatcctatacctattaggaatcactccctatttcccctgaactctctatccctaggcaaccaaaaatctactttctgcctttatgatctatgttgcatattgcatataagtggaatcacacaatatgtgacctttcatgtcttacttcgtttacttagcatgttttcaaggttcatccatgttgtgtttcattcatttttatggctggatgatatacataaaaatattgataaaatacatcaatattgtattratataccacactttatttatccattcatccattggtaaatttgggttgttttcacttttggctactgtgaacaatgctgctatgaacattcaggtacaagtgtttgagtggacatatgttttcacttttcttgggtatattcctaggtgcataa

SEQ ID NO: 642830 - DNA, 582 bp, Homo sapiens
ttaggaccatcccttgcaacattgtgccttatgcttttttagcaacagttttatcaacatacatttcacataccaggaaattcatctatttaaagtattattcaatggtttttagtgtattcacagagttacacaaccatcgccagaatcttagaacattcgtgacccccagatgaatcctatacctattaggaatcactccctatttcccctgaactctctatccctaggcaaccaaaaatctactttctgcctttatgatctatgttgcatattgcatataagtggaatcacacaatatgtgacctttcatgtcttacttcgtttacttagcatgttttcaaggttcatccatgttgtgtttcattcatttttatggctggatgatatacataaaaatattgataaaatacatcaatattgtattaatataccacactttatttatccattcayccattggtaaatttgggttgttttcacttttggctactgtgaacaatgctgctatgaacattcaggtacaagtgtttgagtggacatatgttttcacttttcttgggtatattcctaggtgcataa

SEQ ID NO: 642831 - DNA, 635 bp, Homo sapiens
ataataatgtggttatatttcataagagtctttatttcttaaagatatataatgaaatattacaaatgaaataatgatgtttgggattttcttcaaacaaaayataatggaagcgtgaatagaaggactatggataaaaaagattgcccatgagttgataatttgtgcaactgggtgatgaatccattgagatttgtcatactatttgtgtacctctgtatatgcttgaaattatacgctacactacacacacacacacacacacacacacacacacacacaaaatcatatactatctcacattaggtagcaaacagcaagacacagttaccatcccatctgaagaacatagctactaccagaaaccatcatcatcatcatcatcatgacatttaatcattacaccaaatccatttaggtgattacattactcttatttttcagaagaggaaactaggacttagagatattaacaatcttttccaaggttagatatatattgaatatcagaactggtgattttaaggtctatttactttcctacattatgggtacacttgctagagtttagtattctgggttgcctgtggacattgtacaaggatgtgtgaaaataaattaaaactacctaaatg

SEQ ID NO: 642832 - DNA, 609 bp, Homo sapiens
atgcttggggccttgtgggacatcttctccatatcaaatccattaaatcattggcccagactccatttgtctttaacaggaaggaatagctcttggggtgattcaaggtgaaaccttatccatttcttccctctctctcattgacgccgtgtatgtgcaaggtggtgaggcagccgaaattaggactatagagtccttcatgttcacagaacaagtgctgcaaatgggtgtgagtcagccttgagctcaatcgagagtaaacagacaaatttacattcatatatggatttagacatttgtcaaatatttgctaaaagagcatttcacttgtckaaggaaggcatagccttaatatttttctttctttctaaaggactcgtttcacccacgtgcttgatgaaagtttaaatataaaatgcctgagatgaaaatgtatattaatatttttctgtctttccaggtagatctgctgacctccttcttgtgctaaatctattaacaagcaaataaagctgaggtccttagatcagtactatagccaagagatactaatagtacccatcaaaatcagatgttaagcctgtccagagagctcctggcaacctgaga

SEQ ID NO: 642833 - DNA, 551 bp, Homo sapiens
ctgatcaacagcagcagctatagattctccctcatttaaacttgaattatcttttattttatttatttttttattatttatttatttaattattattatactttaagttttagggtacatgtgcacaacgtgcaggtttgttacatatgtatacatgtgccatgttggtgtgctgcacccattaactggtcatttagcattaggtatatctcctaatgttatccctcccccctccccccaccccacaacagtccccagtgtgtgatgttccccttcctgtgtccatgtgttctcattgttcaattcccacctatgagtgagaacatgcggtgtttggtttttttgtccttgcratagttcgctgagaatgagttcatgtcctttgtagagacatggatgaaactggaaaccattttatttatttaaaaattatatttattcatttctttcattttaagatgggaatgtgaatatagggcattttcttttaagattaataaataacatctaattgacacagtcttagaaaacattattcccctataccctga

SEQ ID NO: 642834 - DNA, 551 bp, Homo sapiens
ctgatcaacagcagcagctatagattctccctcatttaaacttgaattatcttttattttatttatttttttattatttatttatttaattattattatactttaagttttagggtacatgtgcacaacgtgcaggtttgttacatatgtatacatgtgccatgttggtgtgctgcacccattaactggtcatttagcattaggtatatctcctaatgttatccctcccccctccccccaccccacaacagtccccagtgtgtgatgttccccttcctgtgtccatgtgttctcattgttcaattcccacctatgagtgagaacatgcggtgtttggtttttttgtccttgcgatagttcrctgagaatgagttcatgtcctttgtagagacatggatgaaactggaaaccattttatttatttaaaaattatatttattcatttctttcattttaagatgggaatgtgaatatagggcattttcttttaagattaataaataacatctaattgacacagtcttagaaaacattattcccctataccctga

SEQ ID NO: 642835 - DNA, 555 bp, Homo sapiens
cctgtcttgtcacacagaaatatgatccaaacataaatcagatccattaattattggaaatgaacaattaccacaaatacctgcatttactatatttgttatatttcatattcttattaatttgtycagttattgtttataattgttcttatatcaaattatttttaaagcaaaacaatttattacgagggtttctgctatttgacacttcagatcagtaaatgaagcacctactagcagtttgttactgttgttcaaactttatagctctgtttagctcagttttctattcagtgtttgtttacttgtacagatgcaaatgctcactttattcttcctaaaatatgtgtggaatacaaatgctctcagattgaatccctctttgaaccacacatttgaatattttctgcttaatatttgctaatgcccatgaaaagaaatttgattgactgtaaaaggacatatcaaggaaaactcatatctcagaatactaaaatgaagtacaatgactatctctacaaagcaccaaaaacatccagttgaaatgtgaacata

SEQ ID NO: 642836 - DNA, 555 bp, Homo sapiens
cctgtcttgtcacacagaaatatgatccaaacataaatcagatccattaattattggaaatgaacaattaccacaaatacctgcatttactatatttgttatatttcatattcttattaatttgtccagttattgtttataattgttcttatatcaaattatttttaaagcaaaacaatttattacgagggtttctgctatttgacacttcagatcagtaaatgaagcacctactagcagtttgttactgttgttcaaactttatagctctgtttagctcagttttctattcagtgtttgtttacttgtacagatgcaaatgctcactttattcttcctaaaatatgtgtggaatacaaatgctctcagattgaatycctctttgaaccacacatttgaatattttctgcttaatatttgctaatgcccatgaaaagaaatttgattgactgtaaaaggacatatcaaggaaaactcatatctcagaatactaaaatgaagtacaatgactatctctacaaagcaccaaaaacatccagttgaaatgtgaacata

SEQ ID NO: 642837 - DNA, 561 bp, Homo sapiens
ttgttcatttattttcactctttttttctctaaacttttcttattgctttatttcattaatttgatctgcaatcactgatatcctttcttccactttagaatcaactgttgaagcttgtgtatgcgtcacaaagttcttgtgccatggttttcagctccatgaggtcatttaaggtcttctctacactgttcatwctggttggccatttgtctaaccttttttcaaggtttttagcttccttgtcatgggttagaacatgcttccttaggttggagaagtttgttattaccagccttctgaagcctacttctgtcagctcatcaaattcattctccatccagctttgttccattgctggcgaggagctgcaatcgtttggaggagaagacgcactctaatttttagaattttcagcttttctgctctggtttctacccatctttgtggttttatctaactttggtctttgatgttggtgacctaccgatggggtttttgagtgaatgtcctttttgttgatgttgatgctattcctttctgtttgttagttttccttctaa

SEQ ID NO: 642838 - DNA, 625 bp, Homo sapiens
cttagtttgtgtttttccagtacaattcaacattgtaatggaagacctaaccagtagcataaaktaggaagaagaattaaacatcaggcatattggaaaggaagtaataaaactatcttcatttgtagataatatgattaagttgaaaggcctaaggtgtctaccaaaaagcagctgaaaaaatatgagttaataaagattgctggacacaaagtgaacatacaaaaataagtttttccattaccaaactagaaatggttattttttaaataattgcactcacaagaccatcaaaaatatgaaataaagagaaatttaacaaaatatatggaatacctacatgctgcaaatttaaaacattgtggagataaattttaaaacatctaaatagtggaaagataatgttcatagatgggaagactgaaccgtaagatgtcaattctctccaaatctatagattcaatgcaataccaactaaaatcagagcaggtcgggtttttttttttttttttttttgtaaaaattgacaaacggattataaaattcatacatagatgcaaaaggcatagaataccaaagtaatttttaaaaagaaaaacaaagagaatttacactatttgatttc

SEQ ID NO: 642839 - DNA, 644 bp, Homo sapiens
gatgtgtcattttaactctaaagagcaaatcatactttgagaacttcaggaaataatatactttttagcacaaagggctctgactcccatgacagaagagaatttactatgatggttacacaaatctcttttctgtctaaaagtttttgtaccagcttttcctaggctcttatccttctcacaaatcaggactcagttcaaatatctctatcttggtgacactttccttgacttccctacctaattagtcccactctcctcctctgacaatatcctgtttctgcatggaaatactttacattttgtagttgcttgttaagtatatgtgttactaaactgcatcctcctgaggacaggrattgtggtttgctcattcagctcctaacaatgcctagtatacagtaagcactgattaataatctgttcaatgactagcttgaggaatggatgcagatttagcaattttaattggctatcgtcagagcaatgtcctcttttagctcctttgatacttggagcattgaacatagaattgaaaattttggatctagtcccaattccttgactatctgtgagtcttaaatatagtgaagcatatatctagttcacctacctagttaagtggtagagccaggatttgagac

SEQ ID NO: 642840 - DNA, 644 bp, Homo sapiens
gatgtgtcattttaactctaaagagcaaatcatactttgagaacttcaggaaataatatactttttagcacaaagggctctgactcccatgacagaagagaatttactatgatggttacacaaatctcttttctgtctaaaagtttttgtaccagcttttcctaggctcttatccttctcacaaatcaggactcagttcaaatatctctatcttggtgacactttccttgacttccctacctaattagtcccactctcctcctctgacaatatcctgtttctgcatggaaatactttacattttgtagttgcttgttaagtatatgtgttactaaactgcatcctcctgaggacagggattgtggtttgctcattcagctcctaacaatgcctagtatacagtaagcactgattaataatctgttcaatgactagcttgaggaatggatgcagatttagcaattttaattggctatcktcagagcaatgtcctcttttagctcctttgatacttggagcattgaacatagaattgaaaattttggatctagtcccaattccttgactatctgtgagtcttaaatatagtgaagcatatatctagttcacctacctagttaagtggtagagccaggatttgagac

SEQ ID NO: 642841 - DNA, 604 bp, Homo sapiens
tcactcccatggctgtccaatgctccactttataaataactcacatttcttgtcctttcactgttgatagacaattttgttgtatacagattttacaaatcgtgctgctatgaataatattttcatatagtttggcacacacatacatgcatttctattggtttagaactaagagtgctattgctggatcataggtgagtagatgattggcttagtctctcaaaaascaagtttctagtagtaaacaaacagtagaggagggtgaatctcttacttagaaattattcagataataaatgaagaaggaatgagagactgagactataataactcttttgcaacccatcatgaattaacagatttagccattgaatagcaatggcaattaacaacacaataaaagaaaaaactaatgtgaggttcttcctcttgatggaagaacacaatacagcaccatcaaacaagtccaagtgaaaaagaaaccaagcctgaatagaagctgatctccatagccaattaccaatttagaggcaatacagataatagaaatgcatattaaactatgccttggggagcaatcagcaaaatgcacactatgggaagc

SEQ ID NO: 642842 - DNA, 604 bp, Homo sapiens
tcactcccatggctgtccaatgctccactttataaataactcacatttcttgtcctttcactgttgatagacaattttgttgtatacagattttacaaatcgtgctgctatgaataatattttcatatagtttggcacacacatacatgcatttctattggtttagaactaagagtgctattgctggatcataggtgagtagatgattggcttagtctctcaaaaagcaagtttctagtagtaaacaaacagtagaggagggtgaatctcttacttagaaattattcagataataaatgaagaaggaatgagagactgagactataataactcttttgcaacccatcatgaattaacagatttagccattgaatagcaatggcaattaacaacacaataaaagaaaaaactaatgtgaggttcttcctcttgatggaagaacacaatacagcaccatcaaacaagtccaagtgaaaaagaaaccaagcctgaatagaagctgatctccatagccaattaccaatttagaggcaatacagataatagaaatrcatattaaactatgccttggggagcaatcagcaaaatgcacactatgggaagc

SEQ ID NO: 642843 - DNA, 551 bp, Homo sapiens
ctaaccactacaagcaggagatcaagccttcatattggccactatatagacattgagtagttttattttattaaaatattgaagatttccttaagttcacaactttgttcatgctttttcacacatgcttcttgctttccctttaaaaaggaaatataaattaataattaggaaagctagctcaaaacctatattaaaataagtatggggaaatggctttaaaatatcagataaagtttacaaaaatctataggcaaattttctccatagaagcaaagcagctactcctagcagkacaaatgaggcccctctaagtaggtgcatgtaagtgggtattatacatgcctaaacatctactaaagagaaagcccattaagaaaatgatgtctggaggcacctacatctttttcccctttttcaagtacagcctagacatcttatcttctgcagcttttaacacaatctctgcatttccattccatctggcggggctggttgaagggaagatgtgagaatatgctgaaggagaaatctacctctccttctagttg

SEQ ID NO: 642844 - DNA, 426 bp, Homo sapiens
tgaattcatctttgtactatgctctgtctgcgctattgcacactcttggtaagatgctggctgcatggcaagttgtaggttcacactgcctagcagatatgttggctgacctcataccatgcagtctataccagagactagctttagcaacttcctttggaattttaagaccattatctctagatgctgaatattgagaatttactagtaaatttagtgcttctaggacgtagtggggagggataaggaaaaaaataagtagattattggggatagtgaatgataaatctattactaccgagatttgagttatcttttcgattcacagagtactcagggagtctctcaggttgctcctgcagagccagttgcagtagcacagmcccaagctacccagccgaccactttggcttcctctgtagacag

SEQ ID NO: 642845 - DNA, 537 bp, Homo sapiens
aactagccaggcatggtagtgtgtgcctgtagtctcagctacttaggaggctgaggtgagaggattgcttgagcccaagagtttgaggctgcagtgagctatgatgttgccactgcatcccagcctgggcaacataccaagacccttctctacaaaaaaaatgtaaaaaaaaaaaaaaaaaaaaaaagaattagcaggacatggtggtgtgcacttacagtcccagctactcaggaggctgaggcaagaggatcgcttgagcccaggagatggaggttgcagtgagctgtgatggcaccactgcactccagcctggggaacagagtgagactctgtctcaaaaaaaaaaattaacacagaattatcatataaaattaccatatgaggggccaggtgcagtgactcacgcctgtaatcccagctamtcaaggaggctgaggcagaattgcttgaacccaggaggcagaggttgcagtgagctgagattgtaccactgtattccagacttggtgacacagtgagactccgtcttaaaaa

SEQ ID NO: 642846 - DNA, 417 bp, Homo sapiens
gctcagattggcacagaattcttttgtgaaatatcagtgccacagattgtaacagatagcttcatgcacactctgcattttattggtttgtttggaaaatgttggccattgaattattcatagatttatttcaaatagtttggaaattgttgtacytttgaaaacatgctgttcctgtagttttttgatgagagttatagttgttatatatacataaagataattttcttttcatttttgagacaattctttttatcctaaatattttatcatctttaaatttgtttctgtattattatatgtgctcctgaagcgagcactctttttatctatgatacttccataataatctcttctatttatagctattggtagttcccctaaattctgacgatagaaatttttatttgctgttta

SEQ ID NO: 642847 - DNA, 317 bp, Homo sapiens
aaatgttgctttgatgcagaattcagtttgggcaacttgtgtagaaggatggtcagaaagtaattttctgtttgttggggtgtgtgtctgtgtgtgtgtgtgtatgtatgtatgtatgtatgtatatgtatatgtgtatgtaaagaacacaggttctgcaattagtccagtgttgttgtkctgggaatttaaatgttttcattctcaaagcagttctgctgagtagaaattttcacgttaccccattatacagactgaaaacctgaagcttgagtagtttgcccaaggtcacatagcaaggaagatcacaaggcaaa

SEQ ID NO: 642848 - DNA, 563 bp, Homo sapiens
agaggttctattttctgaagcctgaatctgaggccagaagtacccagcattgtaacgagggctatgggagttagaagccaggaactatgggcgaaaaccaatatatatggataataatacacacacacacacacacacacataataatatcacactcaagcaccaggaagatgtctaaagagaggatgcatgggactagtgcaagtgtgtcaagatttctacaaacactgaaaatgtctttggtggctgataaggcaggctctcagaggcttctgactaagctgcttacctatatcctcgaagctaactggacctttgtttcttacaagtgatacatctctgagcttgacagttgcatgcaaaccagtgaactggtccacrgggtattagaatcacaaataaatactctgtccacacatcacaaaactgaaaagcttaattggcactatcataaaaatcacaggctttgattgtaacaccctggcagtgtatttgtgaaaagctgagtacaatagcaacttttaattaggcaacctgtttttgtatgacaccaaagcatttta

SEQ ID NO: 642849 - DNA, 558 bp, Homo sapiens
atatatttaatttatttgctacaccaaatgccaggacaatctctaagtgaattcaagacataactcttttttcaaaaaaactatgcaaatattaaaagaaaacaagttaatgtttttataatctatgaatatggtaaagatggataacattgactatcaaattaatttttaatgcgtaataaaactatgagaaaatttaaaagtgrgaagaaactacttgtaactcacataatagactagcacttctaacacatagggaacttctaaaacaaaacccaaaatattaataggaaaatgggcaaaacagttaaacttacagttcatacataaggagaatcagtcttttttttttttacagttgtaggcaaaaaacttttatttttcatttatttgtaaaatttacccctaatttattcataattcatttaactgctaagggcattaatgtgtacaacgccatgggagaaaccagtatattcagaatttctcctgaaatttgaccagaagttatgggcatccctcccctgggaaggaggcaggcagaaaagtttggaatct

SEQ ID NO: 642850 - DNA, 574 bp, Homo sapiens
aaaaaaattctgaggctgaaaagtacaataactaattaaaaagttactttttacttagggttccaatagaagatttgagcagctggaaaaaagaatcagtgaacttgatagatcaartgaaatgattcagtctgaagagcaggaaaatgaaagaatgacaacaaaaaagaatagagcctaaagacctgtgtaacaacatcaagaatgcctacatacagaatcctggtggggagtgaggggcaggaagactatttgaagaaatgtgtttgaaagcttcccaaatttcactaaaaacaaatatatacattcaaaaagctcagtgaacttcatcaaggaaatatacaaagatattcacaccaagacacactatgtttcaaattgtcaaaaggcaaagcgaatgtttgaaagcagcaagagaaaggcaacgcgtcatttacaaaggatcctcaataagtttgacagcagatagtgcattataatccatggatgccagaagagcttaggaaaaaggcaatgcatcatttacaaaggatcctcagtaagtttgacagcagagagctcatgataaaccatg

SEQ ID NO: 642851 - DNA, 574 bp, Homo sapiens
aaaaaaattctgaggctgaaaagtacaataactaattaaaaagttactttttacttagggttccaatagaagatttgagcagctggaaaaaagaatcagtgaacttgatagatcaagtgaaatgattcagtctgaagagcaggaaaatgaaagaatgacaacaaaaaagaatagagcctaaagacctgtgtaacaacatcaagaatgcctacatacagaatcctggtggggagtgaggggcaggaagactatttgaagaaatgtgtttgaaagcttcccaaatttcactaaaaacaaatatatacattcaaaaagctcagtgaacttcatcaaggaaatatacaaagatattcacaccaagacacactatgtttcaaattgtcaaaaggcaaagcgaatgtttgaaagcagcaagagaaaggcaacgcgtcatttacaaaggatcctcaataagtttgacagcagatagtgcattataakccatggatgccagaagagcttaggaaaaaggcaatgcatcatttacaaaggatcctcagtaagtttgacagcagagagctcatgataaaccatg

SEQ ID NO: 642852 - DNA, 574 bp, Homo sapiens
aaaaaaattctgaggctgaaaagtacaataactaattaaaaagttactttttacttagggttccaatagaagatttgagcagctggaaaaaagaatcagtgaacttgatagatcaagtgaaatgattcagtctgaagagcaggaaaatgaaagaatgacaacaaaaaagaatagagcctaaagacctgtgtaacaacatcaagaatgcctacatacagaatcctggtggggagtgaggggcaggaagactatttgaagaaatgtgtttgaaagcttcccaaatttcactaaaaacaaatatatacattcaaaaagctcagtgaacttcatcaaggaaatatacaaagatattcacaccaagacacactatgtttcaaattgtcaaaaggcaaagcgaatgtttgaaagcagcaagagaaaggcaacgcgtcatttacaaaggatcctcaataagtttgacagcagatagtgcattataatccatggatgccagaagagcttaggaaaaaggcaatgcrtcatttacaaaggatcctcagtaagtttgacagcagagagctcatgataaaccatg

SEQ ID NO: 642853 - DNA, 526 bp, Homo sapiens
cacatttttcaacaaatatattgtatgggaaagaaaactttgaaaagaaacctgtatgttagaagggattttaaaaacacgacaaatgaaaacaaatgcgcaagactaaatcatagtgtcttggaatgcatgcakgaaggacacagccgtgaaaatgcaaggacgcctctactggaacagtcacgtttatcgtcacttttcaggagaaaggtggctgcaactgaggagagtcacatgcaggacttcagggctggcaaagtcctatatcttgacttatgtgatgattacagggatgtttacaaaaatcaaactataagtttgttttgtgccatgttttgtattgtgtgtgtgtgttttgtttttcaacttaaaaatacataaaatcaaaaccaaggcttcattatcaagtagcacaaagtctccaatctataacctcctttgtctggatatctgcatttaactaccattgccagagctaatcctgacaatgcattcatatttttaacactgaaacacagtaaacagg

SEQ ID NO: 642854 - DNA, 429 bp, Homo sapiens
ccaaaacaatctatcgttttgcctacgtacttatcaacttcctcatagcaaactgggagaaaaaagcaatggaatgaataaaatgatagccacaaaaatcaaggtgggagaaatacttattatatgtccataaaaaattttaattaatgcaaagtattaacaccaatgattgcagtaatgcagatcttacaaatgatagttttagtctgaacaggactatccaaaagttaattttctatagtaacagtttttaaataaaatwtcaattcctgaaacacataaaatggtccatgagtatacaacgagtgaaaaaaaacaaattcagagcaaagataaattaagaagtatctaatattcaaacatagtcaaagagagggagatttctggataatcacttaagcccatggttaaacataaatgcaaatatgt

SEQ ID NO: 642855 - DNA, 631 bp, Homo sapiens
ttattttgaatttatatttttatatggtatgaaataagggcctaagatcaatcttgtggacattcagttttctcaacaccattttttgaagagactgttctttccccatgtgtgttcctggcacctttgttgaaagtcaattgactataatatgtagatttatttatgggctctttattctgtgtaattggtctatgtgtctgcgtttatgccagtaccatggtgtttcgattgctatagctatgtagtataatttgaagtcaggtaatgtgatatctcctgccttgcttttttcgatcaagattattttggcttttcagagttttttgtgattccatacagatttgagagttgtttttctatttctgtgggaaaatgtcataggaattttgatagagattgcattcaatatgtacatcactttggatagtatggacatttcaaacatattactttttccaatccatgaacatgagatatctttccatttatttgtggcttcttcaatygttttcatcaatgttttgtagttttcagtgtaaagatcattcacctctttgtttaaatttacatctaagtattttttgttgctattataaataggattgttttcttgatttctttttttgta

SEQ ID NO: 642856 - DNA, 631 bp, Homo sapiens
ttattttgaatttatatttttatatggtatgaaataagggcctaagatcaatcttgtggacattcagttttctcaacaccattttttgaagagactgttctttccccatgtgtgttcctggcacctttgttgaaagtcaattgactataatatgtagatttatttatgggctctttattctgtgtaattggtctatgtgtctgcgtttatgccagtaccatggtgtttcgattgctatagctatgtagtataatttgaagtcaggtaatgtgatatctcctgccttgcttttttcgatcaagattattttggcttttcagagttttttgtgattccatacagatttgagagttgtttttctatttctgtgggaaaatgtcataggaattttgatagagattgcattcaatatgtacatcactttggatagtatggacatttcaaacatattactttttccaatccatgaacatgagatatctttccatttatttgtggcttcttcaattgytttcatcaatgttttgtagttttcagtgtaaagatcattcacctctttgtttaaatttacatctaagtattttttgttgctattataaataggattgttttcttgatttctttttttgta

SEQ ID NO: 642857 - DNA, 602 bp, Homo sapiens
ggcacttaacatttttccatctctcccctcrtatattcagaccatcatatatctgttgtaacatttttcatgtcctggctaccacctttggcctttggtggtctatgtgacagttgccatagtctgagaatccaaggataatgtgttttctttttctgaaattatttttgtaccttttacatatgctgcaaaagtttcattttaagaaacaacttgaggtttaaattcagcttaatttttccatctggtttatcttcatgtgtttagaaaatgtttttatgttttagaaatccaggttataagaagaaatgactagttagttagttcaagagatttccctcattctctaaaaaaggctagttattaacacaaacatgatcttattaggggaattcaggtcttttatgatttaatcttagggtacagatggcaagcgtaagtgcagtaaataccagaaccatgcagaattcttggttcaggttcttggaattcatcacaatttattttgtcaacatttgtcctattctacacttggcatcaagctgagtgagttgtgtccccagatgtcaagaaggaacatgcaatctcatgagagtgagagg

SEQ ID NO: 642858 - DNA, 602 bp, Homo sapiens
ggcacttaacatttttccatctctcccctcgtatattcagaccatcatatatctgttgtaacatttttcatgtcctggctaccacctttggcctttggtggtctatgtgacagttgccatagtctgagaatccaaggataatgtgttttctttttctgaaattatttttgtaccttttacatatgctgcaaaagtttcattttaagaaacaacttgaggtttaaattcagcttaatttttccatctggtttatcttcatgtgtttagaaaatgtttttatgttttagaaatccaggttataagaagaaatgactagttagttagttcaagagatttccctcattctctaaaaaaggctagttattaacacaaacatgatcttattaggggaattcaggtcttttatgatttaatcttagggtacagatggcaagcgtaagtgcagtaaataccagaaccatgcagaattcttggttcaggttcttggaattcatcacaatttattttgtcaacatttgtcctattctacacttggcatcaagctgagtgarttgtgtccccagatgtcaagaaggaacatgcaatctcatgagagtgagagg

SEQ ID NO: 642859 - DNA, 675 bp, Homo sapiens
ttttctattttttgtgaagactgttacttatagttttataaggattatgttgaatctgtagattgttttgggtagtatggacatgttaacagtgttgattcttccaattcatgaacatggaatatcttaccaattttgtgtcctcttcagtttcttgcatcaatgttttatgatattcattatacagctctttcacttctttggtgaaatttattcctagatattttatttgtaactattgtaaatgaggttaccttcctgagttctttcttatatttctattggcctataaaagtgctactgatttctgtatattgattttgtatcctgcaactttatttgatttgttatcagttctaatagwtttttttggtggagtctttgagttttttcaaatataagataatcatcgtaaacaaggataatttgacttcttcctttctaatctggatgctttttatttctttctcttgtctgattgctctagtgaggaagacttctagtactatgtagaataacagtgttgaaagtgggcgaccttgtcttgaaacatatcttaaaggaaaagctttcagtttttccccatgcagtatgatgccagctgtgggtctgttttatacagcttttattgtgttgaggcatgttccttctaaacccagtttttggggggttttt

SEQ ID NO: 642860 - DNA, 365 bp, Homo sapiens
ccgcccgcctcggcctcccaacagattcatatattttttaaaacactgattagtcaggcaacaatactggggaggggtctcctcattcccagtgatgcaaaccccactgcacggctccggggttgcaagggctacaragcctaaaggctctaacttatgatttcattactttatttgtattgtgagacagggtcctgctctgtcgcccaggctggagagcagttgtgcacttatagctcactgaagcctcgaccttctgaatttaagccatcttcctgcctcagctccccactggctggtaccacagttgagtgccaccatacctggctattttttaattttttgtagagtgaggggtcttgcta

SEQ ID NO: 642861 - DNA, 365 bp, Homo sapiens
ccgcccgcctcggcctcccaacagattcatatattttttaaaacactgattagtcaggcaacaatactggggaggggtctcctcattcccagtgatgcaaaccccactgcacggctccggggttgcaagggctacaaagccwaaaggctctaacttatgatttcattactttatttgtattgtgagacagggtcctgctctgtcgcccaggctggagagcagttgtgcacttatagctcactgaagcctcgaccttctgaatttaagccatcttcctgcctcagctccccactggctggtaccacagttgagtgccaccatacctggctattttttaattttttgtagagtgaggggtcttgcta

SEQ ID NO: 642862 - DNA, 649 bp, Homo sapiens
ttaccattatgtaatatacgtgtgtggaaatatatatcctgcaaatatataaatttacattttttaaaagcatggtgagaaattataggttgaatggcaatatactgaagagttttaacaaatagctttggatgtgagtgtatggataaattttctgctttaaatgtgtcttttaatggacacatcctccttttgtgtgtatatatgtgtagtttataaacatccagaaacatatgtggatagataatttaacactctttcagatttaaacaaaaaggtatctgctaaaaccatgtcggtagttgttttcctgaaawgatattagaggttaatgaaaatatccttttatccacaaaaataccatttgttcctaaaatcccaccataagagatacttctagcttaagcaacacaggagttttgaagcctgtgaaaaatacagttctccctgaggagagaacatattccttgttggttctctacctgacctggtgtgagaaatataccttatctcaaagaaatgcctttgagatatggaaggctgtggcttggagtctcatcaaattagataatggagacacggtctgctgacttccctttccaacccagtcccaatgtcatctaggacagcttggagctatcactaagtc

SEQ ID NO: 642863 - DNA, 649 bp, Homo sapiens
ttaccattatgtaatatacgtgtgtggaaatatatatcctgcaaatatataaatttacattttttaaaagcatggtgagaaattataggttgaatggcaatatactgaagagttttaacaaatagctttggatgtgagtgtatggataaattttctgctttaaatgtgtcttttaatggacacatcctccttttgtgtgtatatatgtgtagtttataaacatccagaaacatatgtggatagataatttaacactctttcagatttaaacaaaaaggtatctgctaaaaccatgtcggtagttgttttcctgaaatgatattagaggttaatgaaaatatccttttatccacaaaaataccatttgttcctaaaatcccaccataagagatacttctagcttaagcaacacaggagttttgaagcctgtgaaaaatacagttctcyctgaggagagaacatattccttgttggttctctacctgacctggtgtgagaaatataccttatctcaaagaaatgcctttgagatatggaaggctgtggcttggagtctcatcaaattagataatggagacacggtctgctgacttccctttccaacccagtcccaatgtcatctaggacagcttggagctatcactaagtc

SEQ ID NO: 642864 - DNA, 599 bp, Homo sapiens
gacttccctttccaacccagtcccaatgtcatctaggacagcttggagctatcactaagtctatgtgtgcagtaaagactgtgacttttagtgggagctgagtaacaatttgtgagtaagtgaatgaaggaataaatgaccrgcaataaagtccacccttggctctagagcacacactttctccagcagtaccaccttctctcagaatgttgccagcaacctcaccttgaagctactgtggcctcccaaactccacattgcaatgcatttttttgatgccatgcatcatgtttattttcactccaacttgtaactggattgcaattggatgttcttgcattgccccccaaaaataaaatgtttaaaagcaatgttctaggagttcaagataagcctgggcaacaagacgaaaccgcatctctacaaaaaaatatatgaaaaattagccaggtatggtggtgcatgcctgtagttccagctacctggaatgctgagtggaaggatcgcctgagcccaggaagttgaggctgcagtgagctgtgattgtgctactgcactccagcctgaacaacagaatgagaccctgtctcagaaaaata

SEQ ID NO: 642865 - DNA, 522 bp, Homo sapiens
tgagcaactacagaaaacaaaagcaaacagggcagcagaagaagcctttgtaaatgacattgaccagttcttcccaggcactgagtgggaaagtgtggcctggctgtgtaactttaaccccaagtccagaaggcaggctaaagacatctcccagaggtgctcagtcctcatctccctcaagcaggccccgctggtgcactgaagagccaccctgtggaaacatgtgcaggaaacatctgcaatatcttaatcctactcagcaaagttcttcacagttattggattaattatgttgagttattttggaccaaacctttttgtctttagagttgatcattgtttgtgattgcatgtttccttcaactgtgttctacctggcattcagagagtagggggagtaggaagaggaagagagagawgcctcccaacagtagcctcgacctatgcttttgtgcattattctgagaataaatttctgtttcaaactattaaaaacaaaacaaaacaggcaaaggatatgat

SEQ ID NO: 642866 - DNA, 635 bp, Homo sapiens
cctgtctgttggctgccttgcagaagctggctggaaattggaccacgtgtgtgtttcccccctctttccctacatatttcctttttttgcccagcatattttcctagagttatgattcacatatttaaaattggagcagaaaaaggagggaaagaggtgattcatgttctttccccattcctagcaatgcttagcctctggaatctagattaacaatgtgatgtgctgagagcctgaaggaaaatgaaagagagaggaggaagaaaaggaggaggacaaattgaagaagatggagctcactgcaaattatatttccagttcccagacttagaaggacattgcaactgaaattgcttgtgcttgtaaaattctatcttgctcaaagaacctsttttatagatgaaatcaggtttaccagaggaatattgtgtcttgaataaatcagttccctaatgaaatataccatcaagcatgaaaaaaacctaaagggtaagaagtattaatgtgctgattaagaggaatgatgataaggatgtcagcttatggaaagtaacactgtgtctatatacacagatggctttgaaagatatcaactcttcctacagttggaccacaaccaaccagttacaaactgc

SEQ ID NO: 642867 - DNA, 547 bp, Homo sapiens
ggacatcatggtctcggtctcttgggctcattatctgcctgcctcggcctcccgaagtgctgggattacaggtgtgagccaccgtgcctggcctctagtgacctcattttaacttgatcacctctgtaaagactctggttccaataaggtcacctctaaggtctggagggtcatggcttcaatacatgaattaggggtggggggcacaccatgcagcccataatactagcgtatctggttatgttaaacttgctatagccacagtctcgctgacttggattatggtaccatgggaagggcccttaaagatcatcttatctggttgggctcaatggctcaygcgtgtaattccagcactttgagaggccaaggcaagaggatcgcttgtgaccaagagttcaagaccagtctgggcaacagagcaagatgctatatctactacaggcatgcacctgtagtctcagctacttgggaggctgagagaagaggattgcttgagcccaggaggcaacagagagctgattgtaccactgcaccccagccaagg

SEQ ID NO: 642868 - DNA, 547 bp, Homo sapiens
ggacatcatggtctcggtctcttgggctcattatctgcctgcctcggcctcccgaagtgctgggattacaggtgtgagccaccgtgcctggcctctagtgacctcattttaacttgatcacctctgtaaagactctggttccaataaggtcacctctaaggtctggagggtcatggcttcaatacatgaattaggggtggggggcacaccatgcagcccataatactagcgtatctggttatgttaaacttgctatagccacagtctcgctgacttggattatggtaccatgggaagggcccttaaagatcatcttatctggttgggctcaatggctcacgygtgtaattccagcactttgagaggccaaggcaagaggatcgcttgtgaccaagagttcaagaccagtctgggcaacagagcaagatgctatatctactacaggcatgcacctgtagtctcagctacttgggaggctgagagaagaggattgcttgagcccaggaggcaacagagagctgattgtaccactgcaccccagccaagg

SEQ ID NO: 642869 - DNA, 547 bp, Homo sapiens
ggacatcatggtctcggtctcttgggctcattatctgcctgcctcggcctcccgaagtgctgggattacaggtgtgagccaccgtgcctggcctctagtgacctcattttaacttgatcacctctgtaaagactctggttccaataaggtcacctctaaggtctggagggtcatggcttcaatacatgaattaggggtggggggcacaccatgcagcccataatactagcgtatctggttatgttaaacttgctatagccacagtctcgctgacttggattatggtaccatgggaagggcccttaaagatcatcttatctggttgggctcaatggctcacgcgtgtaattccagcactytgagaggccaaggcaagaggatcgcttgtgaccaagagttcaagaccagtctgggcaacagagcaagatgctatatctactacaggcatgcacctgtagtctcagctacttgggaggctgagagaagaggattgcttgagcccaggaggcaacagagagctgattgtaccactgcaccccagccaagg

SEQ ID NO: 642870 - DNA, 547 bp, Homo sapiens
ggacatcatggtctcggtctcttgggctcattatctgcctgcctcggcctcccgaagtgctgggattacaggtgtgagccaccgtgcctggcctctagtgacctcattttaacttgatcacctctgtaaagactctggttccaataaggtcacctctaaggtctggagggtcatggcttcaatacatgaattaggggtggggggcacaccatgcagcccataatactagcgtatctggttatgttaaacttgctatagccacagtctcgctgacttggattatggtaccatgggaagggcccttaaagatcatcttatctggttgggctcaatggctcacgcgtgtaattccagcactttgagaggccaaggcaagaggatcgcttgtgaccaagagttcaagaccagtctgggcaacagagcaagatgctatatctactacaggcatgcacctgtagtctcagctacttgggaggstgagagaagaggattgcttgagcccaggaggcaacagagagctgattgtaccactgcaccccagccaagg

SEQ ID NO: 642871 - DNA, 561 bp, Homo sapiens
gagatacacggcagttgtaaagtggggcatggtaaacatcacttatcatgataaatatcacttcctgttgcacagtaccatgtgaccaccccctaaattctcaagagtgactcaaagtcaaaatctggcctcacttgccagtgaaaggacatgccatccctccccttcctctggcaacaatttytgctataggagaaagcttacaagggtgggttatcataatcacaggcactatgacagggagaagacaacattcagaactcatttatagaacattttcaggtaaaacaccgcttgaaaatactgcccagcccaatagccaagttcagcaatggaggcgactgtagtttaactcatgcctgtatcagatgaagaaaaaaaaaaaaaaaaaccacagacgcattattcaatccaaccaagctgtctgtctagaagatgcttcaggactgattaatgacagaaagcaaagaggaaccacacagaccttggctgtcaaggtcaaatgcacaagcagacagaatcgggagaggctgggaggctgcccgatctggatttagactg

SEQ ID NO: 642872 - DNA, 561 bp, Homo sapiens
gagatacacggcagttgtaaagtggggcatggtaaacatcacttatcatgataaatatcacttcctgttgcacagtaccatgtgaccaccccctaaattctcaagagtgactcaaagtcaaaatctggcctcacttgccagtgaaaggacatgccatccctccccttcctctggcaacaatttctgctataggagaaagcttacaagggtgggttatcataatcacaggcactatgacagggagaagacaacattcagaactcatttatagaacattttcaggtaaaacaccgcttgaaaatactgcccagcccaatagccaagttcagcaatggaggygactgtagtttaactcatgcctgtatcagatgaagaaaaaaaaaaaaaaaaaccacagacgcattattcaatccaaccaagctgtctgtctagaagatgcttcaggactgattaatgacagaaagcaaagaggaaccacacagaccttggctgtcaaggtcaaatgcacaagcagacagaatcgggagaggctgggaggctgcccgatctggatttagactg

SEQ ID NO: 642873 - DNA, 538 bp, Homo sapiens
tgaattcacacatatacaaacatmgataacttcacaaaatgtttatctctttcactgaaatttcaatctaagacctcaaactatgaaactactacaagaaaacattggggaaaatctccaggacattagtctgggcaaagattttctttagcaatacccctcaagcacaggcaaccaaagcaaacatggacaattgggatcacatcaagtgaaaaagcttctacacaacaaaatatatgtttaaccatgtgaaaagacaaaccacagaaagggagaaaatatccatggaataatttttttaaaaaatatcatatattacttgtttagtggaatgtacgaattctaggagtcagagtgttctaacctcaaccacaactggagagagacaacaggtgaattaagactccaaataaatgcaaccaccagctgtcctttatagctacttccaatagcatcaggtgatgagttaaaatgcccccaacaacgagagcaggtgggacagccacgtccctgtggtttgagtgctcccgcacctaag

SEQ ID NO: 642874 - DNA, 538 bp, Homo sapiens
tgaattcacacatatacaaacatagataacttcacaaaatgtttatctctttcactgaaatttcaatctaagacctcaaactatgaaactactacaagaaaacattggggaaaatctccaggacattagtctgggcaaagattttctttagcaatacccctcaagcacaggcaaccaaagcaaacatggacaattgggatcacatcaagtgaaaaagcttctacacaacaaaatatatgtttaaccatgtgaaaagacaaaccacagaaagggagaaaatatccatggaataatttttttaaaaaatatcatatattacttgtttagtggaatgtacgaattctaggagtcagagtgttcwaacctcaaccacaactggagagagacaacaggtgaattaagactccaaataaatgcaaccaccagctgtcctttatagctacttccaatagcatcaggtgatgagttaaaatgcccccaacaacgagagcaggtgggacagccacgtccctgtggtttgagtgctcccgcacctaag

SEQ ID NO: 642875 - DNA, 538 bp, Homo sapiens
tgaattcacacatatacaaacatagataacttcacaaaatgtttatctctttcactgaaatttcaatctaagacctcaaactatgaaactactacaagaaaacattggggaaaatctccaggacattagtctgggcaaagattttctttagcaatacccctcaagcacaggcaaccaaagcaaacatggacaattgggatcacatcaagtgaaaaagcttctacacaacaaaatatatgtttaaccatgtgaaaagacaaaccacagaaagggagaaaatatccatggaataatttttttaaaaaatatcatatattacttgtttagtggaatgtacgaattctaggagtcagagtgttctaacctcaaccacaactggagagagacaacaggtgaattaagmctccaaataaatgcaaccaccagctgtcctttatagctacttccaatagcatcaggtgatgagttaaaatgcccccaacaacgagagcaggtgggacagccacgtccctgtggtttgagtgctcccgcacctaag

SEQ ID NO: 642876 - DNA, 559 bp, Homo sapiens
attgcttgaggccaggagtctgagagtagcttgggcaacatagcaagacccatctctacaacaagtacgtaaataaaaatttcatttggcatggtagcrtgcatctgtttttccagccacttgggaggctgagatgggaggaccacttgagcccaggatttcaggactgcagggaactataatcatgccactgcgctccagcctggacaacagcgtgagaacctatatcaggaaacaacatagttaagagaaaacagtgaaagatgatggctgaactaaagtgtaagagaaggtctttggaaactaggaacttcaggaactggtatgatttggtgggcctttgtgtgaatgttaaactcactgtaatcattgacaggaattggaatggacaggaagattgtgagaataaagggagtgggtcataaatttaggaaagtgtacttgatatgatattagaaagggacgaagaagaatctgtgacctcgctcaggccttgcagtatatggagtgtgagggaataagtggcctctccttgggtgggctgcaagagaagtagtga

SEQ ID NO: 642877 - DNA, 559 bp, Homo sapiens
attgcttgaggccaggagtctgagagtagcttgggcaacatagcaagacccatctctacaacaagtacgtaaataaaaatttcatttggcatggtagcgtgcatctgtttttccagccacttgggaggctgagatgggaggaccacttgagcccaggatttcaggactgcagggarctataatcatgccactgcgctccagcctggacaacagcgtgagaacctatatcaggaaacaacatagttaagagaaaacagtgaaagatgatggctgaactaaagtgtaagagaaggtctttggaaactaggaacttcaggaactggtatgatttggtgggcctttgtgtgaatgttaaactcactgtaatcattgacaggaattggaatggacaggaagattgtgagaataaagggagtgggtcataaatttaggaaagtgtacttgatatgatattagaaagggacgaagaagaatctgtgacctcgctcaggccttgcagtatatggagtgtgagggaataagtggcctctccttgggtgggctgcaagagaagtagtga

SEQ ID NO: 642878 - DNA, 559 bp, Homo sapiens
attgcttgaggccaggagtctgagagtagcttgggcaacatagcaagacccatctctacaacaagtacgtaaataaaaatttcatttggcatggtagcgtgcatctgtttttccagccacttgggaggctgagatgggaggaccacttgagcccaggatttcaggactgcagggaactataatcatgccactgcrctccagcctggacaacagcgtgagaacctatatcaggaaacaacatagttaagagaaaacagtgaaagatgatggctgaactaaagtgtaagagaaggtctttggaaactaggaacttcaggaactggtatgatttggtgggcctttgtgtgaatgttaaactcactgtaatcattgacaggaattggaatggacaggaagattgtgagaataaagggagtgggtcataaatttaggaaagtgtacttgatatgatattagaaagggacgaagaagaatctgtgacctcgctcaggccttgcagtatatggagtgtgagggaataagtggcctctccttgggtgggctgcaagagaagtagtga

SEQ ID NO: 642879 - DNA, 594 bp, Homo sapiens
cctgccacgattacaccatattgggggcccgctgtccccacacccctatcctttctcctcctgttgtgcctctctctgtgtatctggatgaatcctaaccataccacacacatgggtgggaactcagggtttaacactctttggctatttgacargcacattaaacaatttctacatgattgtacagcccctgaggagtgatgagtgtaaaaatatatttctctctttccttccttttatacgggatacaatgcttcatatagcaaacaggatgtctttgcctggatatgtgaagaacaagtgaggaaactggcaagtgctcaggagtgaaatgcttggaaagctgttttccaagacaacattgcattcagagacacaccaagggagtggggagaaggatcagtccacctctgtgggaagagcacttcatctctgatgtttcacattgtctgggcatagtgatgataaaaagcacaatgacttgtagacagctttatcactgttttgaaaactctgtagaaaacatatccccttcttgcctgcacccaggaaggatcactctctccaccctgctttggctatttgtgatgccac

SEQ ID NO: 642880 - DNA, 487 bp, Homo sapiens
aaaagataaaaaaaggtagacattggtctgtttccttacaatgattttctatgcactgggattttttaaatatacctgtaagcatagtatagttatcattttgtattctacatttttttatgaagcatattaaagccatattattgtacactcttcacaagcatcatttttattgttgcatgagtgtcatatgtacgtagctatttcctgatgttagagcgtgcacaatatattccatttttcacattagaaatcatgttgctataaaccatctccttaggatagattcttagaaattgagttactgaatcttaaaggatattaatattttgaaactctttatccacatggccaaattacttcytaagatgattttaacagagtacactgtctggcaatttcctgcctgtgtttgatatgcgtgtttgtgtgtagcgggtggggtagggcatgttgtttaacttgtgcaatgtgggagagcatggat

SEQ ID NO: 642881 - DNA, 598 bp, Homo sapiens
aacaggtttggaaatatatggctttattaaaaaaatgttgtttctgctcccagagtgctatgaagaggagttgtttttgtctacctcctaattcagcctgctccacattataatgattacaaagtccttgttttcaagtaatataacccctggaaactatcttaagctaaatagactattayacaggatggtctcataaagcctccagggaatactcagaactcagggacgggtggaaacaggaactgggagtatacctggagccagtttctccctctcttcctccttccctccctcctttcttctttttctccttctaactccctccctctttctctccccctccctccttcctttccctccctactttcattatctcttccttcctctgtctctccttctccctctccttcctccagaggcatccagtagaggccaggtgtgctactaaacgtccaggacaggccaccacaacaaagagttgtgcagccctaaatgccagtagtgctgagactgagaaacctcactactggcaatggggagccactcgaggtttttgagcagggaagtgtcaaaaggatgtgggtgtcgatgtgct

SEQ ID NO: 642882 - DNA, 584 bp, Homo sapiens
gtaggccctaccatctaggtttgtgcaagtacgctctatgatgatccccctcaatgatgaaatcacccaaggatgcttttctcagaatgtagctccatcattaagtgatgcatgaccatactttttgttcattcacacaattttaaatatcatctattcatcatagatggtgaaatttatacctctggtctttgctcctcctctgacctctcaaactatgagttcctgcttgacactaacacttggatatcatagcagcatttaaccctaacccatctaaaatggaattcttcactttctccccagaagagtgtctttcccatctcagcaaatggtatcatcatttacctagttcctaagctagaatctcagagtcattcttgactcctgtctccctcaaaggcccacacttctactgtcaggtcctataaattctgtcttcaaaatatacctcaaattcttccactttccatctccactgccagcatccaggtgttaggctctrtcattgttcaactagactacaacatagttttcatatctattccactattaacaccctctcattcattttcaacacagtt

SEQ ID NO: 642883 - DNA, 622 bp, Homo sapiens
attttctctgttgaggaagtaagggtctctgttactgcatcttggctggaaataaaagccttaaaggttattgtttaatgatarctataataacaggaagggttactaatttgtgtgatccctttggggttcagatatttcttgggatgacttagcagagtagaggagggcatattcatcacatatttattacaaaagatagagagcatttcactgtaaaaatgttctaactttaaagtgcaaggtatgtgagtacagcagtaaagtgtttgaacactgatcaaagaatctttcagaaatctgagttagacttgacacaatgtcagtgaaagtattcacagtacactgggcaattactgatgacagcccatttgttgggccaatggaacaaataatgattctataaagtttcagaacagatggacagttatttctgtttctacaaagtcgatgtgcaagataagagtaaactcattttctcctaaccaggggattttgttaatgatatgggaaaactcactctttataaagaacaggagtttgcctgttattaactttgagggcctagaaaattcccaggcaaacagtagtcatttcaatatatatttatcaaataaatgag

SEQ ID NO: 642884 - DNA, 582 bp, Homo sapiens
gataaatatctgcatttatgatgcaaatgacaccttctctaaagtgttacccttctgcagtgcactacctgtgcaactgtcctcagcaaagatagagtaatctgcaggaactgagwggtggctgccccctttgcagaggcctaagttctcaacgtgccacagtccacaccatacccctttgtgctgtgcctggtctattttactcactgatattacccaacctctgaaggtgtttaagtttggacccttgacctctcatttcatagtgaacctcagagaggtgaaacgattcacccaagatcactcagcaagtatgcagtgtgagcaagttagcagtaagtcaaaaccaggccttaaggctcttgtcacttcagagcaggactcttactgccatgcagctacctctctcatcagatggtccaaagcattcggttgtctctggattaggtggttgtgggaggggtggatcagagatgctctgggccactttatggctctaggccgtgaaagcaagctggaaactgaattgcctctgcagctgcagaagactaatttctatattgatatttggaaaaactaaca

SEQ ID NO: 642885 - DNA, 582 bp, Homo sapiens
gataaatatctgcatttatgatgcaaatgacaccttctctaaagtgttacccttctgcagtgcactacctgtgcaactgtcctcagcaaagatagagtaatctgcaggaactgagaggtggctgccccctttrcagaggcctaagttctcaacgtgccacagtccacaccatacccctttgtgctgtgcctggtctattttactcactgatattacccaacctctgaaggtgtttaagtttggacccttgacctctcatttcatagtgaacctcagagaggtgaaacgattcacccaagatcactcagcaagtatgcagtgtgagcaagttagcagtaagtcaaaaccaggccttaaggctcttgtcacttcagagcaggactcttactgccatgcagctacctctctcatcagatggtccaaagcattcggttgtctctggattaggtggttgtgggaggggtggatcagagatgctctgggccactttatggctctaggccgtgaaagcaagctggaaactgaattgcctctgcagctgcagaagactaatttctatattgatatttggaaaaactaaca

SEQ ID NO: 642886 - DNA, 507 bp, Homo sapiens
aatgctaatttcttctctgcctccccaaattttgtccatctctcaatacccgctaccatcaagagtcatcacagttatgggcattaacatatatgaatattgatagttctcagggcaagaaaacacacagaacatgcctctccatggaggccactctattcacctggatgtttataatgtaatctatagtttgactttacagggctctttccagattataattcaatcttcacttttctgtgtctaaatttttacattgctttctgaatcatcttttttcccattttattcttaacaggctaaaggaaggcttaataaagtagagctaatgaataggatctgggtttataatcaggcttttgtgatttgaatcaaagaaatgcaaaaacttcgtgtttatcagagtgtggtayacttattcctggagttatgcaagatcattttagatggcacacaaactaaaaaccacttatagaatggctgtttatttattttgctgtgtattag

SEQ ID NO: 642887 - DNA, 579 bp, Homo sapiens
catagttcaatcttgataggttgtatgtgtccagacatttatccatttmttctaggttttccaatttgttggagtatagttgttcatactagtttcttataatctttttgtatttctgtagtctcagttgttatgtctcctttttcatttctgattttatttatgtgagttgtctctctttttttcttagtttagctaaagatctgttattttatcttcttaaaaaagtaacttttcattttgttaatctgtaattttatttcgtctgaatttcatttatttctgctctgatctttattatttctttcttctattaattttgttttttttcttgcttttctaattgcttgaagtgcattaggttgtttctttaaagtctttctactttttaaatataagtgtttactgctataaactcctctcttattactacttttgctgtatcccatatatagttatgttgtattttcattttcatttttttcaataaatttttaaattccttcttaacttcttcattgacctattggtaattcaggagcatgttgtttaatttccacatgtttgtaaagtttccaa

SEQ ID NO: 642888 - DNA, 632 bp, Homo sapiens
gctttgggcagtactgccccccgtggatttgctggacacagcccatgcagctcctctcataggttggagttcataaacacacttttkgaaactttgttatttgttattgtggacatttaagtctttggttagcttagtagtcacgtagtaatttgacagagatttctttgaattcctgggggaaaaaaaaacaaccaaattagtccaatctttgcaaatgtactctgtgtgtgtcttaaggcaagccttcaacactgagctggacaatttacatctctgccttagccttaactttctgtttgggcagagtctgaaggtcagccagatgtgagagcttagggctcttacaggttttttctgaatgtgctctctacttttggcaagcacgtggtcttctagattcccaggaatatgtgagaactttcaaagctcttatcccttaaagtaactcacttcccatctttcctcccaagctttttggtaagtttattgtttcccccaaggattcacaacaagggactcttttttccactgggatctattctttgtcccaggaggcagtagctaatgcatttgtcttgcattgtaggctaccaccttcaaaactgccatggaactaaagagtggaagag

SEQ ID NO: 642889 - DNA, 632 bp, Homo sapiens
gctttgggcagtactgccccccgtggatttgctggacacagcccatgcagctcctctcataggttggagttcataaacacactttttgaaactttgttatttgttattgtggacatttaagtctttggttagcttagtagtcacgtagtaatttgacagagatttctttgaattcctgggggaaaaaaaaacaaccaaattagtccaatctttgcaaatgtactctgtgtgtgtcttaaggcaagccttcaacactgagctggacaatttacatctctgccttagccttaactttctgtttgggcagagtctgaaggtcagccagatgtgagagcttagggctcttacaggttttttctgaatgtgctctctacttttggcaagcacrtggtcttctagattcccaggaatatgtgagaactttcaaagctcttatcccttaaagtaactcacttcccatctttcctcccaagctttttggtaagtttattgtttcccccaaggattcacaacaagggactcttttttccactgggatctattctttgtcccaggaggcagtagctaatgcatttgtcttgcattgtaggctaccaccttcaaaactgccatggaactaaagagtggaagag

SEQ ID NO: 642890 - DNA, 543 bp, Homo sapiens
ttccatccatcatccatccagccagccagccatctattatccattatttatgatccagccatccattattcattattcatccatttattcattcatagagtatagtagttgagaaaatggactctgaagccagattctctgggttagaattctgtaactgctacttactggttatrtaatcatagacaagttaattaagtatcttctttgtaccttggtttcctcatttataaaatggggctaatattccaacctatctcctagggctgttgtaaggattagatgaacttagtgctgagaacaaaaacaatgcctgacacagagtaagtgtattcatattagctattgttattgacaaataattgtttggcatctactgtgccaaatactttgctaggctttagtagctggaggaggaagaatgatgttctcgggacagtggggtggggggctgctagatcagtgttctcaaagacaggcgcatgggcctcctataacagaaccatctagagtgtgggtattaaaaggtgggttttctgcccc

SEQ ID NO: 642891 - DNA, 584 bp, Homo sapiens
gttttgcaagatgaaaaagttctaaagatctgttgcacaacaatgtgagtatacttaacactactaaattaaatacttaaaactggttatgatgctaagttttataatatgtattctttttttttaaccacaattaatagttttaaggctgggtgtggtggctcatgcctgtaatcccagcactttgggaggttgaggtgggagaatcgcttgaggctaggagttggaaaccagcctggtcaacataatgagaccctgtctctaccaaaaaaatattaaacatgtatataatatgctaccatttgtgtaagaaataagggcaagtaagagtatatatagtatttacttatttttataaaaagaaacccaggaaagatcaaacaaaaatgaatgaaaatagtttcctgtaagkggtagataggaaaaaggaaaagtggaaagggattggaaggagacttcactgcttgtttcctcttaaatagggtttagatatttgaattttgtaaatattttaaaagaataacagtaaatttaaaagaatacagaaagtaaaccctaacaccaaacacaaacagaaaagaatg

SEQ ID NO: 642892 - DNA, 551 bp, Homo sapiens
agaaaatgcctgcaggatttaaagcaaggtgctgtcctcaagcattctagtttagctgttccagagtgggccaagttttgatagttgttttttaagctttgtcaggtgattctaatgtatagcacggtctagtatcattgatttaaattttctttctctttctgtatttgctgaatttgtgtaatttaaaatcactttcagtgtgactcccttatgccgctctctcctgccatttgggcaacagccaacttcygaggccaaccttgtttctggagaagcattcttcccacatgggaaaggcaaggatggtgctgagcctggtgagtctctgttcggggcctttgactttgcctgaacacacatttactaaaactaacaaagcaagacaggaggtgggctgtccagaaggacaagtgcttcactttatcaccttcaaaatgattttaaacccctgagatcaatgctgataagatggatatttgagatcaatgctggacagtatgaagccagaaactggtgggaaaacctctggaaatacatgagatacagct

SEQ ID NO: 642893 - DNA, 527 bp, Homo sapiens
gaattcactgtctatcaaaatcctgatagccttaatttctctgttcaagtggaaacctacagccttctcaaattgtaaccttaattcacccttcagagaattagggtgatttcagccagtccccagaccttgaatgccaccctagagtaagtgctgcaaaacctatcttccagccctgacctcttccctgagctccaagtgattaggtccaattccttaayctacatctctacttagatatctaaatttcaaatttaactctgccaacatagaatttttttttttttttgagacagggtcttgctattacccaggctggagtgcagtggtgccatcatggctcactgcagcctcaacctcctggactcaagcaatcctcccacctcagcctccccagtagctgggactataggcgtgtaccactacacccactaattttttattttttgttgatatggggtctccctatgttggccaggctggtctcaaactcctggtctcaagtgatcctcccacctcggcctccc

SEQ ID NO: 642894 - DNA, 597 bp, Homo sapiens
ccagcaacattcattagtgcttggcatcagacccagcctagcctggtcatccaccactgactttgcctcaatggcaggtggggttgtaaagcttaagacctgtacctggttcaagtcacggggcctggtactgtgcttgtgcatggtggacctcaagaaagagggagcaggtccagcagggatatgggccttggactggctccagggcctggtgaagcagtgtagcctggtggttagtaagtgggtgggggcatctgccacttgcaatgtctgtgcgctcagaagttactttccttcttggagtgtcactttgcacagttataaaaaggggttgttaatagtacctacctcatagggaatgtgtgagaatcaattgagaaaaagctggcaaaggacctggcacatagaaaatgtgtcatacagctgggcrtggtggctcacgcctgtgatcccagcactttgggaggccaaggcaggtggatcgcaaggtcaggagttcaagaccagcctgactaagatggtgaaaccttgtctctactaaaaatacaaatattagccgggtgtggtggtgggtgcctgtaatcccagctactcagg

SEQ ID NO: 642895 - DNA, 635 bp, Homo sapiens
gtcagggggcttcacctgttgacacatgagcactgaaggaacctcccggaccttcagcattccacttgacaatggcttcattaggaaaagctctatccacagtcacaccaataactagatgtgtaattaacttgctttcccacaccatccccctaaggggtggcagtaaggatggctgaaaatataaggrctcaatatcatagtaaatgttttcactgatgtgtctttctccaatgggtgccacactgacagcatggctaaatgaggcttaatttgacaatcccaacaatccattgttaatgatgtgccatcattgtgatttgcatttggtaaatgcaattttttggctgtttccccttgctgcctcctctgggttcctggacccctgtgttctttggcgggcaagtttccttttcaacatcacaaataccatctctgctattgggacacaacagttaaataatgtgaaattgcactgatgccagtgaaataaaagtgagttttacaaaaccaagttccttccctgaacataataacagtaaatttctagggtcctatagtgtaatatccattagatttattatgttgcaattcccagtcccactagttctgcctgagggtgagtatattacatt

SEQ ID NO: 642896 - DNA, 544 bp, Homo sapiens
aattcctctggctaggattttcactactaygcttaatagaagctgtgatagtgggcctccttgtcttgttcctgatcttagaggaaaagctgttagtcttacaccagtgagtatattgctgtttgtgagtttttcatatttgacctttataatgttgaggatgtttccttctaatcctagtttgttgagcattttatcataaaagcgtgttgaatttgtcaacacaatttgtcaatttgtgttatttctacatcaattgagataattatatgtttgtttctcttcattctctcaatgtggtgtattatactgattgattttcatatgatgaaacatccttgcctaaccatttggtcatggtgtttaatctttttaatatgctcttgaatttggctttctagtattttattgaagacttctgaatcaatatttataagggatagtgttttatagttttcttgtagagtctggtttgatatcaggataatgctgtcatcatagattgagttagagtgttcctccgtctcatatttttggaagagtt

SEQ ID NO: 642897 - DNA, 544 bp, Homo sapiens
aattcctctggctaggattttcactactatgcttaatagaagctgtgatagtgggcctccttgtcttgttcctgatcttagaggaaaagctgttagtcttacaccagtgagtatattgctgtttgtgagtttttcatatttgacctttataatgttgaggatgtttccttctaatcctagtttgttgagcattttatcataaaagcgtgttgaatttgtcaacacaatttgtcaatttgtgttatttctacatcaattgagataattatatgtttgtttctcttcattctctcaatgtggtgtattatactgattgattttcatatgwtgaaacatccttgcctaaccatttggtcatggtgtttaatctttttaatatgctcttgaatttggctttctagtattttattgaagacttctgaatcaatatttataagggatagtgttttatagttttcttgtagagtctggtttgatatcaggataatgctgtcatcatagattgagttagagtgttcctccgtctcatatttttggaagagtt

SEQ ID NO: 642898 - DNA, 572 bp, Homo sapiens
tgaacatgcaggagacaacatgcagctccctctttaagaatccctgtatggcttctttgtagctggtgatgttacacaagccacataacttctctgaacctcagttttccttatctgtgaaatggaaacataaacattagcctgattaacccataggagtgttgtgggtttcaaataagtaacgtatttttcagcactttttgcaaattataaagcattatatggcatattgaccttctttggtccttggggatgaataagcctggcctcattgaccatggtgctggaaccagctgaggcccaatttgtacaggtaggagtcaaacctgtatctacctgaatcttcaacatctcaggcactagttccactctccttcctgttgcttmtgtctcacatcagaaccgtctttgattcctccttctctttcatccccagagtccaatccctcagcagtcatatccattttacattaaaaacttagctcaaatctgtttcttatccccatcttccttacttccaccctaggctagctgtggcttttgacctcctgagtgaaccactgagtgaaacc

SEQ ID NO: 642899 - DNA, 572 bp, Homo sapiens
tgaacatgcaggagacaacatgcagctccctctttaagaatccctgtatggcttctttgtagctggtgatgttacacaagccacataacttctctgaacctcagttttccttatctgtgaaatggaaacataaacattagcctgattaacccataggagtgttgtgggtttcaaataagtaacgtatttttcagcactttttgcaaattataaagcattatatggcatattgaccttctttggtccttggggatgaataagcctggcctcattgaccatggtgctggaaccagctgaggcccaatttgtacaggtaggagtcaaacctgtatctacctgaatcttcaacatctcaggcactagttccactctccttcctgttgcttctgtctcamatcagaaccgtctttgattcctccttctctttcatccccagagtccaatccctcagcagtcatatccattttacattaaaaacttagctcaaatctgtttcttatccccatcttccttacttccaccctaggctagctgtggcttttgacctcctgagtgaaccactgagtgaaacc

SEQ ID NO: 642900 - DNA, 602 bp, Homo sapiens
cacttacagtcaaagtgtgcacacttctctgtcttttcatgtaataaactggtcagagtgagtagagtctttggtccacctttgatgctccaaatgccgtgagcacttcttattgcacaagtctatttgcaactcccagtggcaggcaagatgacccttctgaatctctccatctacctctgcytatttataattcacaagtctcttggaccccctggttcctcttctgtccctcaggtagtgtttgggcttgtcgtcttcttatgaaatactcgcatccacagatgtttctgccctgactctctcagtttgcctgaggtcctcaaactagcctcttcttgtatggtgttacaacaactggacctccaatggggtgattagtcctttaccttggcgtcactcagcaatttgcctaatagtcgcatcccttttgccctgtcattggctctgagccttctgtcaggctggactcaaagctttatggtgatttcccttcaatctttcattcgttcttctccacctcacccacaagtaggctttttcctgtttgatccatccaagtcacccaaaacaaggatcttaaaaagctttctagctacctg

SEQ ID NO: 642901 - DNA, 609 bp, Homo sapiens
agggaggaaggatattaagcagatactgacccgtagttttgtggccactactagaatttattgacatacatagcaactaaggactgcaggacagctgagtttggtatttacttcaagagaataaaagatcagatgtctgaaaacagagggctatattgctataatgagcccattgcctttgataacaggaggtaatgacagtcatgttagctggcattgattgaacatgtgcgatgtgcctggaagtctgggaagcctgatttgtattccagtgccaataataatgtacagaacaatcataaggccaggagtaagagcttacacttttgagtkctcactatgtgcctggcagcagctaagggctttccctgcaggtgttgttccccgtgtggatgaggaaactgagctacaggagttaccaacattgtccaaggtaaccaggcaagaaagaggcagagccaggatttgaaaccaaatctgtttgacccgggcagcacttgtgcttttgaccattaccaccataatctggtaatagctcttgctggcaagccatcctcacccccaaattttctgtgttttctaaactatgctaaaacaccaggaatttgc

SEQ ID NO: 642902 - DNA, 604 bp, Homo sapiens
taaacctaatcatcgtgtattgtcttgaaaccttcttgattttttccttgccaatctactttggaaatacagagatagtgctgcctagcccatgccctcaggcagaaatcagtctgcaagccacagaggtggcaattctccccaagtatgagcttgttgcaatcacatttattaggctatgaacatcccatgagtgaaagaaagatctgatgaaaagttaaatggatggaaagatggatagtggaatttacatatggatacagacatagagtaagaggtgggaaaaaataagaaaaattaggttgagaattggaaggtgagaaaaaaagtgaaaaagggtttgagaaaggaagaatgatgaaagtatatgggagaataagaaaaatatgtgcatttgtgtcacaggtatatgggttatttaatgatcaccatcctattgccacagatgggcakgggttaagaccctaccaggttgtgtagaagggctggtggcagggagatgtcagtactgactatagtgtctgcttcagggtgtggaggggcttttttgacaaccaaactttttaatatcataaaattaatcttccttagtactggtactact

SEQ ID NO: 642903 - DNA, 472 bp, Homo sapiens
aaaccaaaatccttaggatgctgctaaagcagtattaagaggaaagtttatactaaactttccctccagcataaactaatgtttagtatatactaaactttcctttagtataaactgaagtttatactaaatgtcttcatcaagaagttagaaagatcttgaattagctgtctgaaagtgcacctagagcaactagagaaaaaggaacaaagcaacacccaagctagcacaagaaaagaaataaccaaaatcagaaaagaactgaacaaatgaaatttgaaagtccaaacaaaagatgaatgaaatcaagamttggttatttgaaagaataaacaagattcatagaccactactagctagattaagaaaggaaaaaaaaatagaagatccaaaaaacacaagcaaaaatgacaaagatgaccttacagccaattctacagaaacaaaaaggccttcagagactaatatgaac

SEQ ID NO: 642904 - DNA, 586 bp, Homo sapiens
caagtgagttatcttaggcaggaaattttatacccaaatcactctgagggtgctagaaagatattgtgttattgtctgtcctcacatcaacctgggtatagcaatcaaagatacctgcaagtaagagtggtctgctcttagaagaccagaggctagtttctctgaggtgttttggttctgttgagcataggacaaccaaagaattgagtgctggtgatctagatgaagagaaatggcataactgcctaagacatttaccaagtggaaattatggaggattctcagacacatatgtaatatgaacaaaatgtgaggtaaaattgagtcagctatcaagagccacgagactttgagaaagctgaaaaacattttcattcaagtgttttattgctgtgtaagaaaccacgccaaaacttaccagcttattttctcacaattttgtgtgttaggaattcaggaagggtaaaatggagcatctcatctctattccaagctgcttgggacctctcctgaggtagcttacactgacagctgctagctgggattgctaaatttaggtcmtatgtctgagttctcattctagctc

SEQ ID NO: 642905 - DNA, 626 bp, Homo sapiens
agggcttgactttgggaacagaggaagagggtaaggatagggtaaatcatatgcctaattatatttttttctggtagcttaacacagatgggccactgactgtgtttctcaatccaattccatcagttttgtagccagtcctcctagattcctaatttttatttataaggagtctaacttttgtttttcatcatatcctccatcaaatatttyttctgcagtttctcattacccaagaagtatttcctagatgaatctggactttacttgagtgactgaccgctggtatatatttactttctatgatagatgatggaccttaccaaagattctacttattgttaattaccaggcagtaaatattactgtaaattaggagctttgcgaaaatgggtattgatttcaactcgcagccccttctacctcctgtttttcaaagacctgaaactgtgcaagaaaggtgtcactgacattagaaagccagcaatttattctaaactatatctggttctctagtaacctcaatgtgaatttccagctagttacattttcacacttttaatgacagtctcctgtctagtatcccacacacatttactatctgctatgtgctagaattatgctaa

SEQ ID NO: 642906 - DNA, 586 bp, Homo sapiens
tttcattatctaatggcatttgggttttctaacgcatcttaataagggctgctgcatatgcatagactagcctggattttatgtggaacagyttactttgattaaaaaaaaaccaaaaactagtcacattattcttaggcttacaagtacgcttatttttcttattaacttttcaaaataatgtctggatttcatttaaagccattagtactttttgtttattaaattaattgccataaaaattctctcctgttttgatttccatatcggaattgagttccctaatattactgagtacaagagatatattctttcaagtgttaaataatctctcaaaaaggagtagctttatgctagacataagatctcattttctttaacctgacttattttgagaattaagtgtaccatttgctaattaaattactcagtactgacactaaaactttctgtttaaaacctgatttgaaaaaaaattcatttgaaatgttagtgtacattgttctctcagagtatgggaatgcagctattccatgcttgatacatgatctggattctgcaaggttttgtttctgtttgaaagtct

SEQ ID NO: 642907 - DNA, 603 bp, Homo sapiens
tgactccaattgagtttagtcattacagtttaaccaccagggtattaattgaagcactagaaaatatctctgatcagtttcattatctaatggcatttgggttttctaacgcatcttaataagggctgctgcatatgcatagactagcctggattttatgtggaacagcttactttgattaaaaaaaaaccaaaaactagtcacattattcttaggcttacaagtacgcttatttttcttattaacttttcaaaataatgtctggatttcatttaaagccattagtactttttgtttattaaattaattgccataaaaattctctcctgttttgatwtccatatcggaattgagttccctaatattactgagtacaagagatatattctttcaagtgttaaataatctctcaaaaaggagtagctttatgctagacataagatctcattttctttaacctgacttattttgagaattaagtgtaccatttgctaattaaattactcagtactgacactaaaactttctgtttaaaacctgatttgaaaaaaaattcatttgaaatgttagtgtacattgttctctcagagtatgggaatgcag

SEQ ID NO: 642908 - DNA, 586 bp, Homo sapiens
agtggctgggctggatgggctcctccacactgatggatcatcaatgcaaggttagtaactgttttacaggaatacattatgtgctctgtctctcttcttcacattgttttgggtaacagggatcagctcatggaaaccctttctcttcttcacattgttttgggtaacagggatcagctcatggaaaccctttggatcttgtagaagagatccagggtggatggagactgggtgaacttcctaacattctagtcttcctgggtgatgtaattctctcatatctatcttgcagcttccacgtggctaatcatctgcaggaacccaaatgacctttagatcaggcctccttccttctatagatgaagcaactaaaaatacagatgaatacctttggcctgggaagctaggaaaaaggagtcggagcctggctcttttgattccagtccygatcattgggttaacagcgcccgccactgtgcagatggccaagctggaccccctccttctagggtaaagtcagcacatgcttccatcatggcacatgccacagtagacttggagttcttcaaggaattgtattttattc

SEQ ID NO: 642909 - DNA, 571 bp, Homo sapiens
tctcacttctctcagccttcatagaattgaagatttagggctttgctctggattaggctttggcttacaaacattagggaatgttgtggctggtttgatcttctatccagaccactcaaactctctccgtatcagcaaggctgtttttccctttcttatcattcatgtgttcactggagtcacattttaatttggtgcaggatctttctctctgcattcacaacttggctatttggcacaaaagtcttggttttcagactgtctttgcttttratatgccttcctcactaagcttaatcatttctagcttttgaattacagtgagagatgtgcaactcttcctttcacttgaacacttggaggacgctataactttattaattaatttcaatactgttgtgtctcaaggaatagggaagcctgaggagagggagagagatgaaggaatggcaggttggtggatcactcagaacacacacaacatttattatgttcaccatcttatatggatgagggtcattgtgccccaaaacaattacaatagtaatatgaaagatcacggatcacaggt

SEQ ID NO: 642910 - DNA, 569 bp, Homo sapiens
caatgagttcctccaagcatggggatttagagttatggattagacctcttaacccttctcctcccctcaaaataccttaaagaccttttctcccaggggaggagttctgctatccagtgtctgactaaaagatctttgtgaagtcacgtttagacaggacatcaaatgaaggatctgtgttcagctgagatactccgcatgttgccctcaaccaaactgaggggccagaaccacaatggccccatcaaaatgaagaaggagcctcktaggggtttcatttcatttctggatgtgaatgatcttggaaaaaacttctttgctgttttcttgatgctttagtttatatacctgtaaattactgatttaactaaaagtagattttgctttacagcaaaaacaagaatgacaaatcagatcctgttcaactagtaaggcacttccttgctgaatatcagtcacactttgaaagatgtatgaattctttcaaaccagcaggaaaaatttggaatcaactctgtattttctaaactgaacagttacagcacacaaaacaggttatcaaaatggat

SEQ ID NO: 642911 - DNA, 635 bp, Homo sapiens
tgacagtgccctgtcctgtttgtttctcagtctgggtggtgtgatggggccgaggtgcagcttcaggctcactaatgctcttttgctcctcttcatccaagcaaagggtacttggaactcaggtttggaatttgcttttcctcctcaataaaacttttctgtttcaacagatttcaagctaatggtagctacagctgccaactggagctgttcatatgcatcctgggggttgtggtagggacaggatttcacactttgatctttgcaatgaggataaatagcattttccagtccccaaaatggaggaagtgggagctggtttcctgycctaatcacagagctctgtggaatctacttgtctgggatggaaaactcttgtactgaggcttgactttcatgtctctcactggtcaatatagaaagatggtgaactgggaaagtaaccaaatattctgctttctgttgtggagaatgtcaaccctatacaaagacacagcatggaaataataactgccatgcaccggttactcagccccaatgatgatcagctcatagccagtctcatttcgtctgtatccccacctactcacctatcttctacattcttttaaagtgaatccaagacatcacattat

SEQ ID NO: 642912 - DNA, 656 bp, Homo sapiens
gaatattatgggccttaatgacactgtaactgcataaagccaaagaaagctagaaaaaggggccaaaaaaatgagctcagagccagccgaagtgacaacaaacatgtggttgtttactaggactggagaggtttagtctgcagatgtttgtggtctcyagaaggttccagaggaacgagttgttatgaagatttgcagagttggatgagagcaagattcttctcggagatggcaggccccaggacagggaggcccagtggtatagacagaatttatagatttctgtggtcagatcatactctactggtcccacaatgtacatcaacaaattaatattgtacggatgtcatttcaaagccttctaaagacgagagtcattattgaagccattagagcacagatggttcaaactatatgcagatattcatacttgcatttttgcattatagctgctttttttttctattgaactgtaatgaattgtctcataatctattccatcttcttgccattaaccgggctttgaatgttcacaaataggagctaagaactcattttccagagctttaatcacacaaagagggaatgcctaattctctaaatgaaatggtctgtgatcactgaagcagagatttaatatatcacggcaaattagg

SEQ ID NO: 642913 - DNA, 589 bp, Homo sapiens
tccaggaaccagggatggctgggacttcatggcaaagcatccagaggctgccctagactttgtgaaacactgaaagctttcttgtttgaacttttcagcaactacatggaggagatctcagctccactgttttacaaatgaggaaactgaggcatagattggtgaattggtttgtttgcctataaataaatctggtcagagcgaaagatgggactgaaatttatatctttaaactccaagccactagtgtttgccacgaaacatgagctttttgccaagatattttcatctgtgccaaatcgtatgacaatatgctgggtaacttattctttacaaatatttattttttgccttttggcagcttcaggttagcatatgtgtttaattaacatttctaattaaaatcacaatgtgtaaaaatcaaatattgtccatgagttacattctgccttatctctaaatggtgccaatttgcacatggtaggtaaactattttaacttttctagtaagawcttctggtaaaattttataaaataaaatcagtgggaagaagttaaaaactcttagccagctctccaccaaggctga

SEQ ID NO: 642914 - DNA, 582 bp, Homo sapiens
tgtcaacacaatacttttatttattcaggtcaaaaatcttggagtcattcttgacttctctgttccacatatccagtccttagggtatatcatcacaatatattcagaatatgaccactttgcaccatctaaacagccacatatctacccaccaacatctcactattggattatttcatgtaagtaccatgtgctaaccgaytgcacaactggagctccattactggatcatttcaatagtctcttagtaactggctttcctacctccatccctgactcaccccctgctcccaataatctgttctgagcacagaagtcatagtgattcttttaaattctaagtcaaataattctttgtctctgcctgaaaccctccagtgactccccattgactcccatttttccacaaagtaaaatccaaattttcccactggccctcagggtctttacactctggtcctccccaccgctcttgcttcttctctggctcttctcagcatcacccacactggcctcctcaccccgccttcccccagggcctttacaatgactgctccctctgcctgaagtcctttctttcca

SEQ ID NO: 642915 - DNA, 564 bp, Homo sapiens
ggggaggcaagtggaatgcagctccactgaactcggtataaatggctgggaagctgctgaaaattatggcaataccccctcccccaaccaccagcatgatttataatgtgagtttctgtgttgcatttaacattcatggtgggagctgtgactgtatccagtgccagtgtagggggcaactgctaggcacagatattctagttaagggtcctgctataagaaggagtgtgagtartttctgctgcaatcagagagacagcccggggaagtagggagagcactctgatttagagaaaatcccacccatccagatagacttgttttctttatcagcctgtctcggatggccaggtgaaagggacactaccaccaaccttgatggcaaaaagttagtgagcatgtgggaaaaaaaaagtggttctggatatatccactttgaagtctgcccccagtaaaatacagggccgtttcctgaagaggacaccagtgttcttggttatgaagttttcttctaatgaaatttgagcagaaatctcacttccagctggccaagaagtgatgccc

SEQ ID NO: 642916 - DNA, 573 bp, Homo sapiens
tgagaacagctaggtgaaaatccatccccatgatccagtaacctcttgtcaggcctctcctccaacagtggggattacaatttgacatgagatttgggttggggcacaaatccaaaccatattataaatatatatgtaaaattctcacaaaatgctaacaaaccaaattcaacagcacatcaaactatcatttgccatgatcaagtgggatttatccctgggatgcaaggatgattcaacataaacaaatcaataaatgtgatacaccacattaacagaaggaaggataaaatcatatagyccaaatagatgcagaaaaatcattggacaaaattcagtattccttcatgagaaaaactctcagcacattgaatatagaagaaataaacttcaatattgcatggccatatattacaagcccaacaaacagcatactcaatggtgaaaagctgagagcttttcctctaagatcaggaagaagacaagggtgcccactcttactgcttctattcaatgtagcactggaagttctagtcagagcaagtaggcaagagaaagaaataaaatacatcc

SEQ ID NO: 642917 - DNA, 573 bp, Homo sapiens
aacttgagaccattaggaagagttttacrtggagtatcaaatcacacagaaagaataatatttataatatttgtatcaggtccaaaaacttttgtgtagcctttcaactaccatagaattttagagatgatgaatacactctttaaaatacaactttttagaagacatttacagataacagagaaattttatgaccatttgcctattaaccaatatgcaaagcaaaatagatgaacatgtaactacttgaccttatcaaggtcagagtcagtgcttcctgcatttggtgttcaagcagaggtcttctgatgacaagtttcagtctttcctgtaatgccactaactagcttagaccttggaaaatttacttaatctctccaaatcccagttacccctctgtaaaatcagacctaatgcctgcttattcaatagagctttgtgagaattaaatgagataatatgtggaaagtgcttagtacagtgcctggttcccaagagccaatacttatccaggtggttgttatcattatgtttattgcttcctccctgttatggaaaattgatttttaaata

SEQ ID NO: 642918 - DNA, 558 bp, Homo sapiens
caaggcaaggagttcaaggccagcctgaccaacatggtgaaaccccgtctctactaaaaatacaaaaatacaaaaattagccgggcatggtgttgcacacctgtaatcccagctactcaggaggctgaggcaagagaattgcttgaacccaggaggtggaggttgcagtgagctgagatcgtgtcattgcactccagggtggatggcagagcgatactctgtctcaaaaaagaaagaaagaaggaaggaaggaaggaagggaaagaaagaaggatggaaggaaggaaggaaggaaggaaggaagagaaagaaaggaagaaagagagagagagaaagaaagaaagaaagaaagaaagaaagaaagaaagaaagaaagaaagaamgaaccagtttccaagagtattgagaagggcaaatgagacataagaggatttgctactgttccatttcctagggtgcaaggggtgcttacaggggctgtttaatggccatgcctcaccacctccatatgcttacatgtatgtacttaaatgtgtttgtacatattaattattttgt

SEQ ID NO: 642919 - DNA, 659 bp, Homo sapiens
tggcattgggaagcaccaaggtgtacctggaagcgagcggggttttgggggggtcccacctggaggggcccagcaatgacatcagaaccactcagtaagggggtctcagaggcagggatgtccgaggtgggggcaagtcctgagctccttaggggccacaggggcttccctcaaccttggacatccctggcccaggcttgccccaggcatggcctgagtcagctgccccttccaccttctcaccatcccctggactcctaaacaccactctgaaaggcagttgtatgtctggggtggggagtactctccatctcatggacagagaaagcgagtcccagagaggtctactgacttatctgtggcttggccacacaaaaggggcaaagccctgggatattgccacttccygctttgtactttcctactcagtaccaaagggggtcagggaacagggtacagtacgggaaataaaaagaaaaacagaaaagcaaagccttctctgctaatgaggtatggtgggctggagcatcagcatggggccagatggcgagagatttcccctaatctttctaggaggccccagggaacatcctcaccagtctccatccatccctgatgaaattcctccaactctctcctgctgcagaatgagtggttgg

SEQ ID NO: 642920 - DNA, 526 bp, Homo sapiens
agagaattccatccatgagtctaatctgcctctctcacccaggtcccagaggcccctggagaaatcccaagtcactcccaagtgctcactcctcacaatagctgctccctggaaacctaagccaggttctgctctaggaatgtccaatatggcagcaattggaattaaaaaaaaaatttgatttctttcaataatttttgcgggtacaggtgatttctggttacatgaacgagtgttttatttgtttttgttttttgtttttttgagacagtgtctcactctgtcgcccagggtgcagtgcagtgacacgatctcagctcactgcaacctccgcctcccaggttcaagcagtcctcctacctcagcctcccaagtagctgggattacaggcacacacacagccatgtctggctaatttttgtatttttastagtgacgactgttctcgaactcctgacttcaagtgatccgcccacctcagtgtcccaaagtactgggattacaggcatgagctactgcacccggc

SEQ ID NO: 642921 - DNA, 594 bp, Homo sapiens
ttttgtttatgaaaagttctctgaatggagacaaaaagatggtacgtacacaaatagccaggctgaaagagccacacatctccacatggaaacatgagagttgagaaaatcctccatttagccaacttgccctgagcttcctgggtctctcagactcgtaggaagggtattttttcaataaaatatttcatactacagagtagagtcaaagctgtcaacaatttttaatttatccatcacaaaattcaacaytgaaaaaaattggaggatattttatgaaaaataaaagtaataaataatgaaaaaagacattcttcaaaaaaaaaaaccacatcaatgacatagtgttagagccagaaatgcttgaagactgaaatgaagtttgtaagtatgtaccaagaataattattctgcttgttttttaagtgtaatcaatacaaaggattttataaaaaacattttgctttaatatacagatctattgaaataatttgtttttgataatagattttagatagaactgttttataagtctgccaataaaaataaatacacacaaatgtcagaaaataaataggcatttcaaaaaagcat

SEQ ID NO: 642922 - DNA, 496 bp, Homo sapiens
ggtcctcagtgactctgaaataatctgatgattctttcttttccccttactcttcrggtgggatgcaactgccttttgtgctttctggtcctgaatggcagggcactgtgcttcctggcctcgcgggccctcagctggtgacctcctcccggcagacgtagagaaaggaaaatctatccgtttaaagcacatccatggctttgaactttctaggtgaaaaacaaaggaaaacccaccaggcatatagataaacaaagacagctgcccccacagaccttgttcttccttctcaataatttattgagcacctactatgtgcctgtactgggctgaagggaaggaggaaatgcaaacagctttgaaacactctcaagagctggctgcatggggagctggctagtcaggctccactcctgaactcatgttgactctccccaaatttgctgatccctactctaaaaaaggcactgttctgggcactgaggtcaaagtaacg

SEQ ID NO: 642923 - DNA, 562 bp, Homo sapiens
gatgcaatggcaaatatccaagataaaaactacaaggagtctatctgagaatccgctttgtgatgttcacattcatatcacaaagttaaacctttctttggattcatcagtttggaaacactgtttttgaccattctgcaaatggacatttaggaggtcattgatgccaatggtgaaaaagtgaatatcccaggataaaaactatagggaaattatctgtgaaatggctttgtgatgtgtgcattcatctcgcagagttaaacttttcttttttcagcagtttggaagcactgtttcggtaaaaactgtgaagggayatttagcagtgcatcgaggcctaaggtgaaaaagaaaatatgttcagataaaaacttgaaagaagttttatgagaaactgcttggtgatgtgtgcattcatctcacagagttaaacttgctttcaattcagcggtttggaaaacctgtttttatagaaactgcagtgggatatttgatagcaaattgaggccttatgtgaaaaagtaaatatcaaatgataaaaactaaaaggaagctatttgag

SEQ ID NO: 642924 - DNA, 562 bp, Homo sapiens
gatgcaatggcaaatatccaagataaaaactacaaggagtctatctgagaatccgctttgtgatgttcacattcatatcacaaagttaaacctttctttggattcatcagtttggaaacactgtttttgaccattctgcaaatggacatttaggaggtcattgatgccaatggtgaaaaagtgaatatcccaggataaaaactatagggaaattatctgtgaaatggctttgtgatgtgtgcattcatctcgcagagttaaacttttcttttttcagcagtttggaagcactgtttcggtaaaaactgtgaagggatatttagcagtgcatcgaggcctawggtgaaaaagaaaatatgttcagataaaaacttgaaagaagttttatgagaaactgcttggtgatgtgtgcattcatctcacagagttaaacttgctttcaattcagcggtttggaaaacctgtttttatagaaactgcagtgggatatttgatagcaaattgaggccttatgtgaaaaagtaaatatcaaatgataaaaactaaaaggaagctatttgag

SEQ ID NO: 642925 - DNA, 370 bp, Homo sapiens
ctgccacgcacccctggccttggcctggtgcctgatagctgcccctgctaggacmtgggggtgtcgcccagctctgacagctctgggaatgaatcctgggctaagagccacgagtcctcttcagggttcagctgctccgctgaggcttaaaccaaaaggtcatcagctcccgttcagcctccctctcccctgcttcctccttcctcctccctccttctccagctcttcttcctccttcctctcctcctcaggctccctcccttctcccttgatctttagaagaatcctgggagaggggcaggacagtggcagttatctccctctgacacagggggaaggtgagacccagagaggggctgggacttaccca

SEQ ID NO: 642926 - DNA, 592 bp, Homo sapiens
ccccacgctccgacctccgagccccccaacgcccgtcacaccatccagcagtctcctcagagtccaagttgccctctccagacccccgactccacccgcagcccaggaggccaacgcggccacctgacctctgacccctgaccccgacctggccctccgcggcacacccacctgcccgggagcttgctgttgctgcgcttccagaattgcttcctggccccgtcgctggccatggcccctcctcatccctcagacccgcggcccaaacaccccgagtgcacccggccctcccctagcggccctttcctgtgccccgggtggcccctcactgctcccgggactccagagcctagagccgagaagctcttccgcctccttccggaagttgtgcctacgcgcgcccggaagtcccgcctaagtccctggtggcgagtgacgcascactccgagcgcccgtcgttattaaagggcgacgccgcgcaacgcacgttacacgcatcgcggagggagcggaggtggttgggtttctgagtttgagtctgtcgctcctggctctcccgacacaacagcggcgcccacctgcccgcaacgg

SEQ ID NO: 642927 - DNA, 565 bp, Homo sapiens
tgatggatttgttaattaatatgatggtaataatcaatatgcaatgcatacatatatcaaatcatcatgttgtatgtaaaatttttatttgtccattaaatattttaaaacaaaaattttgcaaacatgcaacggttctcaccgtttgtgaaaggtacattttgtgtrttgatttttattactggtttatatatttcccttcactctccctcttaggaaaacagaacaccaatcctcaaccttcattcccagacacagacacaaaaggagtggtagacactgaaatacctgtgactcggggaacctgtcctagtaagtgagggaagtcacaatcattcccaagggtgttcactgagaaagtgcctttgtcctgcatctgcagccttgaatggatgaggttctggggcaccaacgggcatcgtccatgctttgtgggaacaccaaggcccgcacctaaagaaacagttgaaaggagtacctggagtcagaaagatgacagtgtcctctgaccactgcttttagccaccttgatagctgctcaaacgagctcttcccagtgtgcgaa

SEQ ID NO: 642928 - DNA, 565 bp, Homo sapiens
tgatggatttgttaattaatatgatggtaataatcaatatgcaatgcatacatatatcaaatcatcatgttgtatgtaaaatttttatttgtccattaaatattttaaaacaaaaattttgcaaacatgcaacggttctcaccgtttgtgaaaggtacattttgtgtgttgatttttattactggtttatatatttcccttcactctccctcttaggaaaacagaacaccaatcctcaaccttcattcccagacacagacacaaaaggagtggtagacactgaaatacctgtgactcggggaacctgtcctagtaagtgagggaagtcwcaatcattcccaagggtgttcactgagaaagtgcctttgtcctgcatctgcagccttgaatggatgaggttctggggcaccaacgggcatcgtccatgctttgtgggaacaccaaggcccgcacctaaagaaacagttgaaaggagtacctggagtcagaaagatgacagtgtcctctgaccactgcttttagccaccttgatagctgctcaaacgagctcttcccagtgtgcgaa

SEQ ID NO: 642929 - DNA, 565 bp, Homo sapiens
tgatggatttgttaattaatatgatggtaataatcaatatgcaatgcatacatatatcaaatcatcatgttgtatgtaaaatttttatttgtccattaaatattttaaaacaaaaattttgcaaacatgcaacggttctcaccgtttgtgaaaggtacattttgtgtgttgatttttattactggtttatatatttcccttcactctccctcttaggaaaacagaacaccaatcctcaaccttcattcccagacacagacacaaaaggagtggtagacactgaaatacctgtgactcggggaacctgtcctagtaagtgagggaagtcacaatcattcccaagggtgttcactgagaaartgcctttgtcctgcatctgcagccttgaatggatgaggttctggggcaccaacgggcatcgtccatgctttgtgggaacaccaaggcccgcacctaaagaaacagttgaaaggagtacctggagtcagaaagatgacagtgtcctctgaccactgcttttagccaccttgatagctgctcaaacgagctcttcccagtgtgcgaa

SEQ ID NO: 642930 - DNA, 582 bp, Homo sapiens
tcataactttctcttgctcttcccaaaaatgggcttcctaacagctgtgattttgcgtcataactcactaccggccacctaatgaaaccaacataaatacgaaagttgggacattctgattctccttggaaatctggaattgagattgagatgatcactttctgtatgtagctgagatgtaaatagaaatgattcactcttggccatatggccaatctgcggagaraaaatatgaagtagataaacagaaagtagtataaaaaactgagtacttgaagccagtacctacactctgggtttgatgagtctcacatggattctttctttgggagtctggacatacctgcacagtaatgcctttaggctttaagtagctccaaacagtttttttgttacttgcaagcaatcgtttttctcaatggctcaagatgccttttgcatataaaaccatattcatttggaattcatcaataaattagtattaattagaattatataactatttattgtgttagatctatacagatttagttaacagatttagtatgtgtgtgtgtatatatatatatatatatatatata

SEQ ID NO: 642931 - DNA, 515 bp, Homo sapiens
tcttttgttctttgtagtttgaggacataatacttgcagctgccatagctgtcttgccaccatgaagaaggatatcaaggcaaaggctctaatagaaatatagaatatgctagggacttaagtgtagttgctaaaagaaattagaatgtcctaggttcactcttctgctgtatgagaaaaacagacacagcatttcatccttcagcccttttcatttgagtgttgaaaatattaaaaaaaaaatacatttttgaagtgagtttccttatygccttttcctgggatgatcaacctttcttttcttctacctggcaacttagggatgcatttgttgacctgcacagtctggactccacatatgagctctctttatggttctgctcctctttggtcctttgcctctgtctcaatctagagtctccattattacctgcattacattctttatctcttaattgtagagcatcccagaacctggcagaagagattcactaagaatttgctgtagctgatgt

SEQ ID NO: 642932 - DNA, 672 bp, Homo sapiens
gagtaacatagctcaacgatgtatctcacttttaggtatgcgcatatatgactcgtgggataccacataataatctcccactctaaaatattttgccatgtttcctaaaattccaatattataggcttattactgggcaaaaattcatggctggtctctaagaaactgaaatatttattgtgggatggtgctttaaacaaaatttccattatctttcacgtatcttagtatgtttttcaacttggaagctatctaaaataaaatggaacaccagacaagcacgaaattttaaatatctttgttttacataaaaaggtattataaagtcagtaaaaaataattaaagaaaaaaattatatgtatrtttcccctcatcatgtcccacacttccattctgctaaagaaattcctgttaaaattatatttacacccttccaaattaattacattgacaaatattaacataggtatatgtatgtcaatatagtgatgcatactctataaattgattgcatgtattgtgtgtgtatggttctatttatgtgtgcatctatgtgtgtgagaataagatattgaacaattttaagcataagagagtaagtgctcacccgtatagaataaaatacaaaatactattttggaaaaaaaaatttgactctgtaattgtagtac

SEQ ID NO: 642933 - DNA, 449 bp, Homo sapiens
ctagttaatatttttatgtaagaaatagtattattgtcctagaagctgcatgatggttataatggtggggataaatgtgtatatgtaaacatttggtccaaccaactaggttgaagaaaaagtgtgtttcttgccttgcctacagtgaataaggaacctgttggctgatctacaaacaaaataaactgagggattagccctacctgggtgaaacttgttagtgatatgcaaatggtttatcattaatataataataggcactatttagtactaatcctttgagaayctctgatggtgtagacaatatacctgatgcttaagatgaaatatcatctgcctccagtattccacgagttgtttttgttgaaaagcttcaggttgcctggccctttaaggcaaatctctggtgttcaaattggtgaagtaaaaagatattttatgctccagtg

SEQ ID NO: 642934 - DNA, 506 bp, Homo sapiens
tggttcactggggagaacacaaaaggaaagagagacatcagatggccattcaaagatgctatccttctggtactttaaatgcaatgagaagttgtatccactagtaactattttctcaaagacttaactttcaaattttgccayggctgtgacctaaatcctttgcaatctatccctttctaatcatctttattccaatgacaaattccaaatttatattcccagcacagacctctactttgtctttcaaatctatataagtatacttggaaatgagaacatatgtgttccccaaaagctccatacaggaatgtgtatagaagtactatgtgtaggagcaaaaaactggaacaactttatgcagcaatgagaacggatgaaccacaattactcacaggaaaatgaatgaagttcataaacaagatgctgagcaaaaggtaaaccccaaagggtacacattgcatggctctatccaaatcaagtttaaaagcaggcaagattaatat

SEQ ID NO: 642935 - DNA, 570 bp, Homo sapiens
aacattaataaagatttgcaatatatatgttacaacaattcttagatatttgtattagtctggtttcacactgctgataaagacatacctgagactggataatttataaaggaaagaggtttaattgactcacagttccacatggctggggcagcctcacaatcacggcggaagagcaagggacatcttacatggaggcagaaaagagagagaatgagagccaagtgaaaggggtttccccttatgaaaccatcggatctcgtgagacttattcactaccatgagaaccgtatgggggaactgcccccatgattcaattatctcccactgggtccctcccacaacaygtgggaattataggagctacaattcaagatgagatttgggcagggacactgcaaaaccatatcaatattcaaattttaattcatggataaaaccatcatctggttccaggtggaagcatgtgctttaggtgtgtgccatcagtccacattgagcggcattatacaaaatagctctgagaaacttgatactgcttttcctttaagaatattcttaagaacatca

SEQ ID NO: 642936 - DNA, 580 bp, Homo sapiens
gagttcaagaatattgtcataaaagggcattgcctcctccctcacaaaacaaggtgcactaagcttctcaagccctcacttcagtgggctgatggaaatatagccaaagtattttaccatgttttgtaagatctcttggtttagcaaatacattcaaagaaatttttccaccaaacgtgccacaagaattgtgttttcatttctcctgtgcaagtacagaatggagagaaagtaggcaatcagggagagatgcaaagagtctagcaaattatttctagcataatcacacatttaacttcagactcagccttgttttataattccaaaaaaaaaaaaaatgaaggtcaaagaatactgctttaccagtattctacgtrtttacatattggcagccaggcttaaaatagagccttacctattttacttaccactgccggcttggatactagttggtatcaacaaaagaaaatccccttggacagagcaatgtaaattagccaagtattattaaatgccttgtatagtcttagcattccactaggtgttaacaggcacctaagagaactaaagctcatagtcc

SEQ ID NO: 642937 - DNA, 497 bp, Homo sapiens
tagccaatcaaatctagatattcaatagcataacatcaaaatacccaaaaaaaactctgamatgcaaagaagccgtaagatatatataattaagatatatattaacaggataaaaataagtcatttataaatgacaaaaaagaaggaaatttcaaggttcttaaagtaaatatattttataaatacatatagataaatacatatatatgtcaaggtacttaaatgaaaattaaacataggagaaaaatagaagttataaaatgaaaaatgtgacatatatagatgaaaaataaatatttgaaataaaaattccatgacatagaataagtaatggattttaccctaacatcagaaaatttatagaacaaattagaagcattacaaactaaaggacaaatggtaaactaaaataagaaaaccagaaactcactgatacgtcagacaatatgcatcagtgtaacatacatgtaatcaacatctcaaaaaggatgggtggg

SEQ ID NO: 642938 - DNA, 424 bp, Homo sapiens
gaattcttctttcaggtgatacctataaaactcaggctcttcgtgtcatacgatttcaatacatggcctccattgttgctattgaaggagaagaaagattacgaaaaatcacacagttttatagccagtcctagaactgttgtacatcatttccatccacttccaattggccaggacttaatcacatggcccatcctgaaggagcctggaaaatggagtctccctgtgtgccccagaagaggaaatgggattggtgagcatccagacaaccagtcttcgagtacacagccaggcttgggaattttattattctttgtaaatctggtagcaatartcacttctttaaaaatttggagggagaactactttgttatatttcaatgggttctctaaaccatataattcttcattctttagatataat

SEQ ID NO: 642939 - DNA, 571 bp, Homo sapiens
tcccactactaggtatatatctagagtaaaataagtcattattcaaaaaagatacttgcacatacatgtttatagcagcacaattcacaattgccaaaaatatggaaccagcccaaatacccatcaatcaataagtggataaagaaaatgtagcatatatataccatggaatactgctcagctataaaaaggtatgaaataatggcattcacagtgacttggatggaattggagactattattctaggtgaagtaactcaggaatagaaaaccagacatcgtatgctctcactcataygtgggagctaagctatgaggttgcaaaggcataagaatgatacattggactttggggacttgggggaaagggtgaggggtggcgagggataaaagactacacattgggtacagtgtacactgctcaggtgatgggtgcaccaaaatctcagaaatcatcactaaagagcttattcatgtaatcaaataccacctgtttccctaaaacgtactgaagtaaaaacataaacaatttttttaaaagaatgaagatgaagaggaagaggaagaagaa

SEQ ID NO: 642940 - DNA, 514 bp, Homo sapiens
ggctgctctggctgtggctgcaacttccttgggagaagggacttttcatcaactgttagaagtttggctggttcccttgggctatgagagggccaaggtgtgaaatgcttgttaaagaaaagtatttcttaatgcttatttcccacctgcagtctattattccaatcttggatttatttagggataatagtaaaatgtctcaggttttttttgcagtggatctaggctaccataagggagctttggcctcttgyggatattttcttggagaaagtcaagctcccatgatatattactttgcaaagactgctgtaacaaggtacaacaaaccgggtggcttcaacaacaacaatgtattatttcatggttgtggggactagaagaagtccaagaatcaaggttttggcagggttgttccttccaagttctgtgagagaaggatccattctatgcctctctcttttgcttagagttggctgccttctccctgtctctttatatcattgtccctgca

SEQ ID NO: 642941 - DNA, 436 bp, Homo sapiens
attgtattttaagtcagcaatatagtgacaaggcaaaaggagtaaggaaaatattattatgcaatacagttacaagaactgcaatttctattacaatggtaaattggactctcaatatattcaactttcttcagttctcccaaacctcaatcccacacacccatcatagtgcttartgaatccctcttctcttctacagttctgtaaagacgtgtcattatttggtgttcattttcttaaatagcatttcctctcctgccttctatcagcacaactactgaaagtacttttaatgtttgttgctaagtagcttaaaacttttgcagtacctttttatgagaattcacagccatgtgactgtatccctgaattccctgggtgacattgtttctttgtcacctagcaactgctatgaagaaaaagtgagtaagagaca

SEQ ID NO: 642942 - DNA, 645 bp, Homo sapiens
aataaccactgattattctaccttcagaaggcagagcagtaagcaaagacattaaagccttggctttggagtcactgggttctaacttaggctatataattttctccaaaatcttagtgttctccattataaaggattaatgatatttacctcttgctgtcaccatggggataatatgagataatgtaagtgaaacccctggcacacagggttcacgctcagttaaagagtgtgattattgttaatataattgttctctcattgaatatgttcagaagatcattgttatggatagaatgtttgtgccctcctcattcatatgttgaagccctaaccccatatatgatgggttttggatttggagctcttgtgaggtgattaggttaagatgtggtcattagggtggagcccctatgatgggattagtgtccttataagaagagaaaaagaccagagctctctctttccaccacataagaacacagtgagaaagtagctgtctgcaagccaggaagaaagccctcaccaaagacccaacaatgctggcayccttgtcttagacttccagccaccagaactgtgagagaaactgtcttttgtttaagtcatccaattgatgatatttgttatagctgcccaagctga

SEQ ID NO: 642943 - DNA, 581 bp, Homo sapiens
taaggaatatctgtatttacaaattacccagtctaatgtattttgttgtagcaacaggaacaaactaaaacactaccccaaaccatttttttcatattttctgagtactcttcttttgtcacatggcttgaaatttcttcacatagagaactctactattattttattttattttattttattttattttttgagacagagtcttgctcttttcacccaggctggagtgcagtggtgccatcttggctcacggcaacctctgcctcctggattcaaactactctcctgcctcagcctcccgagtagctgcgattacaggtggctgccaccaagcctggctaattcttgtatttttagtagagacggagtattgccatgttagtcaggctggtctcgaactcctgacctcaggtgatctgcccaccttggcctcccaaaatgttgggattacaggcttgagccaccaygtctggctgataactctacttttagatactctctttgcttaaacaaattagccattccttccttgacatgttttaatcagattgccttcctattaacttcggaaattaagagtt

SEQ ID NO: 642944 - DNA, 372 bp, Homo sapiens
aaagcatcagccactctgcaaatggcactagatggaatgctaatgaggccaacgtcatgacttcatgttcaatctgtgtactgagactacttaatttatactataggcatgacctgtgggttccctaaaccccatctccataccagccaccagccagtatctcctaartacatgctatggtcacagtctggaccaaaagatcaaatgtgacaattgttatggatcgctgagaacctcggttctcctcaaactcctacttagaatcaaaaacacttactgccaaggatataaataatagctccctgcagtggcattttaaaactttccagtctctggatagctgtgtaaatctgccttgcagactgagggtat

SEQ ID NO: 642945 - DNA, 629 bp, Homo sapiens
actagtgtaaggataaacatatagattaatagaatggaattgggaatccaaaaacgtacccataacctctctattgattttcaacaagagtgccaaaaccatcagctggatttccacatgcaaaactaggataaagttggacccttgcctcacactgtatacataaaagtaactcaaaatggatcaacgatgtraacttaagggctaaaattataacacttttagaaacataggtgtgaactcttttgacctagggtttggcaacagtttcttggatatgacttcaaaaacacaagcaacaaaataaaaatataacttagacctcaaaattaaaaacttttgtgcattaaaagcactatggagagcaattacccatggtaatagagagaatatttgcaaatcatatatctgataaggacctagtatccaaaatatataacgaattcttacaaatcaatagccaaaagacaaaatctcaattaaaaatggggcttaagcgtcaaattttgtctcctcaaaaaagataagttgaagtcctgatccgagtacttcagagtacatccttacttggaaatagagtcactgcaaatgtaattagttaagatgaggtcatactggaataagaatgc

SEQ ID NO: 642946 - DNA, 629 bp, Homo sapiens
actagtgtaaggataaacatatagattaatagaatggaattgggaatccaaaaacgtacccataacctctctattgattttcaacaagagtgccaaaaccatcagctggatttccacatgcaaaactaggataaagttggacccttgcctcacactgtatacataaaagtaactcaaaatggatcaacgatgtgaacttaagggctaaaattataacacttttagaaacataggtgtgaactcttttgacctagggtttggcaacagtttcttggatatgacttcaaaarcacaagcaacaaaataaaaatataacttagacctcaaaattaaaaacttttgtgcattaaaagcactatggagagcaattacccatggtaatagagagaatatttgcaaatcatatatctgataaggacctagtatccaaaatatataacgaattcttacaaatcaatagccaaaagacaaaatctcaattaaaaatggggcttaagcgtcaaattttgtctcctcaaaaaagataagttgaagtcctgatccgagtacttcagagtacatccttacttggaaatagagtcactgcaaatgtaattagttaagatgaggtcatactggaataagaatgc

SEQ ID NO: 642947 - DNA, 525 bp, Homo sapiens
aagaatcccttttaaacataatgttagagtaagaatttcacagaactcattaggactttaatttttatagtaaagaaaaactataatatccattgycactaaaacatcatatttactgggtatcaatcaataataaattgttcttgtgaaatgttaaaaatgtgagcattctaaaaatattggaaaaaaagcccagagtgtttatgtgttagtaagttttgattttattgcatacaggtcagttaattcttcaaagatgtgttaattccttcagggcactagtcatgcatggctgtagtatgattcattttatggaattaagtaataatctccataggtttataatttactctgagaaagcaacttaactcactaagaaagtaagactaaatagtctacataatccaggagtggtagagggaggtaaatatcattttcaattgagaaaaaaagattggaatgcattctagcatttttttcttcacaattggaccttcccatttctatgtcttagattattgcaat

SEQ ID NO: 642948 - DNA, 525 bp, Homo sapiens
aagaatcccttttaaacataatgttagagtaagaatttcacagaactcattaggactttaatttttatagtaaagaaaaactataatatccattgccaytaaaacatcatatttactgggtatcaatcaataataaattgttcttgtgaaatgttaaaaatgtgagcattctaaaaatattggaaaaaaagcccagagtgtttatgtgttagtaagttttgattttattgcatacaggtcagttaattcttcaaagatgtgttaattccttcagggcactagtcatgcatggctgtagtatgattcattttatggaattaagtaataatctccataggtttataatttactctgagaaagcaacttaactcactaagaaagtaagactaaatagtctacataatccaggagtggtagagggaggtaaatatcattttcaattgagaaaaaaagattggaatgcattctagcatttttttcttcacaattggaccttcccatttctatgtcttagattattgcaat

SEQ ID NO: 642949 - DNA, 434 bp, Homo sapiens
cagtgtaaagatcttttatttttctttcaagacagggtcttgctctgttgcccaggctgaagcacagtggtgcgatctcagctcaccctaacctctgcctcctaggctcgagcaatcctcccacctcagccccttgagtagctgggactacaagtgtgcaccaccacacccagttaatttttgtatcttttttggtagaggctggtctcaaattcctaggctcaagtgatccacccgcctcagcctctcaaagtgctgggattacagatgtgagccaccgtgctaggccaggcaatgtaaagttcttattatctgtctttaaaaagacactcttggcacaatttcagaccttawcttggatcaaacattggagaaagactttatttttcaaagtttcaaatgactgaagaaccttacatttggaatgaacccaa

SEQ ID NO: 642950 - DNA, 575 bp, Homo sapiens
actggattcagtcttataactatttttggccaattagagtgaggcagaaatgacagtgtaccagttctgaaactgtgccggcagagcctttgaatgttttttttgtctctcacacctctgccatcatcatgagaagaatatggctttgctagctccaaatctgggctcgacattcttctgctccaaagaagatgagagagccatgtggagcagagcctctccagatgaggccagcctaggtcaatgaaactccagccaacacactgacactcaacaaatgctttctggtgcatgctgctgagattttataattgcctgttatacracattgtagcattagttggctgatgcaaatatattattagctaattatattgattgaatttctggtattaaactattttacatttctgaaacagaattgtttattattatttcaacacaggactgaattcagtctgcttaattgttcatttagaactttctgtttgcattcaatggtcatcttagtctattttatctttctcaggttggagcattaaagttatgttatcatcataaaacgtactgggata

SEQ ID NO: 642951 - DNA, 600 bp, Homo sapiens
cattttaaaattagattgtttggatttttttgctgttgagatgtttgagttccttgtatattctgggtattaattccctcatagaaaaatagtttgcaaatattttctcatattctgtccattgtcttttcacagtgttattgtttccttttatgtgcagaagctttttagtttgatgtaatcacatttgttaatttttgcttttgttgcctgtacttttgaggtcgcagccataaaatatttgcstaaatcaatgttctggagtgtttccactgtgtgttcttctagtacattcatagtttggggtcttacatttaggtctttaatccattttgagttgatttttgtatgaggtaagaggtaggggtctagtttcattcttctgtatatggatatctagttttcttagcattgtttattgaaaagactgtcccttccccagtgaatgttcttgttgtctttgtccataccatttgcctatagatacgtggattagtttccgggttctctattctgttccactggtctatgtgtctgttttataccaataccatgctgttttggttactatagcttcatagtatattttgaattctggta

SEQ ID NO: 642952 - DNA, 600 bp, Homo sapiens
cattttaaaattagattgtttggatttttttgctgttgagatgtttgagttccttgtatattctgggtattaattccctcatagaaaaatagtttgcaaatattttctcatattctgtccattgtcttttcacagtgttattgtttccttttatgtgcagaagctttttagtttgatgtaatcacatttgttaatttttgcttttgttgcctgtacttttgaggtcgcagccataaaatatttgcctaaatcaatgttctggagtgtttccactgtgtgttcttctagtacattcatagtttggggtcttacatttaggtctttaatccattttgagttgatttttgtatgaggtaagaggtaggggtctagtttcattcttctgtatatggatatctagttttcttagcattgtttattgaaaagactgtcccttccccagtgaatgttcttgwtgtctttgtccataccatttgcctatagatacgtggattagtttccgggttctctattctgttccactggtctatgtgtctgttttataccaataccatgctgttttggttactatagcttcatagtatattttgaattctggta

SEQ ID NO: 642953 - DNA, 602 bp, Homo sapiens
ttatttacttgatttttccctcatagcatatagtttgaggtcaggtttccatcctagttaatttcttctgcacacttttgagtttgtctctatctcttttaaagrgaagcattcagaacctaagactgtttctgttttgtttttgattggggtcagaccgtatgtctgcccctgtcagatcatgttactactgactcatggtgaggttaccactgactcaagccctgctgtttacccacattactgctaataaagcacgtttcctcatcctgggctcatacagtttttatcctgtttgtcagcatttacctttattagtaaagatacttaaaaagattaaatcccttgctcaagatttgcaagttattttgaatcctaatgtcaaggcaaacatctctacttacaagaaaatcactttgcttcgtgaacacatttttatttcttttgcatgatttcatgtatcttcattatgcaagtgatgttttgtagcataggtagaaatttgtgtatgtgttattttaaacattgggtgctgggcttaatacctgggtgacgaaagaatctgcacaaaaagtccccgtgacaagagtttacttatgtaa

SEQ ID NO: 642954 - DNA, 473 bp, Homo sapiens
agaagggaaaaaagaataaacatattttgtttgaataagtgactcactcttttggaattttctttttggtcaaatttattttgaattgataatacttggtttcagaaaaaagtaagtgtgtatacagtaaaaaatgtctctttcctagtctaacacacagttactctttcctaaggcaccagttgtgtttgtttcttgtatgtcctcccatggatattgtattagtccattttgcactgctgtaaaaaatacccaagaggcactttataaagaaaagaggtttaattggctcatggtcctgcmggttgtacaggaagcatgacagcatctgcttccggggagtcctcaggaaacttacaatcatggcagaaggtgaacgggcagcaggcacggccgacgtggccagagcggaggaagagagagagtggggggcggtgctacacacttttaaacaatcagatctcatgagaact

SEQ ID NO: 642955 - DNA, 473 bp, Homo sapiens
agaagggaaaaaagaataaacatattttgtttgaataagtgactcactcttttggaattttctttttggtcaaatttattttgaattgataatacttggtttcagaaaaaagtaagtgtgtatacagtaaaaaatgtctctttcctagtctaacacacagttactctttcctaaggcaccagttgtgtttgtttcttgtatgtcctcccatggatattgtattagtccattttgcactgctgtaaaaaatacccaagaggcactttataaagaaaagaggtttaattggctcatggtcctgcaggttgtacaggaagcatgrcagcatctgcttccggggagtcctcaggaaacttacaatcatggcagaaggtgaacgggcagcaggcacggccgacgtggccagagcggaggaagagagagagtggggggcggtgctacacacttttaaacaatcagatctcatgagaact

SEQ ID NO: 642956 - DNA, 536 bp, Homo sapiens
gaggctgaggcaggagaatcatttgaacccaggagtcggaggttgcagtgagctgaaatcatgccactgcactctagcctgggcaacagagtgagacttcatctcaaaacaaaaaaagtactgttttgaccatttcccttcccattgtctaaaacctggacttcaatcttatgaaatgaacctgtggccctcttttctttcactgtgaaatgtagttctctagtacgttcttcagacttggctgcttctgaacatcttcccccaaccaccccagtcaccatagaaacaccaagtcaagccttataaaaatcattatctaattttgtcttatttctaaagaggagcttttggttgcacattgtcttgatgtgacagacattataacctgtgattgaatgtctgatcattttatacttacagtcctcgaaggtgatttctgtgatattggcaaagatagtgaattaatttccattcattagtcakgaatcttatgaactgtatctttctgactaacatcaacaaaatgagctgcccac

SEQ ID NO: 642957 - DNA, 521 bp, Homo sapiens
atgaacaaaagacggtctttaaaatgcttggaaagctcagacgcaggccaggtgcagtggctcatgcctgtaatcccggcacttcgggaggctaaaatgggcgggcagatcacctgaggtcgggacttcaagaccagcctggccaacrtggtgaaaccccatctctactaaaaatacaaaaatgagccaggtgtggttacacacacctgtaatccttgctacctgggagactgaggcatgagaatcacttgaatgcagtaaatggaggtggcagtgagctgggattgtaacactgcagcactccagcctgggtgacagagtgattctgtcttgaaataaaagctctgaactatccagaggctatacacactgtattgggagtgggaaattcattcaacaaatgtttcctctgtgtctgctatatcattaaggtagatactaccctgtctctatggaactatctatctagcaagtcagaaaataaaaatgatgatgggatatatacacagcacactgataca

SEQ ID NO: 642958 - DNA, 604 bp, Homo sapiens
atccacccacctcggtctcctaaagttctgggattayggtgtgagccaccatgcccagccaagtaaacattttcttagagccagataggaaatattttgccatgaaagtcatagggtctctgtcccagtgactcaattctgaccttgtagctccaaagcagccattgacaagacttctacaatggatgtggccgtattccagtaaaattttatttgccaaaaccggtgcctgctaactatagtttgtttatctctgtatctctgctctggtggaacaataacattcatgaactctggttctctggatgccctggaaagagaactgccctacattccagatcacctactaactcagatgtctatgtgaaggaaaaataaggcgttttgtttttgtttttttttgtttgttttgttttttgtttttgacaggatctcacactgttgtccaggctggagtgcagtggcaggatcatagcccaccgtagcctcaacctcccttggctcaggtgatcctcccacctcagcttcccaagtaggtgggactacaggcatatgccaccatgcctggctgattttttattttaaaaattttttgtagagacag

SEQ ID NO: 642959 - DNA, 604 bp, Homo sapiens
atccacccacctcggtctcctaaagttctgggattatggtgtgagccaccatgcccagccaagyaaacattttcttagagccagataggaaatattttgccatgaaagtcatagggtctctgtcccagtgactcaattctgaccttgtagctccaaagcagccattgacaagacttctacaatggatgtggccgtattccagtaaaattttatttgccaaaaccggtgcctgctaactatagtttgtttatctctgtatctctgctctggtggaacaataacattcatgaactctggttctctggatgccctggaaagagaactgccctacattccagatcacctactaactcagatgtctatgtgaaggaaaaataaggcgttttgtttttgtttttttttgtttgttttgttttttgtttttgacaggatctcacactgttgtccaggctggagtgcagtggcaggatcatagcccaccgtagcctcaacctcccttggctcaggtgatcctcccacctcagcttcccaagtaggtgggactacaggcatatgccaccatgcctggctgattttttattttaaaaattttttgtagagacag

SEQ ID NO: 642960 - DNA, 604 bp, Homo sapiens
atccacccacctcggtctcctaaagttctgggattatggtgtgagccaccatgcccagccaagtaaacattttcttagagccagataggaaatattttgccatgaaagtcatagggtctctgtcccagtgactcaattctgaccttgtagctccaaagcagccattgacaagacttctacaatggatgtggccgtattccagtaaaattttatttgccaaaaccggtgcctgctaactatagtttgtttatctctgtatctctgctctggtggaacaataacattcatgaactctggttctctggatgccctggaaagagaactgccctacattccagatcacctactaactcagatgtctatgtgaaggaaaaataaggygttttgtttttgtttttttttgtttgttttgttttttgtttttgacaggatctcacactgttgtccaggctggagtgcagtggcaggatcatagcccaccgtagcctcaacctcccttggctcaggtgatcctcccacctcagcttcccaagtaggtgggactacaggcatatgccaccatgcctggctgattttttattttaaaaattttttgtagagacag

SEQ ID NO: 642961 - DNA, 618 bp, Homo sapiens
gcctctatgagcaactatatgccaataaattggaaaacctagaagaaatggacaaatttcaagatacatgcaatctaccaagattgaactatgaagaaattcaaaagaacagaccaataacaagtaacaagttggaagctgtaataaaacatctcccagcaaagaaaagcccaggacctgacggctacactgcttaatcttaccaaacatttaaagaaggactaataccaatcctactcaaagtattccaaaaaataaaggaggaaatacttccaaactcattctacaaggccagtattaccctgacaccaaaatcagacaaagccattaaaaaaagaaaactacaggccaacatctctgatgaacattaatgcaaaaatcctcaagaaaatcttagcaaaccaaattaaacagcaaattaaaaatatcattcatcatgaccaagtgggatttatcctagggatrcaaggatggttcaacatatgaaaatcaatatgatacatcatatcaacagaatgagggataatataatttcatttgatgctgaaaaagcatttgataaaattcaacattccttcatcattaaaaccctcaaaaaactgtgtatagaaggaacat

SEQ ID NO: 642962 - DNA, 413 bp, Homo sapiens
tgttgtgatgactgaatccattaaaacagagaattccagtgctcactgatgatctagctcaaattccccaagatcttgtattaccaacaagattggttgttcagttagacagagctcttttgtgtgtgtgcaatrggaagtttcctgtattaacctatataattaatttgcagacaagaaaaacactgcaaacattgttaaaaatgcattttatgttcattttttttttaattttttaaatcgggatttgatcttcaatgctaccaaatcacctctagtaagacacaggtctgcagttagtttttgaagtggatccaggatggtggtctgaggttgcctgtaaagaatgaggtttttctggcctttggccaaagcaaagttaactaacggaagggataaaaattgtcttgtgt

SEQ ID NO: 642963 - DNA, 564 bp, Homo sapiens
tggaactgaacttaatttctgtgttaaaccctggttcctctgaggagcagaaactcaacttgagtcatacagggtttctttccacagtcatcactgatattacaggtaagttctaagggactaaggtgatgtcaggggttgaaacttggaggaagaagagacatagtcaaagcttagagctaatctgctaagagagctagaaggaggagatggattccagaaaaaacatggtaattctctatcttaaccctccctgtctgtcctctcacccgtcacaaaatgagaagacaagtttattgatcagaaatttgtttatgttattgccatttttttcttattctcagaaggtcaggatcaaaagcttaagaaagatacctgattctttcctgacttatggttttggcagagattcagaaagagctgacagttatctcagaatgccactatttccaatttaatgctaatttatgacaatgttttcttatgttttactatctcaakcattattaaatgtattcagttatagtattaaaatatattaagtagtatattaaggattgagcc

SEQ ID NO: 642964 - DNA, 542 bp, Homo sapiens
tctacaaacatagtgacaggtccacattcggttcacayataattacaagttatagcacccacccctaggttttcaatcctcttaacattggctggggcaccaggtagaattttctaatctcctaacaatccttggtaacttctctggttggggaaaatgtacttccagagggagatgctggtactgaggtcactccatctcagatttaacacaatggtttcatctcctgcagaaaccagatagcatctcaaggctttcactagcaacctactagcaattattactaaaaaacagtaggttctatatcaatgaactaccaaacacagaggaaaaactaccaaggattttaaataaatcctttcttgtaaaaattatgagcctatctgttcaaagactttgaataatcataaaattattcaaagtattcagtgtataaattcacttaactgctatttcccagtcaattagatttttattcttcattaccaaaaatactaaatgcttttattttggaggttttaaactgcattatgatatgccac

SEQ ID NO: 642965 - DNA, 542 bp, Homo sapiens
tctacaaacatagtgacaggtccacattcggttcacacataattacaagttatagcacccacccctaggttttcaatcctcttaacattggctggggcaccaggtagaattttctaatctcctaacaatccttggtaacttctctggttggggaaaatgtacttccagagggagatgctggtactgaggtcactccatctcagatttaacacaatggtttcrtctcctgcagaaaccagatagcatctcaaggctttcactagcaacctactagcaattattactaaaaaacagtaggttctatatcaatgaactaccaaacacagaggaaaaactaccaaggattttaaataaatcctttcttgtaaaaattatgagcctatctgttcaaagactttgaataatcataaaattattcaaagtattcagtgtataaattcacttaactgctatttcccagtcaattagatttttattcttcattaccaaaaatactaaatgcttttattttggaggttttaaactgcattatgatatgccac

SEQ ID NO: 642966 - DNA, 463 bp, Homo sapiens
tcatactactaatacttatcaagcaactattttctggaagtcaataaatacagtatacaacttcctacattattgctttggagtttactgtgaataccagaggtcctgaaatcaatcaatcagttgtctgacctactgcctaccacacacttcttgtttctgctgaccttgtttatttgctcaacttaatgtgcttaccttctaaccaaataatctcttctccagcccactgattatttcatttcctctgatttagttttctctgttttgaatagtttacctcattargaccttccattatccctaaggatatttctgagtgaaaacaatcaaaatcattgctgttactcctatgtaccagacactttaaaaaggacttcatatgttttatatcatttagtccccaaatacacacatgagttattattattcttattttacaaatgaaagaattgaggcttag

SEQ ID NO: 642967 - DNA, 463 bp, Homo sapiens
tcatactactaatacttatcaagcaactattttctggaagtcaataaatacagtatacaacttcctacattattgctttggagtttactgtgaataccagaggtcctgaaatcaatcaatcagttgtctgacctactgcctaccacacacttcttgtttctgctgaccttgtttatttgctcaacttaatgtgcttaccttctaaccaaataatctcttctccagcccactgattatttcatttcctctgatttagttttctctgttttgaatagtttacctcattaggaccttccattatccctaargatatttctgagtgaaaacaatcaaaatcattgctgttactcctatgtaccagacactttaaaaaggacttcatatgttttatatcatttagtccccaaatacacacatgagttattattattcttattttacaaatgaaagaattgaggcttag

SEQ ID NO: 642968 - DNA, 585 bp, Homo sapiens
  misc_feature 565, 566, 567, 568, 569, 570, 571, 572, 573, 574, 575, 576,577, 578, 579, 580, 581, 582, 583, 584, 585: n = A,T,C or G
cctttaagaccagcagaaaacctctgttactgcttcttaactgctttaatgactcaacttatatcccattatattcacagctattgccatactcaaaagggagagcattattcaaggtttgtacgccagggatataagtattataattctgaataccatccttgctaaatgattttgtgtaaatatttatggtcttagtttccaaaaatgaaaagtataaataaaataaatagccctaaaattgttttataatgtatataattctaagcctcaaaatgagctaagtttgaaaatgtgtaagtgaattcctctctattttagatattttcttcttccaaagggcttaatatataatttgccatcagtcacaaaggacatttgttgatcaaatttagtctgcacaaatgaatagacctctgttaagtgagtagcacatacaatatatagtttcaggctaaaatcattayttctttattgatagaaacaaagaaaaaaacatttggtatttcagacttcagtgcacaatgataaaaattagttaataaatataggactgtattcgacnnnnnnnnnnnnnnnnnnnnn

SEQ ID NO: 642969 - DNA, 456 bp, Homo sapiens
gtgaaactggcatttttcatgataaactctaagatgcactcaaaacccaagttaggacagtgacagtgtaattcccaggtgtcggctgggaaaggttcctgcagctaagaattaagtttwtttttaagcttttttacccaaatatacattctcaggcctaattttcacatccattcttttgcttctgattggctctggcaacaatagactttaataagaaaaaggtttttttttgttaaaactatttaaattaaaccacagtgtggtacagaaatataaaaacctaacttttttgtttgaaaaatactagaaaaatgtctttttatcatttaaacaaccttgtagatcaagtgactacatttcaagttaatcaccaatgaataaaaatgaactgcaactttgaggtttttttccctgttagtttctacctaatattttgcagatttttttccctaa

SEQ ID NO: 642970 - DNA, 456 bp, Homo sapiens
gtgaaactggcatttttcatgataaactctaagatgcactcaaaacccaagttaggacagtgacagtgtaattcccaggtgtcggctgggaaaggttcctgcagctaagaattaagtttatttttaagcttttttacccaaatatacattctcaggcctaattttcacatccattcttttgcttctgattggctctgkcaacaatagactttaataagaaaaaggtttttttttgttaaaactatttaaattaaaccacagtgtggtacagaaatataaaaacctaacttttttgtttgaaaaatactagaaaaatgtctttttatcatttaaacaaccttgtagatcaagtgactacatttcaagttaatcaccaatgaataaaaatgaactgcaactttgaggtttttttccctgttagtttctacctaatattttgcagatttttttccctaa

SEQ ID NO: 642971 - DNA, 529 bp, Homo sapiens
acatgatgaattcaaatagctggcaatttgtctttggcgagaaataaaggtttaattttatgattatgatttaatagctcttctgtcctaaaaggataccttccaccattcctatgctggtttcatatcatgctctgaggttagtcctatgcaacagcccgcaagttacaagtaatgagcagtgctaaacaattgcctataggaccaggaggtcagctttgactccgagttttgccgcacagcaagagcatctgaatttgtttgtttcttcatccacacaaatgactcagcttgcttagttaaaaaaaaaatccaaagcacaatattgttttcacctcaaataatgaaagacttgttctctgcttactataactattgtattgatattttaaactaaacttgtcaagcaccggtagttaaggctgaggcagggaggtgcagagtttgatctattattatagagaagtggatgatttctgttgaagaaagccagccagtgttgggkggaggggaggtttggggctacctg

SEQ ID NO: 642972 - DNA, 506 bp, Homo sapiens
agcattattttgcctatttgaagtgctaattattattggcaggttcttcggtttctatttttartctgtggaaacaacaatagtatcaatttcaatttcatagtgtatttgtgataattaaataaactagtggacataaaacatcaaagagatcttttagtaaatgatagctattacttagtagttagagtctagtttttcacactagtaaaataataattgatatattaagaaatttaatattgtgaaaattagagagaatatgtgtatagttcctaacacttcttggttgtacaaactcagtttagttacttaacatttttggtccttatatttctcatctgtagaatatgctcaataattgcatagccctcgtagaatttttgaaaagataaaatttaaaaatggacatagagcttttagcatgttacctgatacctaataagtgctcaatagcaagttagtcattattataatttgtaataataacacaaatttttattatt

SEQ ID NO: 642973 - DNA, 586 bp, Homo sapiens
gtcatgaaatagctgtgcagggaagtctttctaaagtgatatggtctaatctcctcattcctgagggggaaactgaggttcagggagataaaaagattctgctggcttggacccagtgtactttatgccctctctgttttcctctgtcttgatcctttctttggaaatattctggtgaactcagttgcattgataggtatgaacaacagacaaaagataactttattaatgccagtagcatttaatgttttgacacagtcaatgacatcagctaaagaaaagaccayatatttgtagaatgttaacatgtgagagaaaagaggaagcagaataggaggagcatatgttaaaggataaacccttaaaattcaaagttcatgtagcttatagttgtctggtcctcagatcaatccggtttgcaggattttaagactgtccaaaatattgtcagatagggtttaaaaaaaaacaaaccaccttagtgcatattttttttcaggcttttatcaatctatatgatcttttacaaaaatgacataatgatgctcatattgttttgtagctctgttttgtttccattcaaaaa

SEQ ID NO: 642974 - DNA, 648 bp, Homo sapiens
cccttcctttcttcctgttcctttcaattcattcattcactcactcatgagcactgttgtagtgtttgggaaacctcatgaacagggctggggaattctttctttggaacatgtctagacggaggatcacaaacgatgacccatgaggaatgagcaaaacaacaagggatgttttgcctggagaagcaaagtctcaggaaatttccacatttatccttaaacacctgtgggattattgtaaaagtgaagggagaaatttagtcttcaaggctccaggagtcagaatttaaagtcattgaaggaatcaagtttccgtacggggtcaggagaaactatgcaatgcttggagctgtgcagcagaacatactatcagataataagctttaaatggcaggcgttctatgagcagaaacagcaaaawcctacttggtttgaggtgttagagttcccagtctgtgctgagacatcaggaagctgtaaatagtattgtttgtgatcattcctactaggaagggtgtaagttgacaagaaagactgaggagcctctgagtatcagggaatgcatgactagagacagttgaccttataatgacatgtcctgcttttgatatatgctgaaagtcccattcttcatccattattcatcca

SEQ ID NO: 642975 - DNA, 570 bp, Homo sapiens
tagttttctgtcctattactaacacacttccagaagaacaagtacaaaaatacttcaatgaatgacatattctgtatcaacatcaggaatatcctggctcttgacccaaaaaatagattctctagttaattttggactcttccttcataacaaaattaaataagatataaatttgagtttgagaaattgctgcacacacattaaagcaaggaatatgagtaaagtcctttactctgcaggcaaagtgttgaaagtcacagtagtctatgagtcttccagtggatgattaacatgcaattaaaaaaaactaaaaatttactgtgcaaatgttttatagatattttatagatataaaaaaggataaagatattttatagataataaaaaaggaaaatccagaccagatcctagaaaacaccaaatcttcacatcatagagaatacgggatgatgggcaaatgaggtgcctaayaatagagggcagaactacagcccagctcagcatggatagacaataaagaattgaaagtagtagtagtaggtactttgtggagaccactgaagagtagca

SEQ ID NO: 642976 - DNA, 570 bp, Homo sapiens
tagttttctgtcctattactaacacacttccagaagaacaagtacaaaaatacttcaatgaatgacatattctgtatcaacatcaggaatatcctggctcttgacccaaaaaatagattctctagttaattttggactcttccttcataacaaaattaaataagatataaatttgagtttgagaaattgctgcacacacattaaagcaaggaatatgagtaaagtcctttactctgcaggcaaagtgttgaaagtcacagtagtctatgagtcttccagtggatgattaacatgcaattaaaaaaaactaaaaatttactgtgcaaatgttttatagatattttatagatataaaaaaggataaagatattttatagataataaaaaaggaaaatccagaccagatcctagaaaacaccaaatcttcacatcatagagaatacgggatgatgggcaaatgaggtgcctaataatagagggcagaactacakcccagctcagcatggatagacaataaagaattgaaagtagtagtagtaggtactttgtggagaccactgaagagtagca

SEQ ID NO: 642977 - DNA, 595 bp, Homo sapiens
tctgggctttgaaactgtcttccatagtgtgatatgtgaaatataaaatgaaaagtaagacagagaagaaagaaaacagtgagtgaattctctatcttcagctgaggtatccaagttctcacttcggaactgactacgggcggttgtgatgcgacccatggagagtaaggaaaagcatggtggggcaacggcccacctatgagtgtcacagaaccaggacaaaccccaaccccagcccagggaggcagtgagtgattgggtgaccctgctggggggaaccactatcttcccactgatctttgcaacccatgagacaggagatctcatgagctcatgccaccagggctttgggttagaagcacagagccatgaggtctctcagcagcctcttggacaagcacaggagacacaggggtttttgcattctctggccccaggaattccggtgagacaggagytcctctgtgcagtgctctgggaagggggcggaaaccagggagccaagcagagtcattctgagggcctcactaaccacaggcacctcacaagttagacccactggcttggaacccccagctgctggccagcaaacagc

SEQ ID NO: 642978 - DNA, 590 bp, Homo sapiens
aaggggtatttagtcaaagtttttatgcatgtttttattgagtaaatgtctaacttacataatggtatttttttttttataagtagtaaccattacagcatcctaagtagtccagaaactttgggaacattgttcacagtataaaatgataactgaaatgttttaagctaaatcacttctatataattgaaataagacttaaactgcaccaggtgctgtctctaatatacccatccccttgagagtttggtgttgaatacttccttggtaatggaaaggcacgccaactatgcccactacttgtatcgacacatactctttatctttttataaaaaaaaaaaaaaaaaaaaatactatattgtttcccctatctaaatgatggtcacagaatctgtttttttttttttttaagcaagtggagtaaataataaattttaggaaaatcattacccacttcactcattcattcaattcttattgatcactaagtaccatgaagtattttkggtaatgggaactctgtgataagcaagtaaagagggggaacaagaatgatgaccttggagagctcaagcagtgagggaggcag

SEQ ID NO: 642979 - DNA, 571 bp, Homo sapiens
aggcttaagcgtatgtgcgtgtttagtaaaaacctgaacagtggtatcagaggttgcacactctggtgaaaacaagcttaacaatatttatgagaataaatcactaaataaagtaacaatagsaagctctgggagagggggatcgtaatctggatttgctacaatattttctatagtgtctcagaaatcatgaaatattgcatgaaattaagtatgtttgattcttacagtcaaaaaatgcagacaatagaattgcatttgaaagggtttagatgttggacttagcagataaatgcttcaaaatcttcttctataatttgttcaaagcactaaaagaatgtttaaagactgaaaagtataatgatgatctatcaaataataccaataaaattataaaaattaagcacatagaaattcttgaattggaaatcgaataactaaaataaaaactttataaggatctcaacagtagtttgatcacaagaaaaaaatcaaatagataaatagaaatattccaatctgagattttctaaaaaaaaaaagaaaaagaaataagtaaaaatgaacaaag

SEQ ID NO: 642980 - DNA, 573 bp, Homo sapiens
cgccaacttgggtacatctcaagggtattatgctgactctgaaagtcaatctcaaaggggcaaacgctgtatgatttcattcaaataacactctcaaatracaaaattatagaaatagagaatacattagttgttgccaggggagaaagagatgggcgtgagtataaagggtagcacagaggagatgcttatggtgatgaaatcgttctatatcttcattgttgtcatagctacacaaatacacaggacatagaactaaacgcacactgtgccctggtcaaattcatagctttgctaatgcattattattgtataagatatgaagagggttcatttaaaccggcacagaatttttcctaaaccactccacttagccaactcaccattccttctgtgaagcaggtggacagatacccactgggtcattatcgctccacaccaggggctgctcccctgtgctctgcgtcctgaggctttcaccagctgagctgtctgcttaccaggagtgagttgtatttgttctcaagcctgctaaggcctcttgagccatttttttaaattatgtaattaaaa

SEQ ID NO: 642981 - DNA, 521 bp, Homo sapiens
ctgctttttattttttgtgtatctgttgtacctttttttatttgatgttaccatgaggcttgcaaataatatcttataacccattattttaaaccaatgacaacactaactgcataaaccaacaaacaagcaaaaaagacaaactgataaaaactctacactttaactttgtccccctacttttaaactttttattctttctrtttatatcttattgtactgtgtatgtcttgaaaactggttgtagttattattttttattggttcagctcttattctttctctgcaagatatgggcagcacaattactgtgttataatattttgtttgcctgtgtacttactattaccagtaagttttgtaccttcagatttcttattgctcattaatgctcttttctctcagatagaactcctgttagcatttcttgtagaacaggtctgatgtttatgaaatccctcagcttttgtttgtctgggaaagtctttatttgtccttcatatttgaatgatatttttgct

SEQ ID NO: 642982 - DNA, 467 bp, Homo sapiens
tgtctctactaaaaatacaaaattaagcatgtgcctgtaatcccagctacttaggaggctgagacatgagaatcacttgaacccrggaggtggaggttgcagtgagctaagattgcaccattgcactccagcctgggtgacagagcaagactctgtctcaaaaaaaaaaaaaaaaatgtttttcccttctcgtcttccttttccattccaccatatgcaaggagggccttggaatgctaatagtctcacactagcacgtcacgctaaatagggtcccacttcaacactactgactggaggtttgctgagctaagtttttactatccatccaccaatcaaatcagtcacagactttgtagtcattatttccttgctggatgacaaggaccaactctagggtattgtaagtaccacattccctctgggtttctgagggagctaacccagcccttctataatgaatctta

SEQ ID NO: 642983 - DNA, 544 bp, Homo sapiens
tgcctgtaatcccagctactcgggaggctgaggcaggagaatagcgtgaacctgggaggcagagcttgcagtgagccaagatcgcaccagtgcactccagcctgggcggcagagcgagactcctactcaaaaaaaaaataaaaataaaaataaaaataaaaataaataaataaataaataaataaataaataaataaataaagtcaggtcatgagggtgcataattccacrgtgatttcccatccattgcacattcactgtgaatagaagctaaaacttaaccagttaactttatttatactctggatggagccttctcttttaataaaacagaatccgttaaggattataaacaaacagtgttttatgaactaaaactgcagtgcactagtcactcaagggtaaaaacagggctctgggtagctcagccagctataaataaagataaggccctgccaagcagggacttgggcagagtaattgctgactccataatcagcttctctcgtcttccttcaggcccacaaatcactcaggtgttggg

SEQ ID NO: 642984 - DNA, 520 bp, Homo sapiens
cttgcagattttatgaagactataatcataatataaatacaaaataagtagtattcatatccaatttgtgaattggtagtcacttttcttagtaaagacactatttgcaaaacttgaccttgtccgagctataatacatgcagttgtccacagcgttactaaggacaagtcatcatagatcactgagaagacagcttaaggcaagcatcttcagttaaagtttstattgccacaacattttttagagcttcagatttgctgttatattaatattttggtaacatatctaacataggtttaacatgaaacaggccacacaaaaactttttcagggttccgataactgacacatcaaaaaaattcatgtaattatttttgtaggtaagtctaaaatactataggtttgtccaaactgttatggggctgttccaaaagcaaacaaaaaaccaaagctcttgagaccatctaaagatcctgtatttgtcagtttaggctgccataacaaaatatcacagattaa

SEQ ID NO: 642985 - DNA, 520 bp, Homo sapiens
cttgcagattttatgaagactataatcataatataaatacaaaataagtagtattcatatccaatttgtgaattggtagtcacttttcttagtaaagacactatttgcaaaacttgaccttgtccgagctataatacatgcagttgtccacagcgttactaaggacaagtcatcatagatcactgagaagacagcttaaggcaagcatcttcagttaaagtttgtattgccacaacattttttagagcttcagatttgctgttatattaatattttggtaacmtatctaacataggtttaacatgaaacaggccacacaaaaactttttcagggttccgataactgacacatcaaaaaaattcatgtaattatttttgtaggtaagtctaaaatactataggtttgtccaaactgttatggggctgttccaaaagcaaacaaaaaaccaaagctcttgagaccatctaaagatcctgtatttgtcagtttaggctgccataacaaaatatcacagattaa

SEQ ID NO: 642986 - DNA, 529 bp, Homo sapiens
ttttattgataaaatttgtctctatagacattcactgtattaaaatttaaaactgataaaatttaaaaatatgatgtcatttcatttaaaataatattagtaaacaaattacattgtaatataaagagtgtgtatttgcatttccatattaaaacatattttttcgagacaaaaaatagaacagtttttttgacatcttaaaatctctctttaatatttggcttaatagaagatttttgtattttcttttgcattctgcctgttgcaattgatattttggttgatgtgtataaaaaatgttgactcacaaagatatgtggtttgaaatagttgtatattttaatgccttttacagataattgtagatattttgttgatactacaccaaaactcaagtgatagattctcaaatatcagttgtaatattgaatgtgcatcctttttaatkaacattttgtactttgttacattaaaatacattaatttattttgtacatttaatgaagattttccccatatactattttat

SEQ ID NO: 642987 - DNA, 604 bp, Homo sapiens
ttccataagtaacaaggagctgaatgttaataaccaagaaaatggggaacatgtctccaggacatgtaacagaccttcatgacagctcctcccatcacagacctggaggcctaggaaggatagtggtctcctgggctggattcagagccctccttgctgtgtgcagccttgcaacttggtgccctacaccctagccactccagccatggctaaaaggagccaatgtatagctcaggycattgcttcagagggtgcaagccccaagccttggcagcttccacatggtgttgggcctgcaggtgtgcagaagtcaagaagtgagatttgggaacctctgcctagatttcagaggatgtatggaaacacctggatgtccagtcaaaagattgctgcaggggtggagcctcatggagaacctctgctagagcagtgcagaaagaaaatgtggagttgagaccccacacagagttcctactgggacactgcctagtggagctgtgagaagaggactgccatcctctagaccccagaatggtacatccaccaaaagtttgcaccacgtgcctggaaaagccacaggcactcaacatcagcccatgaaagc

SEQ ID NO: 642988 - DNA, 605 bp, Homo sapiens
caatgcctcacagcagtctgacattcccaaagtagagagagctctgtctcaatatttacatatatctgaaaatattcagataactgaaaagttccagatatctgaaaatctcataaatattttaagagagcaacagtgacagaagcactaccaacttggattaaatgaaactgagacagtggaatataaaaagagggctctgagccccaggtttctgtgagtaggaagcagggacaggaagcagcgaaactgcaaactcaggaattttcagtgcatgcaaccctgggtgagggaaaatagtggactcgtggacccctgtcaaggagtagaagaatcaggccctaatgaagaaacattgtattgaataggggaagtgggtgataygtcgagaaggattttagaattgctacagaccaagaactactatgggccttccttctcccattgctgactgagagtgtctattgcagttagcctgtccatgtctcatcactgtatgttggtgtgggaaaaggataaccagacttttaattctcaaatctcaagacccagagaaactaaattcaaataggcttatcctctccagagcagacatagatcacaaa

SEQ ID NO: 642989 - DNA, 486 bp, Homo sapiens
ctaaataactggttgccatagtggcaggcactttggaaaaagtgtgtcagagtgaataaagatcattaaaaatgactaattagccatcagataagaagatgctatttgcatgctcatgtgagaaacagaattcttgcaaatttcatgtacctgcacataaaatgagagagaggtaaaggtgaagaaaacagtgttttcttttatccttctttctccccaatcagaactctatttcaaaaacatattataggctacaaaaattgcttgatcctcttggttacctgagtaccaattactgctgcctttttagactatccatccagtatctgtcctttcatgggtcarttgtttgtgatatatatgaaaagagtgtagacattggtactttagccatgattagactctgctacttccctcaccaattcaaacctcacgattttatttccagagaaatgtttctatgcacaaagtcacagagacactacc

SEQ ID NO: 642990 - DNA, 552 bp, Homo sapiens
gtgctatagctcttggtggcaaggtttgcaggcactcaagttgagaccactgggatccacgattcccttctggctagggctgctgttaattatccctctgtgggtgggcgtcacctgagttagctctgatttttctttctgctgtaacagaacaacactgagttcagtgcctcacaattgctgtgttctcactctcccagcatccagagatgctctctgcaccatacagctgctggcggggtgggggaggggtggcatcaccaattcaggactgttttttctatctgcagagcatctttcagtgatatgaagttaaaaccaggtactatgagtgctcacytgatttttggttcttgtgaaggtgctttttctgtgtagacatttgtgcggatggccatcaaaggagcttgctattctgccatcttgctccacttcacctctgtactttactaaggcagccctagaaaaccaatagagatactaaggtggatgttcattaactcgctaaatatttagatggtctataacactctaagcactgcactaaaacag

SEQ ID NO: 642991 - DNA, 552 bp, Homo sapiens
gtgctatagctcttggtggcaaggtttgcaggcactcaagttgagaccactgggatccacgattcccttctggctagggctgctgttaattatccctctgtgggtgggcgtcacctgagttagctctgatttttctttctgctgtaacagaacaacactgagttcagtgcctcacaattgctgtgttctcactctcccagcatccagagatgctctctgcaccatacagctgctggcggggtgggggaggggtggcatcaccaattcaggactgttttttctatctgcagagcatctttcagtgatatgaagttaaaaccaggtactatgagtgctcacctgatttttggttcttgtgaaggtgctttttctgtgtagacatttgtgsggatggccatcaaaggagcttgctattctgccatcttgctccacttcacctctgtactttactaaggcagccctagaaaaccaatagagatactaaggtggatgttcattaactcgctaaatatttagatggtctataacactctaagcactgcactaaaacag

SEQ ID NO: 642992 - DNA, 552 bp, Homo sapiens
gtgctatagctcttggtggcaaggtttgcaggcactcaagttgagaccactgggatccacgattcccttctggctagggctgctgttaattatccctctgtgggtgggcgtcacctgagttagctctgatttttctttctgctgtaacagaacaacactgagttcagtgcctcacaattgctgtgttctcactctcccagcatccagagatgctctctgcaccatacagctgctggcggggtgggggaggggtggcatcaccaattcaggactgttttttctatctgcagagcatctttcagtgatatgaagttaaaaccaggtactatgagtgctcacctgatttttggttcttgtgaaggtgctttttctgtgtagacatttgtgcggatggccrtcaaaggagcttgctattctgccatcttgctccacttcacctctgtactttactaaggcagccctagaaaaccaatagagatactaaggtggatgttcattaactcgctaaatatttagatggtctataacactctaagcactgcactaaaacag

SEQ ID NO: 642993 - DNA, 552 bp, Homo sapiens
gtgctatagctcttggtggcaaggtttgcaggcactcaagttgagaccactgggatccacgattcccttctggctagggctgctgttaattatccctctgtgggtgggcgtcacctgagttagctctgatttttctttctgctgtaacagaacaacactgagttcagtgcctcacaattgctgtgttctcactctcccagcatccagagatgctctctgcaccatacagctgctggcggggtgggggaggggtggcatcaccaattcaggactgttttttctatctgcagagcatctttcagtgatatgaagttaaaaccaggtactatgagtgctcacctgatttttggttcttgtgaaggtgctttttctgtgtagacatttgtgcggatggccatcaaaggagcttgctattctgccatcttgctccacttcacctctgtactttactaaggcagccctagaaaaccaatagagatactaaggtggatgttcattwactcgctaaatatttagatggtctataacactctaagcactgcactaaaacag

SEQ ID NO: 642994 - DNA, 558 bp, Homo sapiens
tggttttgccatgttgcccaggctggactcgaactccttgcctcaagtagtccacctgtctcagccccgcaaagtgctggtattacaggagtgagccactgcacccagcatttgccaagacctttgatggcaggctttttccaggtgatcagtccttgtctggtctggctctgccccactctccttctcacctagttggaatccctagctacttttcagtagaggagagtgtgtaccccaatcccagcttggttcagatctgcatttaactcatggaacctggctgctccccaggtyctgaaggaaaaaacggtctctctgtgcgtatgataaaggatgggcctgtccccaggaccctgtgagagggaagcccaatgtcccaccaggttggcagggctggggaagggaaagtgttatggcagccccaagaaaaaaaagaggcagcagagggagcaggacagcgctcacatggaactcatgccactgcctgaatgaggggagggaggagtgcacgccagtgacgtcagggggcagagaggcgcagttccagggcggctt

SEQ ID NO: 642995 - DNA, 513 bp, Homo sapiens
ctatacagagaatctccaaagactgacaaaatatcattcaagactgttacacagacaaccttgaggatgacttgatgtaccagtgatctacaatatttgggatcattccaaattcccatcaaggatctgcctatatcaacaaaggagccaaggaccaaccattcaaatgggccctgctgccaagccttttttttttttttttwacaatgccatctcttcatattgttccatttaacaaaactgcagcccttcatctatccttaagtcccttggccaatggtacagagccagagtatgctactccctagcaggaaatcaacaggatgacctactaaacaccattcagaagatgctaagacccatgaattgcaacaggaaagaaaagacagagaattagtcagacaggtacatgctgtgccaaaaatgcactacagcccccacccaattctgcctaatcctagctgggctgacaccaacctgatgagacaggcctataagatctcaaactaaaac

SEQ ID NO: 642996 - DNA, 472 bp, Homo sapiens
ccaagacctcaaactgtgttctctactaaaaggaatcaaggttccctagagaaacggctgactccatgtatggtgcagtatattgatcctggaacatctkttttgccagaaagcaaggaagccatcaaagtccaacaggatcacgtcaaaaagacatgaaagtcaacttgaagagataattattaacctagatgagacaatgtaagcatccaaaacaataaagactgcaatggcctgaaatacatcaaatgcaaacaataatctatgagttcataatggtattcagaaaaaaaaactactggtcattagagggaaggttactaggtcactaacttactactctgaaaagtgacttaagatgagaggtagggtggagaattagctatttattcagtctttcctgtacaaacataaatttttagggagattgaagcagatgaaacaaatctggaaaaatggaggtaactgctta

SEQ ID NO: 642997 - DNA, 560 bp, Homo sapiens
ttgcattctgagtctctgcatgcaggacaagcagcagcctctgtgttggaggacaggagtgggtctcaggccactggcatgatgttccagagtggagcattgctgcctgtgcttcacagaagagtttgtgcagggagtggggtatagcaggcagtggtgagacccacagttcccacgcacctggcaaggcagatccactcccacartgttccactggcagcagcaagctgagttccagtcagcctgtaatcagaacttgccactgcctggagtcgtaagcttttcccttggagatttcagctgtggcttccagggcatgctattccctgtgcactgcagagctggcgcctggctcctgcacccactggcttctgcactggcacgtcctgcactcatgactcctgcacttgcactctccctcgccccggccctgaccaagggggttcatccctacccaagtttatatcatgaaaccctgttgggaacttctttcaacctatgaccaccacctgaaatttttggctgtcctctgcagcatcccctgtgaggaactgtaagga

SEQ ID NO: 642998 - DNA, 529 bp, Homo sapiens
acaatgagattcttgagaacttgtctgctttatctgtggtccctttaatgtgttagcatcagctatatccatcagaaaggggcaggaagcagaatgctccactgccatcattcataaagttaggaaacgtacttgagcctctctttgttctgccaaggaatgtaaataatgccatttagtatgtataataaatcacgagaaactttaaatcactacctagcaattattaaccacaaatgtggcagatgaaggacaagtgcagatctttgtagccaagaaaatgtcttagcctycctaaagggacacatattaactcaaggggtttttttatttgtttttttgttttgtttttgcttttgcagtgggtctttctttttttcagagttttaaactgtgcataaatgaatgctgaattcctaactcctgaagtccagatcctatatccaaatgactattcaacagatgcacttagatgtgtaataagcatctcaaactcaatgttaagaactgaactccccttttcctcctc

SEQ ID NO: 642999 - DNA, 444 bp, Homo sapiens
ttttctggagagcttcttccaaaagctgcaccctagctatgcaaatattgatgactgacattactgcagtttatgttaacgttctctctcaaatgtggaatggcattaaggctaaaaagaaaaggaaatgagcagaatagaaagaaggtatttgagtcatggaaaagctcttaaaataatatttgcccaggaccaggatgtacatgggattctgatagacacagataaaagtaattctctcctccaacctctctggagcatttttttaaaagatcatctttctactgtcaaggggctatcacagtattatttactatgttccttcagtaaaagggtaaaatattgtatttgtgcactattcaattgagaaacttaaaagttcgattaagagctctgggagaagactgtcayaacactgcttacagcctgttcttatcagtgggc

SEQ ID NO: 643000 - DNA, 563 bp, Homo sapiens
ttttttaccctctgccataagatcctcttattctcyttactgaaatcaacatgcaggaggcaggaatgatgacaatatacaaacacgtttcctgttatgtggccaccataagcagcttacaacatgttccaccaagaagtcacttactttcaggccagcaggggtgtttttctatgacgtgtctctttctctcaaaaccacatctgattaagtttagcacaagcaggataatctccattttgataaacacaaaggcaacacatgagtaacctaatttcatgagtgatttcctaccacagtcacacgtttctacactcaagaagaaagtattacacagctggtgtgtaacagactgggaattcagggtattatcttagaacgttgtctacccacataaataaacttttaaaatagtcttttgcctgtcacagtggctcatacctgtaatatcagcactgtgggaggctgaggcaggcagatcatgaggtcagctgtttgagaccagtctggccaacatgatgaaaccctgtctcttctaaaaatatgaaaattagtcgggcgtg

SEQ ID NO: 643001 - DNA, 563 bp, Homo sapiens
ttttttaccctctgccataagatcctcttattctctttactgaaatcaacatgcaggaggcaggaatgatgacaatatacaaacaygtttcctgttatgtggccaccataagcagcttacaacatgttccaccaagaagtcacttactttcaggccagcaggggtgtttttctatgacgtgtctctttctctcaaaaccacatctgattaagtttagcacaagcaggataatctccattttgataaacacaaaggcaacacatgagtaacctaatttcatgagtgatttcctaccacagtcacacgtttctacactcaagaagaaagtattacacagctggtgtgtaacagactgggaattcagggtattatcttagaacgttgtctacccacataaataaacttttaaaatagtcttttgcctgtcacagtggctcatacctgtaatatcagcactgtgggaggctgaggcaggcagatcatgaggtcagctgtttgagaccagtctggccaacatgatgaaaccctgtctcttctaaaaatatgaaaattagtcgggcgtg

SEQ ID NO: 643002 - DNA, 563 bp, Homo sapiens
ttttttaccctctgccataagatcctcttattctctttactgaaatcaacatgcaggaggcaggaatgatgacaatatacaaacacgtttcctgttatgtggccaccataagcagcttacaacatgttccaccaagaagtcacttactttcaggccagcaggggtgtttttctatgacgtgtctctttctctcaaaaccacatctgattaagtttagcacaagcaggataatctccattttgataaacacaaaggcaacacatgagtaacctaatttcatgagtgatttcctaccacagtcacacgtttctacactcaagaagaaagtattacacagctggtgtgtaacagactrggaattcagggtattatcttagaacgttgtctacccacataaataaacttttaaaatagtcttttgcctgtcacagtggctcatacctgtaatatcagcactgtgggaggctgaggcaggcagatcatgaggtcagctgtttgagaccagtctggccaacatgatgaaaccctgtctcttctaaaaatatgaaaattagtcgggcgtg

SEQ ID NO: 643003 - DNA, 563 bp, Homo sapiens
ttttttaccctctgccataagatcctcttattctctttactgaaatcaacatgcaggaggcaggaatgatgacaatatacaaacacgtttcctgttatgtggccaccataagcagcttacaacatgttccaccaagaagtcacttactttcaggccagcaggggtgtttttctatgacgtgtctctttctctcaaaaccacatctgattaagtttagcacaagcaggataatctccattttgataaacacaaaggcaacacatgagtaacctaatttcatgagtgatttcctaccacagtcacacgtttctacactcaagaagaaagtattacacagctggtgtgtaacagactgggaattcagggtattatcttagaacgttgtctacccacataaataaacttttaaaatartcttttgcctgtcacagtggctcatacctgtaatatcagcactgtgggaggctgaggcaggcagatcatgaggtcagctgtttgagaccagtctggccaacatgatgaaaccctgtctcttctaaaaatatgaaaattagtcgggcgtg

SEQ ID NO: 643004 - DNA, 577 bp, Homo sapiens
gatgacatctcctcttctactaggaagccttccatagtgaccagaaagctacaggaatagtcctcgctgtgcagaaggatttttaagtttgtctgtcagtgtctgtcatcataagagatcacctggagagtttttataaaagaatggtggtcctacccacaggtagtctgatttaattggactgtcatggattctgggctccagcttcaggttgagatgaccctctkgggctctttctcatctccctttatggtcagcaggcagcttcagtattggatgactagagtctgatggggagaccacagcactccaagtgctgttctcggacaagagagttctttgagaagcagccacagtaaagaaggttttctgggggctttttggttacactggatcatgtgaactatagttttagatctactctgaaaattcatttcatgctgaaaaaccccaagagaatgcaattcacatctctcttcctcccatcctccagcaatttgttttctagcaggagatgactggttcctggaagtccatctctaggggctccggtagcagcaacttggtgagcctagtt

SEQ ID NO: 643005 - DNA, 425 bp, Homo sapiens
ctcttcactacacagcgattgagaaatcaaggctgttggctgcttggacatctttaatgtgcggcttccaggtaggtcattctgagtgttgccatcacagtcaacctaaactgggaaagagaatggaggagtgcacgtgcaaatcatttatggtccagatttggaggtggtacacatcacctctgctaacatgtcaaaggrgagagctcaatcatatgccacgcctaactgctatgtagttttgggccagaagaaggggaatatgtattttggtggacagctaactgacttaactgctaacacccctttatggctttatttgctgatggagaatgattccagaagaaaaaagcatcctacctttacttaccacagattctgtccactaaataatcatattcatgaaacctcaaatccccaaattc

SEQ ID NO: 643006 - DNA, 598 bp, Homo sapiens
taaatgttcagagctgagctaaaggccctgaagttaacggttcagaaaagcctgcaaagatccttaatatgtatctcccttccatctaccttcttctaatcattcactgctcaaaaactatttcattaataattactatgagccaggcctaagagwtataagtacatcttccaaaaacatttggatggtgattctcaaaatcatatatctgagctctatctctgccttaatttctatcaagaaaacaaaaacaaacaaacaaacaaaaagcaggctgaaaagagaaggcctgatttagccatatttattcacacattctttcacagctatgttgttgttgttgtttggtttggttttttttgagacaggatctcactctgtcaccaaaactggagtgcagtgacagaaacatatagctcattataaccccgaactcctgggttcaagcaatcctcccactccagtcctagtacctgagactacaggcaagtgccactacgtccaaatagtttattttattttttgtagagatgggggtctcactatgttgcccaggctggtctcaaactcctggcctcaagagatcctcctgcctcag

SEQ ID NO: 643007 - DNA, 533 bp, Homo sapiens
aattcactcattactcaaatatcacctctctgtatctgttggcttatttctgagaatctttttgagaacatgaccaggcttctttctataatttttatatatatatatatatatatacacacacgcacacacacacatacactacatatatatgtatgtagaatacatatatatatctatatatgtacatatatatctatatgtatacatatatctatatatgtatacatatagatacatagatatatagatacatatctatataatgtatacatgtatacacatgtacctacatgtatacacatgtakctgcatgtatacacatgtatacacatgtagatgcatgtatacacatgtatacacatgtatctgcatgtatacacatgtagatacatgtagatgcatgtatacatatatacatgtagatgcatgtagatacatgtatacatatatacatgtagatgcatgtagatacatgtatacatatatacatgtagatgcatgtagatacatgtatacatatatacatgtag

SEQ ID NO: 643008 - DNA, 533 bp, Homo sapiens
aattcactcattactcaaatatcacctctctgtatctgttggcttatttctgagaatctttttgagaacatgaccaggcttctttctataatttttatatatatatatatatatatacacacacgcacacacacacatacactacatatatatgtatgtagaatacatatatatatctatatatgtacatatatatctatatgtatacatatatctatatatgtatacatatagatacatagatatatagatacatatctatataatgtatacatgtatacacatgtacctacatgtatacacatgtatmtgcatgtatacacatgtatacacatgtagatgcatgtatacacatgtatacacatgtatctgcatgtatacacatgtagatacatgtagatgcatgtatacatatatacatgtagatgcatgtagatacatgtatacatatatacatgtagatgcatgtagatacatgtatacatatatacatgtagatgcatgtagatacatgtatacatatatacatgtag

SEQ ID NO: 643009 - DNA, 566 bp, Homo sapiens
acaaaaaacttacccaagcacatgcacaaccaccatcacacaacaagaaaaagaaaaacttttcctaaaagatctagtatggagaagtaggagattttatatgcagccaaagaataaaaagtaaaaatcacactagaacctgagaaataatgcctgtatcactcagccctagcctttggccacagattaaggtcatgtgttggcggtattagaagcagatgytcttataaactaaatgttaggctaatgagtgcgatagcactgccagtaatcagaggtgactgcgaggaacatgttgttttcttgcacatgcttttccaaaatgctctaggaatgagaccatactataggaagaggcagaggcagtgctgtctgggcagttcctcgtgggcattttctgtaaagctttttgcagataaataattcagtagacaatattaagagtcatttgcatttgcctccctgactttgagtatatgttactcaatgtcttgcttttgtgtgaatacacaattggcattcattttacatttctgtaatgttggttttctaattatactcatttc

SEQ ID NO: 643010 - DNA, 566 bp, Homo sapiens
acaaaaaacttacccaagcacatgcacaaccaccatcacacaacaagaaaaagaaaaacttttcctaaaagatctagtatggagaagtaggagattttatatgcagccaaagaataaaaagtaaaaatcacactagaacctgagaaataatgcctgtatcactcagccctagcctttggccacagattaaggtcatgtgttggcggtattagaagcagatgttcttataaactaaatgttaggctaatgagtgcgatagcactgccagtaatcagaggtgactgcgaggaacatgttgttttcttgcacatgcttttccaaaatgctctaggaatgagaccatactataggaagaggcagaggcagtgctgtctgggcagttcctcgtgggcattttctgtaaagctttttgcagataaataattcagtagacaatattaagagtcatttgcatttgcctccctgactttgagtrtatgttactcaatgtcttgcttttgtgtgaatacacaattggcattcattttacatttctgtaatgttggttttctaattatactcatttc

SEQ ID NO: 643011 - DNA, 566 bp, Homo sapiens
acaaaaaacttacccaagcacatgcacaaccaccatcacacaacaagaaaaagaaaaacttttcctaaaagatctagtatggagaagtaggagattttatatgcagccaaagaataaaaagtaaaaatcacactagaacctgagaaataatgcctgtatcactcagccctagcctttggccacagattaaggtcatgtgttggcggtattagaagcagatgttcttataaactaaatgttaggctaatgagtgcgatagcactgccagtaatcagaggtgactgcgaggaacatgttgttttcttgcacatgcttttccaaaatgctctaggaatgagaccatactataggaagaggcagaggcagtgctgtctgggcagttcctcgtgggcattttctgtaaagctttttgcagataaataattcagtagacaatattaagagtcatttgcatttgcctccctgactttgagtatatgttactcaatgtcttgcttttgtgtgaatacacaattggcattcrttttacatttctgtaatgttggttttctaattatactcatttc

SEQ ID NO: 643012 - DNA, 341 bp, Homo sapiens
gtttaaaaaaaactaggcagctgccccctggcctgtaatttactaacccatagcctagaatatcacctattttggatgatattccatgtgtgcttaagaagagtgtatattctcctggttattggatgaagtattctacaaatgtcaggtaaagttgattatttctctctctctctctctctctytttttttttttttttttttttttttggtgacagggtcttgctctattgcccaggttgagtgtggtggtgcaataacagcttactgcaacctccacttcctgggctcaagccatcctcccacctcagcttcctgagtagctgggactacaggtgcat

SEQ ID NO: 643013 - DNA, 341 bp, Homo sapiens
gtttaaaaaaaactaggcagctgccccctggcctgtaatttactaacccatagcctagaatatcacctattttggatgatattccatgtgtgcttaagaagagtgtatattctcctggttattggatgaagtattctacaaatgtcaggtaaagttgattatttctctctctctctctctctctctttttttttttttttttttttttttggkgacagggtcttgctctattgcccaggttgagtgtggtggtgcaataacagcttactgcaacctccacttcctgggctcaagccatcctcccacctcagcttcctgagtagctgggactacaggtgcat

SEQ ID NO: 643014 - DNA, 588 bp, Homo sapiens
tggtacaacttcagtgcccagcactagggtacctaccacacagcaagcaacaagtatgacccccttttggaagagaaaaatagacatttggggaatcatcctctgtggaaaacaggtttcgctttattcaacatatgttccagaacttcttatctagcaaatgtctgtggcacttactgtggccaggcatggttcaagtgctttgcatacatcatctcatagaaactatgagatagsgatgattattatccacaacaaaggaggaaactgggacacaaaccttcaataatcttagataaccgagaaggctatggagatagcccaagtgggagaagacagtaggtagtttcttcagatcttcaatcctgtgaccataaaaggggtaaggaggggtagaagggtcgctgtcccactctaggcagaacaaaacatccaaactttatgcatccgacttcaggagttcagatgtcgtcacagacaccaacatattaacgttctcttgcaattattcatagctaaactcatcatgttcttgcttttggtagaaatataatcataagccttaaatttctttgatttcaccttagt

SEQ ID NO: 643015 - DNA, 588 bp, Homo sapiens
tggtacaacttcagtgcccagcactagggtacctaccacacagcaagcaacaagtatgacccccttttggaagagaaaaatagacatttggggaatcatcctctgtggaaaacaggtttcgctttattcaacatatgttccagaacttcttatctagcaaatgtctgtggcacttactgtggccaggcatggttcaagtgctttgcatacatcatctcatagaaactatgagatagcgatgattattatccacaacaaaggaggaaactgggacacaaaccttcaataatcttagataaccgagaaggctatggagatagcccaagtgggagaagacagtaggtagtttcttcagatcttcaatcctgtgaccataaaaggggtaaggaggggtagaagggtcgctgtcccactctaggcagaacaaaacatccaaactttatgcatccgacttcaggagttcagatgtcgtcacagacaccaacatattaaygttctcttgcaattattcatagctaaactcatcatgttcttgcttttggtagaaatataatcataagccttaaatttctttgatttcaccttagt

SEQ ID NO: 643016 - DNA, 546 bp, Homo sapiens
ccctgtgccaggaactctgccaagaggaaaacatgcacccatccccacttcaagacaggaaaaccaagactcagactggcaaagtgaccagcccacagccaaacagcaggtacacagtggagtcaggattccaaaccaggaccatctgactcaaggcccactcttttgtgctctcctgagtcaaggtcagagactgagctagtgcagcacatggctcacattatagattttcatccacccccgtcccacctgattagcaaggaggcttcattacatccattctgcaagggaaaagcttgaagctctgagtccagggmcctcacccaggacatcttggtgcttgggccaagatctgaaccaggtctgcccaagaacacagcctgagttcttgaccaatatcgcctccctccttgcaaaaggtgttctttccagccacctcctccctcaagcatggcggtcctgaagtgcccatactcaagttggctttgattttggggatattcgccagtgctccagactgcagagttgtcactacccaggggagac

SEQ ID NO: 643017 - DNA, 546 bp, Homo sapiens
ccctgtgccaggaactctgccaagaggaaaacatgcacccatccccacttcaagacaggaaaaccaagactcagactggcaaagtgaccagcccacagccaaacagcaggtacacagtggagtcaggattccaaaccaggaccatctgactcaaggcccactcttttgtgctctcctgagtcaaggtcagagactgagctagtgcagcacatggctcacattatagattttcatccacccccgtcccacctgattagcaaggaggcttcattacatccattctgcaagggaaaagcttgaagctctgagtccagggacctcacccaggacatcttggtgcttgggccaagatctgaaccaggtctgcccaagaacacagcctgagttcttgaccaatatcgcctccctccttgcaaaaggtgttctttccagccacctcctccctcaagcatggcrgtcctgaagtgcccatactcaagttggctttgattttggggatattcgccagtgctccagactgcagagttgtcactacccaggggagac

SEQ ID NO: 643018 - DNA, 559 bp, Homo sapiens
gctggtcttgaactcctgatctcaggtgatctgcccaccttggcccccmcaaagtgctgggattacaggcatgagccaccgtgcccagcctatttttgcttttacaatctcaatctgttaaatatgaagattccataaatggtaaaattcacatatatgtaatttttaaaaacaatgaacgtgctaaacagaaaatatgttaataggcctgtatattgttaagaaacttctattttaattctacccacctggaatacaaatttctaaagctgagctttgtcataatcctaaaatcatgctggaattactgcttatgtcggaagtgttctatagtgtcttaattttataaagggaaagcaattcgcatttcctatgtatactttgactatgacaatggttggttgcgtgcttttttgagtccctgtggctattgcccattagtccagtggagaaagacaatgactccctggcatagcaatttatcatactaccgctaggtctgaattccatattcagccaccacatatgaaaccattccacaaagaagtcaaagaaagcc

SEQ ID NO: 643019 - DNA, 596 bp, Homo sapiens
tgaatgaatggatcagacctatctagaagctggcttttaatgttaaaaggggaattcacctagacagataatctatttctcaaaagaaattgactttaaaaagtctatttgattgtatccagatccatttattatttgtatttggaaatgccctatctagctggttttccaagcccctaattcctctctactggctctctgacctctgagaacatttacttattggaagcattctcacggctattcagaaagccagataaatataaaatggrtaggagagaaaacctcacttttaggctgcttcccctacagtaggccaccctgaagaattttcaaatgaaaaggtaacttatggctaagaaacagaatatgattgatatggttgaatcatgcaatccagactgacctgacaggcttattctgccatatctatagtcaagtgacttaaagaggtcagagctggccaaagaataacctgttcagccttgttataattctactaatacattttggttttctattgaagttgaaattgtctcgtctgacacttttaaagcacataaaataatttattggagcccacgtggaaatacatg

SEQ ID NO: 643020 - DNA, 524 bp, Homo sapiens
ctacttgggaggccgaggcagaagaatcgcttgaacctgagaagcagaggttgcagtgagccgagatagcaccattgcaccccagcctggtgacagggcaagactccatctcagaaaaaaaaaaaaaaaaaaaaaaaaccactatgaataaaccattgcttctgatggaagtggatcaaatgttgggggtgtgttaagaatcacttctgtattaactaagaaattgaaaaacacttctattttaactaagagtttaatcactgaattactcaataaacatgtcttgagtaactaccacctgctcagcacctagcctctaggaacacaacagtgtaagatttagacatggtattaaataaagctgcaagttcaggatggaaagatatatgctaggaaaaaaatagatcattatgggactattgagaaagaatactaatctggttttggcaagtgagggaaggatgtccagtggtattggtatccatgttgaaacstaaacattgaaataaatgagtgaggcaaaa

SEQ ID NO: 643021 - DNA, 438 bp, Homo sapiens
tgtgttttactgtgatctagcagttccacacctagatagtattctacccaagggaaataaaaatgtatgtccacaaatacttgtacatgaatattaagagcagcactgcttatagtagccgaaacatggaaacaacctaaatgtctatcaactaataacaggtgaataagtgtcgtacatccatrcagtggaatgttgtttggcaataaaaagatgtgtaccttgaaaacattagaataaattaaagaaaccagtcacaaaagaccatatattgtatgattccatttacatgaaatattcagaaaaggtaaatttataaaagaaaggagagtagtggctgcttagggccaggaaggtgtgagagagaatggagagtgactgctaaagagtatggagatttttaggggcaatgaaaatacaaaaatacagattttggta

SEQ ID NO: 643022 - DNA, 635 bp, Homo sapiens
acttaaaacaataaacttttgttatctcacagtttctttgggtaaggaatttaagagtggcttagctaggtggttctggcttgaaatcattcaagaggttgcagtcaaactgttggctgggctatggtcttcttaggactcaactgagagatggtccaattccaagctcactcgtgtgccttttggctgcttcagaagatctactccmaagttcactcccatggttgctgggaaccctcagttccttaccatgtggcctctccatagactgcttcagtatgtcctcagctggcttccctctctcagggccacctcacaacctggcggattgtcccatggtgagcagttcaaaagaaacaggggtggcaaggagagacacacacagagagagagacagagagagaacaagatagtctgctcaagatgggagccacagtcattttataactaatctcagtatgatagctcatcactagagacaatcaactccacaatcaaggggagggaaggtaacctctgtctcttgtagggcgctgtattgaagaatgtgtagccacagctacaaaaccaccacaaattgtcaagctcatcattgtggatgcaagttttcccgagttctaatttttgctttaaag

SEQ ID NO: 643023 - DNA, 635 bp, Homo sapiens
acttaaaacaataaacttttgttatctcacagtttctttgggtaaggaatttaagagtggcttagctaggtggttctggcttgaaatcattcaagaggttgcagtcaaactgttggctgggctatggtcttcttaggactcaactgagagatggtccaattccaagctcactcgtgtgccttttggctgcttcagaagatctactccaaagttcactcccrtggttgctgggaaccctcagttccttaccatgtggcctctccatagactgcttcagtatgtcctcagctggcttccctctctcagggccacctcacaacctggcggattgtcccatggtgagcagttcaaaagaaacaggggtggcaaggagagacacacacagagagagagacagagagagaacaagatagtctgctcaagatgggagccacagtcattttataactaatctcagtatgatagctcatcactagagacaatcaactccacaatcaaggggagggaaggtaacctctgtctcttgtagggcgctgtattgaagaatgtgtagccacagctacaaaaccaccacaaattgtcaagctcatcattgtggatgcaagttttcccgagttctaatttttgctttaaag

SEQ ID NO: 643024 - DNA, 635 bp, Homo sapiens
acttaaaacaataaacttttgttatctcacagtttctttgggtaaggaatttaagagtggcttagctaggtggttctggcttgaaatcattcaagaggttgcagtcaaactgttggctgggctatggtcttcttaggactcaactgagagatggtccaattccaagctcactcgtgtgccttttggctgcttcagaagatctactccaaagttcactcccatggttgctgggaaccctcagttccttaccatgtggcctctccatagactgcttcagtatgtcctcagctggcttccctctctcagggccacctcacaacctggcggattgtcccatggtgagcagttcaaaagaaacaggggtggcaaggagagacacacasagagagagagacagagagagaacaagatagtctgctcaagatgggagccacagtcattttataactaatctcagtatgatagctcatcactagagacaatcaactccacaatcaaggggagggaaggtaacctctgtctcttgtagggcgctgtattgaagaatgtgtagccacagctacaaaaccaccacaaattgtcaagctcatcattgtggatgcaagttttcccgagttctaatttttgctttaaag

SEQ ID NO: 643025 - DNA, 635 bp, Homo sapiens
acttaaaacaataaacttttgttatctcacagtttctttgggtaaggaatttaagagtggcttagctaggtggttctggcttgaaatcattcaagaggttgcagtcaaactgttggctgggctatggtcttcttaggactcaactgagagatggtccaattccaagctcactcgtgtgccttttggctgcttcagaagatctactccaaagttcactcccatggttgctgggaaccctcagttccttaccatgtggcctctccatagactgcttcagtatgtcctcagctggcttccctctctcagggccacctcacaacctggcggattgtcccatggtgagcagttcaaaagaaacaggggtggcaaggagagacacacacagagagagagacagagagagaacaagatagtctgctcaagatgggagccacagtcattttataactaatctcagtatgatagctcatcactagagacaatcaactccacaatcaaggggagggaaggtaacctcygtctcttgtagggcgctgtattgaagaatgtgtagccacagctacaaaaccaccacaaattgtcaagctcatcattgtggatgcaagttttcccgagttctaatttttgctttaaag

SEQ ID NO: 643026 - DNA, 401 bp, Homo sapiens
tactaggttcatggctcagacccctataacaagacagataatcaagaaaaaaaacatacaaatgtatttaaatataagttttatgtgrcataggggctttcataaggaaattaaaacctaaagaaacaggtaaacctgtatattttttatgctaggtttgatgaaaaagtcagtcaatacagagaagtgtgattggacaaaagggttatgatctaatggtaataaactgggaagaacttaccaagtcttgtctgttgagattcttctctgtgtccctgtatcatcagacatgaggatgttcctttcttgtggatatagagtgggcacctctcacatgaaagtcttatgacctgcttcaggggaaggtcagaaaaaggatgtggggaaggtgagagtgacct

SEQ ID NO: 643027 - DNA, 486 bp, Homo sapiens
aaaagctggggaagtggggatagggtgctgtctgcatcattttaacacttgtatcaagaagtgggaaatttccagtcaaagaggccacagttccttctcttttagggaacaaagatgggattggggctagttccctgatctccaytgagagctctctctctctctctctctctctctctctcaagattttacctattgtttcttaataggtaaaagcttgtactcctatagagaaatccaagcatggactagagctaggactagaaatagaaaaataagaaatgacacaaagcaatgtagaaccatgagacaaacaaggacagatagttcagctaagattccaaaacagccaggtatcatagagtgcttaagttctaagtggaggaaccactgggctagaatgaagtttatcagatgaaattcaaaatcgtgaaagcagtgaagccaaagacagctaaggtcatctgtaaaagaaacagtactgag

SEQ ID NO: 643028 - DNA, 548 bp, Homo sapiens
gttgcaattagccaagatagtgccactgcactccagcctgggcgacagaaaaagactgtctcaaaaaaataaataaataaaaacagataaagtatttctcacttatattttgttatattattacaatttgtagagatgtggactcactattttgtccaggcaggtctcgaacttctgtcctcaaatgatcctcctgcctcagcctcccaaggtgttgggattacaggcatgagccaccatgcccagcccatatgttactattcatgagttggttccttccctttgtttgaacagtcaaactggttagcagtaaaatgatggagaatctatttctgttactactcagaacatttgaagyaggaaaaatgtgatgacaattctaggtcaatagctttaaaaacattagttttaaaagaacaaaaattacctctgttgtgagagggaaattagtgcagcaaaaagaataaggacacaaataatcatgctacacgtctgattctgcaaaaggggtgaccaaaatttccaaaagaacttagcacttgttgtgc

SEQ ID NO: 643029 - DNA, 581 bp, Homo sapiens
attagtgatgtcaagcacttcttcatgtatttattgactgtttgccttcttttgagaaatgtctgttcagatcatttgccaagtttttaatcggattttttttttttttggctattgagatgtttgagttccttgtgtattttggatgttaagcccctttctcatttgtttatttttgtttatgttgcttatgcttttgaggtcttatacataaaatctttttacagaccagtgtcctgaagcatttcccctgttttcgtctagtagttttatagttttgggtcttacattcaggtcttggatccacttgagttgatttttttaataggtgacaggtagttccattcttctgcatatggatatctagttttcccagcaccatttattgaagagattgtcctttaccctatgagtattctgggtgccttgtsaaaaatcatttggctgtaaatgtgtagattaatttctgagttcactattctgttccattggtctatgtatctgtttttatgacagcactgtgctggttttgctactacagctttgtagtatattttgaagtctggtagtgtgatgtcagc

SEQ ID NO: 643030 - DNA, 602 bp, Homo sapiens
taaaaggctcaacacagcaagaagatatgagttataaacatctgtatacacaataacagactaacaaaagatataaagcaaaaactgataaaactaaagggagaaaccaacagttctacaataatagtgggagacttcaatayccattctcagtaatggatagaataaccagatggaaggtagataaggaaatataagacttaagcaacataataaaccaattagatttaacagacacatgaaacattctagcaacaacaacagcatacacatttttctcaattgcacatggggcacttcccagtataaaccacatgttaggctagaaatgaagtttcaacagatttaaaaagagatataaaaagtatgctgtctaaacactgtaggatgaagttagcaacagaagtaaaactggagaattcccaaatttgtgaaataagcaacaccctcttaacccatggatcaaagaagaaatgacaaagaaaattagaaaatattgttagatacactaaaaccaaaacaaaacacaccaaaacttatggaattcagtgaaagcagttcaaagggggaaatttatacctataaatgcttacgtcaaaaaa

SEQ ID NO: 643031 - DNA, 602 bp, Homo sapiens
taaaaggctcaacacagcaagaagatatgagttataaacatctgtatacacaataacagactaacaaaagatataaagcaaaaactgataaaactaaagggagaaaccaacagttctacaataatagtgggagacttcaatacccattctcagtaatggatagaataaccagatggaaggtagataaggaaatataagacttaagcaacataataaaccaattagatttaacagacacatgaaacattctagcaacaacaacagcatacacatttttctcaattgcacatggggcacttcccagtataaaccacatgttaggctagaaatgaagtttcaacagatttaaaaagagatataaaaagtatgctgtctaaacactgtaggatgaagttagcaacagaagtaaaactggagaattcccaaatttgtgaaataagcaacaccctcttaacccatggatcaaagaagaaatgacaaagaaaattagaaaatattgttagatacactaaaacmaaaacaaaacacaccaaaacttatggaattcagtgaaagcagttcaaagggggaaatttatacctataaatgcttacgtcaaaaaa

SEQ ID NO: 643032 - DNA, 563 bp, Homo sapiens
agtctcttaccataacctgctgttgattgacattttcgaggaataaaacactttgaaactaccaaactttttcagcagtctgcagctgttataaaaatagttctcccataattcttctttaaagacagttgtcaatatttatacctgtcaaggaagatagcactttttttttttttttttttttttttttttacagaaaattagcttttcaggtcttaraaattaacatgtgacagttttattttttttctgctgtacatctgctgacttcagggatattatgactgtccattattctagtgtactcaatgatgaacacatggagtgaaagcatgtcttctcctatttagtagtgactatgattccctgtcattgagcaagcgtccccattgagacatgtcagaggatgaacttcacttaacattccagttctgcgacttagttgctgggaaagatatttagctttaggcctctgtttcctcacctgtataatgggaatccagtaatattagtattaccctgtgacattgttgtaagaactaaatgaagtgatacatagaaaa

SEQ ID NO: 643033 - DNA, 565 bp, Homo sapiens
ccttggaaattgaacaaatacaaggaaattaaataacatgctccaaaatgaccattgggttaatgaagaaataaagaagaaaataaaacatattttgaaacaaatgaaaataaaaacacaacaaatcaaaacctgtggatacagcaaagtcagtgctaagcagaaattttatagcaataaacacatcaaaaaatagatttgaagaaaaatctaacactgtgtctcaaggaactaaaaatgcaagagcaaaccaaacccagagttagtagaaagggaaaataataaagctcagagaataactaaacaaaataaacatttaaaaaataaaacaaagtattaactaaacaaaaaggtggtcttagaaaagataatcaaaatcaataaaccactagctgggctaaccaagaaaagaatggagaagattgaaataaacaaaatcataagctgaaasgggacattacaaatgataccacagaaatacaaaagaagagactattcataacaaatactattctgaacaattatatgctaacaaactgtaaaacatagagaaagtgataaattc

SEQ ID NO: 643034 - DNA, 343 bp, Homo sapiens
tgttacaaatctatagtaaccaaaacagcatggcattggtataaaaacagatatatcgaccaatggaacagaatagagaacccagaaacaaattcatgtattaatagtcaactgatttttgacaaagattccaagaacatacactggggaaagggcatcctctttaataaatggggctaggaaaattgaatatttgtatgcagaagaatgcagtaaacccctrtctctctccatttagaaaagtaaactaaaaatgaaacgacttgaacataaaacttgaagcataaaaaatactatatttcagaagaaatataggatgcactccagacattgttttttgcaa

SEQ ID NO: 643035 - DNA, 583 bp, Homo sapiens
tatttaaggatatatgttaataattaactcaaaagttatgagtaaatttcatttagctcaaaacgtttccatacacaatctgttatgtcagaaaatattaaccaaggttcccaccttaccgatagaaaaaaataacmaactcccagttgcatcaaatctacagttttggtgaacgttagtttcatgaccattaaaaaacagagattaacagatgctttcagatccaaaataaggcagtcttttatatacaaaagccttggcacatgtctgcaaatgctactgagaaaggtagcattgcaaactgttcagtctcatagttgattcaaaaacactgctcccttctttttcttctctaacatgccagtctagaaattcagctcctgtgccatagggatgattggtattagagtcttccttcttgcatgcatcccctacagtgctgcaatgaggatggtagaaatgggaaacacgtcccctcttacttgagtgcctgtagcacatttgttaaactgtttgttgtcacttctctgtaaaatattaactggaagttggttccctttttgcagcagccaatgaaatattc

SEQ ID NO: 643036 - DNA, 580 bp, Homo sapiens
ctgtaaccatgcaggatgttatgggtcattttaagttttctggtgtttagcctaaaagcaatgtaaagctattaggtcataacatgggagtgatatgaccagttttacattttgaaacaataygtccagctgtagtatgaacacattggaggggttaggagtagatatgagatatatctggagccaattgtaggaatgtatgagaaataaggggggcttaaactagggttatggattagaggaaaaagaagtgggcagatgtaggagaaatttaggaaagtacaacagaaaaatgtggtggattatggagggtatagaagagagtgtcaattatgatttttaggttttgactggtataattgaatggatggtgggctcattctcattgataaagaacactaaaagagtccgagcttagagcaaaaaaccatgtgtaattttgaactggctggcttggatatacttttgtgatagccagtgtgataatccaggggaggttagataaaaaggcctggaattcataaaggaggcctaaaccagagattgtaatgcttgagactttctttgtaggagataaaac

SEQ ID NO: 643037 - DNA, 329 bp, Homo sapiens
agtaaaaactggaggattccaatccagatcaagatgctctagtttgtattacctcttttcagtagattcaccttctgtgtcatcatctgtgaagttgakgtttggtctgtcatctttaaggtccctttctgctctgaaatgataaagcaaatagactaatgaatatttggcattataagaggataaataatagacattttaatttttctgaattatctaaaaactgttgagtgctgattacaaagtattatataaaagtagttattattttctcagttacatcacagaaaccagaaagtgattgtgtagcaaaactatgaagtgggtga

SEQ ID NO: 643038 - DNA, 603 bp, Homo sapiens
ttttctgtccttgagatagtttgctcagaatgatggtttccagtttcatccatgtccctacaaaggacatgaactcatccttttttatggctgmatagtattccatggtgtatatgtgccacattttcttaatccagtctatcattgatggatatttgggttggttccaagtctttgctattgtgaatagtgccacaataaacatacatgtgcatgtgtctttatagcagcatgatttataatcctttgggtatatacccaataatgggatggctgggtcaaatggtatttatttttactttttttttaggaagcttatcaaaagagaaataactgggtgaaagcagggtttgtatactcctgggtcctctggccttacatcatcacataaaccctaaccccttttcactgctgtccagtatcccctagctgctattactccacttgccaggcaagtcagccctacaggtgagtaataggaagaataacctgacctaaactactggacattggagaaaatggtttaagtatatacattcctcgatttcatcttgcctctcttctggtattcttcctgtcctcctacctttccaggcacaaata

SEQ ID NO: 643039 - DNA, 603 bp, Homo sapiens
ttttctgtccttgagatagtttgctcagaatgatggtttccagtttcatccatgtccctacaaaggacatgaactcatccttttttatggctgaatagtattccatggtgtatatgtgccacattttcttaatccagtctatcattgatggatatttgggttggttccaagtctttgctattgtgaatagtgccacaataaacatacatgtgcatgtgtctttatagcagcatgatttataatcctttgggtatatacccaataatgggatggctgggtcaaatggtatttatttttactttttttttaggaagcttatcaaaagagaaataactgggtgaaagcagggtttgtatactcctgggtcctctggccttacatcatcacataaaccctaaccccttttcactgctgtccagtatcccctagctgctattactccacttgccaggcaagtcagccctacaggtgartaataggaagaataacctgacctaaactactggacattggagaaaatggtttaagtatatacattcctcgatttcatcttgcctctcttctggtattcttcctgtcctcctacctttccaggcacaaata

SEQ ID NO: 643040 - DNA, 623 bp, Homo sapiens
agacatgatgaacatttttataatatatattactttttgatgttctgatactatgataattggtatttttctatttcagtgtccaacattccattatcagtatagaaaaatataacttatctctgcataccgattttctattctgcaatcttgttcagattacttattaattacactagcagtttctagatacacgaaaatgtcattgacaaatgaagagggttttactgtttcctttataatcattttggctttttttcttatctttctgcaattaatatcatttccagtagatttttcaaaagaggtggtaagatcagatattggcattttattattgttaagggaaagagtttaggctttccatacataaagatgctatttataatttcttagtaggtaccctttatcagattaaagatgttcctttaattctcggtttgttgagatttttctatgatcaataagtgtttatcaaattggttttctgaatctattgagataattataggatktttaggctttattctgttaggctgatatactagcttgtctgtggccataccaccctgaatgcacccaatctcatctaatatactaccttcattgcttttttaaaaaaa

SEQ ID NO: 643041 - DNA, 446 bp, Homo sapiens
ggtgtctgcactcagtttggcgtcaatatggtgacctcatgtgggtggaggatcaccaggttgcctaaggaggagtgaaccagtccaggtcagaaatggagcaggtcaaagctccagtgctggttaatagtgggatggtgcctgtaagtagccactgcatcccaacttgagcacacagcatacccggtgtctttttttttttttwaaaaaagaagagctccagggtatgttttagaataggaaagaatgggggagaaaagaaagggaggaaatttaatttggattatagtaatcactcaagagtaaacccaaaatgcatttttcacataattacctggctttagtacaaggaatccatggatttgtgttatcaaagacttttcatttacctgcatttcatttcctgccacattctgatcccacccattttcccaccacaggctgat

SEQ ID NO: 643042 - DNA, 600 bp, Homo sapiens
gtgcaaataaataaggtaaggtagatgaaaaggacataagtgacataaatgaggatgagtatctattargaaaaagaaggggaattggagatggtgaacaaagagggcaaacaatgacaaaacaaaactgttttgtcagaaacaatgtttaggcctttcacaggctagtgatgaaaacatgcatggtcatcttaattttgggcacattaaattaaaaggaaaaaggaaagtaaaaagaaatagtaaggaaagtaagaaagagaaatgactaagatgatttctttacgttatgaggctaggaaagtatctctgagaggggtatatatgctgagatttgagatacaagaaattactcatggaaatatcagaaggaattgcaagcattcaaggtaagcaaaacagctaggaagagatcctatgatgagaataaactgtaacacagagatgcatacatatatggattccaaaaataataactcgatagcctctgtttttttgcagtatgatggactggatactcaagaccatatgataaaaacaattaaacttgctgataaaaatataaaattaaaaacaacatatttgaaaaatgggcaagag

SEQ ID NO: 643043 - DNA, 600 bp, Homo sapiens
gtgcaaataaataaggtaaggtagatgaaaaggacataagtgacataaatgaggatgagtatctattaggaaaaagaaggggaattggagatggtgaacaaagagggcaaacaatgacaaaacaaaactgttttgtcagaaacaatgtttargcctttcacaggctagtgatgaaaacatgcatggtcatcttaattttgggcacattaaattaaaaggaaaaaggaaagtaaaaagaaatagtaaggaaagtaagaaagagaaatgactaagatgatttctttacgttatgaggctaggaaagtatctctgagaggggtatatatgctgagatttgagatacaagaaattactcatggaaatatcagaaggaattgcaagcattcaaggtaagcaaaacagctaggaagagatcctatgatgagaataaactgtaacacagagatgcatacatatatggattccaaaaataataactcgatagcctctgtttttttgcagtatgatggactggatactcaagaccatatgataaaaacaattaaacttgctgataaaaatataaaattaaaaacaacatatttgaaaaatgggcaagag

SEQ ID NO: 643044 - DNA, 597 bp, Homo sapiens
gcagggccagttggccagaatgcccctgcgacagttttacatttttaagtgatatcatattacataataatagcacatgactatttctattctgtgaattataattgctaaaggaaataccccgctatttatgagatgcttagtgcatctgtcaccatggccttctggcccaaatcaaartgatcggagctattaagatgatttccctatttggctgggttttaaagactatagttttgaagtcagtggcagatgacctactaatggtgtttaatggttctctcaacaaattgtgaagtaccttgaatgacccactggttaagtacgtaaaaggaaaattccagctttaatcatttaatcttgattccatcctatttttcttttggacagtgatgtttattttcacctttaaggaagaatggggagatttaaaaaaaaagggggagggaaaaggtaattaagagttcttgagcactgggctaaacatttcatatgagccatctcatttggtcttcacaaccctatagaagaaagaaaggaaaaggtacacacaacttgcatagctgaggtcacacagtcagggagcaacgcagtggg

SEQ ID NO: 643045 - DNA, 597 bp, Homo sapiens
gcagggccagttggccagaatgcccctgcgacagttttacatttttaagtgatatcatattacataataatagcacatgactatttctattctgtgaattataattgctaaaggaaataccccgctatttatgagatgcttagtgcatctgtcaccatggccttctggcccaaatcaaagtgatcggagctattaagatgatttccctatttggctgggttttaaagactatagttttgaagtcagtggcagatgacctactaatggtgtttaatggttctctcaacaaattgtgaagtaccttgaatgacccactggttaagtacrtaaaaggaaaattccagctttaatcatttaatcttgattccatcctatttttcttttggacagtgatgtttattttcacctttaaggaagaatggggagatttaaaaaaaaagggggagggaaaaggtaattaagagttcttgagcactgggctaaacatttcatatgagccatctcatttggtcttcacaaccctatagaagaaagaaaggaaaaggtacacacaacttgcatagctgaggtcacacagtcagggagcaacgcagtggg

SEQ ID NO: 643046 - DNA, 546 bp, Homo sapiens
atatcatattacataataatagcacatgactatttctattctgtgaattataattgctaaaggaaataccccgctatttatgagatgcttagtgcatctgtcaccatggccttctggcccaaatcaaagtgatcggagctattaagatgatttccctatttggctgggttttaaagactatagttttgaagtcagtggcagatgacctactaatggtgtttaatggttctctcaacaaattgtgaagtaccttgaatgacccactggttaagtacgtaaaaggaaaattccagctttaatcatttaatcttgattccatcctatttttcttttggacagtgatgtttattttcaccttyaaggaagaatggggagatttaaaaaaaaagggggagggaaaaggtaattaagagttcttgagcactgggctaaacatttcatatgagccatctcatttggtcttcacaaccctatagaagaaagaaaggaaaaggtacacacaacttgcatagctgaggtcacacagtcagggagcaacgcagtggg

SEQ ID NO: 643047 - DNA, 610 bp, Homo sapiens
actgtatccctacaacttgatagaacaatgcctggcatgtaatggatgcatcataaatatttgttgagtgagagaatgaatgaatgaattgtgaaagatcaccaatggataaattacccaaactctggttgatatagccaacctactacaaatcaatgaccattccagtgcagagttgtacatgagcagatgcagtattggggccacaacactgtgtaaggttggatctggaattaaacctttcttgtaatcatatctgcctaagtgtttctttctttctttctgaagagggattaaagacagattctagaagctcactgtatattattttcagttaggtatgagtatccatacatgtttacttgtgcatgtgtgtatacgcatacatatacataggtacaaatatatacacacacatatccacacatccccacacatgtttgtatatgtgtattaagttcactttagtaaactctgtagaggatattccmttgagtacaatccgtagagtcagataatgtcgaccaatatttttctgtctttttaaagcttgtgaagaatttcttgagacattgcaatggagaaaagcctggaacaagtgaatttaaat

SEQ ID NO: 643048 - DNA, 397 bp, Homo sapiens
aggcaattgtaacacaatggtatttatttgtctaaacatagaaaaggtacagcaaaaatacagtataaaagataaaaaatggtacatttgtatagagcatttaccatgaatagatattgcaggaatggaagttgctctgggtgagttagtgaatatgaaggcttrgaacattactgtatactactgcagaaaaaattagccgggcatggtggtggacgcctgcaatttcagctactcgggaggctgaggcaggagaattgcttgaacccagaaggcggaggttgcagtgagctgagatcaacactgtacagttaggctacactaaatttatataaaaaaaattcttccttcaataattaattaactttagcttactatagcttcttaactttataat

SEQ ID NO: 643049 - DNA, 565 bp, Homo sapiens
atcccactctctcttggtcattagatttctgctgagaggtctggtgttagatatattgggacttctctatatgttgtttgcttcttttctgttgctgcttgcaggatcctctctttgtctttgcctttgactgtttgattataatatatcattgggcattgttatttgaatttaatctgactggggagccttggccttcttgtacctggatatttatatctttttccaggtttggaaaaattctagtattgtttctttaaataagttttctctcattttctctttttctactgtctctggaatagcaatgacctatacatttgcttttttgatgttawcccctaaatcccataagctttctttattccttttcattctttttctatttttctctctttcactgtttatttttaagtaactggtcttcacattcacatattctttcctcttattgatcaattctcttgtcgaggcattctattgcatttcttattttattcattgtgtattttagccccagtatttctatttatttattttttattacttaaatctctgtaaaatt

SEQ ID NO: 643050 - DNA, 608 bp, Homo sapiens
tttagttggctgtattagagttaggtgactttttaaagaagggatcttgtaacacagatattccatgaatgatttttgatacacattcgacaatatttgccagttgcttttacacttgaataaaaatttggctgtaaataatattgcacaattacaccttctttctctcaacacctgcaaacactactctactattttcaaacaatagatattgttttttagaagtgtaagaccagcttaacatttagcacctataaattactggcttctttccctagagtgggtgaagaatttagtttactttatcttcaaagatcaaacatgtaactaagtataattaatttctataagttgtcctctttcagtttttttctaaaaaaagtgtatcattttcacttgyagttgtagttcttcattctatgaatattttatggcattaaatcttgaataattgtctggtttatttgttaacctgtttactttagaaacactaattattgttattttgcatcgcttggcctttcttttttaaatctcttatattatcattaattatatctttgtctcttcctttcacatttaccttaaatctatatactaattattaa

SEQ ID NO: 643051 - DNA, 608 bp, Homo sapiens
tttagttggctgtattagagttaggtgactttttaaagaagggatcttgtaacacagatattccatgaatgatttttgatacacattcgacaatatttgccagttgcttttacacttgaataaaaatttggctgtaaataatattgcacaattacaccttctttctctcaacacctgcaaacactactctactattttcaaacaatagatattgttttttagaagtgtaagaccagcttaacatttagcacctataaattactggcttctttccctagagtgggtgaagaatttagtttactttatcttcaaagatcaaacatgtaactaagtataattaatttctataagttgtcctctttcagtttttttctaaaaaaagtgtatcattttcacttgtagttgtagttcttcattctatgaatattttatggcattaaatcttgaataattgtctggtttatttgttaacctgtttactttagaaacactaattattgttattttrcatcgcttggcctttcttttttaaatctcttatattatcattaattatatctttgtctcttcctttcacatttaccttaaatctatatactaattattaa

SEQ ID NO: 643052 - DNA, 626 bp, Homo sapiens
gaaagactaggtttttttgttctagaaatttaaggtaatctctctcaaattattcactcaccactaagttaacagaacaaagactcagtgaccacccataacaaagaatatacactttaaaatattagtttggaaaattcactaaacaaacaaaaacagtctttcaacaacaacaaatcataaggaaaagagacaatcagatatgcagagatactgcattataggattcaaaatgtccacttctcagcaagagaataacccatatacagaatgaaaataactcatagaaattgtccccaaggaagcccagacatagamcttgctagagaaagaccttaaaattgactattttaaatatattcaaagagctaaaggactcccatgtctagaaataaaggaagcacagaatgatgtccaaaacaaaagagaatataaataaatagatgaaaattatgttttaaaaagaaccaattaaatattctgtaattgaaaagtgcaataaataaaatgaaaattttactagacaggctcagcagcagattttatcaggcaagagaaagaatctgtgaattcaggaatagattagtagagatgatccagtctgaggaatagaaagaaaaataaat

SEQ ID NO: 643053 - DNA, 598 bp, Homo sapiens
  misc_feature 217, 218, 219: n = A,T,C or G
agtctgcagtacctttcaatttgctcttgatcataatttactgaaaagcattttaaaaataagtgcatgactcttaaagactgttcttggctcctttttatttttacttgtgaataggttgggattatatgtcttcctttttaataaggctattgtggatttaaatatctaacttaaaccctgttggctaaaactttgctttttggctttttttttnnnttttttttttcaagaactgagctcaaaatgtgctatacaaaagctgtcttttgagaacatatatcaattcagctttgcctcacttgaaatgttgatatttgtaaatgacagagctcccactctagacttacaatcctctcctctttcaatgctccagagaagcaatcttgggaggagaaatgttttgactcatctttgattttgaaagaggtttaragctctggtctcctttcatgtctcaggttattttttggtcttccccatccccgattttcccaaacccctaaataacaaacccagttccttggtttctctcctttaaaaagataatgtttcaatttacaaccagctctgaataattaatgatggtaatgatgtg

SEQ ID NO: 643054 - DNA, 570 bp, Homo sapiens
ccagccctagaactgcctggtctgatcctaagtgttccatggagattttgtttttttaatgtaatgaatgattaagtcagcaaatactttacatctcttgtgtgctaggccctgtgccaggtggtgattatgggccctattctcaaaggactcctggtctccgtctgtcacttactttagaaacaagtcatctagccagagccagaagggcactggagatcactaatcmatcccatcattacatagctgaggaaactgaggcccagagagtaactgcaacatgttaaagactacacagggagcaaatttattttctgcttctaagccaggtggtttggccacagataggccaagaagaatacgaacagacaagccttgctgggtttcccactcagtttattactattagaccattccctttttccccactcacatttctgcgcatttccatggtcttcatagaatctaagcctaaaaatagagttttccttgagtctttgggtcttcatttctgaagactctcatgtcacagaaaactttaattaaataaatcgttatgcttttctcttg

SEQ ID NO: 643055 - DNA, 570 bp, Homo sapiens
ccagccctagaactgcctggtctgatcctaagtgttccatggagattttgtttttttaatgtaatgaatgattaagtcagcaaatactttacatctcttgtgtgctaggccctgtgccaggtggtgattatgggccctattctcaaaggactcctggtctccgtctgtcacttactttagaaacaagtcatctagccagagccagaagggcactggagatcactaatcaatcccatcattacayagctgaggaaactgaggcccagagagtaactgcaacatgttaaagactacacagggagcaaatttattttctgcttctaagccaggtggtttggccacagataggccaagaagaatacgaacagacaagccttgctgggtttcccactcagtttattactattagaccattccctttttccccactcacatttctgcgcatttccatggtcttcatagaatctaagcctaaaaatagagttttccttgagtctttgggtcttcatttctgaagactctcatgtcacagaaaactttaattaaataaatcgttatgcttttctcttg

SEQ ID NO: 643056 - DNA, 570 bp, Homo sapiens
ccagccctagaactgcctggtctgatcctaagtgttccatggagattttgtttttttaatgtaatgaatgattaagtcagcaaatactttacatctcttgtgtgctaggccctgtgccaggtggtgattatgggccctattctcaaaggactcctggtctccgtctgtcacttactttagaaacaagtcatctagccagagccagaagggcactggagatcactaatcaatcccatcattacatagctgaggaaactgaggcccagagagtaactgcaacatgttaaagactacacagggagcaaatttwttttctgcttctaagccaggtggtttggccacagataggccaagaagaatacgaacagacaagccttgctgggtttcccactcagtttattactattagaccattccctttttccccactcacatttctgcgcatttccatggtcttcatagaatctaagcctaaaaatagagttttccttgagtctttgggtcttcatttctgaagactctcatgtcacagaaaactttaattaaataaatcgttatgcttttctcttg

SEQ ID NO: 643057 - DNA, 420 bp, Homo sapiens
caggacctatgcacacactaaccaatgccatgagcacatcccagcgaggaatcaatcctcatctaagaagctggcctgatgcctggttcctaaggagtctcatacacaaaccatttattagcaactctgatgctctcccattacwgacagctgctagccaggctcaaatgaaagatctagggaaagaaatataggcaaatttttcccaagactttgagtttgaagagacaaactcagaagaaccaagagaaaaggaataatagagaatgggccttttctaaatagtaataagaatcataactaacatgtaatcagtgcctactacatgaagtaaatattttaatttttcccatttaacacagagatgtaaggctgtcactttacaggacaagggagagaagaaaggaaggaaggaaggga

SEQ ID NO: 643058 - DNA, 481 bp, Homo sapiens
aggatccagtggcagaattccaggatgaagtctagtcatcagaagggagttgaggccagagaattgatgactatgagagtgaattctgmagaaaagaatccagtcattgaagaggaccaggtttcagaaacaaaatccaggtacctaagagcacggtgagtatgaggaagcagatggtattaaagtttatgagctatcagaggataaatggggcaaggagcactgtcccaaagagtaacactcaccatgagggaagatggtttggctgtagctgggctttgctgccctctttacaccaggtgaccctctttgctctagtctgtgatagcttcttacacttaagggttttttgtttttgtttttgtttttgcctcttccttggacaaatgaggcaaaagcgactataactaaatcacatcagtggcaaagtttaaagaacacttagattttataattaattctttttttttttttttttttt

SEQ ID NO: 643059 - DNA, 481 bp, Homo sapiens
aggatccagtggcagaattccaggatgaagtctagtcatcagaagggagttgaggccagagaattgatgactatgagagtgaattctgaagaaaagaatccagtcattgaagaggaccaggtttcagaaacaaaatccaggtacctaagagcacggtgagtatgaggaagcagatggtattaaagtttatgagctatcagaggataaatggggcaaggagcactgtcccaaagagtaacactcaccatgagggaagatggtttggctgtagctgggctttgctgccctctttacaccaggtgaccctctttgctctagtctgtgatagcttcttacacttaagggttttttgtttttgtttttgtttttgcctcttccttggamaaatgaggcaaaagcgactataactaaatcacatcagtggcaaagtttaaagaacacttagattttataattaattctttttttttttttttttttt

SEQ ID NO: 643060 - DNA, 567 bp, Homo sapiens
gacaagtgtcatccaggtaacacagggtttctgaagatgccctgaattctgttgagtcaacaatgaaggctctcagagaagcacccaacatctggtgtgagagtgatctagaacatgttctcacaaccgcccagaagctgaatatcaagtttatctggacttggatcacagtgatcactgaacacagcttttaattactcaacagttagtcaacaatatgcagataagtaagataattatttgtcatatcttttaccttctctgtttatgtagcctactttatgtctaggcaaagtgtgtggccacagcaaagtgagatttgttctgttcaggacaggaaaggacmctgcttcaactataaattctcctcttgtcaaaggcacagaaataattagctatatccaagggcacaactattcctctaccgacaataaagcctgactgtatttgcattttatcttgcaatatgcccacctaaaaaacatttctacaaaggctgcataaaatagaactgtcaagtttcagtactgctccatacaccagcagcacatttgcaaatatgaaggt

SEQ ID NO: 643061 - DNA, 593 bp, Homo sapiens
cccatttaattcctaagtcagtaggaattgcagctgcaggtctggagtgggatctcagattcagtattctgtgaggcaacctaagattatcagtttttaacattttcatgacagggaaccttattaaaatatgaaaaaatgttgaagtctttctcttacaacatgtagataaaacataattttatatcaatttcaggagactcagggacagctccccaaagccctaaatatagtgaatttcaggtgtgagtttgagagttacaagttctgaaacctgttctgatgccaggacatagcctaatagattcagacacattgaattattcagttggtgcaaaagtaattgcagtttttgatggttacttttaatggcaaaaaccacaataacttttgcacsaacctagtatgtttctattatcatttttctttcttaaagacacagactgagagtacaaagacatgtttcattgtccctagagcctccattctcagtgtcaaagccagaagatgatcaggatgaaaaagacactattcatttcccttgtattaagaaaaagagagagatagccttatgcctcacaatggtaattact

SEQ ID NO: 643062 - DNA, 560 bp, Homo sapiens
actcaactttgagctgctaagatggttcaatattgaaaattgtttatattaagagtataggggtatatgcttgtctctaccaaaatttaaaatagtcttttataaaatttaacattcattctaataaaacttacagtaaaaatgggaatcagtaagctaaacacacagtcacataaaaatacacaaactcatttagaaacattctcagtaaagacattaacgagccaagaatgcccacttcaaaatagatgatatttttaggaattgttatcaatattaatttggctagaagtaaaatgtcataaaggaaaataaaaaagagttattcttatcttcrcaaaatttgatcatattccaaaaattacaaaagattcaatggcatattataataaatatagcaatgtttaataagaaattgagagtgttctgtctttgcccatgaacagtatcatcttacttactttctaggaaaaaggaagtctttatcagctcagcccctcattgaaagagagaaagagaaagagaaggagagaaatatagaattataacttgggtagaga

SEQ ID NO: 643063 - DNA, 570 bp, Homo sapiens
ctttttgcaggttttgggagacattagtaggagcagcgatgaagttagcagtggacttttcgccgttgttggtgactgctgggatatgttttatcccttcattctgatttggtgttctttttaagattctctgagatgcctgttataatcagtaagtgaggtgaattgactagggcgttttgagygtcagtgatgagcaacgcaagagcatcaggactgtctttttgttcctctattgagagaagcccttgagtccaatatggagtgtaaaacattcattttaagtctttctttttaattgtaaattcctttaggaacataaaagtgaatatagtctgttatcaataaataacattttgatatgattatctttcctttttagaatacgccagacaccttttgaaagctaatttttggtgaagaaatggattcggttacataagagtgcaacttcagactgaagataggccaaggtcgtcactgatctcaagatttcaaccttgaccatgggcagtgaccagattgaaaggggagcaagttcggcagtgggagagttgactgtgtcacccc

SEQ ID NO: 643064 - DNA, 581 bp, Homo sapiens
tgttgtttggtttgattataggatgcctctcaatttggaattgtctgataaaaatcattttttaatgtaaatctgatcatgacactttcctacttaaatcactcttttctctttacacttaatcacaccattacaaagctactcctaagctgacctctgccttcctctcccatcactctctgccccatcgtgttccaggttttctgttgctaataagctccaggtgttctcacttcaaggctgttgcattttctgttccctctttcctcagctcccatctttcagacttcagttcccaatcgccaactcagaggcatcttccctgaacccrctgtcaaaagtagcccaccctcagagccaaaccttttcacttctcttcttatttccttcagagcactataaccatcagaaataatcttgtttgtgtattttatttccattgaaataaaagccctaggagggcaggaatcttgtctgtctgttcacagatgagtctccagcatcgacaatattaccaggcacacagaaggccttcagtatatatttttggaaaggacaaataaatagtggagaaagagagc

SEQ ID NO: 643065 - DNA, 581 bp, Homo sapiens
tgttgtttggtttgattataggatgcctctcaatttggaattgtctgataaaaatcattttttaatgtaaatctgatcatgacactttcctacttaaatcactcttttctctttacacttaatcacaccattacaaagctactcctaagctgacctctgccttcctctcccatcactctctgccccatcgtgttccaggttttctgttgctaataagctccaggtgttctcacttcaaggctgttgcattttctgttccctctttcctcagctcccatctttcagacttcagttcccaatcgccaactcagaggcatcttccctgaacccgctgtcaaaagtagcccaccctcagagccaaaccttttcacttctcttcttatttccttcrgagcactataaccatcagaaataatcttgtttgtgtattttatttccattgaaataaaagccctaggagggcaggaatcttgtctgtctgttcacagatgagtctccagcatcgacaatattaccaggcacacagaaggccttcagtatatatttttggaaaggacaaataaatagtggagaaagagagc

SEQ ID NO: 643066 - DNA, 564 bp, Homo sapiens
taagaattcttgagtggggataattttaaagtggccaattcactaatgaatattttcttgtaaagacaatttttgctcctctctgcaayctcaaaattacacggccttggataacctcccatcctcacccgatctctccccctttaggtctttccacaaatttcacctcaacaaagccttttgtgaaattcttatataaaactgcaattcaattctaaccccatgtacactcactccatttatcctttttctgctgatttctttccagcacttaccaataccaaacatacaggcataccccacatatattgtgggcttggttccaaaccaccataatgaagcaaatagcaaaataaagtcagtcacgtgatttgtttccaggggatacagaagttatgtttacattaaaccatagtctattaagtgtgcaatagaattatgcttaaaaatcaatgtacatatcttaatttaaagataccttatggctaaacatactaacaattatctaagccttcagtgagttctaatctttttgctggtgagggccttgcttcaacgttgaca

SEQ ID NO: 643067 - DNA, 564 bp, Homo sapiens
taagaattcttgagtggggataattttaaagtggccaattcactaatgaatattttcttgtaaagacaatttttgctcctctctgcaacctcaaaattacacggccttggataacctcccatcctcacccgatctctccccctttaggtctttccacaaatttcacctcaacaaagccttttgtgaaattcttatataaaactgcaattcaattctaaccccatgtacactcactccatttatcctttttctgctgatttctttccagcacttaccaataccaaacatacaggcataccccacatatattgtgggcttggttccaaaccaccataatgaagcaaatagcaaaataaagtcagtcacgtgatttgtttccaggggatacagaagttatgtttacattaaaccatagtctattaagtgtgcaatagaattatgcttaaaaatcaatgtacatatcttaatttaaagataccttatggctaaacatactaacaaytatctaagccttcagtgagttctaatctttttgctggtgagggccttgcttcaacgttgaca

SEQ ID NO: 643068 - DNA, 481 bp, Homo sapiens
tggggatcttcctataactgggtcctcctgaagtttttaactatcagagctgcctatactgagcttcctgcaattcatcaattactgttcaggtcttccaaccccagcactgtttccactcttgagtctctgctctagtaagccctgattccctgtatttacctgtctctccaatcttggggttagtagtgtgccctcacctctcttagaggcccaagaagagttgttgattttttagtctgtttasatttttatttgttgttaggacagagtggaaacttccaagctcatgcagaagcaggaaccagaaatctgccatatgttcaactttggtagacaatgtcaaacttttccaaagtggttgtaccagtttacattctcaccagcaatgtatgaacattcttgttctcaaatttttgacaacatggtaatatccattatttttaagcctttctgttgtatctcatcttggccttatttt

SEQ ID NO: 643069 - DNA, 506 bp, Homo sapiens
agaaaggcattatagaagtaatgctgtagtgtcttgtagccatggtgaagrctttgatgtttaagctatataaggcagaagtcaaaggaaggtttttggacacagaacagattgcaggaacaaggatgcagtcttattacctttgataactttcctgagtaactgattcatcataagtgctcataaatactagttgaataattatctattatcaaggtcatttgcaatataactaccattcttagagtatattttagttagcctatgtccttttgtaattgccatatttagaaatagaccaaggtacccaagtttaatctgacagggtgaagagaaatacatattccatgatgttccaaatcagtgaattccagagattttactttttcttttggcagacaaagacactattgaccattacagttaataaacactccttttctacagtctcatacttgggcaattggagcaggcgagagaaatccaagtaaaggagcttacattta

SEQ ID NO: 643070 - DNA, 458 bp, Homo sapiens
tttctctttcaagggttgtattacacagaactagagtaatcatttccatcactctcccctctaggctgagggctgactgcagagagggtgaatcctagcttatcactgcctctcagtgcagcactaaccttgaaacaggcttgacactcaggcartttggttgaataaatggcccacagtttggtgctctggttcaaagttgagcctcatctctgtgtgctctgggccacacctgtatttcccatggtggatgtttagtggtaaaaaaacaaccaaactattttcttgcacgatactttcaatgtagaatatttctggtcaccaaaatgagtgtgggttttcccccacattaagcaattctccagtggacataaactagctgtctactatagtttggtttgttcattccctgcagacctcatgttgaaatttaatccccagtgttggatggtgcctaa

SEQ ID NO: 643071 - DNA, 458 bp, Homo sapiens
tttctctttcaagggttgtattacacagaactagagtaatcatttccatcactctcccctctaggctgagggctgactgcagagagggtgaatcctagcttatcactgcctctcagtgcagcactaaccttgaaacaggcttgacactcaggcaatttggttgaataaatggcccacagtttggtgctctggttcaaagttgagcctcatctctgtgtgctctgggccacacctgtatttcccatggtggatgtttagtggtaaaaaaacaaccaaactattttcttgcaygatactttcaatgtagaatatttctggtcaccaaaatgagtgtgggttttcccccacattaagcaattctccagtggacataaactagctgtctactatagtttggtttgttcattccctgcagacctcatgttgaaatttaatccccagtgttggatggtgcctaa

SEQ ID NO: 643072 - DNA, 458 bp, Homo sapiens
tttctctttcaagggttgtattacacagaactagagtaatcatttccatcactctcccctctaggctgagggctgactgcagagagggtgaatcctagcttatcactgcctctcagtgcagcactaaccttgaaacaggcttgacactcaggcaatttggttgaataaatggcccacagtttggtgctctggttcaaagttgagcctcatctctgtgtgctctgggccacacctgtatttcccatggtggatgtttagtggtaaaaaaacaaccaaactattttcttgcacgatactttcaatgtagaatatttctggtcaccaaaatgwgtgtgggttttcccccacattaagcaattctccagtggacataaactagctgtctactatagtttggtttgttcattccctgcagacctcatgttgaaatttaatccccagtgttggatggtgcctaa

SEQ ID NO: 643073 - DNA, 546 bp, Homo sapiens
attctgacaaataccaaaagatacagtttaaatgctgtagggtgtcagaggaaaaagagctgacttcttgctgtaggtatcaggcaatacttcatggaggatggtatatttgaaatggaatgggtagaatttgcacatgtagagttgggaagacaaaaattggattaattaactattacttcatcgaaaaccactccacatgttagtggcagcaaacaaccaccatctactatttcycatgagactaaggacccaataggtggttctgctcttctgggctgcattcaggtaatacagactggcctttctcatgcatctgtgttcagctgctgggatggctgagggctggctggtttaggttggcctcactcacatgtctggaggttggctggctgtcgtcctccagcaggctaacatatgtggtggtggcaggaccctaagagacagaatggaagcatgccaggcctctctaggcttaggcccagaatgagcacattgtgacttgcactacattctattggtcaaagcaagtcataacaccagcct

SEQ ID NO: 643074 - DNA, 539 bp, Homo sapiens
gggtctgttaatctggtccctccaaaatcagtgtcttttctaagtaagaagtcagctatcttccaaatcagcacagagccactgtaccactaagtgactgaatgatcttgaacaaatcaccttacctccttgattttgattccctatagttgtaaagacggaaatattaatattgaccttatttaacaaggtgattgtgaattgaagtgagatacgtaaagcctaaagaattatcatgttaatttttaaatatttgagtcaaaattataatttaataacagaaaaacacttgggtgttgcctgcataattaggcatccattctttaaaataaagaggccttgtttacttatctgagagggttgtggaaggctcaaatgaaataatatccatgaaagtccttcacctacctacaactgtgattatttgatatcccagaataattttcccacaaaaaaatgctcttatgttctctctggcagcatakataccaaaactggaacaaaacatactttcaccacagaaattcatgagtggtaca

SEQ ID NO: 643075 - DNA, 563 bp, Homo sapiens
gctggtgttgcaaagttaaacccatcttattgatgactcacaaagaggtgaagtgagttactaagagttcacaaaattaattccattaataaatatttacttattgagcatctgctatgtgccaggtgccatgccagaagtttgggaatggaataatgagtgagacagattttgtgtctctcttcatcaagaagtatagtatggtggggaagacagaaataaagtaaataatataggcacgggcaaagatttcatgattaaaatgccaaaagyaatggcaacaaaagccaaaattgacaaatgggatctaattaaactaaagagcttctgcacagcaaaagaaacgatcatcagagtgaacaggcaacctacagaatgggagaaagtgtttggaatctattcatctgacaatgggctaatatccagaatctataaggaacttaaacaaattaacaagagaaaaacaaccccatcaaaatgtggatgaaggatatgaacagacacttcccaaaagaagacatttatgtggccaacaaacgtgaaaaaaagctcatcatcactgg

SEQ ID NO: 643076 - DNA, 563 bp, Homo sapiens
gctggtgttgcaaagttaaacccatcttattgatgactcacaaagaggtgaagtgagttactaagagttcacaaaattaattccattaataaatatttacttattgagcatctgctatgtgccaggtgccatgccagaagtttgggaatggaataatgagtgagacagattttgtgtctctcttcatcaagaagtatagtatggtggggaagacagaaataaagtaaataatataggcacgggcaaagatttcatgattaaaatgccaaaagcaatggcaacaaaagccaaaattgacaaatgggatctaattaaactaaagagcttctgcacagcaaaagaaaygatcatcagagtgaacaggcaacctacagaatgggagaaagtgtttggaatctattcatctgacaatgggctaatatccagaatctataaggaacttaaacaaattaacaagagaaaaacaaccccatcaaaatgtggatgaaggatatgaacagacacttcccaaaagaagacatttatgtggccaacaaacgtgaaaaaaagctcatcatcactgg

SEQ ID NO: 643077 - DNA, 580 bp, Homo sapiens
acacaaaggataaatacctgagatgatggatactccacttaccctgatgtgattattatgcattgcatgcctgcatcaaaatatctcatataacccataaatatatacactactatgtacacataaaaattaaaaattttaaaaagttgtgggaatatttctgataaaattattaaatgtagtaattggtataattatgatcaattggatcaattaaatatgtctagcatttctagaatgaatatggaatttttcatcctcaaaaatatacctgggccagaccaggcatagtggctcatgcctgtaatcccagcactttgagagaccgaggcagaagaattgcttgagcccaggagtttgagaccaaccktggcaacatgacaaaacctcatctctaccacaaatacaaaacttagccaggtatggtggcgtgcgcctgtagtccaagctactcgtgggggctgagttgagaggactgattgagcctgggacaacaaggctgcagtgatctgagatcgtactactgcacttcagcctgggtgacagactgcaaatatatatatgtcaaatacatatatac

SEQ ID NO: 643078 - DNA, 477 bp, Homo sapiens
agatagaactcactcactatcatgagaatagcaccaagggggcaatctgcccccatgatacaatcgcctccaccagaccccacccccagcatcggcgattacaattccatgtgagatatgggcaggacacagatccaaaccatatcacaaggcaataggtattgcttggacatccaggacagtctgtgccagacttccatggcaggagctctgtctcatcccagcctggcctagcgctcctcccacagagccaggagactgagtgtggacgtgaaacctcaggacaggtcacggggtccatctgaatgcactatattcagggcaggtgtcccagagggaacaagaggggycttgtggctgcctcacttccaaacagaaagtgacccaggctccaagcctggtaagccccagggcatgagccccagggcagacatccatggggcttgggatccttttgttctggatgccagaggaaca

SEQ ID NO: 643079 - DNA, 554 bp, Homo sapiens
gaattcgagctgagagctttaccatacagattgtcctcaaaaggtttctcttcaragtgaattaataggagttactgaatgctatttcatattgattagagtagaaggatgatgtgctgagggcttttcttcattaattccatggcaaatttcccagatgcttctgagttatctgtttcctggtattcataccttctgcagtctctcacattgtatcaggattggtgtgttgtgagaccaacacaataggaaataagtgaaagcttagcagtcctcctgaggataggtcataaaagccattttggcctctgtattggtcctctcttggatcactaaccttggcgagaacttattgccaaattgtcaaggagctgggccttgtaaagaggcctacatggtaatgactgaaggtcccctgacaacaaccaacatcaactttccaggcatgtgaataagtcatcttggaagtggactgttcatcagtaaagatgttagatgactatagctttggctgacatcttgattgtaagtaaaggcatgagagatcctgcagt

SEQ ID NO: 643080 - DNA, 222 bp, Homo sapiens
gaattccagaaggaactactgagatgcaaagaagcacagcagcttttgcacacatgcgtgggattagatggaaaacaagtggattgagggtctgccaatgaaagcgacccatactgaartccactggctctggttgagacccagaagagtcatgcatcagaataaaggtggacaggaaataccctggcctttgtagggactgagcctgcaccgatgacttca

SEQ ID NO: 643081 - DNA, 222 bp, Homo sapiens
gaattccagaaggaactactgagatgcaaagaagcacagcagcttttgcacacatgcgtgggattagatggaaaacaagtggattgagggtctgccaatgaaagcgacccatactgaagtccactggctctggttgagacccagaagagtcatgcatcagaataaaggtrgacaggaaataccctggcctttgtagggactgagcctgcaccgatgacttca

SEQ ID NO: 643082 - DNA, 566 bp, Homo sapiens
gtggtatatggtcttctgttcctgtgttattttatttacttacttttctcacatcttgaggtcttagaagggatttctacctggagccacgaaaggccagtctctcttttgacttctgcacctgcttgtgtcaggcactgtgctaatagttgactctgtgactagagagaggcgcttggcttttactccaagcaccaggagatgccacttgagcacttgtgaaggaacatgatctgacttggagctttaaragctccccctgggccgggggcagtggctcacggctgtaatcccaatgctttgggcggctgaggcgggaggatcgcttgaggccaggagtttgaggccagcctgggcaacagtgagacccatctcttaaaaaaaaaaaaaaaaaaaaaaaaaaaaaagagctctctggctgctgaatggcacatggacagtagggggagccagaggggcagcagggaagcccgcaatctgcagtcgggacgtgacctggaggaagatgggagggacgcagagaagtggaccactttgggacatgctccattttggtcttggagaaa

SEQ ID NO: 643083 - DNA, 589 bp, Homo sapiens
cctggctaattttttgtatttttagtagagacagcattttgccttgttgggcaggctggtctcaaacacctgacctcaggtgatccacccacttcagcctcccaaagtgctgggattacaggyatgagccaccgcacctggccctattaggttggttttaagcgcaaactggagcaggtgaatcaactctagttgctagctatcatctttgcaaggactgaaacaacaaagggaggtggtagttacctgaatccaggagctgcagttacctggccagtcacctgcccccaccccccaccatggtggggaatacctaatgggactgagaccacagaggaggcacagcagccatggctagagacactcaaagtggagggggggaaattctctggcttctcctttcttggcaccctccaatctgcctgtagacctcccattggctgagcctaaccagatgcaaagaagcctgggaaatgtagtgtgtagagaacctgagaaagataatttgcaggagccattgccctgatacagaggggagcagggggaaagtggggaatagatctaagtgcatatcgaccaaattccaacc

SEQ ID NO: 643084 - DNA, 359 bp, Homo sapiens
gtcagcagtggagtgtaaataaggcaacccatataccatttcataaggggataagccaccatctttccgaggggcattcctgactcttaacaaggcaatggggaggcatttagtctatggtaacygaatctctaaaactaattcggttagatgaattcttagagtttgttttttttatattcttcctgatgaaggtgggtgccgggggtatggtatttttatgttatgattagtacttgggctaattttttaacggcatgtgcagtgaaataagtcttattttctgaatcaatattttctattaatctaaacttgggtataatgttttcaattaatgctttaactacattactggctgt

SEQ ID NO: 643085 - DNA, 359 bp, Homo sapiens
gtcagcagtggagtgtaaataaggcaacccatataccatttcataaggggataagccaccatctttccgaggggcattcctgactcttaacaaggcaatggggaggcatttagtctatggtaaccgaatctctaaaactaattcggttagatgaattcttagagtttgttttttttatattcttcctgatgaaggtgggtgccgggggtatggtatttttatgttatgattagtacttgggctaattttttaacggcatgtgcagtgaaataagtcttattwtctgaatcaatattttctattaatctaaacttgggtataatgttttcaattaatgctttaactacattactggctgt

SEQ ID NO: 643086 - DNA, 543 bp, Homo sapiens
tatatttttacaaagctatagttaacactctccgagtttgtgcaagggaaaataagtaggtaagaagcaagcatgcagtgaactctcccctcagcagtttaaggatccacagcaaacacttggtatataaaatcaggaggatttccaaactgcttttgcaaatcctgcctcagagaacacgtttatgtgcatgttaaatctttatgtgtttcagagtctatgaaagaaagaatacttagtatctatgtttccaagggacttctttaaaactaaagcttcaaaaacaaaagtatacaattcttgaaaactagtaactttattaagtaatgttattatcattgaggctgagaaatttcctgggtgattaaaattaaatgcyatatcctaatttgttctgtgacaacacaagagagatactcatgaatgagaaaatgatatacatctttttattcctttaacacttgtttcttttatatgacccactcctagtatttgtttctttatgcttagctaaaataaatggatccatgaaagtagattgtg

SEQ ID NO: 643087 - DNA, 549 bp, Homo sapiens
tacagccttgttcatttgctagtgaagatacccacatctgacacagcagctgcattgggagatactacctcgttgagttttggtaagttgtaatcctccagggagtttacgtagtggccaaatctgtaaattaaatggggatattagggaawccatgacccctgcatcctttaggataccaatccgtgctgtttactatgacaatgtaatactcttttggctggggcagtgagcaatggacaaggagtttcagggatttccccactatggtgttcttagccctcaagccagagagtctcaggatccattgccatgtacattctcccagctgctgctagtacatgttggtgaaatcctgtagttccttcagggtagagtctctatccttccttagcagacccagcacctccacagctgagttgtattgtgattaaaccctaattaataggctgggagccgggatatgagataggggtagatcctgcaggagcttcatattgtcttgcacggaagaggcttctacattgtcttcaagcaaggagggaacac

SEQ ID NO: 643088 - DNA, 356 bp, Homo sapiens
cccattaaaatagatttaaggcaataaaaagaaaaaaatttctttgacctttacaagataatgtagagtggttatgtgcctgacaaaccaagctcaagayctggctttgcctcttactagctgtttgactccaggcaagtttttaatactgtgtcttttttaatgaaaaaatggacagaccatttaaaaaccattaataccattgacagaggtgtagttgagaatatctttgccccatctgaggggcatcactggggaccccattgtctgccagcttctccagtcctaaagcctcatgtttggtggcagtcaagttcccctcaaagctcactgatttgtggagagaagagggtaga

SEQ ID NO: 643089 - DNA, 584 bp, Homo sapiens
cactggtctcatagtcagtttttggtcatctagaagatacttgttgacagggagtaaagattaattgaattgtacaattattaccagtaggccgcttcttctgcctcaggactatttatctgagagttgtgaatacaacttgaatctcactttccttttcccttttgcagcctccatcttctatctttatcmagattcagagagagaatcagttaaaatgagcattaaagagaaccttgaaggggaaataaataaccacaggcttgtttgatgtgtgtgtaatggaagaaggatcagggctggcaaggccagagctcatggagagattatgcactgcatggtcttttaaagcccccgtgggcaggtagcattctctcttactagctgcctcactgagtaataaattgctgggctactcaaatacaatgtgatttttctaaagttaggtacccctgatgctactgagctgatcactactgccaatggtatacttttcctggctctttaattcatcctaacttgcttcctaaaattgctgtctctgttcagaagttgcaatgacttaggaatatttctgggaagaa

SEQ ID NO: 643090 - DNA, 533 bp, Homo sapiens
cacactgtcttccacagtggttgaactaaattacactcccaccaacagtgtaaaagcattcctatttctccacatgctctccagcatctgttgcaaaacaaacagtttatttcctatacaatttgctcattgtctataasattgggaaataaaggagaaaagtgtgacaagtgactaaataatttcagtgatgactaggacatttgtgaagtttatcagccaacaaaacataataaaattgagttggtccctagtctcccaaatatcccctctctgcagctctggagggctgtgacgtcaactcaacgaggaataatggctcgcgtccacggttctggttgttttctccttcagttttcacaattcttttttttttttttttttttaagtgctaacctgctttctttctctctgccaggggtggatgtgattacaaagctcttctcagcctcaggtaaagattattgttacctgtggtcctgagagacctggctctatttctcaaaccttttgtatgtgtgctgggaaaccct

SEQ ID NO: 643091 - DNA, 530 bp, Homo sapiens
cactaaatctttgtgcaagtgtttctatttttaagatgttaaaaagattgtaaaatctataatgcaaactgctacaaaaatttagacattgatttttaagacagtgggtcatgtacattttgtttaatttttgagttcccattaactttcaacacatcaatcacagtctttcctaagtacatatcaaatatccctaaactccacacgctcaaagtcgagaaaggattgcaactttcctcctgactctccttcggaggatattggttatttacatttatattttcacctggatatactgtcttgacacactgataataaacataatgtcttcaaagagacataaatcttcagtgtaacatgccaacaactgagtaacaagccataaacgtggctgctggaaaaawatctctataactgcaccaccagtgataaagagttacaccgagtgttaaaataaaatggccacctacagtgtttgtatctcctgtagctcttccgtgttgacatcatacagatatttatcagtatca

SEQ ID NO: 643092 - DNA, 530 bp, Homo sapiens
cactaaatctttgtgcaagtgtttctatttttaagatgttaaaaagattgtaaaatctataatgcaaactgctacaaaaatttagacattgatttttaagacagtgggtcatgtacattttgtttaatttttgagttcccattaactttcaacacatcaatcacagtctttcctaagtacatatcaaatatccctaaactccacacgctcaaagtcgagaaaggattgcaactttcctcctgactctccttcggaggatattggttatttacatttatattttcacctggatatactgtcttgacacactgataataaacataatgtcttcaaagagacataaatcttcagtgtaacatgccaacaactgagtaacaagccataaacgtggctgctggaaaaatatctctataactgcaccaccagtgataaagagttacacygagtgttaaaataaaatggccacctacagtgtttgtatctcctgtagctcttccgtgttgacatcatacagatatttatcagtatca

SEQ ID NO: 643093 - DNA, 530 bp, Homo sapiens
cactaaatctttgtgcaagtgtttctatttttaagatgttaaaaagattgtaaaatctataatgcaaactgctacaaaaatttagacattgatttttaagacagtgggtcatgtacattttgtttaatttttgagttcccattaactttcaacacatcaatcacagtctttcctaagtacatatcaaatatccctaaactccacacgctcaaagtcgagaaaggattgcaactttcctcctgactctccttcggaggatattggttatttacatttatattttcacctggatatactgtcttgacacactgataataaacataatgtcttcaaagagacataaatcttcagtgtaacatgccaacaactgagtaacaagccataaacgtggctgctggaaaaatatctctataactgcaccaccagtgataaagagttacaccgagtgttaaaataaaatggccacctacagtgtttgtatctcctgtagctctyccgtgttgacatcatacagatatttatcagtatca

SEQ ID NO: 643094 - DNA, 633 bp, Homo sapiens
agtacagaactgtaagataatacgtttgtattgttttaagccactaaatttgtggtaacttgttccagcaacaataagaaactaatatacctgtatgccagcccagtatctaatatatatatcgccctctttatttgctgcctaacactcagcacgatctgcaattatcttatccatttatgtgtcctcttgacttagtcaaatggggcttttatgaagacacaaatgtctatcttatttaccagctcacctgctagagtacgggttatgtagcacatactccttctttattcatttattaattatactttaagttctggggtacgtgtgcagaacgtgcaggtttgttacgtaggtatatacgtgccwtggtggtttgctgcacctatcaactacagtaagtatttctcctaatgctctccctccccagccccccaccccaccaacaggccctggtgtgtgatgttcccctccctgtgtccatgtgttctcattgttcagttcccacttgtgagtgagaacatgtggtatttggtcttctgttcttgtgttagtttgttgagaatgatggtttccagcttcatccatgtccctgcaaaggacatgaattcctccatttttatagctgcatag

SEQ ID NO: 643095 - DNA, 633 bp, Homo sapiens
agtacagaactgtaagataatacgtttgtattgttttaagccactaaatttgtggtaacttgttccagcaacaataagaaactaatatacctgtatgccagcccagtatctaatatatatatcgccctctttatttgctgcctaacactcagcacgatctgcaattatcttatccatttatgtgtcctcttgacttagtcaaatggggcttttatgaagacacaaatgtctatcttatttaccagctcacctgctagagtacgggttatgtagcacatactccttctttattcatttattaattatactttaagttctggggtacgtgtgcagaacgtgcaggtttgttacgtaggtatatacgtgccatggtggtttgctgcacctatcaacyacagtaagtatttctcctaatgctctccctccccagccccccaccccaccaacaggccctggtgtgtgatgttcccctccctgtgtccatgtgttctcattgttcagttcccacttgtgagtgagaacatgtggtatttggtcttctgttcttgtgttagtttgttgagaatgatggtttccagcttcatccatgtccctgcaaaggacatgaattcctccatttttatagctgcatag

SEQ ID NO: 643096 - DNA, 633 bp, Homo sapiens
agtacagaactgtaagataatacgtttgtattgttttaagccactaaatttgtggtaacttgttccagcaacaataagaaactaatatacctgtatgccagcccagtatctaatatatatatcgccctctttatttgctgcctaacactcagcacgatctgcaattatcttatccatttatgtgtcctcttgacttagtcaaatggggcttttatgaagacacaaatgtctatcttatttaccagctcacctgctagagtacgggttatgtagcacatactccttctttattcatttattaattatactttaagttctggggtacgtgtgcagaacgtgcaggtttgttacgtaggtatatacgtgccatggtggtttgctgcacctatcaactacastaagtatttctcctaatgctctccctccccagccccccaccccaccaacaggccctggtgtgtgatgttcccctccctgtgtccatgtgttctcattgttcagttcccacttgtgagtgagaacatgtggtatttggtcttctgttcttgtgttagtttgttgagaatgatggtttccagcttcatccatgtccctgcaaaggacatgaattcctccatttttatagctgcatag

SEQ ID NO: 643097 - DNA, 614 bp, Homo sapiens
gctctttaaggtcagggaccacatgttatccactttggtaccctgtccatttgcttctgtttctcagtctagcgcttgccttcatctccattgccactattcaagygcacaccttctatcaccacccacctagaacactgaaccagtgtccgacctgctgggactccctgcatctgctctcgtgccacttacaatccagttttcccatagcagtgaaagggattatttgaaatcacaaatcaaatgtgccatttctttccgtagctcagcaagatctggccctcgcctgcctctctgacatcatcccagtgaactcatccccattcctcacagcacttctctctgatcccttttatcacatcattctgcataacagtttggattattgcccagcaagtgttgatggcctccccgctccaattgtggatggtatttacttccctaccacatgattttgggcttggccatatgactcgttttggccaacaggatattagtgggtagaagtgaacagagatttgaaatgtgatagagtggttgggctcacctactttagttcttccatggccatgagggtaacatgccctgggtaacctgttggtcccagaagagtg

SEQ ID NO: 643098 - DNA, 614 bp, Homo sapiens
gctctttaaggtcagggaccacatgttatccactttggtaccctgtccatttgcttctgtttctcagtctagcgcttgccttcatctccattgccactattcaagtgcacaccttctatcaccacccacctagaacactgaaccagtgtcckacctgctgggactccctgcatctgctctcgtgccacttacaatccagttttcccatagcagtgaaagggattatttgaaatcacaaatcaaatgtgccatttctttccgtagctcagcaagatctggccctcgcctgcctctctgacatcatcccagtgaactcatccccattcctcacagcacttctctctgatcccttttatcacatcattctgcataacagtttggattattgcccagcaagtgttgatggcctccccgctccaattgtggatggtatttacttccctaccacatgattttgggcttggccatatgactcgttttggccaacaggatattagtgggtagaagtgaacagagatttgaaatgtgatagagtggttgggctcacctactttagttcttccatggccatgagggtaacatgccctgggtaacctgttggtcccagaagagtg

SEQ ID NO: 643099 - DNA, 614 bp, Homo sapiens
gctctttaaggtcagggaccacatgttatccactttggtaccctgtccatttgcttctgtttctcagtctagcgcttgccttcatctccattgccactattcaagtgcacaccttctatcaccacccacctagaacactgaaccagtgtccgacctgctgggactccctgcatctgctctcgtgccacttacaatccagttttcccatagcagtgaaagggattatttgaaatcacaaatcaaatgtgccatttctttccgtagctcagcaagatctggccctcgcctgcctctctgacatcatcccagtgaactcatccccattcctcacagcacttctctctgatcccttttatcacatcattctgcataacagtttggattattgcccagcaagtgttgatggcctccccgctccaattgtggatggtatttacttccctaccacatgattttgggcttggccatatgactcgttttggccaacaggatattagtgggtagaagtgracagagatttgaaatgtgatagagtggttgggctcacctactttagttcttccatggccatgagggtaacatgccctgggtaacctgttggtcccagaagagtg

SEQ ID NO: 643100 - DNA, 614 bp, Homo sapiens
gctctttaaggtcagggaccacatgttatccactttggtaccctgtccatttgcttctgtttctcagtctagcgcttgccttcatctccattgccactattcaagtgcacaccttctatcaccacccacctagaacactgaaccagtgtccgacctgctgggactccctgcatctgctctcgtgccacttacaatccagttttcccatagcagtgaaagggattatttgaaatcacaaatcaaatgtgccatttctttccgtagctcagcaagatctggccctcgcctgcctctctgacatcatcccagtgaactcatccccattcctcacagcacttctctctgatcccttttatcacatcattctgcataacagtttggattattgcccagcaagtgttgatggcctccccgctccaattgtggatggtatttacttccctaccacatgattttgggcttggccatatgactcgttttggccaacaggatattagtgggtagaagtgaacagagatttgaaatrtgatagagtggttgggctcacctactttagttcttccatggccatgagggtaacatgccctgggtaacctgttggtcccagaagagtg

SEQ ID NO: 643101 - DNA, 430 bp, Homo sapiens
agagggacctggtgggaggtaattgaatcatgggggtgggtctttctcatgctattctcatgatagtaagtctcatgagatctgatggttttataacasggagtttccctgcacaagctctctttttgcccgctgccatccatgtaagacgtgacttgctcctccttgccttccaccatgattgcgaggctccccagccatgtggaactctgagtccattaaacctctttcctgtaaaaatgacccagtctcaggtatgtctttgttaagagcatgaaaatggactaatacacccaccaaggtgcctggcacatcactaaaactgcactagacccttcagagcagccccgaagccctctgaatactactgagtgacctcagatgatactgtgtgagcagaagaactgcccagctgggtcctgcttaaatt

SEQ ID NO: 643102 - DNA, 602 bp, Homo sapiens
aggtataagatattttttaaagtaacaccagaagaggttttaatgtgtatctctcgtgttcaggtgagaaattggagtccagagaggcgagatagcttgcctaagtttctacatctagtcaaacttacatgagaattggtagttattacaagcaggcagttagtacaaatcagaatttaacatacagactaagaggcaaatacaaagaaccaaggttaattttttctcagacttgaggccaaacttccacgtggagatgcagtgaataatattgaggtcattggttgggagggaaagatggaaatrcacagtatggggcagaaacagcactgagagcagaaaaagatataaaagaaaaaatgtgtaaacaaatagtcatgtgaagggaatggtagatgtccactagggcaaataccattagtgtgtcattgaggcaaaaaatactcatctaagctaagagtaatttaggaagaaattagaggctctataaagaagagatatgcgagacaattatagggaacactgaaccttgggttggaaaagaaatggtgaagagaatctaaccattggtgatggcctgtgaatgtttgcattatacctgg

SEQ ID NO: 643103 - DNA, 600 bp, Homo sapiens
tgttatatttgtattgtattacttcttagtcctaatgcatatttctaaaaaggggaaatttattcatagcaaactgtaacctttcttggtttgaaatatataccatagtagccatgctatgagtcttttcagctctccattgctttagtaatttcctgttgctggaaaaggtttcccagtgttttttttttttttttcctaataaacagaattgtttgttttacactcagttaacttcccaaaaggatttgaagcatgtttmttatcaagtagaaactttgcactcctttccccaacatttttttcaacactatcccaaaattctgaggacaatggttccaagaagtttccattagaacctgtcatctccttttttttagtggtcagcaagactcatttcatcatggctaatatttctggcatcagcagaaatctaatttggtcctgtcactccccaacaattgtattctaatcttcacctgattttgtgtatcaccaaatctgactcatatcacatctcattcctaatccacaaatcttttcactgtgtccttggaactcataactgtcatcatgatatatcacactcgacatcctcaa

SEQ ID NO: 643104 - DNA, 600 bp, Homo sapiens
tgttatatttgtattgtattacttcttagtcctaatgcatatttctaaaaaggggaaatttattcatagcaaactgtaacctttcttggtttgaaatatataccatagtagccatgctatgagtcttttcagctctccattgctttagtaatttcctgttgctggaaaaggtttcccagtgttttttttttttttttcctaataaacagaattgtttgttttacactcagttaacttcccaaaaggatttgaagcatgtttattatcaagtmgaaactttgcactcctttccccaacatttttttcaacactatcccaaaattctgaggacaatggttccaagaagtttccattagaacctgtcatctccttttttttagtggtcagcaagactcatttcatcatggctaatatttctggcatcagcagaaatctaatttggtcctgtcactccccaacaattgtattctaatcttcacctgattttgtgtatcaccaaatctgactcatatcacatctcattcctaatccacaaatcttttcactgtgtccttggaactcataactgtcatcatgatatatcacactcgacatcctcaa

SEQ ID NO: 643105 - DNA, 600 bp, Homo sapiens
tgttatatttgtattgtattacttcttagtcctaatgcatatttctaaaaaggggaaatttattcatagcaaactgtaacctttcttggtttgaaatatataccatagtagccatgctatgagtcttttcagctctccattgctttagtaatttcctgttgctggaaaaggtttcccagtgttttttttttttttttcctaataaacagaattgtttgttttacactcagttaacttcccaaaaggatttgaagcatgtttattatcaagtagaaactttgcactcctttccccaacatttttttcaacactatcccaaaattctgaggacaatggttccaagaagtttccattagaacctgtcatctccttttttttagtggtcagcaagactcatttcatcatggctaatatttctggcatcagcagaaatctaatttggtcctgtcactccccaacaattgtattctaatcttcacctgattttgtgtatcaccaaatctgactcatatcacatctcattcctaatccacaaatcttttcaytgtgtccttggaactcataactgtcatcatgatatatcacactcgacatcctcaa

SEQ ID NO: 643106 - DNA, 616 bp, Homo sapiens
tgttggggcgagcccgcctgagaggtggtttgttttttccttttacaagtccatctccttacagaaggggttcttggcttgatacagtttctagatggatgaaatagcacccccttgcccagtttatttctatttatattattatttctaatttggctgagcacttttcactttcatttaaagatttgaaaatgatattcccttccttttcaatatctttatgcaaacatgcttactttgaggtgtgataacaaacaggagttgaaataaacatcttgaaaatttaaaatgttgtgggaagaacattgttgacttycaacttcttgaactgtttgactttaaagtgaaattaggatttaaaatgcttattcctttttgcctccccccataaggagatagcaggggaggagctgtgtggcttctttctttgtcctataggggcttaaatttgtgtgctcttgagatccattttaaaacacaacaaggaacattctttaaaactcagtaatgtttgactacaaaatagtgaattcatgcatgccataatacatcagattgtggtaaaacgtgaactttccgctaaagtgtgtggtaaaagatgcatttactgcaacac

SEQ ID NO: 643107 - DNA, 530 bp, Homo sapiens
tcctactgatggctctgagctaactatacataattagcctatttaaaaaatatttttgatcatcttaaagtactgtggaaggacaaggactctagcgtttttgagtcagagggaggcaggattcacccactacactactcagtagctattggcctcagatgggttattcaaccacgatgcctctcagtgtgttgtgtgtgaagtgtgggtaatggctcatgtgcaaagttgtaagaatctttgcacatgttttagatatgccagtgaattctaacactgtgtctgccatatcctaatctttccaatagatggcagataatttgtgttattataaaagccaacctcattttttttgtattttaagtgtccaataatttgccacaagactgaaatatttaaaatattttacattttctattcaagaagrctagataaaaagattgaagaaaatctactaacttcttagcaaacttgaagatatccatagaaagaaaattgcaatgagtgaaattcaattaatatcatctgaa

SEQ ID NO: 643108 - DNA, 397 bp, Homo sapiens
ctccaattttctcactcatgtaggggactgaagacacaactagaaatatataatcctctgttatttgggcaggaggcttccgttaagcattacatgaacacttcaatagacttattcaagcctgaccactttttctatgatttttacttttgattacttctgttctgttttcatcccctgaccatcttttaaaaaatacayatttagtaatacagattggatatgacttattgtttcatctgtttcacaaatgacattcatatttttcagattataaatttagcctaatgtcaaagttttcttatagtgaacctacaattctgcctctttaattacaatttaagcccagacctctttcatgttttctaactggattctttttcccccatagctttcc

SEQ ID NO: 643109 - DNA, 614 bp, Homo sapiens
gtgggtatgctggtggaaataatcaaatgcatataaagagaaattgatgatgcagaagaaaggaaatatatgaaggagcaaagctattrgaaaggtgagaacagatggcatctcataacattgctttgcgtaggagctgatacaggaagtccacctaaccattgtaatcggatgaaaggtagagaatctggcaaattgaggtattgttaggtatcgtagggttggaaaagtagagggggtcatttgattatttctgctgattctgtggcccaggaatgcaagtttttgatctatattcaaaataatttcctggcacgctcatcaggtgttagtcatacttcctctcctctgggttcaaatccagaaagaataagaatagggagccaaatgggaagagaagtatcagctttattctttcaagcagtaaaaatctggtaaagttgtacagtatatacagttaaatatttgaatctcaaagaagagtatgagatagagttcaagattttagagtcagtggttaaagcctgggatttgaatgaggtcatctagggagagaatatggtatgataaaagaagaaggctggaaatgaaacaccgaataaaatgcatatttt

SEQ ID NO: 643110 - DNA, 639 bp, Homo sapiens
tgcaggtcttgagctgagcttagtgttttacagacatgtgccattcattcatcacctacaccactcatcaaatatctgaagaactatgaaggctgaaggaaaataagtgggtgagcacaggtgcaaakaaataataaatttggagcattctatttcgtgttatttcttgctaaaactggcatattaccccaaacatcaattgcaatatgctattcaacaagagtttttaactagtttataataggaaaattgctcttttttaaaaaccagggttaaagtcacatcctttctctcctctgacaaagtcactgtcacataaaataatggtcctagagtcaaaataataacagaactttgttctgatggagactgtaaatataccaatactcccattaaaaatataggtgggctgcctgaactgagaaggttgtgtcatggctgttagttttaataactggaaggcttgacagagataattgcgttagtgcttcactggcctcaagatgcatgcaatgagtaaaattaagaccatcttattaaaataccaaagcattgtataggaaactcccatgtattcaaaggggaaagaagaaaaaggaatttcatatttacggagcatgtactattttcaaaactctg

SEQ ID NO: 643111 - DNA, 554 bp, Homo sapiens
agtggcacaaaaatggatgaatatattcaaatgtttgagaaatattacttcataaaaatgagagaaattttaatggctggagaagtaaaacttgattttttatttgagaacatagttaatgtcaaaacaaagaaagtcagcaatgaacattgcttctcaacttgaggtgattagagaagaggtcaaatgcctttagaaaacagctgtgcatttatcttggctgtggacctggcaagtcaacaggatttatgaatagcctcaccatgaatttggtcatcctgaggggaaggaaaaccccaaattaattttggagcagaagatcagtgtaactactaccatccttacgtcttctcaatgagcttcattattcctcccagagtggctagagtaggtagttgatgagcatttgtggaatggataggtatctcttttctatgacctactctatcaccctcaggatctattaatcctttgagtttgatctctaaggtggcaatgaaatatttcttayaccagaaatacactgaaactcagagaaagagggctcaaatttg

SEQ ID NO: 643112 - DNA, 541 bp, Homo sapiens
agatctgatggtttaaatgtgtgtggcaatttcccctttactttctctctctcctgccaccatggtaagttttgcctggttgcctttcaccttccactatgattgtaagtttcctgggacccccccagtcatgtttcctgttaggcctacataactgtgaataaattgagcctctttatcaaatatatagtttgcaaatatatatgtatatatgcctagactcttgtaaatacaatactcttgtaaacacaaccaatatatttctggtatggttcttgtttacaggtaccaagacagacctgatcataaaaccaataacaaagaatgtcagaagtcttttacatggaagaagaaaaaaatgcgagcaagaaggcctaagaaaggagaggtttcaatagayggtacactcggttgttcccttagaccacctttgttagtcttcgcctcaaagaaaaacatttccactgaaaaccacataatctggtttaacagattaaatatataaactatgatgtgctgggagaacttcagctttttttcc

SEQ ID NO: 643113 - DNA, 595 bp, Homo sapiens
tgtttgtttaaagtctgttttttcagaaactaagattgcaagctctgcttatttctactttccatttgcttggtagatttttctccatccctttattttaaatatyttatactctttgttaatttatctgacatttccaccacctttactttacattctaatatacaatgaacaaatgcaaaataagataaaaatgtatattttaataactaatatatgttaataactaattgaggctctattgtatatatattttataacacaatttgtcttccctttattgcccagttttggtaataataaaaacatacagataattaaaaatgtagccttaccttcatattacaagtaatattcatcatatttattatatctatgaatttcattagctgtctgagaattcctgcagcttgctgactattctggaatcatagctttgaaaagaacctcaaggggctgtatgagttaatgagatttggaactcttctttcaaattgttttatatgtagttctaatgcacctcaaaatacacttgtatattaatttttatatacaataacgtgtaatttgcatttttcaatatatagtttagtga

SEQ ID NO: 643114 - DNA, 595 bp, Homo sapiens
tgtttgtttaaagtctgttttttcagaaactaagattgcaagctctgcttatttctactttccatttgcttggtagatttttctccatccctttattttaaatatcttatactctttgttaatttatctgacatttccaccacctttactttacattctaatatacaatgaacaaatgcaaaataagataaaaatgtatattttaataactaatatatgttaataactaattgaggctctattgtatatatattttataacacaatttgtcttccctttwttgcccagttttggtaataataaaaacatacagataattaaaaatgtagccttaccttcatattacaagtaatattcatcatatttattatatctatgaatttcattagctgtctgagaattcctgcagcttgctgactattctggaatcatagctttgaaaagaacctcaaggggctgtatgagttaatgagatttggaactcttctttcaaattgttttatatgtagttctaatgcacctcaaaatacacttgtatattaatttttatatacaataacgtgtaatttgcatttttcaatatatagtttagtga

SEQ ID NO: 643115 - DNA, 349 bp, Homo sapiens
tatgattttgttattgaaattagtagtgcaagagtaatataataagggtaaagaagaaagagtctatagagaggtatgcataggctgggcaggagagagataatcaaggttattgatgaaataacaagatgtgagtgattttaagcagtctttacatcattacagctaagawtatggaatcatttctaatcagctggtcaattaacttaatacccttgagacttgttcatgatctgtttaaaatctcactttgaaaatcacaacatcttaactttattggtaaatgcaaagataagtaggcattatttgttcttgttacatacaattaagtaaatataatcaataaatg

SEQ ID NO: 643116 - DNA, 596 bp, Homo sapiens
aagagcaggaaattgtctcacaataatctcctttaaacttgctgctcatacacatcaaaagggtttaactatttgtgccccaaaaggatctagactgcttccaagctgtgggagagtaacctacattctactagggaaaatgtaacttgtatttgcctatactgtatgtttcctttccaaattggaagtttctaaataagaaaacaagggggaaaaagcaggatgatcaagatgtcaatgacactttccatagcctgtaaaaactccatgatggtttctttctarctagaaaagatttcgcaggaagaagcactcctttttgtaaactctcctctttctacagcattgaagcccaattttgtataaaaattaatttgtattgaatttctaagctcctagttgttcttaaaactgcttctcaaagaagcttagatcttttcctgagtgtttaaaaatagatttgaacagaagttttaataaaaagccagtgtggagaaaagccagtattatcacagagcccatttttgcaggtgaacgtgagagtatgtcagagtcaagaattaccaatggttctaaaatccaactacaagaatgct

SEQ ID NO: 643117 - DNA, 596 bp, Homo sapiens
aagagcaggaaattgtctcacaataatctcctttaaacttgctgctcatacacatcaaaagggtttaactatttgtgccccaaaaggatctagactgcttccaagctgtgggagagtaacctacattctactagggaaaatgtaacttgtatttgcctatactgtatgtttcctttccaaattggaagtttctaaataagaaaacaagggggaaaaagcaggatgatcaagatgtcaatgacactttccatagcctgtaaaaactccatgatggtttctttctaactagaaaagatttcgcaggaagaagcactcctttttgtaaactctcctctttctacagcattgaagcccaattttgtataaaaattaatttgtattgaatttctaagctcctagttgttcttaaaactgcktctcaaagaagcttagatcttttcctgagtgtttaaaaatagatttgaacagaagttttaataaaaagccagtgtggagaaaagccagtattatcacagagcccatttttgcaggtgaacgtgagagtatgtcagagtcaagaattaccaatggttctaaaatccaactacaagaatgct

SEQ ID NO: 643118 - DNA, 437 bp, Homo sapiens
taatgcattttccttctctcatgscttttaatgactatttctttcccctggctgcatgcacgcatgcacccccattcccagattcacgtgcccatgttccttagcatagactcctaaagctagcctctatttttaaatctcctcactcttcccttcgtctgagtggtatcatctggttttgcagatatttcacaaaaccttgacaggcattaagccatggaaaccacttaggaaagaaggaatatgatatatttacataccattatccaaaatgtgagatttctgtagcaaatattgcttatttatgataacaacaaaatggagccacctacttaacctttcaataaaattgtgattatacatagactttaccagtatttacttagaaaagaacattatacacaagtgagaaaatgtccctcctttctctcccaccc

SEQ ID NO: 643119 - DNA, 167 bp, Homo sapiens
ctcctaactagagaatcatatcctgaatcattaaaaccacactgtctagcaaactayaccttagatccccactatcaaaaatatacttgtattataccttttattcattttttttctaatagcacttgataagcccctgggaagcggttgatcctggaattttggtt

SEQ ID NO: 643120 - DNA, 508 bp, Homo sapiens
cagatcaagatagctggaaattattttcatcttcttagagaactatgaatgcatggctggggttggggaaagactagaaataggtcacaatatcctatattgtgaggggaaatggcattatcctggagaaatataagtgtccaacaaatattttagtgtgccagaaatctccctttatgcttaattatgatcaccatgctctgtcataaatgaagtactccagatatccaggagagattgccagggacaatggcttttcgctcgatcagaactccagcttcaattctgtattactaatactgtactaaaaatcttcaggtttttctagatttaaacaagtctgagtcatcctgttgaccaattaaggcctaggcattggaatgaattaaaattaatcattatattaatatgttagytgataaagatactctgattttctgtaaggattatgccttatatttggtacaggaaacagactgtgagatgaagacttgaatgaagaaagttg

SEQ ID NO: 643121 - DNA, 391 bp, Homo sapiens
aaccccccgtctctactaaaaatacaaaattacccgggcgtggtggtacatgcctgtaatcccagctactcgggaggctgaggcaggagaatcgcttgaacctgggaggcggaggttgtggtgagctgagatcgtgccactgcactccagcctgggcaacaagagcgaaactctgtcttaaataaataaataaataaacaaacaaacaaacaaacaaactatcacagcataaagtaggaatatttcgttactgtctagttaaactggttaatgcagaaaggaagtctggwaattccagttttaaagtaaaattttggacattgtaggattgattatttggcatagttgtgatgtttgttcctgcgttatggttttgttggcagggcagcct

SEQ ID NO: 643122 - DNA, 564 bp, Homo sapiens
agaaacccaaatcataataacctaagaaaattagtagagatcctaaatattcatatataaaartgaatcaattcacagaactgaaattagtggtgcagaagtagaagcataacagtaattgttaacacattcttttcattatgttgtttatctgtgacatataaatatgttttgagtcaatggtttccaacctcggggcacggatgcctggcctaaagtcatgggaggacagaatagattttttaaaaaaggatgcttaaatttgtgtatacaggacacattatctatggatgcaataaatattttatataaaaataacaaatttataaattatttgtatgtgttacataatttaattcttacgaccagcctatatattatcctcttgttataagtaaggtattttggacctagagtgaattaataacttgttcaatgtcagacaggtagttagtgacagaacagatttttcgctcagtcaacatgactcctaagctcttaaccaccatattacattgcttccagcatagatattattaggttagaccacatgatatggtcatt

SEQ ID NO: 643123 - DNA, 627 bp, Homo sapiens
gaacattggaaatagactatagtgtttcacttgctagtcttgagctttcttttttcggtgtaggacatgtctggaggttttttaactagcaaaatagaataacatggtagcttagtaagatttctgcataggagaaacttggtctgaatagagtagaaggaaagtgcagaaaaggaatgatgaagagctgaagaaaggcaggcttgagaaggggaaggaagaatggaaggcattgtgaaagaagagttgacaggacctgctgaaggatgggaggctttttacgcagattgggagaattgctatatctcagatagaagcagggataacaatccattttgaagataacagtttcacttttagctatggttagtaatatcgaacctaaaaatgatggcacagcagccaagtagaaaggtccagcctgctgttggagatgcacccyagggagaatgttcggaacttcatatataatgtagatgaaggtgtaggaggtgtcaacagagacactgagtcctctttaaaattgtgagtagcgggggcagatgctcggcaaaatccaccttgctccttgttcctgtggtttaggtctggactaagaaaaaaaaatagtcattagtttggggaagc

SEQ ID NO: 643124 - DNA, 578 bp, Homo sapiens
ggaaggaataaaaaggaataaccacatgcaaaagcataaaattgaacccttacctcacactatatacaaaaaaaccctcaagattgaaacaataaaactcttagaataaaatrtaggaaaaaaacatttctaaacattggactgggaaatgatttcttgcttataaaaccaaaagtataggtaacgaaacaaaaaatagacaagtgggactatatcaaactaaaaatcttttgcacagcaaaagacacaattaacaaaatggaagacatttgatggaatgagagaaaatatttgcagaccacatatctgataagtggttaaaatccaaaatgtatccctacaactcaatagcacatagaagccatttaaaaattaggcagaggacctaaataggaatttcttcaaagaaggcatataaatggccatcaggtatatgaaaacgggatcaactttactaatcataagggagatgcaaagcaaaaccacaataagacattattttacacctattaggtggggtattatcaaaaacacaaaggaaaatgaatgctagtgaagatgtggataaaaggagatca

SEQ ID NO: 643125 - DNA, 578 bp, Homo sapiens
ggaaggaataaaaaggaataaccacatgcaaaagcataaaattgaacccttacctcacactatatacaaaaaaaccctcaagattgaaacaataaaactcttagaataaaatataggaaaaaaacatttctaaacattggactgggaaatgatttcttscttataaaaccaaaagtataggtaacgaaacaaaaaatagacaagtgggactatatcaaactaaaaatcttttgcacagcaaaagacacaattaacaaaatggaagacatttgatggaatgagagaaaatatttgcagaccacatatctgataagtggttaaaatccaaaatgtatccctacaactcaatagcacatagaagccatttaaaaattaggcagaggacctaaataggaatttcttcaaagaaggcatataaatggccatcaggtatatgaaaacgggatcaactttactaatcataagggagatgcaaagcaaaaccacaataagacattattttacacctattaggtggggtattatcaaaaacacaaaggaaaatgaatgctagtgaagatgtggataaaaggagatca

SEQ ID NO: 643126 - DNA, 578 bp, Homo sapiens
ggaaggaataaaaaggaataaccacatgcaaaagcataaaattgaacccttacctcacactatatacaaaaaaaccctcaagattgaaacaataaaactcttagaataaaatataggaaaaaaacatttctaaacattggactgggaaatgatttcttgcttataaaaccaaaagtataggtaacgaaacaaaaaatagacaagtgggactatatcaaactaaaaatcttttgcacagcaaaagacacaattaacaaaatggaagacatttgatggaatgagagaaaatatttgcagaccacatatctgataagtggttaaaatccaaaatgtatccctacaactcaatagcacatagaagccatttaaaaattaggcagaggacctaaataggaatttcttcaaagaaggcatataaatggccatcaggtatatgaaaacgggatcaacwttactaatcataagggagatgcaaagcaaaaccacaataagacattattttacacctattaggtggggtattatcaaaaacacaaaggaaaatgaatgctagtgaagatgtggataaaaggagatca

SEQ ID NO: 643127 - DNA, 632 bp, Homo sapiens
tccaaccagattttgtgatagcagtctcagtggtgctgaaaattcagtgttctctagagattctaaacctcagtattttctgcctctggctgagtcgatgaggatctctatatgtggccctctgctttttatactttttcttatttaggcaataagttttaagttaactttctttaatgcactcctagtccttagcagaaatcatccaacgcagtacgcttttcattatcacttgccctgaacctcccacatgcstgggatattacacctgccagtgtatttcctttcaccacagatcccactcccgttcgctatcagtaaaagttttaacaattcaacactagtggctggggcctattactactccactcataatcattacctaccagctatttgggaattcagtttcaaaatctattttagtggctccatgggtcactattgtactaattgtcctaggtcaagctgtcagggaaatagactctgagatggagttttatatgtagttgtgtattggagaatgttatcaggaataacacatttgagacacacacacacacacacacacacacacacacacacacacagagcagaattgcacagagggagaggttaacctgcaaagcgatgcc

SEQ ID NO: 643128 - DNA, 548 bp, Homo sapiens
gtaggatccaactccaggctgccagcatagggtagtgacaccaaaacaaacgtctctttctcctttaaaacaaagctgctcttttcttttcagttgtcggtcaaygaattaccctgttcaactaaaagacagcagcaaaaccataacctcccttaaaacataaataaagaaggacccagactagactaaccttaagcaagtacaaggatcagaagaaggtttatctttaccttgcagggaagtcatttgcccctaacaaacaagacaaagttaaatgcaccactccccctccagactgcaaacaaatgcctattgtgtacaccagccatctagggataaaaaagtcattttaaaggtaccaaatgttttgatttctgtaataagtagtcctcatagcctcttttcagataaccatttgacctgtgttctgaaaggctgaggctaaccccaagtggttattctgtttgttatttagtgaaaagatggtttcttatcggcatatgtttcaaacaggtacctgtcctcttgggaaagtgttttctgtttgg

SEQ ID NO: 643129 - DNA, 558 bp, Homo sapiens
gccactgcactccagactgagtgacagagcgagaccctgtctcaaaaatatatatatatttatatattcatatatatgtatatattcatttatatatttatatattcttatatatgtgtatctatgaatatatatatatatatattacggtttggctgtgtccccacccaaatctcatcttgaattgtaactcccgcaattcccacatgttgcaagaggaacctggtggggaggtgattgaattatgggggcaggtgtttcctgcactgttctcgtgatagtgaatgagtctcactagatctgatggttttaaaaagacagaartgcacatattttctttctttgcctgccactatccacgtaagatgtgatgctcctccttgccttccaccatgattgtgaggcctccccagccacttggaaaagggagtccaattaaacctctttctttcataaattgcccagtctcaggtatgtctttatcagcagcatgaaaacagactaatacaatgtatattctcatttgattcttatattaatttttttcaagtgagacca

SEQ ID NO: 643130 - DNA, 448 bp, Homo sapiens
atttatatccacaatcctgtctcctaggctatagtaatatcctcctaattacactccttgtaattgctcttgcatgacttctagtccattttttatacatcaaggtaatcattttataaagggaacatgatcatgtgatcatgcttaaagcatattacaacccttaaggaaaaagaaaacccaaatctgtttattagcccctcctcatttcttggctaacagttactcacctttcaggtctcacatttcctctgggaaaccyttcctctctggcagttaaattcctaccaggcattcccaaagcaggctgctttctccattgaaggtggttcttgttaacactgatgattacttattcaatgtttgccttcctgaccagactgtaagctccaagaaggcaggggcttctttagtcttgtcactgctctgttttcagcccttccggcaa

SEQ ID NO: 643131 - DNA, 459 bp, Homo sapiens
tttataacataaaaaataggatcagtgtcatgttcatgattgttcagcaagcaattgacccagttgcttcaatcttgacatatctaattgaaattccaaatgttttctgctatatggttttaacttgagcaattgtaggatgattgacttaaaataagcatatgtgtgtgtacctctgaaggagaaaaaatctgagagaamtatatcagattctacaaaactcaactgttattctgtttctttaatatctaggtagaaagttgtatttggaggaagatttaattgcttcaactcagagtatattatttatttaaaaccaaaaagcctagtgcttctcttgtgcctattgtcagtcactggcccttccctatgactaatctatattgaggatatttgtagtttaatcctgagtcactctgtagcaaaactgccaggtatacctacaggatagtgaataga

SEQ ID NO: 643132 - DNA, 563 bp, Homo sapiens
gttgcccaggctggagtgcagtggtacaatcatagctcacttgtagcctttaacttccgggctcaagcaatccttctgtctcagcctcccaagtagctagactagaggcacatgccaccaaacctggctgtttttcatttttgtacggatagaatctcactatgttgtacaggattgaagtagtattttcattactcttattctctgtattgaaactgaggatcaaagaggttccatgacttggccaagttcacacaacccatactcctggagcttgaactccaggcccgtttctcatgactctatattaaatgttcttcccagcatcgcatgttgacattaaaatctggcatttgatatttgatcttatacatacgcacacagtaagcaaccgggttccctctaagattatctttgattctyttctgagtttattctcctgggctattaagaatatatttgatttggacaatatttaatttctcacccaaagataaattttttagttttagattgaaagccagcgatgttgaagtaaaggtattacagaatctaaaaccacc

SEQ ID NO: 643133 - DNA, 569 bp, Homo sapiens
cttttgtaagtttgataggggaaatkgttcttgaataaataaacaaggggcagtttagtaacaatagaatggggtgtagataaatataatgtgctgggaagactcaaagtatctctgaactctgtggaacaagcaagtgtagttgaagtagcagatctttaggaatgttagaaatcaggttatttaaaaccaggctgagaatgtaattaatgtgactgaagatttatcagcaataatgtagcatcatcttcagaacattctgtctcttgctgattaaaatacatacctggcaaattggtaagtgaggaaaaaaatggactagagcatggatctgcaaactataacccatgaccaaatccagcgtatgcctgggtttcataaataaagttttcttggaacccagccaaagttatttgcttacgaattgttttggctgcttttgtgctataatggcagagttgagtaattgctacagagatgatatgggccagaaagcctacaattttactttctggacctttaaagaaaagtatcccaagccctggactaaagagaaaaaaagccagtgt

SEQ ID NO: 643134 - DNA, 569 bp, Homo sapiens
cttttgtaagtttgataggggaaattgttcttgaataaataaacaaggggcagtttagtaacaatagaatggggtgtagataaatataatgtgctgggaagactcaaagtatctctgaactctgtggaacaagcaagtgtagttgaagtagcagatctttaggaatgttagaaatcaggttatttaaaaccaggctgagaatgtaattaatgtgactgaagatttatcagcaataatgtagcatcatcttcagaacattctgtctcttgctgattaaaatacatacctggcaaattggtaagtgaggaaaaaaatggactagagcatggatctgcaaactataacccatgaccaaatccagcstatgcctgggtttcataaataaagttttcttggaacccagccaaagttatttgcttacgaattgttttggctgcttttgtgctataatggcagagttgagtaattgctacagagatgatatgggccagaaagcctacaattttactttctggacctttaaagaaaagtatcccaagccctggactaaagagaaaaaaagccagtgt

SEQ ID NO: 643135 - DNA, 598 bp, Homo sapiens
ttaacattttaattgatgagaggaagtcaaatataaaactatcattctctattacatctttctaaattaagctacactactcttgtgtttaaattatattttccattaataaatttactttaagctagataggtagctttcaaaatgttgatatttacatcactcactaagtatattctgaaaattgcactttctctaaagtgcacactgctgtaagctttatgttaactgaaatatttaaataccacttcaaggacatgaagttgattctcataatagaacagtctttttgttcatttttacttacaactttagttgagcaagttgcttatagcatcctggttcattccctgagaatcccagtggcaagaagtaactcttgcttgacgtatctttattgtttctctgccactgttatggctactaaaaggtcagcgagagcttayggcaccaaaaggtcatttttgttattccaaagacagaagttttgacatatgatatattataagagaacagaggcactaattgatgtaccgtaatgctaatcatctacatcttttctttctttaaaagaaagaagagggaaatttttttgtgt

SEQ ID NO: 643136 - DNA, 586 bp, Homo sapiens
acacccagcagggaaaatgaattcaaagattgctatagtatattttcttcagtgtctggagttcaacaaaaaattgcaaagcgtctaaagcaggaaatcatcacccatactcagggaaaatagtcaatgaaacctgtcttgaaggggagcagatattagccttagcatgcaatgacttcaacacaactattacaaatatgcccaaataactgaagaaaccatgtttaaagagttatatgaaattatgataaaaatacctcaaagagaatattaataaggagtagttatagaaaagaaaggggaattttggaattgaaaagtatgataactgtaatsaacgagaaattcactggggaaacaacatcagattagaaatgtcagatgaaataatcagcaaccttgaagatctcccaattattctatcagaggactagaaaataagaagaacaagtaaaaataacagcctcagcaaccatgggaaaccatgacacttaccaatatataaggtaataggaatcatagaaggaaataaagggacaaaaaatattttaagaagtaatggctaaaaacttcccaatttgctgaa

SEQ ID NO: 643137 - DNA, 586 bp, Homo sapiens
acacccagcagggaaaatgaattcaaagattgctatagtatattttcttcagtgtctggagttcaacaaaaaattgcaaagcgtctaaagcaggaaatcatcacccatactcagggaaaatagtcaatgaaacctgtcttgaaggggagcagatattagccttagcatgcaatgacttcaacacaactattacaaatatgcccaaataactgaagaaaccatgtttaaagagttatatgaaattatgataaaaatacctcaaagagaatattaataaggagtagttatagaaaagaaaggggaattttggaattgaaaagtatgataactgtaatgaacgagaaattcactggggaaacaacatcagattagaaatgtcagatgaaataatcagcaaccttgaagatctcccaattattctatcagaggactagaaaataagaagaacaagtaaaaataacagcctcagcaaccatgggaaaccatgacacwtaccaatatataaggtaataggaatcatagaaggaaataaagggacaaaaaatattttaagaagtaatggctaaaaacttcccaatttgctgaa

SEQ ID NO: 643138 - DNA, 561 bp, Homo sapiens
tttcagccaaggaaatgcacacaccccatgaatcttaaagaaccaggcatatcctgctcagacagaggtttgagtttcttgcctattaagataacagttggcggtggggtgtggtggctcacacctgtaatcctagcactttgggaggccaaggtgcggtggatcacctgatgtcaggagttcgagaccagcctggccaacatggcaaaaccccatctctactaaaaatacaaaaattagccaggcatggtggtgcatgctcgtaatcccagctactcgggaggctgaggcaggagaatcgcttgaacccagggggtggaggttgcagtgagctgagatcacaccacttcacttcagcctgggcgacagagcgaaactccgtctgttaaaaaaawaataataataaaagataacagctctcatgaggatcaacaaccaactctaccaacgtatttttttcaaggagtttttagtcatttataataagtttttacaattgctcactcctcctttcgtcaccacacatacatgcacatacacacaatgggagtatttaaaatc

SEQ ID NO: 643139 - DNA, 579 bp, Homo sapiens
tatgtctgccaatgattacagtttttttctgactttattagcagcctgctctgtgagcaataaaaaatgaaataatgaataatactttcagtmtccaagcatctatgagagattgaaagaatttagatgtctcttctctttatcagaaagacagatttgtggaaaatgcctggctcacccgttgcaggcaaacataacactagttcttcctagtgtagtagccttctactgcattctacattacagtttcacaataataaaatagttatttgtctaaattaaagtaacattagactaacaaatttcaatttgatgtcctttgccgcatattgaacatacatattcacacatagctttatatctgcaaccctagatataaatatcccatattcagttctattgtgagatttttcaaaggttattcacatgctttctagtgccacattctttcaaattttaatcatgagctccctaaatagaagtcatttgcatctgtaaacattcccttgcagtagtatttagcagtgtattctctttgtgcagagctattttaaaaggaaaataaaccttaatatggaa

SEQ ID NO: 643140 - DNA, 547 bp, Homo sapiens
aatgttggcatattttcattatatgtatacatcattatattatctatttctttatctttatctttctggtctatatcaggatgacttctcagccttttggctaagatcaagtgcctatctrtatcaggagcattaggaaaaaaattgaaggaagcccaggccttttttgatctatgaaaagccccagttgacagtgaattttccatatttagtaaaaaacaattatgcattcttcaaggtcttagtcttattaaagatatgctcaactcacctttttaatattttctatttcagtctctgttatctgcattcagtttggtggaaacagttccagttttctccagaaatttgtttttaaaataggtatttaaattaaaatgctcatcctgatagcttcctctagaaactttatggaagccttgtctttggaaactgacattttctgttctaccctggatgggtgcatgccttcttcctctatactctctctccttgggtgatttcacatgttcttattcatttagtaaccaatccagtcccagcttgt

SEQ ID NO: 643141 - DNA, 503 bp, Homo sapiens
taattttagtaaatatgaaatttattctcctactttcttctggagcataattttaagttataattcaaaagagaaacatatgattggggatttgatatagttaacctacttttgttctaaaaatgtagcaaagcctgagcatggcagctcacacgtgtaatctcaatggccgtctaagacaggaggatcatttgagcccaggagttcaaggctgcagtgaactgtgattgtgccactgtacttcagcctgggcaacaaagtaagaccctgtcccccmaaaaaaaaaaatgcagtgaaactcagaaaggaaaaagtcttttaacaacaagagcgtaaataatgtataaaacaaaacatgtcattttatattcaaccacaaaaatttggcaagggaagtttattgatgtctatgatatcagtgtcagaactaaaggatgcattttgtagtaaagggtggcaaaataaaagggtctaacttttgtggtcaatgcaaatttgagcat

SEQ ID NO: 643142 - DNA, 428 bp, Homo sapiens
gtctgctacgaggggcagaaacctaaaatttaaatgccaaagagttgcagacatgttcacccatagagtttcatggaagctactagcaaacacataaagtggtgtggagaggaggagagtgaaaagtactatttaagacgtgactgaatttaaaaarcaagtacacaaagatccgatactcaaaactcctctgaccattatgtaagagacttttaattcagccagcagttgggttttagagttagagataaaaggaagacaactaaacttcccctaaacccttttaacccccttttgtgatggaactgtcaccccctggacatcaacagtgtcttgggagaagctgccttctgacttatgtctgaatttagtatggagcctccttaggaagccttcgtagaacgctgcatggcatgaaaattaaatgt

SEQ ID NO: 643143 - DNA, 526 bp, Homo sapiens
tgatgaacacttgaaatttttccagtttttaaccattacaaacaatgctgctatgaacattcttttgtaaatcacctggttcatatgtgcaagatatcctctggggtatatatttaaaagtaaaattattgagttattcaacattaccatgaratgctacactattttttttaacaatcctaccaatttacacttctaccacgaacagataagcattaccgttggtcttcatttgtaggaaccatatttgtcttttgctctgggggctttgttttgttttgctttgttttttgcttagaagtgctttggctattagggatctttttttggctccatgtgaactttaggatttttttttaattttgtgagaaataacgttggtaatttgatgggaattgcattaactctatagattgtatgggtgatatggtcactttagctattgatttttctaatccatgagcatgggatgtttttccatttgtttatgtcatctataatttctttcattagtattttgtagttc

SEQ ID NO: 643144 - DNA, 526 bp, Homo sapiens
tgatgaacacttgaaatttttccagtttttaaccattacaaacaatgctgctatgaacattcttttgtaaatcacctggttcatatgtgcaagatatcctctggggtatatatttaaaagtaaaattattgagttattcaacattaccatgagatgctacactattttttttaacaatcctaccaatttacacttctaccacgaacagataagcattaccrttggtcttcatttgtaggaaccatatttgtcttttgctctgggggctttgttttgttttgctttgttttttgcttagaagtgctttggctattagggatctttttttggctccatgtgaactttaggatttttttttaattttgtgagaaataacgttggtaatttgatgggaattgcattaactctatagattgtatgggtgatatggtcactttagctattgatttttctaatccatgagcatgggatgtttttccatttgtttatgtcatctataatttctttcattagtattttgtagttc

SEQ ID NO: 643145 - DNA, 597 bp, Homo sapiens
tgctgttgctgacaaaaaccatgctgatacatttcatattcagggatgtgtcagaacccattgtgtagcaccttggacagctctcccagtggcccttttgacaaatctaggtttaaatcagcctcctatgtatcttgccttctgtcctatccctcactgccccactgacctcctcaaatgctacactacaagagaactggctgaaaaattattcatgctcaacagatccttccaaaggctgaagttcattcaggaagtcaagattagagtgagccctgcagaatatagggtgagagaaactgggaaaatggcgtggggagataatggaaagaagggtagcttcaggagaggactcacttttttaaacttttattttaggttcggggtacatgtgcaggcttgttatayaggtaaacttgtgtcatagggggttgatgtacagatgatttcatcacgcaggtaccaagcccagtacccaatagttatttttttctgatcctgtccctcccctcactctccaccttctgataagccccagtgtgtgttgttcccctctgtgtccacgtgtatctcatcaacttagctcccacttataag

SEQ ID NO: 643146 - DNA, 588 bp, Homo sapiens
aatctaccttctgtctctacaatttgcttattctggatatttcacataatttgaataatataatatgtggctgagttctttcacttagcataatatttttgggtttatttatgttgtagcatatatcaacacttcaatcctttttattgccattattattttgttgtataggtataccacatgttatttctccattcatcagcttcttgacatttgtttttttctaatttttggctattgtaaataatactgctacaaatggttgtgcacagagttttgtatggacatatgttttcatttatcttgggtatattcctagggggaatttgctgagtcatacggcaactctatgtttatcttttgaggaactgccaaactgttttctgaagcagctacattattttgctttcctacctgcagtacactagagcttcaatttctttacatcctagccagctgtgctattttctatcttatatgatagctccagtaaaattttaataggaatggtaaaagtggacatagctacctgttyctcttcttagagagaaagtattcagtctttcaccatcaagtgttatattacct

SEQ ID NO: 643147 - DNA, 385 bp, Homo sapiens
tgatttagcttaggttcaaacacttctgtgcaccctcccaacacaagtgtggcaaacgatagtgtctgtgagatgactgtgcacacaccacacaygcatgcacacacacatgcacacacatgcaggcacgcccatcccagtttcccgcacatgctcactggtttgatagcacacactgagagtaaagtaaaagaaagcaaagtcaaagaagtgtgtttgtcagccctggcacaagctgtgacggggacaagggcactagcaagtagtttacaggaaagtgagtgggaagcaaaagacatagttgcctcaaaataaaagggggggtgtgggccaggtgcggtggctcacacctgtaatcccagcactctgggaggccaaggcaggt

SEQ ID NO: 643148 - DNA, 595 bp, Homo sapiens
agctatacattaagtatatctacataaaatacatatatataatgcatttctacacacacacacacacacacacacacacacacagttaaccctctctatattgtgtggactttgtatctgtgaattcaaccaactgtggattaaaaatatttgaaaaaaaattgcatctgtactgaagatgtacagactttttggttattatttcctatatagtataatatgacaactatttacacagcatttacattgtattaggtattgcaagtaatttatagatgatttaaagtatacaggatgatgtkcacaggttatctgcaaatactataccattttatatcagtaacttgagcatctgtgaatttttgcatccctgagaagtcctggaacaaatcttccatggaaaataaggaatgactgtatgtatgtatacacacatacatatgtatactgtatgtatgtatacacacatgcacacacacacacaaaaatgcatataatctatatatagatctatataaaatctgtgtataatctatctatataatatgtataatcttacataattgctatttaaatcagtgaagaagaataaaaa

SEQ ID NO: 643149 - DNA, 606 bp, Homo sapiens
acttacttcctttctacttccttcccccacaaacccttaggctgcagctctgttaagctgggttattkcagaggaaaatgcaaatgatcagagttgtatgagctggtaaaaggggaaagcctctgtggggatcccatggtgagtgggagaagacagatgtgttagcagctgttcagctagataatgagtcagctcccagtgcacatgggtaatcgacaaggcggctaatccattcacagacaatcaagaattgaccatatgccacagctggactatgtgtggaggcagctcataaggaaagaggaagaacaggaatttgactattatcttaaaaaaatactcatgatacagataataataatggcccattagcataagtaacatttgtgttttccaaagcattatcacaagctcctttttaatctgctttcttgtataacaggaaagatagttttctttccatttttttttcaagatggaaatacttagagaaggaagaagagaaaagactaacatttactactacgcatttagtgtttagactaaagatgtgcccagaactatagaaataattgtcatttcacgtagcaatacaattcttatgca

SEQ ID NO: 643150 - DNA, 606 bp, Homo sapiens
acttacttcctttctacttccttcccccacaaacccttaggctgcagctctgttaagctgggttattgcagaggaaaatgcaaatgatcagagttgtatgagctggtaaaaggggaaagcctctgtggggatcccatggtgagtgggagaagacagatgtgttagcagctgttcagctagataatgagtcagcycccagtgcacatgggtaatcgacaaggcggctaatccattcacagacaatcaagaattgaccatatgccacagctggactatgtgtggaggcagctcataaggaaagaggaagaacaggaatttgactattatcttaaaaaaatactcatgatacagataataataatggcccattagcataagtaacatttgtgttttccaaagcattatcacaagctcctttttaatctgctttcttgtataacaggaaagatagttttctttccatttttttttcaagatggaaatacttagagaaggaagaagagaaaagactaacatttactactacgcatttagtgtttagactaaagatgtgcccagaactatagaaataattgtcatttcacgtagcaatacaattcttatgca

SEQ ID NO: 643151 - DNA, 581 bp, Homo sapiens
tggagtctaccactgacagcagagttgaaatccgggggctttactttccatagaatttgtccctatgtcctcaaatgaattgctttaattaaaataacttagtgaccttttctttgctctcttggctacagaaattttccataaccctcagatttgcccttgggttgttaaaaatattgcactgaaaaagtgcyttttgttctcccagaaatatctttttttgcaaacacctcttctttttatgatgactgtctattttagaggaaatctttgattgatacatgttaactccacagacttaacatacttcaagcctgggcaaaagcaaagttctcctaggtttgaatcttttggatctcacaaaatgatggagacttggtgggtctcaaaacgagcaagatgaaataaataagcaattatatgatcacttatttacaagaagatttaggatgatttgcaatcattgcaatatagcaaaactgcattaaaatatcctattttaaatgaacagttcttttagtgtaagagatatcatggttactcaaaataataatgaggatggctagatttagcagggactt

SEQ ID NO: 643152 - DNA, 581 bp, Homo sapiens
tggagtctaccactgacagcagagttgaaatccgggggctttactttccatagaatttgtccctatgtcctcaaatgaattgctttaattaaaataacttagtgaccttttctttgctctcttggctacagaaattttccataaccctcagatttgcccttgggttgttaaaaatattgcactgaaaaagtgccttttgttctcccagaaatatctttttttgcaaacacctcttctttttatgatgactgtctattttagaggaaatctttgattgatacatgttaactccacagacttaacatacttcaagcctgggcaaaagcaaagttctcytaggtttgaatcttttggatctcacaaaatgatggagacttggtgggtctcaaaacgagcaagatgaaataaataagcaattatatgatcacttatttacaagaagatttaggatgatttgcaatcattgcaatatagcaaaactgcattaaaatatcctattttaaatgaacagttcttttagtgtaagagatatcatggttactcaaaataataatgaggatggctagatttagcagggactt

SEQ ID NO: 643153 - DNA, 494 bp, Homo sapiens
gctgaattcctcttggacccgtcttttcccaagcacaattgtaactgtaaagctttttgagatgcatttcataaaaatgagcataccaaccttgaaagtcattctggatctactcagaaatccaaggttcacagtatcataattaaacacgtacattttcacgtacaactctaaggacttttactcaggcacttggcagacatatccttgtaatgtgttatgttccatcagggctttcaaagaaactgattttggtcaaatttcactttaccctgtttataagggagtcagcattctttactgaaaaatatttcacttgtatagctcccaaggtagctcctggttggcccctagattccctctatacccttycccacatggctctctgctctaggagctgctctgtgaggacagcctgatgaagactctccttaaaccaaactttagtcagactccactgagccctcttctcaactaaggcttgaaattggccc

SEQ ID NO: 643154 - DNA, 494 bp, Homo sapiens
gctgaattcctcttggacccgtcttttcccaagcacaattgtaactgtaaagctttttgagatgcatttcataaaaatgagcataccaaccttgaaagtcattctggatctactcagaaatccaaggttcacagtatcataattaaacacgtacattttcacgtacaactctaaggacttttactcaggcacttggcagacatatccttgtaatgtgttatgttccatcagggctttcaaagaaactgattttggtcaaatttcactttaccctgtttataagggagtcagcattctttactgaaaaatatttcacttgtatagctcccaaggtagctcctggttggcccctagattccctctataccctttcccacatggctctctgctctaggagctgctctgtgaggacagcytgatgaagactctccttaaaccaaactttagtcagactccactgagccctcttctcaactaaggcttgaaattggccc

SEQ ID NO: 643155 - DNA, 594 bp, Homo sapiens
aagagatgggagatttttgggaaatagatacaaggccagaaaggtcacagttaaaggttcaaagcctcttggctgctggtggtattcagggtgcctgaaattayactcccttgccaaggatgctgcaaggcaacagggtgcatatctgaacctccctccaattttcccccaacacttgattccaatattctgaagggcaagctgggcctagtccaggtgagccaggactctgtattatactcacctttctttccactacaacagctggctgattgctctgtgttgaaggggtttatgatgaccctgttaattgatgcacaaaacaatccttcaaaaggtaaactgatcccactgctccctgaggcagcaggaaaccttagtctttgcagcctgccttctgttgcttgttccatacctgagataatagtgcttccccagtaaacaccagcggggaaacagttaagcattgtgtggtgtatttcactccaggagggcagttcagtgtgtgattgaacattccatcatcatttgccatcttcaaattgcccataagaaaccccaacatctagatgcagtgttagaacaaagagggct

SEQ ID NO: 643156 - DNA, 555 bp, Homo sapiens
agaaaggtcacagttaaaggttcaaagcctcttggctgctggtggtattcagggtgcctgaaattacactcccttgccaaggakgctgcaaggcaacagggtgcatatctgaacctccctccaattttcccccaacacttgattccaatattctgaagggcaagctgggcctagtccaggtgagccaggactctgtattatactcacctttctttccactacaacagctggctgattgctctgtgttgaaggggtttatgatgaccctgttaattgatgcacaaaacaatccttcaaaaggtaaactgatcccactgctccctgaggcagcaggaaaccttagtctttgcagcctgccttctgttgcttgttccatacctgagataatagtgcttccccagtaaacaccagcggggaaacagttaagcattgtgtggtgtatttcactccaggagggcagttcagtgtgtgattgaacattccatcatcatttgccatcttcaaattgcccataagaaaccccaacatctagatgcagtgttagaacaaagaggg

SEQ ID NO: 643157 - DNA, 494 bp, Homo sapiens
ggggtgcttgtcaagcttacagctttccaggattctctggagattctgacacccatgcatctggtttgaagcccaggaatttgtgtttttaaycagtacaaggcttgatcttgcctacaatagtgagataaaaataatcatcttctaccaatgtgaaaaggaatccccttcactgttctctttcttcccgtatctaactctgggaaaatgtctcactcaaaacaggtgcatttttggtagtttgtttaccagtgttcaccactgagtaataaggtatttagtctttagacctgtgcctttttatgcagcgatggctttgttcattgtccttaggggctctcctctgtatttttctcccatgtaaaatgtacattttagaatgtagccctactgcattccctggagttgatatggtattgacattccctgtctgtagatccactagtgtggaggttaggaaagcaatgtgacatggagtaactactgtcacttat

SEQ ID NO: 643158 - DNA, 598 bp, Homo sapiens
agtttcgctcttgttgcccaggctggagtgcaatggtgtgatctcagctcactgcaacctctgcctcccaggttcaagtgattctsctgcctcagcctcccaagtagctaggattacaggcacacatcaccacacccagctaatttttgtacttttagtacagatggggtttcaccatgttggccaggctggtcttgaactcctgacctcagcggatccacccgccctggcctcccaaagtgctaggattacaggcgtgagccaatgtgcctggcccactaattgtttttatatagtttctgcctttcagcgtttatgccatggtctctatttcagttggaataataatttcattaatagctcactaattattttcttacacattcctacaatatataatacaactaagttttgttcattacattcatttttattttatctataaaagataaggataatcaagaaaggaaaacagtactaacataatatgtattaaactcctattgtcctctaggtaccatatatagtacttttatatagtgactcaagattccattaaaattgttagttttacttttttgctaatgaagagagaaag

SEQ ID NO: 643159 - DNA, 598 bp, Homo sapiens
agtttcgctcttgttgcccaggctggagtgcaatggtgtgatctcagctcactgcaacctctgcctcccaggttcaagtgattctcctgcctcagcctcccaagtagctaggattacaggcacacatcaccacacccagctaatttttgtacttttagtacagatggggtttcaccatgttggccaggctggtcttgaactcctgacctcagcggatccacccgccctggcctcccaaagtgctaggattacaggcgtgagccaatgtgcctggcccactaattgtttttatatagtttctgcctttcagcgtttatgccatggtctctatttcagttggaataataatttcattaatagctcactaattattttcttacacattcctacaatatataatacaactaagttttgttcattacattcatttttattttatctataaaagataaggataatcaagaaaggaaaacagtactaacatartatgtattaaactcctattgtcctctaggtaccatatatagtacttttatatagtgactcaagattccattaaaattgttagttttacttttttgctaatgaagagagaaag

SEQ ID NO: 643160 - DNA, 601 bp, Homo sapiens
caaggttgtaatatgcaaacttattattgaatcaaggtgaaagtaccttctgataaaggtgaaagaacttctacaaaataatttcatttatataagtttcaaagaaccaaactaaataatgcatcacttgagaaccattaaagtctattaaaaaacacatacaatgcaatggaaggacagtggtcatatccagcaggaaataaaggagaacacaattggcaaggagcacccaatgggygtctaaggcactagtaaagttctattttgtttccaatcctccaagacatctagttttttttatttttctgagacatggtggcccaggctggagtacgatagtgtgatcttggctcactgcaacctgtgtcctgggcttaagtgatcctcccacctcggcctcccaaagtactgggattacaggtgtgagccaccatggccggcaaatgttctatttcatatcctgtatggtggacacatagatgttctcttttttattattccttgaacactaagtatatgtttatttatattctctgtggaatacctccttatttctcagtcaattcaggatacctccttacccccatcccctttttacttt

SEQ ID NO: 643161 - DNA, 412 bp, Homo sapiens
gtgagtgtaaagaaactactgagttttgtacattgattttgaattctgaaattttattgaattcatttatcatttctaatagctttttggtggagtttttagggtttcctatatataatatgtcatcaaacagagaccattttacttcttccttttcaatttgaatcttttatttctttatttggcttaattgctctggctaggacttccagaaataagttgaatagaagtagtgagaataaatatccttgtcttgtttttgatcttagcagaaaagatttcactttttcattgttgggtatgatgtgagctgtgagcttgttatatatgtcctgttttgtgttaaggtacatgccttctaygcccaatttgttgagaggtttagtcatgagaggattttgaatttagtcaa

SEQ ID NO: 643162 - DNA, 553 bp, Homo sapiens
cttgcaacagacttctgcctggacatccaggcatttccaaacatcctctgaaatctaggcagaggctctcaaagctcaactcttgtcttctgtgcacccatatgcacaacaccatgtgaaagctgcaaacacttggggattgcaccctctgaagcaatggcctgtgctgtactttgtccccttttagctacarctggaagtggagtggctgggatgcagggcactatgtctcaaagctgcacagagcagcagggtcctgggcctggcccacaaaatcatttattcttcctttagacctttaggcatgtgaggggaggagctgtcatgaaggtcactggcatgcgctgaggacattttcctcattgtcttggctattcacatttagctcatctttacttatacaaattcctgcagcctgcttgaattcctccccagaaaatgggtttttcttttctgccacatgatcaggctgcaaattttccaaacctttatgctctgtttcccttttaaacaaaaggtccaatttcaaaccatctctttgtgaatgcatata

SEQ ID NO: 643163 - DNA, 574 bp, Homo sapiens
aaaagccttgaagcagctacacaaaaataaaatattttataaagggaaagaataatttgaataattcatcagaaaccatggaggtcaaaagactgtgaaactacattttcaagtgttgaaagtaaaaaaaaaaaagccatygctttttatccagtgcaagtctccttcaagaataaacgtgaaataaagacatttttagataaaactaagagaatttttttgtcagcagacttgcattctaagaaatgttaaaggaagtttctcatactcaaaggaaatcatatcagatgaaactcatatctataggaaataatgaagagcatcagaaaaagtaaatacctgactcaataaatagaccttttttcttctagttaaaaaaagtatatatgaccacttaaaacaaaaattatagtactttcttgtgggctttgtaaatgtatagatataatgcatatgtgaactagagcataaaagatggggctaaatgcattcatatgattagaaattttctatattttacatgaagtaaaatattttatatattcatgaaatattcatgaactatacataaaat

SEQ ID NO: 643164 - DNA, 578 bp, Homo sapiens
ggcctatcaaatgttcctactcaggactttggctctggagcaaaaagtccagtgagacaaaaaggcagcgagaacctatgtgaatgtgtgtgcaggccacgtgatgccccttggctgtggcagcatccaatagtgactgaccagcaagagggacagtgtcccagccagcctgatcccactgtctggaccycagagctcctgggggccctcctgcctattttccaagcctgctgtcctggcattgctttgattctatgcactctgggacgctgccaacaaatcccccttttacttacgacagacagaggttttctttcgcctgcaacaaaggatcccactctccacggacatatcttgcttccctctgctaagggcaatcattccacctgtccagcctggctatgaactctacacctggcataagacccccagccagcatctctgccaggtttacccttgcaagggatgacaggaagcctgagccacttttcagcagtgtggcacccattgactgtgagaggtgctgaatgcaagcttcaggtattagcaagggcactgtcccattgactgtgagaggt

SEQ ID NO: 643165 - DNA, 480 bp, Homo sapiens
tattttcttttccttctgggactctcaaaatgtgtgttagttcacttgatgatgtttcataggatccttaacttctgttaacctttttmatctttgttctttcttttctttagattcaatttttattgtcctgttttcaagttctctgattctttcttctgtctgctcaattatgcctttgaatctgttatggtttgaacatggtttatttttcctcttcaaatctagcattgaaatttgatccccatgttggatgtcgggcctaattgcaggtgtttgagttgtgggtgtaaattactcatcaatggctttgtgccattctcgtgtgcataagttctcactcttggttcccaaaagaactggctgtcttcaagaggctgattcctcctctttcctctcttgccttctctctcaccatgcaatctgcccacactcattccctttccccttctgccatgagtggaagcagcctgagattcc

SEQ ID NO: 643166 - DNA, 579 bp, Homo sapiens
gtgccttacaattgctgtgctgtccctcccccagcacatagtaacactgaccacaccacattgctgctactaccaggagttaaggagaggtggtgtcagagatttaagactattttttttctacctcttcagtgcctcactcagtgacacaaagttaaaatcaggtaccatgagcactcatctgattttggttcttatgaaggtttttttttttttgtttcttgtatataggtagttgttaaattgatgtccttgtgggaaggacgatcagtggagccttctatttcaccatcttgctccatctctgcctctcttagcactttgaatatatcattccagtctctcctggcctgtaaggtttctgctgagaaatcaactgttagtgtaataggaatttcctttatatgtgatgtgatgcttttctcttgctgttttttgaaatctcgttttgtctttgacgtttgacagtttgacaataatatgtcttrgagaaaccctttttgggttgtatctatttggtgatctttaagcttcctatatctagatgtctatatgtcttgcaagacttgggaaattttc

SEQ ID NO: 643167 - DNA, 435 bp, Homo sapiens
tgtctccaaggtcagagccatctgagccctcagtgtcatggagggaaactacacactacagaaaaaaaccaaatactaagaataatataataatcacacttatactcaccactcagaagttattagcattttggaattgttagcattttgtcatatttgcttctttgctaattttttaaaatagtgaaataaaatatttctgatggccgggcatggtggttcatgcctgttatcccagcattttgggaggccgaggtgggtggattgctygagcacatgagttccagatcagcttggccaacatggcaaaaccccgtctctaataaaatacaaaaaaattagccggccgtggtagcacacacgctgtaatcacagcgtactcaggaggctgacgcatgagaatggttcgaacctgggaggtggaggttgcaccag

SEQ ID NO: 643168 - DNA, 555 bp, Homo sapiens
atctcaaaaaaaaaaaaaaaaaagaaaaagagtcatgtggaaggtaaccttctggggttggctttttttcactcagcgtaattcgcttgagagtcatctagattgctatgtgtatctgatgatataggagtgaagaagaaattactaaggcagatagtgagggtatgggagtcctcagtaaggtttcctttttaatgaaaagcagctcccaaatcattttgttttctaataaagagcagcctgtagaatcgagctgcagacatagataagcaaactagaagcttgcacaggtgaatgccggcagctgtgccaataaaaaaaagctacctgggactaggcatattcaacatggcggctccatcttcccttctctttgccaaaccacgcatacagtaaggaagagacagcatggcgccagccaggcaaagaccccatctccataataagattacggtggggtgcccagcttcctcttgtgctaaacgtcacacctggtccaccctatccgtgggcgctaygtaaatcagacactgcctcctcaatcctgtctataaa

SEQ ID NO: 643169 - DNA, 347 bp, Homo sapiens
gaaaacccatgctgatactggcacaactgccaacaatgagaactacttgcaccaattttagacggtgatggtcatagasaaatgagactggggacttcagtgagccctgatctacacagattaaaaaaaaatacagcttaaattcaaggttgaattttaaaaagtcattgttctctctctgtccactttccaattccatttctcactcctagttttattttattattttgagatggagtctcactctgtcacccaggctggagtgcaatggcacgatcttggctgactgcaacctctgcctcccgggttcaagcaattatcccgcctcagcctcccaagtagctggg

SEQ ID NO: 643170 - DNA, 347 bp, Homo sapiens
gaaaacccatgctgatactggcacaactgccaacaatgagaactacttgcaccaattttagacggtgatggtcatagacaaatgagactggggacttcagtgagccctgatctacacagattaaaaaaaaayacagcttaaattcaaggttgaattttaaaaagtcattgttctctctctgtccactttccaattccatttctcactcctagttttattttattattttgagatggagtctcactctgtcacccaggctggagtgcaatggcacgatcttggctgactgcaacctctgcctcccgggttcaagcaattatcccgcctcagcctcccaagtagctggg

SEQ ID NO: 643171 - DNA, 594 bp, Homo sapiens
tttataacattgtgttgattgtagttttttctatctttaagcaatattgtaatgagtatacatgttgctacacacatacacacacaaccacacacgcacatatcaggctaaatttctacaagtgaaattttcaaagcttgtgatgggtgytaacaaattgcatttcggaaagattttttcatgtaattgataatatatgagagtttatttcctcataagtctgtcaaacactatgaactttttctaattattgtaacaattttataaattgttacaatatataacatgctataaatatatgtgatgcaaatttttttacagttttctgtttattttcatataatattttagttgttgtaaaacctgcatttcagtagtttaatctgtcagtaattcacgcaataaattagagctctaatggtggcttagaagggccttctcccctgtattacttaaatattcaatgactttattcctcctaatacttaaatccatctggaattcattagactatactttaaatttgtatgtatcaaccctaatttttttaagaacatcatgtttgataaaacacattttaacacttacttaaca

SEQ ID NO: 643172 - DNA, 594 bp, Homo sapiens
tttataacattgtgttgattgtagttttttctatctttaagcaatattgtaatgagtatacatgttgctacacacatacacacacaaccacacacgcacatatcaggctaaatttctacaagtgaaattttcaaagcttgtgatgggtgttaacaaattgcatttcggaaagattttttcatgtaattgataatatatgagagtttatttcctcataagtctgtcaaacactatgaactttttctaattattgtaacaattttataaattgttacaatatataacatgctataaatatatgtgatgcaaatttttttacagttttctgtttattttcatataatattttagttgttgtaaaacctgcatttcagtagtttaatctgtcagtaattcacgcaataaattagagctctaatggtggcttagaarggccttctcccctgtattacttaaatattcaatgactttattcctcctaatacttaaatccatctggaattcattagactatactttaaatttgtatgtatcaaccctaatttttttaagaacatcatgtttgataaaacacattttaacacttacttaaca

SEQ ID NO: 643173 - DNA, 553 bp, Homo sapiens
gtggattttaatattgcgatgttggtgactattctcatgtggttctgaagtcaaacgaccacactgtttagaatggcatcatgaaccggctgagtggttgtgagcttttcygcactccatcccactggtttgtcctcaaatgagaaggggatactttctctccatatcggccccagggtgtgctggacactcagcagttcaattcaatgctcaaatgttccactatccacagttccactattgtccccagtgcaataatccgaatgggaaccggactctagggctggccacaggaggaggctttcatttgggaataaacctagttgcaccccatctcagcccgcttctctgctcactactcaataccacatgtgccctgcctgggaagattcggagatgcaatgtagtgaaaagtcaggaaaggtttcaggaaaatcaagggtttactttccaggtgtcttcatcccaccaaccaacaacacagtaatgaaggtgacggagacccaccttcacaatggaggtgcagaagcaactcccaggaggccacagccac

SEQ ID NO: 643174 - DNA, 553 bp, Homo sapiens
gtggattttaatattgcgatgttggtgactattctcatgtggttctgaagtcaaacgaccacactgtttagaatggcatcatgaaccggctgagtggttgtgagcttttctgcactccatcccactggtttgtcctcaaatgagaaggrgatactttctctccatatcggccccagggtgtgctggacactcagcagttcaattcaatgctcaaatgttccactatccacagttccactattgtccccagtgcaataatccgaatgggaaccggactctagggctggccacaggaggaggctttcatttgggaataaacctagttgcaccccatctcagcccgcttctctgctcactactcaataccacatgtgccctgcctgggaagattcggagatgcaatgtagtgaaaagtcaggaaaggtttcaggaaaatcaagggtttactttccaggtgtcttcatcccaccaaccaacaacacagtaatgaaggtgacggagacccaccttcacaatggaggtgcagaagcaactcccaggaggccacagccac

SEQ ID NO: 643175 - DNA, 553 bp, Homo sapiens
gtggattttaatattgcgatgttggtgactattctcatgtggttctgaagtcaaacgaccacactgtttagaatggcatcatgaaccggctgagtggttgtgagcttttctgcactccatcccactggtttgtcctcaaatgagaaggggatactttctctccatatcrgccccagggtgtgctggacactcagcagttcaattcaatgctcaaatgttccactatccacagttccactattgtccccagtgcaataatccgaatgggaaccggactctagggctggccacaggaggaggctttcatttgggaataaacctagttgcaccccatctcagcccgcttctctgctcactactcaataccacatgtgccctgcctgggaagattcggagatgcaatgtagtgaaaagtcaggaaaggtttcaggaaaatcaagggtttactttccaggtgtcttcatcccaccaaccaacaacacagtaatgaaggtgacggagacccaccttcacaatggaggtgcagaagcaactcccaggaggccacagccac

SEQ ID NO: 643176 - DNA, 572 bp, Homo sapiens
tgactgtgatggtaaggaaagcacgtggactgtggatgcttttgaaacctactggcagtttatttaggctgagatggtcaatccctcctccattctatttcattcgcaaaggtacagaatgcaaatccacctgcagctcaacagaactrccactcagctcagagccaacaccatcagcatgtcttgggatggtcaagaggagacaagaaaaattacatagagtaatgacacagaattaaggctgttcctgtcaccatctctggccaggaccacatgtactagcggaaataccccagcaagtgcccgtgttcccgaccaaaatgccgagaaagagaaatctccccacaggtagaaaagatgtagcatttacaatgaaatacttgagaccatacatttctgtgtgcacctggtgcttgactggttacctgacttttcaaaaaatttaggataatgaaaaaagaatacaattttcattgagaagcatttatggaacatcttctcacgcctactaccgtgctaacaacctcatcgcaggaaaataaagatatgaaaagaactcgtctaatcgctgg

SEQ ID NO: 643177 - DNA, 560 bp, Homo sapiens
atcagtttacagatattttgaataatgagataaagagtggatttcatcctgtagatcattgctttccagaattttaagtaaataagaatcatctaaaaatgtatcaaaatgccatttcttagrccttacctctaaatattctattttaattcgttgggggcaggcccatgaatctgcattttaactactctaatgtcctcatgccctatgattctgatgcaagtggttcattattaacatttttagaatctctgtttgccagggcaaatgaaaagtttttgcataggaaactagcttttttatattaatacactcataagaactagcaccattaaagcatggtttaagaggcaaagagttaaagagcaggaggacaatcaggcagacagtacaataatctagaagtaaaaagaaccagcaccaattttggttgatagcaatagaattgaaaaggggcagataagtaagtagtagaggtttaaggaatataggactaacaggatccaggcatccattggctatccaagagcaagggatagtgttccaatcccagtagataa

SEQ ID NO: 643178 - DNA, 560 bp, Homo sapiens
atcagtttacagatattttgaataatgagataaagagtggatttcatcctgtagatcattgctttccagaattttaagtaaataagaatcatctaaaaatgtatcaaaatgccatttcttaggccttacctctaaatattctattttaattcgttgggggcaggcccatgaatctgcattttaactactctaatgtcctcatgccctatgattctgatgcaagtggttcattattaacatttttagaatctctgtttgccagggcaaatgaaaagtttttgcataggaaactagcttttttatattaatacactcataagaactagcaccattaaagcatggtttaagaggcaaagagttaaagagcaggaggacaatcaggcagacagtacaataatctagaagtaaaaagaaycagcaccaattttggttgatagcaatagaattgaaaaggggcagataagtaagtagtagaggtttaaggaatataggactaacaggatccaggcatccattggctatccaagagcaagggatagtgttccaatcccagtagataa

SEQ ID NO: 643179 - DNA, 480 bp, Homo sapiens
aacatggcctttcatagatatccatagaatgtcagttctacctcccaccaacagatggcagtagtaattactagcaacactttgatttagaaacaaattgacttaagattgacatttcagggttacattgtctgattcccaaccttggctgcacatcagaatcaaataagacctcttgttaaaaactgatgcctgcctccccggggtgctcttttgcccttctgcttctgccatggggtgatgttgcatgaagactctcacaagatgctggcaccttgatattgaactttccagcctctaatactgtgagaaataaatttcttttctttataaattacccagtctgkggtattctattatacaaacacaaaatagactaagactatgggtttaaaatgatttttatagttctatactgattgaaggtttatgttaattttaaaaattctgattatttttataataataaaaagaaaatca

SEQ ID NO: 643180 - DNA, 429 bp, Homo sapiens
tagttgtctctctctggaagctcttcccattagataactgcttggcttccttcctcatttcattcagctaaaactacactcaaatatcaccttgccagagaggcattcccttaccaccctatctaagtccacttcccttcttctttcttcccttgacctgctttacgttgttcacgtggcatcagattacccatttgttcattgcctgtccagccccacttggtctcaagtggcacatttgtttccttcactgacacgccctcaataactaggaaagtatctggcatatagcacgtacatgataaatatttattgagtgaytggattcgctatttaaagtgacactggcattaaaccactgattttgcggagagctttgaattttttttatatttaattctgtttgtccttaagtaaatttttatagtc

SEQ ID NO: 643181 - DNA, 551 bp, Homo sapiens
tttttaaaaaatttgttttgtagagacagggtcttgctatgttgcccaggctgaaattgcttcattattagcactaattggaaaacagttttatatgtgcagccacacagcttgttaacactattcttcatccaattcttcactcttctttgagtgaacttcaagaaaaatttcaytcaaaggagagttttaacctgaagaccagaaataaatatccaagatcattgtttttagtgatccagggcaggcatagaacaaagacactaaatctccattggctgcagtttttttttttttttttagagatctgtcgctcaagctggagtgcagtggtgccatctcagctcactgcaacctcttcctcccagatttaagcaattctcctgcctcagcctcccgagtagctgggattacaggcacacaccaccacgcaggctaatttttgtattttaatagagacagggtttcactatgttggccagactggtctcaaactcctgacctcaggtggtttgcctgcctcagcctcctaaagtattaggattacaggc

SEQ ID NO: 643182 - DNA, 572 bp, Homo sapiens
gtttagacgtggacctttgaattctgacagatctgactattttgctgcatggggagccagggtcttctcctttgggaaacactactgggagctggatgtggacaactcttgtgactgggctctgggagtctgtaacaactcctggataaggaagaatagcacaatggttaactctgaggacatatttcttcttttgtgtctgaaggtggataatcatttcaatctcttgaccacctccccagwgtttcctcactacatagagaaacctctgggccgggttggtgtgtttcttgattttgaaagtggaagtgtgagttttttgaatgtcaccaagagttccctcatatggagttacccagctggctccttaacttttcctgtcaggcctttcttttacactggccacagatgatcaggattaagaaaacttactgtttgggaactccatatacaagggagcccttcactgttgatacaaagaaatcatactgttcaggcttttttgtactttagtgtcacttcattttattgctattaaataaaaaatttgtaaaaggcaaaactttttgtac

SEQ ID NO: 643183 - DNA, 608 bp, Homo sapiens
gactggaaaggataaaatggagtttattttgtcactccctctggtaggcagggaggttgcttgagtggtccctgatggtattacaagccgtgatgcaggaaaaccccttgtgactatcaatgcttctctggcatatgtgtcagtgtttctcccaggtggattttgaactctttttttttttttcctgatcaaaaccaacacacacacacacacacacacacacatcacaaatgattttccccgtctcatcccccatttaaatctactaagctgaggcattccgcagttttctttgccacatgagaaataaatggcttttttttttttctaagtcatccaagtccaaaggggctaagctaaagaaagaattttctggtggcccttcttgtgagccagaatagaagtgtttggcacaggtggtgtggtggagttcagctygatagaaccattgcttggtgtgagctgtagatggtatggtggggagactgcagcctttggggacagagagatgcgggtttgaatctcatctctgctccctgcttcttgtgtgacctcactcaggtgttctagcctctcctagcctcagtttctcactttgtaaatgatat

SEQ ID NO: 643184 - DNA, 608 bp, Homo sapiens
gactggaaaggataaaatggagtttattttgtcactccctctggtaggcagggaggttgcttgagtggtccctgatggtattacaagccgtgatgcaggaaaaccccttgtgactatcaatgcttctctggcatatgtgtcagtgtttctcccaggtggattttgaactctttttttttttttcctgatcaaaaccaacacacacacacacacacacacacacatcacaaatgattttccccgtctcatcccccatttaaatctactaagctgaggcattccgcagttttctttgccacatgagaaataaatggcttttttttttttctaagtcatccaagtccaaaggggctaagctaaagaaagaattttctggtggcccttcttgtgagccagaatagaagtgtttggcacaggtggtgtggtggagttcagctcgatagaaccattgcttggtgtgagctrtagatggtatggtggggagactgcagcctttggggacagagagatgcgggtttgaatctcatctctgctccctgcttcttgtgtgacctcactcaggtgttctagcctctcctagcctcagtttctcactttgtaaatgatat

SEQ ID NO: 643185 - DNA, 587 bp, Homo sapiens
tctcactttgtaaatgatatgtttcctaaagcatctgatagttagcaagtacgcagtaggtggcagccatgattgggtatgtggcagatatcgctccagaaggtgattcccaggaggaatctgcctcttgtctttggactggcattaatttaatcagtcttcccagagaagactgcctctctaggtgagagcttgagaagacagatacagaagggatggggtaggctaaagtttacatctgtggtctgyagaatcaatcaggatgaagttcacctttgcaatttaaaaattttcataagtagtgacaagttgcttaacctttccaagcctcatttttaaaaatctgtaaatatgggctcagggtacgacttgtctcataggcttggtgcagagatgtcaaaaaatcatacacatcatatgttatctcagggttgactcagaaagtagtagctgttttgctctaaaagacactaattttaatctacaaagtggcctgttgaacctcacagcctcagtggtcaacacaagcctttgtgaatccagtgcccagtgcctagccctttaggaaaaaataactcgctaacaac

SEQ ID NO: 643186 - DNA, 617 bp, Homo sapiens
gttgtatttggtggttctgtacaaaatagaactagcatttctgttactactctggggtgtgtgtgtgtgtgtatgcatacgcctgtatatgtggttacataggcagttgaggcaaatgcctgaacccagaatctggccacattgtatatgaatagaccycaataagacataaaatttgcattaaacttgaaaatgtttgtggtcatattaaaaagcagggtggcatttacaaatttaaggttatgcacaaactacatcaacttttaaaatgaatttgtctggataaaactttattctctttaagaagtgtgttcacatatcatttatttaagttgaatcctcactttgtgtaaaatattgggggaccctagaatatgatatttcccctgcattcttttctggtccccttggtgatagagtggtctctgatgctcagggcgtgggtgaaggtctctgtactttataggtacaaagacaaatgctggcctcttccctgcagatgggttttgaaaatgacttcatagttctttgcaaagatcattgcacagttggatagtaaatgatgtggttttttttatttttttggtcattcgcaagtacaatctaccccttctccc

SEQ ID NO: 643187 - DNA, 593 bp, Homo sapiens
tttttcacataaagtgatgcgtgatggtttaatcactatgaaaacagtggttcataggctcatgaaggagggttgacttgggctgcctcctaaaggatgataatttggataggtagaaaaaagaggaccaggtgtggtggctcatgtctgtaattctagcactttggcaggctgaggcaggcaaatcacttgaggtcaggagtttaagaccagcctggccaacatggtgaaacactctctctactgaaaatacaaaaattagccaagtgtggtggtgcatgactgtaatcccaggtacttgggaggctgaggtagaagaatcacttgaacctgggaggcaaaggttgcagtgagctgagattgcaccactgcactccagcatgggcaacatagtgagattctgtctcmaaaaaaaaaaaaaaaaaaagtagaaaaaagaagaggagaaactatttcaagcaacaaggagacattgagcaaaatcagatggtattgtgttggttgaatatcccttatcagaaatatctggggccagcagtgttttggatttcagattttttcaaattttggaatatatgcaaatacctaatgag

SEQ ID NO: 643188 - DNA, 615 bp, Homo sapiens
gactcttggacttacaccagtggtttgccaggggctcttgggcctttggccacagactgaaggctacactgttggcttcactgttggcttccctgcttttgaggttttgtgactcagactggctttcttgttcctcagcttgcagatggcctattgtgggacttaacctcatgatcctgtgagtcaatactccttaataaactctgtttcatatttacatctatcctattagtcctttctctctagagaacgctgactaatatacaaggtctctgcaggtcttttttttaaggcttaaattatttttattgatcaaaacatttttaaaattaattaatttttaacttttaggcttaggggtacatgtacaagtttgttatataggtaaactcatatcatgggactttgttgtacagattatttcatcacccaggtactaagctctcagtgcccagtagttattttttcttctcctctcctcctcccgccctccactgcyccagtgtctgttgttcccctcttggtatccatgagttctcatcttttagctcccacttataagggatagcatgtgatatttggttttctgctccttctgcagggtttttttttttc

SEQ ID NO: 643189 - DNA, 537 bp, Homo sapiens
agttgtgggggcattcaggaataaactcctgctagagacccatgtcagaggtcattaaccgagttatactgggaaccgcggccttccccttcctccagcggcagaggaccaaagcaaggtcgggaagcctgggcgcacccacgcgtgtgcatctctggggcgcacacaccttgtgtacacgtgacaccttagcaacgcgaggatcggcggaagcacctggctagacagatcctctaggatcagcgcctagcattgtacctaataagcctcctctccccacaaatattaataataggtgtctggctcygaaaagggcggttagcaagagttgaaatggaggtccctttgaagcatcttcaaaacccgttctctagaggcgcatgcgtcctggtttgttttccgcttaggttacctacagttgcccgcctgctgttacctcctcccttcgcctttctcctccctataacttcaagggaaacccgggatggatcttgcggagagcggaacggggctagtttccgcttccacgtttctcca

SEQ ID NO: 643190 - DNA, 597 bp, Homo sapiens
atacaaggtctcactatgtttcccaggctggtctcgaattcctaagctcaagcagtactcccacctcagcctcctaaagtgctgagagcaaccacacccaactcaaatacatatttctaatgagacatgttactaaaactcagaattatgtctccaactgcctactgarcacttcaaatacaacatatcaacaacagaacttactttccccccaaacactcttttttattcagcttcttgattgggagacctctggaaattatacttaattctttcttttctttcatttgcttctgtggcccatttgattctactcctatttcttgaacacactgaattatttccattccactttccatgtcctcattattgttctcattgcctttcccttgaactaccagaactctcctcataatgtctctagccttcatattcacccaccttcaatgtaatcctcacctagcccatttgtcattaaggtggactctgaaagcaaaatgacacaacacttaacaaaggggaaaatcccttaattatgtcattttgcagttaaaaatcctcaaatggcactccattgatttcaaagcaaagtgtcaa

SEQ ID NO: 643191 - DNA, 582 bp, Homo sapiens
gcccttttgatttctgcctcactgcttgagtaggggcatcttatctcatattctcctgctctcagagatttacaccatcagcccccctatttctctggcctttgaacttggactgaattacaccaccagcattcctgggtctcctgcctgcagacaatagatcctgggaaatctcagccctcataaatgcttgagtcaattcctcataattctctctctacctctacctctctctacctctgtgtgtgtgtgtgtgtgtgtatgtgtgtgtgcatatatatattttttctggagagccataactaatacagcatctaagagatcatttgattcagtctcctgcttttgctgatgagtaagcataggccagaagaccaaaacgtgtttattyagagtctcacattcatttacctgtaacacctaagccttccttcttcctcagttctcttttttatttaacatacagtcaatacaagcaaaacagaatacagaaatgacccttcacagaggagagactcagaatgagacatgaggaaagatctgacttagcctagggaatgagggatcatgtatttagtgagg

SEQ ID NO: 643192 - DNA, 606 bp, Homo sapiens
gctcctagccttcggtcctatatctgggtctgattctttacctaaccatcataagccacatgatcctggctataattcccatctttgtttctagaaagtaaggttttcctccttggttttgaacttgattctggatttaataaccgttcatccagcattttcaggtgtkggtaatgtttgtgggttctatgttagctcaaactaccatgatactggaggatgacgtttaaattggtctaaggtgttgaaaactgaatttgccgtttcttcccacggttttctactttttctgcaaccaccattcccgcaaaacagaatcatctttcacttttccctctccactacttcttgcatcccaatgagtaatgataatcctgttggttccatattgctgtcactttcatctgtggctagtattgtgctgtataattggtcggctgaccgtcagtggtttcaaaccttgagatgtgtgtggatcagtataacttagtgaaacatgaggaatctatcttcccttccaataggctgactcggtgaataaaaccaatcaatcatcaattaataagatgaagttgcaattagcaagaactttctcgtgtttacagc

SEQ ID NO: 643193 - DNA, 551 bp, Homo sapiens
tgtgtttaaaatagttgagccactattagtaaagaaagaacaacactgctgttgtcttgggtgttcaactaaaatattgtgactgtgggttaaaaagtggctctaggtgagggacagagcaggaaaaagcacagtgtagtgaagcatttctgggtctccttttgcccttgggctgtggagtgtgccccactgcactcagtctagttagataactaatactggagctgggaaaccccaccagtcctatataytgtgacttccttatgctttgaattctaatttttactcattcttcatatgtcttttttttttgagacatggtcttgctctgtcacccagactggaatacagtggtgcgatcatggcttactgcagccttgacctcctgggcttaagcaatcctctcacctcagctaccttagcagctaggaccacagacacacaccaccatgcctgtctaatttttaattaatttatttatttttgtagagacagggtctcactatgttgcccaggctggtctcaaactcctggcctcaagtgatcttgcc

SEQ ID NO: 643194 - DNA, 500 bp, Homo sapiens
tcaaaagaaatcttacattttctctctatatttgctcttggataatagcacgcagatctgtaatcatttaaagaatgaaaatgtgtattgaaaaatttaaacattttgttttaacttaattaaactgtcatttctctttaattagtaattaactttcagactacttttctagaaagtatccagagaatctccttaattgttttttttcctattgtatctactttaacaatattttctagagaaaattaatcataaacatataactttatgtaagtttgcataagcttatgcataccttttaagcatgtattaaagagagtrttctttttactaaagttatcgtctcttggttaattacttctgttttaataaacagattattctttgctgaagaaagttttccttataatatgtaactcttacacagttcagaattatatgttatatgttaagtgcataactttattgtgacagctagatgattttctttgtatataaaa

SEQ ID NO: 643195 - DNA, 500 bp, Homo sapiens
tcaaaagaaatcttacattttctctctatatttgctcttggataatagcacgcagatctgtaatcatttaaagaatgaaaatgtgtattgaaaaatttaaacattttgttttaacttaattaaactgtcatttctctttaattagtaattaactttcagactacttttctagaaagtatccagagaatctccttaattgttttttttcctattgtatctactttaacaatattttctagagaaaattaatcataaacatataactttatgtaagtttgcataagcttatgcataccttttaagcatgtattaaagagagtattctttttactaaagktatcgtctcttggttaattacttctgttttaataaacagattattctttgctgaagaaagttttccttataatatgtaactcttacacagttcagaattatatgttatatgttaagtgcataactttattgtgacagctagatgattttctttgtatataaaa

SEQ ID NO: 643196 - DNA, 573 bp, Homo sapiens
atccaatactatcattatttatgttgctaatattattcttgctgtgaccgttgtagtttttgcagattagctccttgcaatatgtacccattctatctggcacatggtgaagaggcttgctttcttttaggtaccacaagatgctcctacgtcacattgggttttgcctatctgtcctgaaaacaatcacttttcctagtaagttgttttattggggtgtggtatttataaactagggcctaggtgtttggtgttttcaatgctactgtggtgtcacagttcctgcattctttcaacaaacagagctaggaaatgcrtgaatgtataataacccacacaaacacacacacacacacacatatatatataaataattatttttgtctttttgcatatatattttaaataggccataataacatctgattccaatctagcaaaggaggttttatttattctagtcttcactcttatttgtaacttctttctcttatggtttctctgaaactgtcactcaacactagtgtgcatatagacttgcctgctcttaaacaagtttatcgaccacacgca

SEQ ID NO: 643197 - DNA, 209 bp, Homo sapiens
tcctggtaatacaagcaagaacttaacttccagttttggagtactgagtctatttccctagagtctgtgtttttcccaaatgggccactgctatcyttccgcttgaataaactcttccaactgaaatcttgacctttctattatttcggagtgacaagtccaaataaggcaactgcatctctgcaaccaatcaagcatttatctggttt

SEQ ID NO: 643198 - DNA, 585 bp, Homo sapiens
caaaggttggagtgcagtggtgcgatctcggctcactgcaacctcctcctcctgggttcaagcgattctcctgcctcagcttgtcgagtaggtgggattacagkcacgctccaccacactgactaatttcgtatttttaatagagacgaggtttctccttgttagccaggttggtctcaaacgcctgacctcaggttatccacctgccttagcctctcaaaaagtactgggattacaggcatgagccactacgcctggcaattttttgtatttttaatagagacagggtttcaccatgttgaccaggttggtttcgaactcctgaccttaggcgatctgcccgccttggcctcccaaagtgctgggattatgggcgtgagccatcgtccctggcctaaacaacagttttattattttattttttatttttttattgcttattactattttttgagatggagtctcgctctgtcacccaggccggggtgcagtggcatgatatgggctcatggcaacctctgcctcctgggttcaagcagttctcctgctttggcctcccaaagtgatggaattacaggcccgagc

SEQ ID NO: 643199 - DNA, 585 bp, Homo sapiens
caaaggttggagtgcagtggtgcgatctcggctcactgcaacctcctcctcctgggttcaagcgattctcctgcctcagcttgtcgagtaggtgggattacagtcacgctccaccacactgactaatttcgtatttttaatagagacgaggtttctccttgttagccaggttggtctcaaacgcctgacctcaggttatccacctgccttagcctctcaaaaagtactgggattacaggcatgagccactacgcctggcaattttttgtatttttaatagagacagggtttcaccatgttgaccaggttggtttcgaactcctgaccttaggcgatctgcccgccttggcctcccaaagtgctgggattatgggcgtgagccatcgtscctggcctaaacaacagttttattattttattttttatttttttattgcttattactattttttgagatggagtctcgctctgtcacccaggccggggtgcagtggcatgatatgggctcatggcaacctctgcctcctgggttcaagcagttctcctgctttggcctcccaaagtgatggaattacaggcccgagc

SEQ ID NO: 643200 - DNA, 571 bp, Homo sapiens
caattctattcctaggtattacatcaattctattcctaggtattatatgcaagagaaagaaaacatttgcccacacacacaaaaaaatactttgtgcaagactgttcatagtagctctgttcataatagacccaaagtggaaacaactcagatgtccatgaccaggagaatagataagctgtgacagatccataaaaggaatactacttagcaaaacaaacaacaaccacaaaataactactctaaatataacaacatggatccatatcaaaatatgctgaatgaagttcaggcttcagtgagccatgattgcgccactgtactccagcctgggcaacacaaatgatactttgtctcaattaaaacaaaaacaaaaaacccctacatgccacataattccacttatggaattttgaaactggtaaaattaacctgtggtgatagaactctgatcagtggtttcttctgagggaagtgggaattgyctgggaatgggaacaggggacttttctggagtggtgaaaatattttgcctcttcatatgcatttggcaaaattaaattgaatggta

SEQ ID NO: 643201 - DNA, 616 bp, Homo sapiens
ctgcttgaattctgttaaatgcagcaactaaataaatgccacctcaccattttggatgcagtagtgattattcctccaaagcatccagctaacaaatgaactttattccctgggccacacagatccagtttgtaatttacagatatctcaccttccatggagaattcacatcagtagaaattatattaagaatacctcacagctgcaaatacaaagctgcagctttacttagaatgttatttgcattaaaaaatcaatttttatagctmtaagattctagagaagctatattctatttaatacacataaacaatacaaaaatgatagtaaaagtttaaaacttagacatctgttttttaaataaattaaagttttaaaacacgcataaaaattcatcgcactgaaaaaaggaagcaaacagctttaaaggagtagttggttaaaaacatattaaaaaaccacgcaagtctccaaggaacaaagtttgacttttgtaaaacagtggaaaattttaccttaattttatcaatgtaattcacttctctgtgattgaacacttcatgggctccattttgcaaaacaatcttttgtccttcctcagtaccagcagtgccca

SEQ ID NO: 643202 - DNA, 612 bp, Homo sapiens
ttcttttcactgttatactaataaattcctagtgtgttttgttatttatcctgctttattcaaactttacaactattatttggcctcctttagaaatatttgttacttcaaatggtagtttaaaagtgctaaaatagagcagattttagagaccaccttaggaaatgctgcaaacgttaataagtttcacttacagaatatagcaaagaagcaaaaccaactcagaaacttagtgtgcattggagggtattatataacgtattttgcagtgaagcctctayaataagtgtttccttggttggtacttcttaaacaagcttgccaaaacccttaattactacccaatagtataatgttttataaaatttgcctcaagatttacctcacatcttggtttaattgggacaatcccaggttaaaactagttaatatatcccacccagtttagcatttatccaagaaaaagggtccaactttggacaataatttctagggttgtcatatttgtaaaatactatgaggtgctaggtaactttttctggataaattttatcttctatcattggaccagagcacactccttgaaaccagagtgctcaggcttgcatccca

SEQ ID NO: 643203 - DNA, 583 bp, Homo sapiens
ccaccctgtacaaggtaaagatgagttagttgtgaaattgtatgtgtgtgtatttgtgcatgtatatatacatatatattatgaatatataatatttgtctcattgattacttttaagtttctttttctctcggtacctatgccaggctacaaaatgccttcataaaaatttgtgagatgtcctatgacctattttagtccatagaggccaagttaaatgaataggctcaaaggcacattagaaggtgaattatactatggaaaagcttgctccagtttttgtttttgtttttttaactaacccgaagaattttgagtttccagagtgacctcagatactctcttccttagtctgttcccacttatcttagtcttttacccaragaacagggccaggctgggatggagcatgctctgggacttaacagtccagagtttttaaggatcctctgaagttcccagagaactttctaggctgaggagtattttagacaccacacctcatcctaatcttctgccgtggttaatactaaaaatgaaattctgtcaaaacttgcctgactaatctcaaaaaggtctaaga

SEQ ID NO: 643204 - DNA, 637 bp, Homo sapiens
tattcctggtgggaatataaaatggtgcaattactttgaaaaacagtttggcattctcttaaaaatttaaatatttacgtaccatgtgatacacccatcccacttctaggtatttacccaaaagaaataaaggaatatactcataaaaagacttgcacaaaaatgttcayagcagctttatttgtaacagcccaaacctggaaacaacccaaatgcctattaatatgggattgcattaatacatttctctgtatccataaaatggattagtactgagcaacaaaaaaataaactattgacacatgcaaaaacatggctaaatctcaaattgtaccgggtgaacagaaaaagagcatacacgtcgaatgattttatttatatacatttctgaaaaattcaaattaactgatagtgacagaaagcaaatcagtgattgcttaaggattggggataggcagggggtgaggagtggggagaaagttcaaaggagtgcaagtaaaccttggcggtaatggatagatctactatcctgattgtggtgatgatttcatgggtgtatatatgtgtcaagatgtatcaaaatgtgcactttaaacttcagaaaagcagtttttcaaatggcaatttaggagagata

SEQ ID NO: 643205 - DNA, 637 bp, Homo sapiens
tattcctggtgggaatataaaatggtgcaattactttgaaaaacagtttggcattctcttaaaaatttaaatatttacgtaccatgtgatacacccatcccacttctaggtatttacccaaaagaaataaaggaatatactcataaaaagacttgcacaaaaatgttcatagcagctttatttgtaacagcccaaacctggaaacaacccaaatgcctattaatatgggattgcattaatacatttctctgtatccataaaatggattagtactgagcaacaaaaaaataaactattgacacatgcaaaaacatggctaaatctcaaattgtaccgggtgaacagaaaaagagcatacaygtcgaatgattttatttatatacatttctgaaaaattcaaattaactgatagtgacagaaagcaaatcagtgattgcttaaggattggggataggcagggggtgaggagtggggagaaagttcaaaggagtgcaagtaaaccttggcggtaatggatagatctactatcctgattgtggtgatgatttcatgggtgtatatatgtgtcaagatgtatcaaaatgtgcactttaaacttcagaaaagcagtttttcaaatggcaatttaggagagata

SEQ ID NO: 643206 - DNA, 567 bp, Homo sapiens
taattatgtgacttcagatatgttctttaaccaaactgtgtttagtttccttcatcaagcaggaagaaaatgttttgagattaaaatcatgtgaaaagtatttaaaatatatgaaatatagcaraaactacaaattacaaatgtaaatatataaagctatttacaggatatgtagaatgtacaattccttaagttagaattttcatcatatctttgtgtgtgtttgtgtatataatataattaaagtgtatgtaggtcttgcaatatttacaatagttataatttaatatgggtacaaactgaatgtattttaactgtggagtaatcataagagaggataagtgcattccattgctatttaatgtatcatttaagtctatgatatacattctgaacaagttttctttttaatttcataaaatagagttagaatagaaaaaccaagcaaaataatttatcttttgtttctcacacaaaaggtcaatgaaattcaagtttaagagcaatatcagtgaagcaataaggttattagtaagtaaaaagtaagtacaagtaacgaatagttga

SEQ ID NO: 643207 - DNA, 564 bp, Homo sapiens
aataaacaactactaaaaagtttcaagcagaacagcaagatgatctcattcgctttctaaacaaactattgagtttatgtgctacatagactgtggattgagataattcaacacagaagctgaaaataagttagggactcttgcgataatctcttatggcttagactcacaggcattgtaagtcggctgcaggaaaacaatggaatttgaggcatagcatggggtagacctgacagattatgatatgtcccatggaacatggcaagggtatattagaaagagaagatcaaaggattggtggaaaaattcattgcatttccaagtcttttccttaccgttgctcctgacactgtagcttttattttttttcacctcttgaacttgacatttgatatttcctttaattctgactttagttctccttcaggactrcagttgtacttatcctttggattgagactgcttctaacatatgacaagaacaacccaattcaatacagtcttatctactttttgtttgagctaacatgagcagccagtttggccaaaaactttgctgatgac

SEQ ID NO: 643208 - DNA, 566 bp, Homo sapiens
tagggacaacaatcagagactttataaggaacatttgtcagtgcctggatgatagctctgggctgattcttcttttatttccctctcctgtttcttagcttttctattttcaggttcaaagaaagaagttgcttttcagttctacctcccagaatttagtgatataagattccgattgctatagaactattttcattctgtttcttccctgattcacaaagaaagagccagtgctacatgccctgtgcccagctgggttctaaatatttcacggtgggatgtttcagtagagccccataaatgcccatgagaagactgtggagatgacccattcatcccggtgcacagctgactcattcagaccttgtaggcaggaacaattccccgagagcatgttctccaagtgagataacttaacrtaaatcttctataggagctactctgtatgtctttactgtttaaacattagtaataagtgagtagtgagactaaacccttgatgatttctaaacctactgttattgataaaataataaaatagaatgactttagaaaacaaaaggaca

SEQ ID NO: 643209 - DNA, 513 bp, Homo sapiens
ccctctttctaaaatatcagcagatgttcattattattaggttggtgcaaaagtaattgcygtttttgccattatttttaatggcaattacttttgcagcaacttatggtaaataatgttattctctacattgatttttaagatctgtgttctttccatgttaatcattttgatctggataagaatttttttctaactcttctctgagaaactaaaatacagaatggaattccgcactttttagaaaaatatttcagacactagtcctctgctgaagaaaggcaaggaatctcagatcttcaggattgcatgtgctccatgtaataggacttcctgaggacatgttgagtactctctggagactttcagaggctcagcattcctctccatgttggccctgggacaaaggagaggcttggtctagagacacctgagctgggaaagaggctgatgaacaaggccttggggcctgttctctttgggtgccttaatagaccaatccacagcctctgc

SEQ ID NO: 643210 - DNA, 513 bp, Homo sapiens
ccctctttctaaaatatcagcagatgttcattattattaggttggtgcaaaagtaattgccgtttttgccattatttttaatggcaatwacttttgcagcaacttatggtaaataatgttattctctacattgatttttaagatctgtgttctttccatgttaatcattttgatctggataagaatttttttctaactcttctctgagaaactaaaatacagaatggaattccgcactttttagaaaaatatttcagacactagtcctctgctgaagaaaggcaaggaatctcagatcttcaggattgcatgtgctccatgtaataggacttcctgaggacatgttgagtactctctggagactttcagaggctcagcattcctctccatgttggccctgggacaaaggagaggcttggtctagagacacctgagctgggaaagaggctgatgaacaaggccttggggcctgttctctttgggtgccttaatagaccaatccacagcctctgc

SEQ ID NO: 643211 - DNA, 519 bp, Homo sapiens
tgttcttttaaatgttattttggttgttttttgttctacacattttcatataaatattagaatccatttttaaatttctatacaaaaagcctggtggaattttgattggtattgcattgagtctacagatcaatttgattacaattgatatcttaacaatactgagtcttttaatcctttaacatggtatctctccccatttgtttatgtcttctctgttttctctgagagacattttacagtttccagtgtacagtcttggcaaattttctatcacatttgttcataattgtttgttacttttgatgcttttataaaaattagaaatagaacaaccatatgatgcarcaatcccacaagtgagaatatatccaaaggaaatgaaatcagtatgtcaaagagatatctgcactcccatgttcattggaatactattcacaatagccaagatatggaaacaacctaaatgttaatgaagagattaatagataaagagaatgtatgaatagtatgtacaaa

SEQ ID NO: 643212 - DNA, 609 bp, Homo sapiens
cttctctttttcaacaaacttgcaaaaaggattaagaaggaaggattgaaaactcattcaacatggaaatgatcctcattgattaatacatcatctcacactttcatgagttcttccatttcaaagactcacttctataaccaccacaagttgaatcaaaaatttcaaatgtttttcaggagtgtaaagaagcatcgtgtwtacctgtgcaggcactagtcctttacagatgaccatgctgatgtctctattcatctatttatttaaatatttatttatttaactatttttaaggtttaaatcatgttttatgtaatatcatgtgtacctttacattttgcttaatgtaacaatatatgttcttcatatttagttaatatattaacttccttttcattaaatttttactatacaaaaattttcttgtgtttgtttattttttaagattaaataccaagcctgactgtataacctgacttaaaaatagatgatttaagtaagttacctatcataattttattcaagttatagaaaaatatatttttctataccacgttatatgttgccttcaggatataaacttgaacataaaaaatacagttcttgttg

SEQ ID NO: 643213 - DNA, 609 bp, Homo sapiens
cttctctttttcaacaaacttgcaaaaaggattaagaaggaaggattgaaaactcattcaacatggaaatgatcctcattgattaatacatcatctcacactttcatgagttcttccatttcaaagactcacttctataaccaccacaagttgaatcaaaaatttcaaatgtttttcaggagtgtaaagaagcatcgtgtttacctgtgcaggcactagtcctttacagatgaccatgctgatgtctctattcatctatttatttaaatatttatttatttaactatttttaaggtttaaatcatgttttatgtaatatcatgtgtacctttacattttgcttaatgtaacaatatatgttcttcatatttagttaatatattaacttccttttcattaaatttttactatacaaaaattttcttgtgtttgtttattttttaagattaaatrccaagcctgactgtataacctgacttaaaaatagatgatttaagtaagttacctatcataattttattcaagttatagaaaaatatatttttctataccacgttatatgttgccttcaggatataaacttgaacataaaaaatacagttcttgttg

SEQ ID NO: 643214 - DNA, 623 bp, Homo sapiens
ccccagctccccagcagaggctctcaccacccagctaacagaggagaagtagtgcctccccccttctataactgaaccattactcccagaggcctaaataaagyttaccttttgtggctgatatctactgaggaaaatccacaggtggttccctaaatctgcctccttaacctctggtttaacccattttagtaactggcacaatcattcaccttgtgtcctagaaacctgggaagttatctttgacttgtcccttttcctcactcccaacattagttgaaaagcaggtcctgttgactacctccaaaatatatgctaaatgaacacactttccccctctgcatccctcaagcatctctagccagacagtcacaatagcctcctatctggtcacccaacttcaacgcccatttcccagcagctagagtagcatgcacatcaaactgtattggtgtccctggccatccaacggcttcttactgaatggggaataaaacccaagctcctttctgtgtcctacaagttttgtacactgcagccacagctacctttctaacctaatctcatcaggttttccctatttgtaagcaggctcctggccctggggccttctgtccatcccc

SEQ ID NO: 643215 - DNA, 623 bp, Homo sapiens
ccccagctccccagcagaggctctcaccacccagctaacagaggagaagtagtgcctccccccttctataactgaaccattactcccagaggcctaaataaagcttaccttttgtggctgatatctactgaggaaaatccacaggtggttccctaaatctgcctccttaacctctggtttaayccattttagtaactggcacaatcattcaccttgtgtcctagaaacctgggaagttatctttgacttgtcccttttcctcactcccaacattagttgaaaagcaggtcctgttgactacctccaaaatatatgctaaatgaacacactttccccctctgcatccctcaagcatctctagccagacagtcacaatagcctcctatctggtcacccaacttcaacgcccatttcccagcagctagagtagcatgcacatcaaactgtattggtgtccctggccatccaacggcttcttactgaatggggaataaaacccaagctcctttctgtgtcctacaagttttgtacactgcagccacagctacctttctaacctaatctcatcaggttttccctatttgtaagcaggctcctggccctggggccttctgtccatcccc

SEQ ID NO: 643216 - DNA, 623 bp, Homo sapiens
ccccagctccccagcagaggctctcaccacccagctaacagaggagaagtagtgcctccccccttctataactgaaccattactcccagaggcctaaataaagcttaccttttgtggctgatatctactgaggaaaatccacaggtggttccctaaatctgcctccttaacctctggtttaacccattttagtaactggcacaatcattcaccttgtgtcctagaaacctgggaagttatctttgacttgtcccttttcctcactcccaacattagttgaaaagcaggtcctgttgactacctccaaaatatatgctaaatgaacacactttccccctctgcatccctcaagcatctctagccagacagtcacaatagcctcctatctggtcacccaayttcaacgcccatttcccagcagctagagtagcatgcacatcaaactgtattggtgtccctggccatccaacggcttcttactgaatggggaataaaacccaagctcctttctgtgtcctacaagttttgtacactgcagccacagctacctttctaacctaatctcatcaggttttccctatttgtaagcaggctcctggccctggggccttctgtccatcccc

SEQ ID NO: 643217 - DNA, 655 bp, Homo sapiens
cagtgataggaaatgaaagacataaatccacagagacatatttagcactactgacttgtaaacaatagttaaataagccaaatatgtagaacaaaaactccatgagttaagaagaaaaacttctaaaccaaggttattagcaaaggattcaaagtgagagggggattgaggtgtccttgaaaaaaatgaataggatttgagaaaaagaaaggcatagaaaggtcagcttgaaccaaggacatgaagaaagaaagcaaagttctgttaacagaacagcaaatcacatcaactgctggagaagcagattcaccaatatcaacagatggtctaagcatttctttctttaaatatataatgttctttgagtatcttggaaaaagtaagtatttaaattaagcctgaaaacagagtaaaatgcaaatccatcctacttttatttttcatttgactcaytggatatcaaggcctttccttggccttttaattctgtaatctccaaaattctacacaagcagtttctgtgtaacaaaggatatccgcattattattttggttccttttatgtatttgaacatcaaaatgcaagcttatagtcttaatccccagttttgttttataagcgattacacaagtgtcattttcagatgtgtattag

SEQ ID NO: 643218 - DNA, 592 bp, Homo sapiens
ctcactggaacttccgcctcccgggttcaagtgattctcctgcctcagcctcccaagtagctgggattacacgtgcccaccactacrccaggctaattttttgtatttttagtatagatggggtttcacaatattggccaggctggtctcaaactctcgacctcagattatccacccgcctcggcctcccaaagtgttgggattagaggtgtgagccacctcacccagccaaaagattatttttaagagctctttccagaattattgtttaatttcatgactttctttatggacaattctaaagttaatttaaccttttcttgttgacttggagtcattatgagcataagtattatactgtatattattagagttgatgtttacttttagtttttttctgcttcatccctcaaaatgagagtatcattcttctgcatttcaaattccacctcttctcttagtttctttaacattaaccaacctttcttcccaccccttaaattactgcctctcatctgctgttgtcaaggaaacaagataaccaagattttaaaagagctagttaaaatatgagtcaaaaaaggaactgagt

SEQ ID NO: 643219 - DNA, 636 bp, Homo sapiens
ctgaactgaacacagtaaattgtgttctgagcctgcagctgcctctcaccgtgggtctgccaggagcctggtgccctgcccggctgtcctttgctgtggttgagctgacactgaccgggaactcactgggaacatggctctgacccactcacctgagccttgtgacatccagcaagggggacaagccttttccatacgacctcgggccccagcatgagcacccaggagaagatctcagcgcagctcctgctgtgagctggtcttcagacagccgccgccatggtcttcacgggcctgctgtcctggcaccctgcctggcatgctgtagcacacagggcagtgtgtgcagagaagggggcccgggaccaagtgtctcttcactcactgcgtctaagtactatgtgtgacaacgaaacagtgttccttggcacaactcacacctggaaggagtgtttgctgtgggacagatcacaagactgggggcggayaacaggattggaaagtggccatcagagggggtgagagtatttcacctgggcccggagaacatgaagcttaagctgttgtgctcctgctcagacaattcacccgcagacgccgggctggggaggtgcgaggcttctgtgggcctctaga

SEQ ID NO: 643220 - DNA, 433 bp, Homo sapiens
attattgcatagttatctagtcaatactgaagtcaccaaaaattatgaaaggagtggtgttagaattacagtgaagaaaatgttaaattcctcaaggaatcaggggcatgttccagggattctgtaaatgactgcaacaatatttagataaatataaagcattcactacttagcagatgggtgctcctgtctgttccccttgccctcactggaaagctggggaaacatcctggtccaagttgatccagtgagactattctttatctggagcttaagggacatcgaaaccgagagggtataaaaaatggtatttgaatgggatcagctgagtcaataaactagaaaattgagtacaattggatcrtgacaatgaggcagtgctgggcaatatgtgaggcatatagctgagggatcagagggccagggatagagc

SEQ ID NO: 643221 - DNA, 589 bp, Homo sapiens
cttgagtgtgtttgacttaggtaactggtaccctagcaattgatgtcgaagttggaatgaccatagaaacaatctggttcaactcccactgtatagtagagaaaagtgatagcccccaaaatgtttgctaagttgaactgaccaaaataatattatgatgacctaacacgaaacccacatatatcttttcccaatagagtgttttttcataataccttacttcctttaggtaccatcattgcagtggtagtcattagagacctattttaaactcatttaataagatgtggctgggaaataaaaaaaagtcctcttctctgctcattttccttctctgtcattactgttttttaaaagtaataaactttggaatggcactgatttcttaaaacatgacagtatcacaaaatccccataatagaagctctgagtctctcatttcttttcaaaaaatttgtttaaaaattttttgttttgcttcrttttttttttttttctttaaagagacagaacagctggttctctctgagctactgttttggattcagctgcagtgattatttaatactttgtgcatgcatcattcata

SEQ ID NO: 643222 - DNA, 614 bp, Homo sapiens
agtacgcccttcctttaagacaatgaataaatgtttagtatgcagataacagaactgtagaacaatgccttcactggggagaaacgagctagtccacagaggaagccttgagaagactaatcaggtttcccagttgctcatttgccttggctcatggagaaattaatgttaggaaaatctaaaaggtacagcccagctggaatctggtagtttaattgccctgcactagagaccagtggtcctgccgggtcttgggtgtgcaaagtccttacaaagctctgtactttgactgctgtgaatactcaaccaggagaattctgtctaagaggaaggactatagatttttctaaataggattctatttttagatctatycatttacctttttttaaattcattgcaacgttaactcatataccagaacattatttctaagaaaacactgactaatgtcctccatggccaaatagaactgaaacaagtcacattctggatgattaacactatttttagccatgctcaggatgggaggtagcccctgcatataaactgcagtcctgtgaataaatgtataccactttatacacacttcagcagaggtgctgcaaagatag

SEQ ID NO: 643223 - DNA, 506 bp, Homo sapiens
gaattctcttgcttgatttttaatatttaatatttctttttatttttaattattgtgaatacataatagttgattaaaaactaaccagtttaactcctttggaagcccttgactgagcacatataaatatatatgtatatgaggcatacagaaaatgcaaagttgcagaagggtgactggtatactcttagtgtggatgagactagaaaaaaggttaaagaaaaggataagataccacttgaaggaaaacactrtgttgtttagacatgtgagtaagcttaattattcaatttttatgctttgtccttccatatccaggagaataactttaaaacggacaagtatagagtaaacaaacataattaagaaaaaatgaaagctcaagacagataactgtgggcaccttgatcttttaaatgaagtcacttcctcagatccaaataaatactttttggagggatgttttatgaaggtgaaggtgcagaggtgggaaaataaccacttgc

SEQ ID NO: 643224 - DNA, 583 bp, Homo sapiens
ttgcaggttcagttctagaccaccagagtaaagtgtatattgcattgaagggagttacatgaattttttttattttctattgcatctaaaagttatgtttacaccatattgtaatttattaggtgttcaataacattatgtataaaaacacaatgtatgtactttcattaaaaatactttattgctaaaaaaaagctagtgatcatctgggccttcaatgagtcctcatctttttgctactggaaggccttgccttgatgttgatggctgccgactgatcaaagtgttagttgctgaaggttggaatatctgtggcaatttcttaaaataagacaataaagttggctgcatcagttgrctttcccttttatgaatgatttctctgtagcatgtgatgctttttgatagcattttacccagagtagaacttcttgcaaaattcaagtcaatcctttcaaactctgctgctgctttgccaactgagtttatgtaatattctaaattttttgttgtcatttcagcaatgttctcagcatcttcaccaggagcggattccatctcaagaaactagtttctttactaa

SEQ ID NO: 643225 - DNA, 464 bp, Homo sapiens
gcctgggtgcccaagtagaagcctgctgcaaagatagagccctcacagataatctatactagggcaatgacaagaggaagtatggtgttggggctgccacacagtcaccactggggaactgcctaatggagctgaagaaggtgagtgccaccctccagaccccagaatggtagattcatcagcagcttgaaccctatacctggaaaacagacactcaactctagaccatcagaataccaagcaaagccacagaggcagagctgctcaaggccttaggagcccacactttgcaccagtgtcccctrgatgtgggacatggagttgaaggagattattttggaggtttaagatttaatgactgccatgctgagtttcagacttgtgtggggactaatgaccttttcttttggccaatttctccctttccgaatagtaatgtttacccaatgcctgtactaccattt

SEQ ID NO: 643226 - DNA, 596 bp, Homo sapiens
gctcgtatgattacgtatgttgtgcccacaccagatcagccaggatattctcccaatcataaggccagttgactagtgaccttaattacatctgcaaggcccttttctccaagtagcatgatgtattcatggtcataataccagagggcagagatcatgggggccaaaactctgcctaccacagacagcaacacccctccaggagtagcagagggctgtggggtccaggggcctcccatagatccaggacacattgctcaagcctctttctgcatcccagcactaggcttagcacctccccagttgccccaccatctgctgggtcccaccacactctgcatctctctttttggtctcagcaccctgtgaattacccccaggattgcagaaacaagtgtgtttccaggttctgtaactccatgtccacgctttggctacttactgtcattgtgaatctctagatcacaccaactttttaaactagatctctgtcttcaatstgaatttcttagaagccttctattttcctgagcagattctgaccagtggagctaccctatgaaggaagggccctgcagccttgggaaacaaaaggt

SEQ ID NO: 643227 - DNA, 446 bp, Homo sapiens
actgtaactttttctgaatttgtcaaatagatttcttaaattgytcattccaactaacgttctatcagggctccaatttatctacatcctctcaaacacttgttatttcctgcttttgaaaatttattgcccttccagtgtgtgcgtatgaaatatgatatctcattttggatttgaaatgcattttctgcacccattaactcatcatgcacatggaccctagaacttaaagtataattaaaaaaaaaagaaatgcgtcttctgaatcactgaatatgagtatgtgtcccatgtgcatcttgggcatttgcccattttatttggagaaatatccattgagatgtttggccttttaattttgtttaagttgtaagttagtcatgtatcggatactagaagttgaaaatttaaaatttgttgcttaaacttatgcatacagaaatcat

SEQ ID NO: 643228 - DNA, 446 bp, Homo sapiens
actgtaactttttctgaatttgtcaaatagatttcttaaattgctcattccaactaacgttctatcagggctccaatttatctacatcctctcmaacacttgttatttcctgcttttgaaaatttattgcccttccagtgtgtgcgtatgaaatatgatatctcattttggatttgaaatgcattttctgcacccattaactcatcatgcacatggaccctagaacttaaagtataattaaaaaaaaaagaaatgcgtcttctgaatcactgaatatgagtatgtgtcccatgtgcatcttgggcatttgcccattttatttggagaaatatccattgagatgtttggccttttaattttgtttaagttgtaagttagtcatgtatcggatactagaagttgaaaatttaaaatttgttgcttaaacttatgcatacagaaatcat

SEQ ID NO: 643229 - DNA, 630 bp, Homo sapiens
aaaatacttgcctgcaaccttatttattcatctgtaaaaggaattcctgaacaagagtatctccaaactcctttctagttttaactaggagtttccagaaatctagyagagaaagatatggggataacaaagtagaagtctatattgcatagtgttatttaggaccatgttctctggagtcagtcaaacctgggtttaaatcctggctccattatttacttactggaaaaactgggataagttaccaccccaatcatctgtttccttgtccattaaacacatgcttataatagtgactacctcttatataattattattacaacaagcaaagagctaataataattcaaagaaaaggtcacgtatgaatgagggctcacaatgcacttacaagaagacagcaattgagaagatccttgaagatgaaggagggtctcagtaggtagaatcagcagacgagagataagagacaaaaatgagagaagttctttctaaaggagggtaaaactcacaaggttttcacacatgtagagaacaggatatacagtacaatagaaccttctacctttcatgagtgatgcttccctgagggctgatcactcatgatcactcatgattgaaactacttcac

SEQ ID NO: 643230 - DNA, 630 bp, Homo sapiens
aaaatacttgcctgcaaccttatttattcatctgtaaaaggaattcctgaacaagagtatctccaaactcctttctagttttaactaggagtttccagaaatctagcagagaaagatatggggataacaaagtagaagtctatattgcatagtgttatttrggaccatgttctctggagtcagtcaaacctgggtttaaatcctggctccattatttacttactggaaaaactgggataagttaccaccccaatcatctgtttccttgtccattaaacacatgcttataatagtgactacctcttatataattattattacaacaagcaaagagctaataataattcaaagaaaaggtcacgtatgaatgagggctcacaatgcacttacaagaagacagcaattgagaagatccttgaagatgaaggagggtctcagtaggtagaatcagcagacgagagataagagacaaaaatgagagaagttctttctaaaggagggtaaaactcacaaggttttcacacatgtagagaacaggatatacagtacaatagaaccttctacctttcatgagtgatgcttccctgagggctgatcactcatgatcactcatgattgaaactacttcac

SEQ ID NO: 643231 - DNA, 630 bp, Homo sapiens
aaaatacttgcctgcaaccttatttattcatctgtaaaaggaattcctgaacaagagtatctccaaactcctttctagttttaactaggagtttccagaaatctagcagagaaagatatggggataacaaagtagaagtctatattgcatagtgttatttaggaccatgttctctggagtcagtcaaacctgggtttaaatcctggctccattatttacttaytggaaaaactgggataagttaccaccccaatcatctgtttccttgtccattaaacacatgcttataatagtgactacctcttatataattattattacaacaagcaaagagctaataataattcaaagaaaaggtcacgtatgaatgagggctcacaatgcacttacaagaagacagcaattgagaagatccttgaagatgaaggagggtctcagtaggtagaatcagcagacgagagataagagacaaaaatgagagaagttctttctaaaggagggtaaaactcacaaggttttcacacatgtagagaacaggatatacagtacaatagaaccttctacctttcatgagtgatgcttccctgagggctgatcactcatgatcactcatgattgaaactacttcac

SEQ ID NO: 643232 - DNA, 626 bp, Homo sapiens
ttgggtggtgggaggctaatgaaaaaacagaagtctttaaaatggggcttgaataataagtagaagtttgacaggttgagagcaaggagttattctcattagtataattagtatataccaggaagagaaaactcaaatgccttaaggaaccaagtagccagcrttcacgagagaggcaggttgggtaggatctgtggggaacctggtgagcctgagctccacctaaatgggagcagccactccttcttgccagttgttgctttgtgagactggtgagttcaggtacccagaatgaccaagtttctaagggaaccctgaaatctgaactgttctgtaaaatctctacacatttttggcaactaattaagagattttttgctttcctcatgcttgtgacttctactttattattgtaccttaaataaacctacctctctccatttagcaggtaatccactcttcacttttgggaacaatagatattcattgaaacaatacaaattagcattgttttaacgttatttatcaatatataagttgcatgttagaaggagaaattttaaatttataatcctctatttcagacaactctgtcagattaaaagttattacttaacatttgcatt

SEQ ID NO: 643233 - DNA, 569 bp, Homo sapiens
ctatagttcactaggtcagcaatctagcatgggtctcatcaagaggctgtaggctgcatttcttcctgaagattctaggggagaattcatttcctgctcatttggkttatttgcagcttacttctttgtagaggtaggcctgaagtccctgtcttcttgcttcctgtaaactgaggctcattcccagcttctagaggctgctaccactttgcttggcaagtagacttcttgctccatcttcaaatccagcaatgtcaggttgattccctcaaatctctccaccttcttcttccgtctcatctctctgacccaactgagaaatgctctttccttttaagagatcatgtgattacattggtcccacaccattaatccaagatactctcctgatcttcaagtatactcctttaatcactgtacatctgcaaagttcctttgccatgtaaggtgacatgttcacagtcctacacagttgcacatactcatgtctccagagattaggacatgcatatctttggggtatcattattctgactccacacttgtgaataagaagccaattcaaagat

SEQ ID NO: 643234 - DNA, 563 bp, Homo sapiens
aattcattgattagtcattagtgacatttctgagaaggcagtctatatggctgattgctttctgttgggcctactccaatcccaaccaccacataagcctgaaaggtaagtggggagttctgaagagcattactcctatcaaatccattggctgyggttttgccagagagggatatatttctatataacataaaaatttgaggtccagagataggatagggatactcaaaattatcccaggagtacagcatcagaattatacagaagcccccacctagttgcaaataccttgctgattgagtgctgctacctctcctgccaagcatggttatgtttactcttgatgggcatttatgacagacataagtctaatgttttatatattttcaggaggtatatctctaaaactacatatgaatgaaaaacttaacttaaaaagaaccagtactactcaaaactgtatgccttagctgtgaaatcccattctgacttctgctttcctggttcttcaagtaagcaaacttttgaaagcagcccacccagttccaacctcctccctaaaa

SEQ ID NO: 643235 - DNA, 563 bp, Homo sapiens
aattcattgattagtcattagtgacatttctgagaaggcagtctatatggctgattgctttctgttgggcctactccaatcccaaccaccacataagcctgaaaggtaagtggggagttctgaagagcattactcctatcaaatccattggctgtggttttgccagagagggatatatttctatataacataaaaatttgaggtccagagataggatagggatactcaaaattatcccwggagtacagcatcagaattatacagaagcccccacctagttgcaaataccttgctgattgagtgctgctacctctcctgccaagcatggttatgtttactcttgatgggcatttatgacagacataagtctaatgttttatatattttcaggaggtatatctctaaaactacatatgaatgaaaaacttaacttaaaaagaaccagtactactcaaaactgtatgccttagctgtgaaatcccattctgacttctgctttcctggttcttcaagtaagcaaacttttgaaagcagcccacccagttccaacctcctccctaaaa

SEQ ID NO: 643236 - DNA, 563 bp, Homo sapiens
aattcattgattagtcattagtgacatttctgagaaggcagtctatatggctgattgctttctgttgggcctactccaatcccaaccaccacataagcctgaaaggtaagtggggagttctgaagagcattactcctatcaaatccattggctgtggttttgccagagagggatatatttctatataacataaaaatttgaggtccagagataggatagggatactcaaaattatcccaggagtacagcatcagaattatacagaarcccccacctagttgcaaataccttgctgattgagtgctgctacctctcctgccaagcatggttatgtttactcttgatgggcatttatgacagacataagtctaatgttttatatattttcaggaggtatatctctaaaactacatatgaatgaaaaacttaacttaaaaagaaccagtactactcaaaactgtatgccttagctgtgaaatcccattctgacttctgctttcctggttcttcaagtaagcaaacttttgaaagcagcccacccagttccaacctcctccctaaaa

SEQ ID NO: 643237 - DNA, 610 bp, Homo sapiens
tcacatgttaagtcaaaaagcaaatactaacaaatttaagaagatttaaattttattgagtatcttttctgaccacaatggtatgaaactagaaatcagttatagaaataatgtcagaaaatttacaaatatggggagattaaatagcgcatcgtagaacatgcaatggaacaaagaataaactaaaggagaagctaaaaaataccctagacagaaatggaaatacaacatactaaaaattatgggatacagcagaggcaattctcagagtaaagtttatattaataaatggctacattataaagaagaaatatcccaaatgaacagcctaactttacaccacaagaaaataaagaaaaatgaactaagcccaaagttagtayaaaaaagggaataattaagcagagagcagaaataaaagtagagactgggaaaaacaatagaaaagatcaataaaacaaagagtgttttgtaaaagataaaatcaatatatctttagctatatgaagtaagaaaataagagaagactcaaatacataaaatcaaaaatgaaagaggagacattaccagcgataccacagagatataaaggatcatgagattattatga

SEQ ID NO: 643238 - DNA, 480 bp, Homo sapiens
attcacaattttccagttacatgactaattatctgtcttgtacagtagctggaccctcttctcagacaaacttctgaaggacaaattgcaactcgcaaatagctcaacatccagcaggcattcatacagtgttcgcccacttgactaaggagaaaatctctacaatggtcactgtctggctgtcaggaactcccaaaagatggaatattacaatgaaaccaaaccaccatatacaatgtgttctgggaacattttttctttaacctgtaagargatttatcttcccagtatgcaatgaagcctatgtaccttacctctaatattgtttctttctagaagattagatgttctatttcttaaaggtgcttaaagcacaatgacgtgagaaaggcagaaaaaatctttcagctacttcagaaggtctgtactttataaaatagacattcaagtagctatcaaatttatggccagtaaaattac

SEQ ID NO: 643239 - DNA, 535 bp, Homo sapiens
tggacagggaggagagggaggcagggaggcacccagacccacacctgggcctggagatccaaacccaggaggaaggagtcaggccctgagaaagaatctggggatggcatggagctcagtgaacatacctagtgggtgccrttctctacctcagccccagagaacccttcccaggtcccaggcccacagcggagctcccacacgtgcaatgcccagcaatcgattaccccactatcaagagctacacagcttaaaatctggattgtcagattcttttgtgtcttcagaaaccaagagcaatccaagaccttcaggctccttcttatcgcaggacaataagatatgtccttcgtcagggcatgttcccagcccagccctcctcactcctgctgggcttctcactttggcctctgtgagaacatctagcagtgcctgccctccctgccttcccactgaggtcaaggcaacctggtaagtcaacctccagccacccctcttactagagggtcagaggctctcaaggcttcccgagcct

SEQ ID NO: 643240 - DNA, 535 bp, Homo sapiens
tggacagggaggagagggaggcagggaggcacccagacccacacctgggcctggagatccaaacccaggaggaaggagtcaggccctgagaaagaatctggggatggcatggagctcagtgaacatacctagtgggtgccgttctctacctcagccccagagaacccttcccaggycccaggcccacagcggagctcccacacgtgcaatgcccagcaatcgattaccccactatcaagagctacacagcttaaaatctggattgtcagattcttttgtgtcttcagaaaccaagagcaatccaagaccttcaggctccttcttatcgcaggacaataagatatgtccttcgtcagggcatgttcccagcccagccctcctcactcctgctgggcttctcactttggcctctgtgagaacatctagcagtgcctgccctccctgccttcccactgaggtcaaggcaacctggtaagtcaacctccagccacccctcttactagagggtcagaggctctcaaggcttcccgagcct

SEQ ID NO: 643241 - DNA, 589 bp, Homo sapiens
ttgccagccatgaaagtccaatgaaagcaaagttttatttgaaaagaaactacacacacacacacacatatacacacasacacacactgaattttcatctattacaacgtaggtcattagaggaaaaaaacaggtaatacaaatcaaagtcggggggcaatgcagagacattttccccacttttcgcatttgtttaagactgatcatggctaattacagattaatttggaatgtcaaaaataaagactccaggcaaaatcatggtgtagtagaaataattctatactaaaaatctgaaaatattagttgattttgagcttagtcatctcaggaaaatcacatcccaccttataattccttactggaaatgtaatgatccttccagataaatgagtttctggattcttatcattgacacctgtatcctagacaacatgatgacatttttgctggtagaccatttttatataaaccaggtttagtatgtgctaaaggttatttaattattaaagtaattaatacataagggttttttcatattattagttcttggttattggaatttatgtcaaatacaaaatattcattc

SEQ ID NO: 643242 - DNA, 526 bp, Homo sapiens
gaaagtaaacatatttcataactattctattatcatgcagattcaaaagatgcctactgcctcattttcctctaagaattcctcatggatatgtgggaggattgtgtagaaaactagctagcttttccctctggacatttagttagatgattatattctttgccagcatgattcagctccaaggttgaagacttctgagatcacaggcatctgccaggtagtatcattcattcccaaaggatgtctggaagaagtttcagraccagactgcaaggaaatactccaattctctgactgctcagagctctacattggcattgttttcgttattcacagatggtgcaactgagatttggcaaaaagaatcattgtatttttcaaaagaaagtttctctagctcttagactatgactccataaataaatgaggctaattctagtctctaaaaaaattcaagctaccaagttgaaataaaatagcactttgctggaagggtgctacttcttaaaaaatgactggctatgtt

SEQ ID NO: 643243 - DNA, 563 bp, Homo sapiens
aaaagcgtacaaattgggtccagtgtataccactccggtgatgggttcaccaaaatctcacaaataaccactaaagaagtcactcatataacgaaataccacctgtttgccaaaaacctgtggaaataaacattttttaaatgtcatatattataaagatagctgcccacactgtgcacataaataagccagttattcctacagaaatctccaggcactccttcattgtggagagcctttccagtcatttgagggctacatgatctactactggtgtttccttcattgtttgaagttctcttatgactatgcttgatatataagtcaccatattttaagaagaaaagaaaattaatgcttggttctacacaaaaagtacagttcaggatacacatggtacctctgaaaaaaaaagtatttacaattattgaaacacacaagtggggcctaaacaagttgggctatcacagcttgasagtcctcctggacaactggtagagttgaactgggttcccagttgagcctgaatatttgagagtagtccttgttttggagggattgct

SEQ ID NO: 643244 - DNA, 611 bp, Homo sapiens
atcacataatggaatactacccaaatattagacagatttgcataaccccgagaagtaatcttctaaatgaccaatacatgatattccaaatatgttcaaagtgaagataaaccaatggattttacaaaacaaaatatgacaaattatttctttcatatggttgcagatattacattgtaacttagattgaagaaactaccctgtgttgagtttggtatggtattaaagaagactaccttcaagtaatatgaaacatctatacacatattttccttttcaagtacatacatatgagagatttgatttctttatatgcttcaagcaaaaaacaaaacatttcacaacaaattgaatgcagaagcagttatgagaatccagamatcctccattaagttagactttaaagaggtttggataatggtaaagtaatgccactcttaattgtttttttgttttggaaaagaagattttattttttaaaaattatttattatactataaaattattaatgttatatttaaatgaaataatgtataaataatttaaagcttcttagctttcatgtctaatatggtaaattttaacaagtataatccacacaaaaaacagc

SEQ ID NO: 643245 - DNA, 611 bp, Homo sapiens
atcacataatggaatactacccaaatattagacagatttgcataaccccgagaagtaatcttctaaatgaccaatacatgatattccaaatatgttcaaagtgaagataaaccaatggattttacaaaacaaaatatgacaaattatttctttcatatggttgcagatattacattgtaacttagattgaagaaactaccctgtgttgagtttggtatggtattaaagaagactaccttcaagtaatatgaaacatctatacacatattttccttttcaagtacatacatatgagagatttgatttctttatatgcttcaagcaaaaaacaaaacatttcacaacaaattgaatgcagaagcagttatgagaatccagacrtcctccattaagttagactttaaagaggtttggataatggtaaagtaatgccactcttaattgtttttttgttttggaaaagaagattttattttttaaaaattatttattatactataaaattattaatgttatatttaaatgaaataatgtataaataatttaaagcttcttagctttcatgtctaatatggtaaattttaacaagtataatccacacaaaaaacagc

SEQ ID NO: 643246 - DNA, 611 bp, Homo sapiens
atcacataatggaatactacccaaatattagacagatttgcataaccccgagaagtaatcttctaaatgaccaatacatgatattccaaatatgttcaaagtgaagataaaccaatggattttacaaaacaaaatatgacaaattatttctttcatatggttgcagatattacattgtaacttagattgaagaaactaccctgtgttgagtttggtatggtattaaagaagactaccttcaagtaatatgaaacatctatacacatattttccttttcaagtacatacatatgagagatttgatttctttatatgcttcaagcaaaaaacaaaacatttcacaacaaattgaatgcagaagcagttatgagaatccagacatcctccattaagttagactttaaagaggtttggrtaatggtaaagtaatgccactcttaattgtttttttgttttggaaaagaagattttattttttaaaaattatttattatactataaaattattaatgttatatttaaatgaaataatgtataaataatttaaagcttcttagctttcatgtctaatatggtaaattttaacaagtataatccacacaaaaaacagc

SEQ ID NO: 643247 - DNA, 559 bp, Homo sapiens
ttgaagatgatgtttgaaagcagtttgmagcaaaatgttatgggataaaattctgagaggccttgttttgaatctttctatattgtaagatccattggtcaagtcaccttttttgctgagtctgaatgttattgtgtatggagtgcagattataatacttatactatttctcctgcaaattcaatgttatacttagtatattgcctgacataaaataggtggtcaataaatataactttcctctcatccacttattaaaataaaatataaatttctcatcagtgtgccagttttaatgttctatattaaaatacctctgagtttagcagttatatataaaaaatttaatatatgtgttttcagatttcaggatttaactgtataattaaaaataatatttaagtataaaaaagataaaatatctaaagtcatgagcttcattttttactctttcatgtataaaattttaataattaaccaagtcttattgtattaaaaatattgtttaaagtatttttcactgattttatgttaaactaatatttagtgagaactttat

SEQ ID NO: 643248 - DNA, 527 bp, Homo sapiens
ctttctttttttttcatttttcgagaaggagtcttgctctgtcgccaaggctagagtgcagtggcgcgatctcggctcactacaagctccgcctcccgggttaacaccattctcctgcctcagcctcctgaggagctgggactacaggygcccaccaccagcctggctattttttttgtatttttagtggattcggggtttcaccatgttagccaggatggtctctatctcttgacctcgtgatccacccgcctccgcctcccaaagtgctggtattacaggcgtgagccaccacgcctggcctcaaagactttcttaaaaaatgaattgctatagaactactctggtaggtaatagacattacacagtgcttgtagagctgggataatcacaagaataaatgaggcctattttccatttttgtcatatggcatctgatattcagagaggttgaaattacagactcaaagtaatgaagttttttacaacaggagaatgacatcaatatcctgataactcatttgttc

SEQ ID NO: 643249 - DNA, 527 bp, Homo sapiens
ctttctttttttttcatttttcgagaaggagtcttgctctgtcgccaaggctagagtgcagtggcgcgatctcggctcactacaagctccgcctcccgggttaacaccattctcctgcctcagcctcctgaggagctgggactacaggcgcccaccaccagcctggctattttttttgtatttttagtggattcggggtttcaccatgttagccaggatggtctctatctcttgacctcgtgatccaccygcctccgcctcccaaagtgctggtattacaggcgtgagccaccacgcctggcctcaaagactttcttaaaaaatgaattgctatagaactactctggtaggtaatagacattacacagtgcttgtagagctgggataatcacaagaataaatgaggcctattttccatttttgtcatatggcatctgatattcagagaggttgaaattacagactcaaagtaatgaagttttttacaacaggagaatgacatcaatatcctgataactcatttgttc

SEQ ID NO: 643250 - DNA, 527 bp, Homo sapiens
ctttctttttttttcatttttcgagaaggagtcttgctctgtcgccaaggctagagtgcagtggcgcgatctcggctcactacaagctccgcctcccgggttaacaccattctcctgcctcagcctcctgaggagctgggactacaggcgcccaccaccagcctggctattttttttgtatttttagtggattcggggtttcaccatgttagccaggatggtctctatctcttgacctcgtgatccacccgcctccgcctcccaaagtgctggtattacaggcgtgagccaccacgcctggcctcaaagactttcttaaaaaatgaattgctatagaactactctggtaggtaatagacattacacagtgcttgtagagctgggataatcacaagaataaatgaggcctattttccatttttgtcatatggcatctgatattcagagaggttgaaattacagactcaaagtaatgaagttttttacaacaggagaatgacatcratatcctgataactcatttgttc

SEQ ID NO: 643251 - DNA, 568 bp, Homo sapiens
ttattgacagaaaaaaaaataagtaactggcagaatagactatagtttccaaggagcagcaaggcaaacaaaaaactgtgtgtgtgtgtgtgtgtgtgtgtgtgtgtgtgtgtgtgtgtttatgagtatctgtgtttatgtttttctgttwaaaagtatatatatgtgagtgtgtggtgtctgagatagaaatataaaaaatagaaatttagtaagaaacataaatgaaaaatagagggaagatatttaacaaattatagaggctgaattttattgagaactttgaacgaagactacagaagaatttttgagggagcagctatgagtaggaaagattttggatgcttaaatcataagttactctcatcaattcatcagtttcttttttttttttaattatactttaagttctagggtacgtgtgcacaacgtgcaggtttgttacatatgtatacatgtgccatgttggtgtgctgcacccattaaatcctcatttacattaggtatatctcctaacgctatccctcccctctacccccatcccacgacaggccctggtgtgtgatgt

SEQ ID NO: 643252 - DNA, 568 bp, Homo sapiens
ttattgacagaaaaaaaaataagtaactggcagaatagactatagtttccaaggagcagcaaggcaaacaaaaaactgtgtgtgtgtgtgtgtgtgtgtgtgtgtgtgtgtgtgtgtgtttatgagtatctgtgtttatgtttttctgtttaaaagtatatatatgtgagtgtgtggtgtctgagatagaaatataaaaaatagaaatttagtaagaaacataaatgaaaaatagagggaagatatttaacaaattatagaggctgaattttattgagaactttgaacgaagactacagaagaatttttgagggagcagctatgagtaggaaagattttggatgcttaaatcataagttactctcrtcaattcatcagtttcttttttttttttaattatactttaagttctagggtacgtgtgcacaacgtgcaggtttgttacatatgtatacatgtgccatgttggtgtgctgcacccattaaatcctcatttacattaggtatatctcctaacgctatccctcccctctacccccatcccacgacaggccctggtgtgtgatgt

SEQ ID NO: 643253 - DNA, 568 bp, Homo sapiens
ttattgacagaaaaaaaaataagtaactggcagaatagactatagtttccaaggagcagcaaggcaaacaaaaaactgtgtgtgtgtgtgtgtgtgtgtgtgtgtgtgtgtgtgtgtgtttatgagtatctgtgtttatgtttttctgtttaaaagtatatatatgtgagtgtgtggtgtctgagatagaaatataaaaaatagaaatttagtaagaaacataaatgaaaaatagagggaagatatttaacaaattatagaggctgaattttattgagaactttgaacgaagactacagaagaatttttgagggagcagctatgagtaggaaagattttggatgcttaaatcataagttactctcatcarttcatcagtttcttttttttttttaattatactttaagttctagggtacgtgtgcacaacgtgcaggtttgttacatatgtatacatgtgccatgttggtgtgctgcacccattaaatcctcatttacattaggtatatctcctaacgctatccctcccctctacccccatcccacgacaggccctggtgtgtgatgt

SEQ ID NO: 643254 - DNA, 464 bp, Homo sapiens
ttaactagggtaaaataaaaatatacattttcttattcattatggtaaatttactatataagttatgctttaatgagcactcagtacttaaacagaagacagcttaagatccaagactgagatattaaaatccaaacattgcasccagaaagaataattaataagattatcattaacggagacactctatatctgttccttatttaagctattttcagctcagatttcgataagaaagttactcttcttactagagcttttgaaataaagcactcatcattggtgaaatgatgttcagcagagaaccttcaactatcaaacttagaacaagaacactaaccaggtctcaaaattcacaatcagaaaaaggcaccatttacagagcaatacctaatatataagagaaggcaattttaaaaggcatatgagaaacaaagcaaaacaacctttcaccaaatattgat

SEQ ID NO: 643255 - DNA, 464 bp, Homo sapiens
ttaactagggtaaaataaaaatatacattttcttattcattatggtaaatttactatataagttatgctttaatgagcactcagtacttaaacagaagacagcttaagatccaagactgagatattaaaatccaaacattgcagccagaaagaataattaataagattatcattaacrgagacactctatatctgttccttatttaagctattttcagctcagatttcgataagaaagttactcttcttactagagcttttgaaataaagcactcatcattggtgaaatgatgttcagcagagaaccttcaactatcaaacttagaacaagaacactaaccaggtctcaaaattcacaatcagaaaaaggcaccatttacagagcaatacctaatatataagagaaggcaattttaaaaggcatatgagaaacaaagcaaaacaacctttcaccaaatattgat

SEQ ID NO: 643256 - DNA, 464 bp, Homo sapiens
ttaactagggtaaaataaaaatatacattttcttattcattatggtaaatttactatataagttatgctttaatgagcactcagtacttaaacagaagacagcttaagatccaagactgagatattaaaatccaaacattgcagccagaaagaataattaataagattatcattaacggagacactctatatctgttccttatttaagctattttcagctcagatttcgataagaaagttactcttcttactagagcttttgaaataaagcactcatcattggtgaaatgatgttcagcagagaaccttcaactatcaaacttagaacaagaacactaaccaggtctcaaaawtcacaatcagaaaaaggcaccatttacagagcaatacctaatatataagagaaggcaattttaaaaggcatatgagaaacaaagcaaaacaacctttcaccaaatattgat

SEQ ID NO: 643257 - DNA, 450 bp, Homo sapiens
aactcagctattataaatgttaggaatgtcacaaaagagatatactgtattctctgaaaatatataaaaagtattctaaataacctaatctcaaatggaataaggtcagagagagctttctgaggagataatgttaaagataaagcttgaaagatgaataggcgataaggaggtggtgtaagtttagtatgactggggcaactagaactatagagctattacagwgagaagagttgactctcttgagaggaaacaacaattaggccatgcaagattttgtgatcatgttgaggattttgtaccttttttttttttttttttttttgagacggagtctcgctctgtcgcccaggctggagtgcagtggctcgatctcggctcactgcaagctccgcctcccaggttcacgccattctcctgcctcagcctcccgagtagctgggactacag

SEQ ID NO: 643258 - DNA, 586 bp, Homo sapiens
caactacgttgtaaaaatatgacggatatctacataaggaaataatcctaaagtaatctgctaaacacttgagacagaaaaaaataaataaataatagatagttataggacaggatgacataacaagaaagttaattaagaaaaactagtgatgaacttataagcataatttgacaaactgcaatacagataacttgtctttgaattggcagcccaaacttttacagtattttgtgttaaggtctgtgaagacctactggtatttgtgaatatgaacttggatcacaataatttttcctaaattgatgtggagaaacatttcttagtcattacgtttaactttcaatcaaaccaagtattaccgtttatgaaaaataatgtaccttggaaatgaatctgaagaagcagtttttcttattaaatcaacatttacgaaattagcattaattaatttgaaatgaagcaagttttataatcaaccattgtrtacatgtctatgtaattgactgggatgcttatttgacaaaaacattctaaaagcccaaataaattcaaaatctacttgttgacacacacatattatata

SEQ ID NO: 643259 - DNA, 179 bp, Homo sapiens
ttttaagtcaattctcattgatttattttcttttaagaactttttggagsaaaagtttgtacttataaatattttctttacttataaaatttagaaagatgaaagtgtggatattttcatatccaaatcacgctaattaacaaaatgttacctctgggccaggcacaatggcttatgcc

SEQ ID NO: 643260 - DNA, 581 bp, Homo sapiens
cattattttacattttataatgtgtatttatataaaaaaaaagacatagaaagtacatacatacagaacgaatgcttgtttgagtgatgttttggcactgaaaatcaattaaagagctagattcacattggaatgatacactgcagaacatagaaaaaaaataagaggaagaaactaacaagcagagagcgccagcatatctcagtctttcatcaacctccctgtacaaaaaataaacaaaaatattgatggaagctttggatttccatagatcatgaaattagagaattcaagtcgccactatcatctagataatacaaggctgtagcaggtcccaactgacatctcacttagatttataacaatgaaacttttattgagggcaaaaccatgtcttaatttagttaagctcaacaactcacaatatgtttcttatgcatgagatattgtgctasaagctgctttggcttatgagatgattggaagggcagaaaagatgtcttttaatcacatttatagaatatccaaaatagcgtcacacattcaaagtactcatcaggctcagagaagctaaatggcgt

SEQ ID NO: 643261 - DNA, 508 bp, Homo sapiens
tggaaatgagccgcttgtcaatggggaacacctgctttgaaatttaagragcaagaaatacacttctatcatgtttgaactgttattcattttggggttcagcaacttgtgttatcacaaattctcttgtcatgtctttcactttaaaaaatacattatgttggtcaaaggatgcatatttataattaggtaggagtaataagttcaagtgatctatcatactgcatggtgactagctgacaataatgacgatatattgcattcttgaaaaatgctgacagtggatgtcaagtgttctcatcacaaaacgttaactatgtgaggtaatgcatttgcgaattagctagatttaattattctgcaatgtatatgtacttaacatcatgttgtacacagtaaatacaattttatatgtcaatcaaaacataaataaatctgtaaaaacaataatgcttccctgtaactacaggataaacatattctgtatcacttcttcactatcatccct

SEQ ID NO: 643262 - DNA, 589 bp, Homo sapiens
ttttgttggtaatttttaaattgccatttcaatctccctgcctgttattggtctgttcagggtatctaattctttctgatttaagctaggatggttgtatttttccaggaatttatccatctcttctaggttttctagtttatgtggataaaggtgttcatagtagccttgaatggtattttgtatttcagtggtgtcagttgtaatatatcctgtttcgtttcttagtgaggttatttggattttctcttttcttttcttggttaaccttgctaatggtctatcaattttatttatcttttcaaagaaccagctttttgtttcatttatcttttgtattttttgtttcaatttcatttagttctgctctgatcttggtaatttcctttcttctgctggatttgggtttgctttgttcctgtgtttctctagttccttaaggtgtgaccttagaataccagtttgtactctttatctttttgatgtaggtgcttagggctatgaactttcctcttaacattgcctttgctgtatccagaggttttgaaaggttgtgtcattaytgtattcagttcaaagaacttttaaa

SEQ ID NO: 643263 - DNA, 555 bp, Homo sapiens
tataaattcaagattgccttactcctaggatgtcggtagaagtgctgttatttggtggtagggttgggaaggaagttagtgataatctggctcaatctcattctacatataaaaaacatgggtctcaagaaagatttttcaggtcaccaacatattattaagtgcacagaagggtaccagtgggaaatcactgactaaatttcttttgagttgctaattgcctttgtaacattccaacaaggtagggcttatttttatttcacagatgatggaaccaaggtgcataaagacaaaatgcatagccgggattctacaaacagatgggggttttccttgagcaatcacttctagtgtactcccttgagataggatcctcstggactgtatcacgtcaagggagctaaaattttactgtacaagcctcgtccctttgtgtcactttgcccctctggagcacagatgcagtagagtctttccatggtaatcaatccaagtcaatttctggaatgagcaagccaagtaaaaggaaatcctcaccacattttatactttctc

SEQ ID NO: 643264 - DNA, 555 bp, Homo sapiens
tataaattcaagattgccttactcctaggatgtcggtagaagtgctgttatttggtggtagggttgggaaggaagttagtgataatctggctcaatctcattctacatataaaaaacatgggtctcaagaaagatttttcaggtcaccaacatattattaagtgcacagaagggtaccagtgggaaatcactgactaaatttcttttgagttgctaattgcctttgtaacattccaacaaggtagggcttatttttatttcacagatgatggaaccaaggtgcataaagacaaaatgcatagccgggattctacaaacagatgggggttttccttgagcaatcacttctagtgtactcccttgagataggatcctcgtggactgtatcacgtcaagggagstaaaattttactgtacaagcctcgtccctttgtgtcactttgcccctctggagcacagatgcagtagagtctttccatggtaatcaatccaagtcaatttctggaatgagcaagccaagtaaaaggaaatcctcaccacattttatactttctc

SEQ ID NO: 643265 - DNA, 587 bp, Homo sapiens
gaacatggctgcaactgtgaggcaacaggggagccacacaactgggcaagagtctaccaactgactaataagcctaagtatcacctgctggatcacaccccaaagcttcaacaccaaaaaaaaaaaaaaaaaatacctcactaacataccccactctgaaacaagacacaagaagtcagcttcaaatmaagaccctacacaaagcctcagcctggtgaaaataaccagaaaagaagtatattaactgtactcagtctctattgcagttaaatgaacactcacatgcaaagatgagaaaggatcaatgcaagaactctggtaactcaaatggccagagtgtcatatgtcctccaaacaaccacaccagttctccaacaagagtttttaacaaggccaaactggctggaatgacagaaatagaattcagactatggaataggaacaaagatcatcaagattaaggagaatggcaaaacccaacccaaggaaaataagaaccacaataaagtgatacaggagctgaaggacaaaatagccagtataaaaaagaacttaatgggtctgacagagctgaataacaaaataca

SEQ ID NO: 643266 - DNA, 587 bp, Homo sapiens
gaacatggctgcaactgtgaggcaacaggggagccacacaactgggcaagagtctaccaactgactaataagcctaagtatcacctgctggatcacaccccaaagcttcaacaccaaaaaaaaaaaaaaaaaatacctcactaacataccccactctgaaacaagacacaagaagtcagcttcaaataaagaccctacacaaagcctcagcctggtgaaaataaccagaaaagaagtrtattaactgtactcagtctctattgcagttaaatgaacactcacatgcaaagatgagaaaggatcaatgcaagaactctggtaactcaaatggccagagtgtcatatgtcctccaaacaaccacaccagttctccaacaagagtttttaacaaggccaaactggctggaatgacagaaatagaattcagactatggaataggaacaaagatcatcaagattaaggagaatggcaaaacccaacccaaggaaaataagaaccacaataaagtgatacaggagctgaaggacaaaatagccagtataaaaaagaacttaatgggtctgacagagctgaataacaaaataca

SEQ ID NO: 643267 - DNA, 587 bp, Homo sapiens
gaacatggctgcaactgtgaggcaacaggggagccacacaactgggcaagagtctaccaactgactaataagcctaagtatcacctgctggatcacaccccaaagcttcaacaccaaaaaaaaaaaaaaaaaatacctcactaacataccccactctgaaacaagacacaagaagtcagcttcaaataaagaccctacacaaagcctcagcctggtgaaaataaccagaaaagaagtatattaactgtactcagtctctattgcagttaaatgaacactcacatgcaaagatgagaaaggatcaatgcaagaactctggtaactcaaatggccagagtgtcatatgtcctccaaacaaccacaccagttctccaacaagagtttttaacmaggccaaactggctggaatgacagaaatagaattcagactatggaataggaacaaagatcatcaagattaaggagaatggcaaaacccaacccaaggaaaataagaaccacaataaagtgatacaggagctgaaggacaaaatagccagtataaaaaagaacttaatgggtctgacagagctgaataacaaaataca

SEQ ID NO: 643268 - DNA, 533 bp, Homo sapiens
tttgcatatgctttctctggcaaatgccaacttttttttcgctatttccagtgtycaatctgcttgccaattatttctaatatactactgtctggtttagctgtgaattaccaacagtaccatattttaacatgtgagacaaaggacaacttccacccccaagatgatcaagcatttagttttctatttgaaagatccagaataaaatgcaatttgagagcatattgtgtgtcggtatcaaccaaatacccaattgctttagtgcttatcctgaaagtggccagaccaaatccaacaattggaaattgcagaaagagtaaaattattttcacaattcaaactgaaatcaaggtgttagtttgtagtttatttccaggaaaccaagtctgtgtgtgtggtttctatactttgggaaatttaggagttcctatacctagattctattccaagctctaccgagtaaccatatgaacttgtgtacataaattgacccctctgcatctgtctcatgtatacagtgtgaactcactata

SEQ ID NO: 643269 - DNA, 564 bp, Homo sapiens
aaggtgaaatttgatgttaataaatagaggagtagagaagagccaggattctaggacacagtgtgatgtggagtrttacactacttaaagagggatacttgatgaggattacatagatttgaacacaacctgacaaaattcatccttgaggttgccagaaaaaaagtcactggctgctcaaaaaattgaagcagatgtcagatgcaagcagctgtggcctaggaaattcaacaaaattccaatattcaaattgcttctctggataaaaactgcttgatagcacaatttcagatttgatctggactgccagtgaaccatctgtgtaaaatgaaagtaatctgctgacactgtccatacaggtaggcatcagtgtcatttggttgaaaaaagaacactgctaagatgttttctggagtcaggaaagttttacagtatagcaattagccccagttgctagaatattgaacaccagaataaagagtaataaaaagctttgcttcattgtttaaggatgatttgaagaaaggaaaacaagaaagaggaaaaaaaacctttcactctaat

SEQ ID NO: 643270 - DNA, 619 bp, Homo sapiens
ttccagggagcaaaacatgagcaaacagtccctgtgacagtatctggttgataaaagtgagtgaagccccagtacataagagcacaaggattctgctcataaaaatttgaacgtagtggcaccacaaaaggattacactagctctccagcaaagatctctaacaaaaatggaaactcagagatgacagataagggattcaaagcatggattgtaaggaagctccacaggatccaacacaaggttgcaaatcaacacaaagaaacttccaaagcaatccagaaaatgaagagataaacatcttttatttttctctgatttattctcttttttcatttcaatagtttttggagtacaggtgrtttttggttacatagatgtgttctttagtagtgatttctgagattttggtgtacccataactaaacatattcttggactataatggaataaataggaattaataccaataagatatctcaaaattacacaaatacatgaagattaaacaacttgacctgaatgactttggggtagacaacaaaattaaggtagaaataaaaaaatctttgacacaaaagaccaacagaaacacaacataccaaaatctaaaagaggcgg

SEQ ID NO: 643271 - DNA, 619 bp, Homo sapiens
ttccagggagcaaaacatgagcaaacagtccctgtgacagtatctggttgataaaagtgagtgaagccccagtacataagagcacaaggattctgctcataaaaatttgaacgtagtggcaccacaaaaggattacactagctctccagcaaagatctctaacaaaaatggaaactcagagatgacagataagggattcaaagcatggattgtaaggaagctccacaggatccaacacaaggttgcaaatcaacacaaagaaacttccaaagcaatccagaaaatgaagagataaacatcttttatttttctctgatttattctcttttttcatttcaatagtttttggagtacaggtgatttttggttacatagatgtgttctttagtagtgatttctgagattttggtgtacccataactraacatattcttggactataatggaataaataggaattaataccaataagatatctcaaaattacacaaatacatgaagattaaacaacttgacctgaatgactttggggtagacaacaaaattaaggtagaaataaaaaaatctttgacacaaaagaccaacagaaacacaacataccaaaatctaaaagaggcgg

SEQ ID NO: 643272 - DNA, 349 bp, Homo sapiens
acgatcccctccctctaacacagagttctggagattcagttagtccagaagagtaagccctggcttatacctcatctctgagagtgatgaggtacttagttatgtctctgtgtgtacgattagaagatgtttagattatagctgagaacttttagtttgcatcyccaatgttatcctgcaaataaaaaaatgatgatttttgaatggaaattcaccttccaatcagttattaattttaaaagaaataaatctacgcttcacaggggatacagcaacacatcctgagtttcattggtaactgagatgtttttatgtaataatcattttgaatatgttaactgggttagtg

SEQ ID NO: 643273 - DNA, 623 bp, Homo sapiens
aaaaaatgtatatgtagccgtctttaatctaccatgtccattagcagataaatactataagcaaaataacaacaatgaaagaaacatagacttagagtagatactctgatttatttaataaaaatttgaagatagaccaaattactctgataaaaaaaatctgttgctattgaggatgagggttagtgtttggaaaggggcaggagaagtatcwctatttttagtaatattctattttcatacatggttataagcaaatacatgtgtttcattaatgaagctatccatatttaatcattgtacttttctgcatgtatgatatgtcaataaatgtcttaaattatatacagcaaaaatagacaaaaccacaagaagacatacacaaatgttaaacctagagagaaatttgaatataagtaagtctccgaatgactagtagaacaaaccgaaaaatagatggagacgtttggatcagcatgactagcaaaattgacatatctgtcttttaatataggcagaaacatagataaaaaaggacttgtctcggagcatgatttctgaaaatagtggaatcgagtttgaatctagtaagtacatataaataaatgtcttaaaactcctct

SEQ ID NO: 643274 - DNA, 404 bp, Homo sapiens
tctgttgctattgaggatgagggttagtgtttggaaaggggcaggagaagtatcactatttttagtaatrttctattttcatacatggttataagcaaatacatgtgtttcattaatgaagctatccatatttaatcattgtacttttctgcatgtatgatatgtcaataaatgtcttaaattatatacagcaaaaatagacaaaaccacaagaagacatacacaaatgttaaacctagagagaaatttgaatataagtaagtctccgaatgactagtagaacaaaccgaaaaatagatggagacgtttggatcagcatgactagcaaaattgacatatctgtcttttaatataggcagaaacatagataaaaaaggacttgtctcggagcatgatttctgaaa

SEQ ID NO: 643275 - DNA, 623 bp, Homo sapiens
aaaaaatgtatatgtagccgtctttaatctaccatgtccattagcagataaatactataagcaaaataacaacaatgaaagaaacatagacttagagtagatactctgatttatttaataaaaatttgaagatagaccaaattactctgataaaaaaaatctgttgctattgaggatgagggttagtgtttggaaaggggcaggagaagtatcactatttttagtaatattctattttcatacatggttataagcaaatacatgtgtttcattaatgaagctatccatatttaatcattgtacttttctgcatgtatgatatgtcaataaatgtcttaaattatatacagcaaaaatagamaaaaccacaagaagacatacacaaatgttaaacctagagagaaatttgaatataagtaagtctccgaatgactagtagaacaaaccgaaaaatagatggagacgtttggatcagcatgactagcaaaattgacatatctgtcttttaatataggcagaaacatagataaaaaaggacttgtctcggagcatgatttctgaaaatagtggaatcgagtttgaatctagtaagtacatataaataaatgtcttaaaactcctct

SEQ ID NO: 643276 - DNA, 623 bp, Homo sapiens
aaaaaatgtatatgtagccgtctttaatctaccatgtccattagcagataaatactataagcaaaataacaacaatgaaagaaacatagacttagagtagatactctgatttatttaataaaaatttgaagatagaccaaattactctgataaaaaaaatctgttgctattgaggatgagggttagtgtttggaaaggggcaggagaagtatcactatttttagtaatattctattttcatacatggttataagcaaatacatgtgtttcattaatgaagctatccatatttaatcattgtacttttctgcatgtatgatatgtcaataaatgtcttaaattatatacagcaaaaatagacaaaamcacaagaagacatacacaaatgttaaacctagagagaaatttgaatataagtaagtctccgaatgactagtagaacaaaccgaaaaatagatggagacgtttggatcagcatgactagcaaaattgacatatctgtcttttaatataggcagaaacatagataaaaaaggacttgtctcggagcatgatttctgaaaatagtggaatcgagtttgaatctagtaagtacatataaataaatgtcttaaaactcctct

SEQ ID NO: 643277 - DNA, 566 bp, Homo sapiens
ccttgatccataagctgcagaagggatgctgtcttcgcaggcatgaaaacaacatttattttcttgtacatctccatygggctcttgggtgaccaggtgccttgtcaatgaacaataatattttgaaaggaatctttttttttctgagcagtaggtctcatcagtggccttaatcattcagtaaaccatgctataaacaggtgtgctgtcatctagactttgttatttcatttatagagcacaggcagagtagattgagcataatttttaagtgccctaggatttttggagtggtaaatgagcattaaagtcaccagcctcattagcctctcaaaagagaatcagcctgtcctttgaagcattgaagccaggcattgacttctctctagctatgaaagtcctagatggcatcttcttctaactgaaggctatttagtctacactgaaaatctgttgtttagtgtattcaccttcatcaaacattttagctacatcttctagatatcttgctgcagcttctccatcagcacttgctgcttcaccttgcacttttatgttacggagat

SEQ ID NO: 643278 - DNA, 510 bp, Homo sapiens
aaaaactgacggtctcttaaaaagttaaacttatacctccttttacgacccagctattccactaccaggaatttacccaagaggaactaaaactatcttcacataatgagttgtactctaatgctcactgcagctttattcacaatagccccgagstggaaacaactcaaatgtattttgtcagctgaatgaataaactgcgatatattcatacaatggaataccactctgcaacaaaagggaatgcatacaacttagatgcgcctcaaatcattatgctgagtgaaagaagctggacagagaagagggcatgctatatgattccatttctagaaatgcaaatcatacagtggattcccactaaatggaaatctatagtgaccaaaagtgataaaaagtgactcaccatctacagaaaaaaaagatcaagaattgcctagggatgaatggaaagctgggttgcaaactgaaacagaatctttggtggggtgatagaaattctctctatct

SEQ ID NO: 643279 - DNA, 489 bp, Homo sapiens
cttgggagccaggtgattaaaataaattctggtgctgaccttgctattgtaagattgatttctaacttcttgtagtggcatacatagcctttcattaataacttctacacacctgtgtaatgcaataaggtgccttttctcaacccagtgtgtttccacagttctggaatactcatcacctttgatttytcttactctctttcccttgcctaactccagaaactccaccgctgtccccattttgagtcagatgtcccctctgagttccctcttaatattctgtggatccccctataatgttacttagcacatcgttctattatttgctgctcagttatctgtattcccccaagaccgagctcctcaagggttgcaaatcatgccatatttctttaacttctaactcttccctcacctaatttcactgcctgatatatagtagatacacaataatttttctactgattgcattatattctcatgagtata

SEQ ID NO: 643280 - DNA, 489 bp, Homo sapiens
cttgggagccaggtgattaaaataaattctggtgctgaccttgctattgtaagattgatttctaacttcttgtagtggcatacatagcctttcattaataacttctacacacctgtgtaatgcaataaggtgccttttctcaacccagtgtgtttccacagttctggaatactcatcacctttgatttttcttactctctttcccttgcctaactccagaaactccaccgctgtccccattttgagtcagatgtcccctctgagttccctcttaatattctgtggatccccctataatgttacttagcacatcgttctattatttgctgctcagttatctgtattcccccaagaccgagctcctcaagggttgcaaatcatgccatatttctttaacttctaactcttccctcacctaatttcactgcctgatatatagtagatayacaataatttttctactgattgcattatattctcatgagtata

SEQ ID NO: 643281 - DNA, 550 bp, Homo sapiens
ttttttgctttgtactccaccctccaatttcaaccccagtaactactggtgtctgagacgttttgttttgtatcttccatttgcctaggcaaacagttctgaggttttttatttctaattttagctgctctttcaatgtttgcataactttttataatttatttttccctcacttatatgtattaaatcaatgctttcatcttcttttttgttgtgtgtttctggtgtttttccattatttattaaaacaccctctagtttctttttatctttttttttcttggaatacacttgcatggagttagattttatttattttatttttttgcagtatttgatgtttaaatgatgtgggttttctgggaagattagcttgggcacattttcaaactttttgtttttttaaatcacttgctatctgtgatctactcccacaaaatctaatgtctaatattttggccccgctcaatttcaattttgtactcagtatttggtctctatgtgaactgttttctyttataagagagacttagcttgatattcctaaaat

SEQ ID NO: 643282 - DNA, 577 bp, Homo sapiens
ggctttcaagatggtgccctttaagctgtgcacttcagagaagaaaatgctgtgttctcacatagcagaaggtgaaaggctaaaagaagcaaactctctgttaagcccttttataaaggcattaattcattcatgatgacagagctctcatgacgtaaacacccccaaaaaggccccaccttctaaaactgttgcattggggattaagtttccaagacacgaattttagcattagacatagcattatataattaggaagattagcacttctaatttaggtagatgagttgaaaatacatttttcctaatttgtcaattgtttcctgactttgstcacagtgggctttttttttctatattttttacccagaagttgacatttgtataagaaaaattaaacatctgttgacattttgacttttgtataagaaaatttagcaatatttttctttatggattccaaatatcaaatcataattggaaaaaccgtctccaagtttataaatgaatttacacatattctctatgtgtaaggaaattaaacatatttctactacattcattatttcacttgttt

SEQ ID NO: 643283 - DNA, 553 bp, Homo sapiens
tgagaaataagttcgtttattcctgtagcataaaaatccatgcttcaagattctacgaactcttggaaagcattttctgcatcctgctggttgtggaagcgttttccctgcaaaaagttgttaagatgcttgaagaagtggtagtcagtcggcaagaggtcaggtgaatatggcagatgaggtaaaactttgtagcccaattcattcaacttttaaagtgttggttgtgtgatgtgtagttgggcattgtcgtgaagaatgggcccatttctattaaccagtgctggctgcgagtgttgcagtttttggtgcatctcatcggtttttaagatataatggttttgcctggattcagaaagctgtagtggatcagactggcagtagaccaccaaacagtgaccatgacctttttttggtgcaagtttgactttgggaagtgctttggaasttcttctcggtccaaccactcagctggtcttcaccagttgtcatataaaattcacttttcatcacatgtcacaatctgatcaagaaatggttcgtttttgtgatg

SEQ ID NO: 643284 - DNA, 659 bp, Homo sapiens
ctaattggttatttttatgtcattaaaatattttgcagtaaataactttcttgaccaaatgaagctttaaatgatctcaagtgattgtagactattaaaagaaatatagttcaaatgattttagttctctcttgcttgctttctttcctctttgctaacctctttctctttgcttcttttctgttctccttatatgttaagacaaaggtgatttttttttctttttcgttttagtatctgcagtrctaggctgtaaatatgtacatgtgtgtttataaacatttgtgaataaacatagatgagtgtagaattcagcatttatttcagaacttattttatttggatgatataatattaaaatgtttctaaaaaaacctttgtttacttgtatgcttagcaaacacctgaaagagagctgtcttttaatttgtttctacttaaaatataaatgctgtcattctaaatcattgttgaaaataaaacagaacaaaagctaatactaagcctaggtctaaaaaaacaataaaaataatccaaatcactttccaaatgcctttcatcacaccctgcaaggcactgaaatagagttttctattcctgtcacattcagttgcaggatttaccagaagtggaccttgttccagttagatgaagtcaga

SEQ ID NO: 643285 - DNA, 516 bp, Homo sapiens
tcgcccaggctggagtgcagtggcgcgatctcggcttactgcagcctacctctcttgacagtccactggttaaagcgattctcctgcgtcagcctcccgagtagctgagattacaggcgcccgccaccasgcctggctaacttttgtgtttttagtagagacggattttttagtagagacgcggtttcaccatgttagccagcatggtcttgatctcctgacctcatgatccacccgcctcagcctcccaaagtgctgggattacaggcgtcagccaccgcgcccggcctctgttttgttttatacatgtaatatattcacaagtatctttacgaagtgattttgatactcttttgtcttctgcctagaatctctttgttctgtaataattttttcttagtttatattgatcttattttcctttttaaagcctttccttacatatctattctatgttgcttatcatttgtagttttttttattatttatttatttatttatttatttatttatttt

SEQ ID NO: 643286 - DNA, 516 bp, Homo sapiens
tcgcccaggctggagtgcagtggcgcgatctcggcttactgcagcctacctctcttgacagtccactggttaaagcgattctcctgcgtcagcctcccgagtagctgagattacaggcgcccgccaccacgcctggctaacttttgtgtttttagtagagacggattttttagtagagacgcggtttcaccatgttagccagcatggtcttgatctcctgacctcatgatccacccgcctcagcctcccaaagtgctgggattacaggcgtcagccaccgcgcccggcctctgttttgttttatacatgtaatatattcacaagtatctttacgaagtgattttgatactcttttgtcttctscctagaatctctttgttctgtaataattttttcttagtttatattgatcttattttcctttttaaagcctttccttacatatctattctatgttgcttatcatttgtagttttttttattatttatttatttatttatttatttatttatttt

SEQ ID NO: 643287 - DNA, 343 bp, Homo sapiens
gcacaccctaccttcatctcctccctgagctccagcctgatggtgtcctcctcccagtgccgcatctttggcacrgccccctggttctgataaaaggtgatgggttttcctgcgggaggacagggctcagacgctggggcccctccgacggccctgtagctccccctgccgtgccctggcctcccactcactgatggcgtctgtctcgccagtggtggatgaagcagagtccttttttcaccagctcactcaggtctgccttctccttcaggtggtccataaagctgctctggagacaaaatattgcagtcacatctcggcagcgacctgccctcaggtggca

SEQ ID NO: 643288 - DNA, 343 bp, Homo sapiens
gcacaccctaccttcatctcctccctgagctccagcctgatggtgtcctcctcccagtgccgcatctttggcacagccccctggttctgataaaaggtgatgggttttcctgcgggaggacagggctcagacgctggggcccctccgacggccctgtagctccccctgccgtgccctggcctcccactcactgatggcrtctgtctcgccagtggtggatgaagcagagtccttttttcaccagctcactcaggtctgccttctccttcaggtggtccataaagctgctctggagacaaaatattgcagtcacatctcggcagcgacctgccctcaggtggca

SEQ ID NO: 643289 - DNA, 343 bp, Homo sapiens
gcacaccctaccttcatctcctccctgagctccagcctgatggtgtcctcctcccagtgccgcatctttggcacagccccctggttctgataaaaggtgatgggttttcctgcgggaggacagggctcagacgctggggcccctccgacggccctgtagctccccctgccgtgccctggcctcccactcactgatggcgtctgtctcgccagtggtggatgaagcagagtccttttttcaccagctcactcaggtctgccttctccttcaggtggtccataaagctgctctggagmcaaaatattgcagtcacatctcggcagcgacctgccctcaggtggca

SEQ ID NO: 643290 - DNA, 560 bp, Homo sapiens
gttattgtcaaattctgtagattttcaatttcaaggcatatattttcaagtttgttgttgggtaatagataaaagatgcttatggtaaaaayttattcaaaatgacacaaaagagcatttgtttttatatatcatatatttgtatttcttaccagtacttaagagacgccctattttttaagatattagtttttacttcattagcttattatttcatttccttctcagttttacctctatcctcatgacatgcaatatgcagcacttggtaggtacattccaagtcaacataatgcttggccggttgccattccctgttctctttatataatttctacagtattttttgtaaacattattttttctataatataatctatcttccttttctgtttcctgtatttcttttgttgttgttgttgttgctgttttagcttaatcacataacccaatagggatcaaaaattcttatttcaacagcttctaatcttctatggaactcttcctagacctatggattaacatctacgttcaatattctaatctaccaaagaggaacg

SEQ ID NO: 643291 - DNA, 598 bp, Homo sapiens
taacaaagagatggaaatagttaaaaaaaatcaagcagaaattctggtgttgaaaaatgcaattgacatactgaagaatgcatcgaagtcttagtaacagaattcatcaaagagaagaaagaattagtgagcatgaagctgggctatttgaaaatacacagttagaggagacaaaagaaaaaagaataaaaaacaatgaagcaagcctacaagacctagaaaatagcttcaaaagggcaaatctaagagctattagccttaaagtgagaaagtttatttgaagggttactatcagggaacttcttaaacctagagaatattattaatatccaagtacaagaaggktatagaacaccaagcagatttaatccaaagaagactacctcaaggcatttaataaactcccaaaagtcaaggataaagaaaggatcctaaaaggagcaagagaaaagaaaaaaaacaaacaaacatagaatggagctccaatatgtctggcagcagacttctccatggaaaccttatgggccaggagagagtgccatgacatatttaaagtgctaaaggaaaaaaatattttaccctagaataatatatccag

SEQ ID NO: 643292 - DNA, 598 bp, Homo sapiens
taacaaagagatggaaatagttaaaaaaaatcaagcagaaattctggtgttgaaaaatgcaattgacatactgaagaatgcatcgaagtcttagtaacagaattcatcaaagagaagaaagaattagtgagcatgaagctgggctatttgaaaatacacagttagaggagacaaaagaaaaaagaataaaaaacaatgaagcaagcctacaagacctagaaaatagcttcaaaagggcaaatctaagagctattagccttaaagtgagaaagtttatttgaagggttactatcagggaacttcttaaacctagagaatattattaatatccaagtacaagaaggttatagaacaccaagcagatttaatccaaagaagactacctcaaggcatttaataaactcccaaaagtcaaggataaagaaaggatcctaaaaggagcaagagaaaagaaaaaaaamaaacaaacatagaatggagctccaatatgtctggcagcagacttctccatggaaaccttatgggccaggagagagtgccatgacatatttaaagtgctaaaggaaaaaaatattttaccctagaataatatatccag

SEQ ID NO: 643293 - DNA, 528 bp, Homo sapiens
cacctgccttggcctcccaaagtgctgggattacaggcatgagccactgcatctggccccctgctttcaatacttttgggtatatacacagcagtggaattgctggatcatatgataatacatcagactttttgaggaactaccgtaatgttttccacagtggctgtaccattttacattcccaccagcaatgaacacatgttctaatttcttcacatcctcactgtattagtctgttttcacactgctgaaaaagacataccsaaaactgggtaatttataaaggaaagaggtgtaattggctcacagttccacatgtctggggaggcctcatactcatggcagaagacaaaggaagagcaaagggacatcttaatatggtggctggcaaagagattatttgtgcaggggtactcccttttataaaaccatcagatgttgtgagacttattcgctataatgagaacagcaaaagaaagactcgccctcatgattaaattacctccacggggtccctccaatgacaga

SEQ ID NO: 643294 - DNA, 528 bp, Homo sapiens
cacctgccttggcctcccaaagtgctgggattacaggcatgagccactgcatctggccccctgctttcaatacttttgggtatatacacagcagtggaattgctggatcatatgataatacatcagactttttgaggaactaccgtaatgttttccacagtggctgtaccattttacattcccaccagcaatgaacacatgttctaatttcttcacatcctcactgtattagtctgttttcacactgctgaaaaagacataccgaaaactgggtaatttataaaggaaagaggtgtaattggctcacagttccacatgtctggggaggcctcatactcatggcagaagacaaaggaagagcaaagggacatcttaatatggtggctggcaaagagattatttgtgcaggggtactcccttttataaaaccatcagatgttgtgagacttattcgctataatgagaacagcaaaagaaagactcgccctcatgattaaattacctccackgggtccctccaatgacaga

SEQ ID NO: 643295 - DNA, 520 bp, Homo sapiens
ttctctagttattatttaatcttcacaacagcccttatgaggtggctactgtttttccccccacattttatataaaaggaatttgaggcttagaaagtttatttgtctaaggtcatcagttggtaagtggcatttctgcctgaggaaatctgccagcccakcctctcgcccccctgttggtacctttttcctgacatatgaccccagtgcttttctttataattcctgggtaccccctgctctcatgattcttcaccacacccccacacttcttctccttgagaaatgactggttcagaattttgacttttatcaaaacatatccctttcctcaggatctgcctctaaatctctattagtaatttctggtaaatcatctttattaatgagttaatgtggaatgggctaaccccttcctagtaatatttgttcagtttaacaattgggaccttctgaaaacaatggtttaacctaaaagggtgcccagtggtagaatttcaggcatcatgattatctgaag

SEQ ID NO: 643296 - DNA, 610 bp, Homo sapiens
gcatttaccaactactattcagctcacttgttgactaactcctgctcaatacaggtgcagatcagatagtgccaagaaatgggcagctaccaggtgcaggcactgtactaggcagtacactccagggacaggcagtcaatgagggaatgagggcataggcaaaagtgactgctgcttccacaaagagagtcctgggtactagggcactgcatgaggagaggagctatatgggagggggtgaaagaatacctccagggaataggcgatgaagctcaactccaaaaagagtagsagtcatcgcagggaagagaaggttcaagagtgtttctgcagaggaatcagcatgtgcaaaagacctgaagtggaagatagcacgccacatccatgggcatcagcttgtctgtgattgctagccaaactccaaggctatcagagtttcaatcctggttccaccagttaaaagttgtgtgaccttaggcaaggtatataaaaccagcttttcccttcctcagctcccttgtctgtaaaatgaggatcagtacaggacctttatgcgggctgtttggaaggatccagagagctatcacatagaagcacataactggtatgt

SEQ ID NO: 643297 - DNA, 610 bp, Homo sapiens
gcatttaccaactactattcagctcacttgttgactaactcctgctcaatacaggtgcagatcagatagtgccaagaaatgggcagctaccaggtgcaggcactgtactaggcagtacactccagggacaggcagtcaatgagggaatgagggcataggcaaaagtgactgctgcttccacaaagagagtcctgggtactagggcactgcatgaggagaggagctatatgggagggggtgaaagaatacctccagggaataggcgatgaagctcaactccaaaaagagtaggagtcatcgcagggaagagaaggttcaagagtgtttctgcagaggaatcagcatgtgcaaaagacctgaagtggaagayagcacgccacatccatgggcatcagcttgtctgtgattgctagccaaactccaaggctatcagagtttcaatcctggttccaccagttaaaagttgtgtgaccttaggcaaggtatataaaaccagcttttcccttcctcagctcccttgtctgtaaaatgaggatcagtacaggacctttatgcgggctgtttggaaggatccagagagctatcacatagaagcacataactggtatgt

SEQ ID NO: 643298 - DNA, 601 bp, Homo sapiens
aacctacaaaattagtaacattgtgtccagatttttacacacttaccttattgaagccttatcacaaccccrtcttttaaattacagggataattcccagatttttaaacacttaccttatgcaagtctcataacaatcccatcttttatagatgagcaaactgaggctcagacgagttaaaaacacattcaccatcaaatcataatgagtgatggaactgggattcaaatccagttctctctgacaccaaaggtggtgcaatgtaatgaagaccaagttatatccagcacacggagggatcaaaacatgtggatttcctttctctaccctcttacatgtgaatctcaatggctttcactgcctcagaacaatcctaaactccctcccaggttgccttgcagagtatcccttctttttggggacgattaggaatccacatttttggatcacaggcatctataaagagttgtgctgatcaagaaataaaattgtctaggccataagttactgtgaattgtctagcttctctgcaaaaaataaatgggctattctctttattttttgttattcctctattgacaatagcctagaatcaaccta

SEQ ID NO: 643299 - DNA, 543 bp, Homo sapiens
ccataaaaaaaaaaaaagaaaaggtaaacgacaaatgttttgtcagactaagaaaaaaagagaaaattcacatataatcagagatgaaaaaggatatactatgatagactctagagaaatataaggaaccatgagtaagtactacaaacaattatatgccaataaattgaaaaacttagaagaaatacgtacgctcgtggacacatataccctatcaaaattgaagaaagaagaaatagaaaatgtgaacacaccaatgacaactaatgagattgaaggagcgatttaggctctcagtcaaggaaaatccaaaagacttcacacagtagctcacacctgtaatctcacagtttaggagcccaaggcaggagaatcaccagaggccaggagttcaagattagcctgggcaacacaaygagactccatctctaaaaataaaaataaaaattatccaagtatagtggtgtgtatttgtactcaggaggctgaggcaggaggatcacttaagaccaggagtttgaggctgcagtcagctatgactgc

SEQ ID NO: 643300 - DNA, 593 bp, Homo sapiens
gaacctgaatgtttgtctgtaacataggattccagaacactcccgctgttgtttgaatgtttgtccctcacataggattccagaacactgctgcttggatcagaaagtttgtcccttacacaggattccagaacactgctacgattgtctgaatatttctccctcacataagattccagaacactgytgctggggtttaaatgtttgtctgacacataggattccagaacactgctacggggttctgaaagtttgttcctcacaggtgattccagaacactccttttgtggtctgaatgttggccctgaagcagaattccagaacagtgctgtgtgggtctgaatgattgtcccttacatcgatgccagaacactgctgcaggggtctgaatgtttgtccctcacataggattccagaaaacttctaagagggtctgaatgcttgtccctcacacagaattccagagcactgctatgagggtctgaatgattgcaaatcacataggattccagaacactgctgcgggggtctgaacatttgtcaatcacataggattccagaacactgttgctggggtctacatgcatgtcca

SEQ ID NO: 643301 - DNA, 524 bp, Homo sapiens
ttaaaaattgaataagaaaattgaagttttaacttgactgcgtatgagaaattcatatttcaaacagtttctgaagtaggccatatttctatcatctactacacaaagctcaaagaaaatgtgttactaataatctcatgagtattctctctgattgtttgaatatagtatattcatgtaagtttgtgaaataggcgccttcttcacacacatttatatgacattctttgtatgctgttaaaagcagtgtaagtgaaaacttttgatgtctctttgtactttattgatttaaaagagaaaccccagagctcagggcacaggcagacgtagcctttgtatgtcacagaacatttcaatacattctctccaaacagtgggctgctgtggctagatagatggggaaggagcttctgtttccattgttgttcgtccasttgaaggtagatgtcatcatcaacccccagagaatgacacatcacaaaatgtccaaatgtttattttcctctgggcaccctcaggaattc

SEQ ID NO: 643302 - DNA, 610 bp, Homo sapiens
agttatctttctccatgaactttaactcttcccaccccaatctttttcatctttcctggacatggatgcaaatgctcccttatttgatatacattaaatttcaaaagtaagtcagcaggaaaggaagaaacaagtgaactgaacaaatgcacaaggcatggaaccacagactactcctataaggggaaaagtagaaagttggtgttagaaagaaagggagaaatgcaaactgattcagaaggctgaaaggaatgataggttttccactttgcggacatagaatctgacttgtggttagactgatcactgacctgtgactctgacccagcagatacacaacctggatgtgagcaggggcttgttaccaggatttcatgcaggcttacaatagcataggcattctgagagctcaagcaaaaccttttcctttccccaacaatttaayatctgagcacactgtcaagtggttatctgctagtgatataagaatggaataaagttctcattacgaatttgtctgaactgatttttcccgaaaatcgcacaagagaatttctcaatactaccaagctatatacatgctgtgtataaatagagctcgagtcactta

SEQ ID NO: 643303 - DNA, 634 bp, Homo sapiens
aaatccaaatacagatgaaaggtcctggttcatatattaagtgctgtacaactgtaagtagtagcagtagtgttattgttgttcttaagaagaaaaaaagaggaaggagaagagttttaatatggctttcagacaacttttgcctaatagctgtctctccctagctcttggcaaaaattgaggagaaaatattcaaagttgaggscagtaggagtagatcttctgggttaatagaaagatcaatatgttttagctaacagatacatcaatggtaacaacaataacttactgtaaaaaaaaaaataaagatcctatctatcttggtcatcccccttatagacagaagcagatcatagaactacctgtcagcaaagccaggacttttctttaaaagaagctctatctcctatttacttttggaacaagtatttgttgaaacctcagaattctgtactttaaactatggaagagatgctcttggtttggaagactttgagatcaagacttgccactgaaaaccattatatcatcatgtcaaagaacactccccaattgggcaagtaacaaataataatgtccttcgccaggacagagtatagaggtaaggttttgcttctaacactacttgttatta

SEQ ID NO: 643304 - DNA, 634 bp, Homo sapiens
aaatccaaatacagatgaaaggtcctggttcatatattaagtgctgtacaactgtaagtagtagcagtagtgttattgttgttcttaagaagaaaaaaagaggaaggagaagagttttaatatggctttcagacaacttttgcctaatagctgtctctccctagctcttggcaaaaattgaggagaaaatattcaaagttgagggcagtaggagtagatcttctgggttaatagaaagatcaatatgttttagctaacagatacatcaatggtaacaacaataacttactgtaaaaaaaaaaataaagatcctatctatcttggtcatcccccttatagacagaagcagatcatagaactacctgtcagcaaagccaggacttttctttaaaagaagctctatctcctatttacttttggaacaagtatttgttgaaacctcagaattctgtactttaaactatggaagagatgctcttggtttggaagactttgagatcaagacttgccactgaaaaccattatatcatcatgtcaaagaacactccccaatygggcaagtaacaaataataatgtccttcgccaggacagagtatagaggtaaggttttgcttctaacactacttgttatta

SEQ ID NO: 643305 - DNA, 497 bp, Homo sapiens
ctgggggaggaaaaaatatgcagtgtagcatagatggttttacttgtccactcagacacatgctcatacttattagatggatgtatcagatgcttcaaaagtcctgatgtgtagtagcacaaaagctgcttgtaaaaaggaagttgcaaaatgataaaaatttctgcagcagttcaggctcctgatgacaaagctggttctgataagtagttcttttgacatgcacagcagctttcactgttaagtcctgtgttccagcggtttcatttagaccataggaagttgaaagcaaagtttaaatgttctctgctgacaaaatgtggtatatatccatcaatggacttctactcagtaatgaaaggaacaaactaccaaaacctgttatatgtcatggaccaacctcaaaaacmttagctaagtaaaaagccagacatgtgaccacatattgtataattctgttgatttgaaatgtccaaaaaaggcaagttgatagagac

SEQ ID NO: 643306 - DNA, 605 bp, Homo sapiens
gatctacccggtgtcatttgccttcagactacaaaaatttacttgttatgcagatatacagaacaagaaataagtgttttttttwatgttcatttttaaataatagttttacttgataaagaattctgggcttacagtttctttcagcactttggtgatgttaattccatttcctccattgtgtctggtgagaagataaatatcactgatattgttttcttgtatgtaatgtgtcttttccttcaactattttcaagattttcttttttctttgaattttttttttttactgggagttcactgagagccttgaatctgtaagcttatattcttcactgaattggaaacatttcaaccttatttcttaatttttttgctttgcccttatggaactccaattatgtgtacaaatttatgtatgtatgtatgtatttatttatttatttttgagacggagtcttgctctgtcgccaggctggagtggagtggcacgatctcggctcactgcagcctccgcctccggggttcaagctattcccctgcctcagcctcctgagtagctgagacgacaggcacgcaccaccacgcctggctaatattttgta

SEQ ID NO: 643307 - DNA, 593 bp, Homo sapiens
gtcatttgccttcagactacaaaaatttacttgttatgcagatatacagaacaagaaataagtgttttttttaatgttcatttttaaataatagttttacttgataaagaattctgggcttacagtttctttcagcactttggtgatgttaattccatttcctccattgtgtctggtgagaagataaatatcactgatattgttttcttgtatgtaatgtgtcttttccttcaactattttcaagattttcttttttctttgaattttttttttttactgggagttcactgagagccttgaatctgtaagcttatattcttcactgaattggaaacatttcaaccttatttcttaatttttttgctttgcccttatggaactccaattatgtgtayaaatttatgtatgtatgtatgtatttatttatttatttttgagacggagtcttgctctgtcgccaggctggagtggagtggcacgatctcggctcactgcagcctccgcctccggggttcaagctattcccctgcctcagcctcctgagtagctgagacgacaggcacgcaccaccacgcctggctaatattttgta

SEQ ID NO: 643308 - DNA, 558 bp, Homo sapiens
actgtaattatgtaattcttcctcgttatcttttctaattgttctcagagctgtttcctaaactgattggaaacaattgcagacagggaatggagtgggaggtaggcgaggacctggaggctggccagagcttggccgtctgatggaggcagtgtcttggcagtggtctcaaggaccgggacagaggggaccaccgggagccaggctgccccatacggttcctgtgtctgagtagcaggggtagcaagaaggaaacactcactgaggtgttggaagcttcggtttaatcaccccaaaataataaatctcccgcctgctctcgggccctagagacccagctgttttccctttctctgctgacgctggtagagctccctggggattgcaccaggcgccaacagggagcaaggtcctmgcctcctggcatcggattgtttgtgctttcttaacagaacaaaaattgcaactcttgagccatccatcacccccagaaagctagggagagccagatggggagagcatagggacttcccactgatttcagcctgagtgggtaga

SEQ ID NO: 643309 - DNA, 549 bp, Homo sapiens
gacaaaatcttaacactgactaatcagtgttcaggcttgatatatatcatctactagaactccaaggccatatcaatggaaatgtaaaaggtactaaacaaatggtccattgaaggcccaagtctcagtcctaagagatcagacagctttctgcaattaagcataaattttagaaaatcaatgattagctaacacttatttatcatctatcataaggcagccactagctatgtgtgtttcctatgttcttttatttaagcttttcaaaaaaatatgcaaggtaggattccartcaccaataagtatctaaatagcaacagagaaaatacatattaaattttgagactacagtgtcaagctctcaaacctaggaggacattttgagctgggtcaaatattttttcttgttggcaatgagataataattggtggtaacagtgggtagtaggttttaactatattgttaattataaccttggcctgtgggttggattctccttgggcagcctaccataacatctcattttccagctttgtcaaataggtgtg

SEQ ID NO: 643310 - DNA, 647 bp, Homo sapiens
aattggtgtatacctctggttaatagctcttctatacagtattattttatgtttcataattttcactcctaataatgggagcacaaggtatcattgcatctaacccttttggcactgacattaaaaagccacccattacttttgtttgtttaagtaattgaaagttctatgttatckgagaaatacaaataatttgtacaatgtcttgtactaatttgtgcatagtatcaaatgacatttcaagctttttttcatttttgtacttgatttatgtaaaatcagaaaatgtaccaggctgaagtttctcattaatttttctgtgttctcctacagatcagaaaattaattcttattaaacttaaaaagtaggttaacaaatttataacaacattttcgcctctctattctggctgttttttttcttgtttcttataaatatctaaacgtattaataacagactagtacacatttcctgcttaagggagagttagaaaatactaatgacatactatgaagaagtaggaacaacttcatatatccagcaaaaaaataataataaagtaactgttccaaagccagaatattttatgtgtaggatgaccaaatcatttataattcaaagcaggacactcttgagtgtgaaagt

SEQ ID NO: 643311 - DNA, 589 bp, Homo sapiens
tcctacctttaatctgcctttatctgcccacggggtatcttttttttctctaattcacctgcctaaaatgaactccttttgatttcccaccaaagctcccttcacaaggccttgtgccagtactgaaagtgatactactactgctcataaaagcaacttatggctctattaaaaagaaaaaagatgaatattttaggtaagtctagaccaaattagggtattatgttattattaaaataaattaaaatttaattctgagacaacwgggtctcagcattcttcatttacttgaattagaaaaaaaaaatctgtaaaagcttataagatgatctgaaaagctatgttctctgaaactgggcaatacaagagcagagggtttgttgccagtaaagttagtgattaatgtcagagaaaacggtctttgcctatatgaaaagagatttcatttacatagaaggaaatctgcaagttaaagatttaaaaatacaaaacccatgtttaaaaaaaaccttgcaatacccatgtgcctgttctgagtaaggctttcctggagccaggaggccatatttaaatttcagttcttcagaaa

SEQ ID NO: 643312 - DNA, 541 bp, Homo sapiens
tatgatatgaatcaaccatattgattcctattctaaggaatcaactattccaagaaatgaataccactgataagtagttcatttaggaaataaagagtatacttactcctgtccttccctgagcrgggaagtgagacagggaagggaagaaatcaataaagggtgtattattgagtcatctgttacagagggtggttgaggctaagtcccactggagaaatacacactgcagagttattccagctgaggagcaagggagctggggcatttatacaccaactcccatcagtcatatttgcagctgcttccaaatgttaatattctagcatgtcttgcctgccaaccacacaagcacaaaaagcattcaaggtgctggagaaacccctcagacaaccagatgaacattcagaatttaactctgtgggtggggcacatatggcatctgttacagatctaccaaactgaccaaaaaggaaaggactgacaacattaagtgttggtgtggatttggagcagcaggaatgctcaaactgtactgggg

SEQ ID NO: 643313 - DNA, 658 bp, Homo sapiens
cagtttagaatagctgctataaacattcacatataggtctttgtatggacatakgctttcattctgttgagtaaatacctatgagtgaaattgctgggtcaaaaattaagtgtaggtttaactttattttttttaaaaaagaaactgtttcccaaagaggctgtaccattttgcattcccaccagctatgtatgaaagttcagttgcttcacattctcaccaacacttgttattgtcggttggttttttgtttgttttgttttgttttgtttcttagagtctcactctgttgcccagactggagtgcagtggtgtagtcatagctcactgcagccttgaactcctgaactcaagtgatcctcccatctcagcctcccaagtagctgagactataaggtttatgccaccatacttggctaattttttatttttactttttgtgtagagacagggtcttgctatattgcctaggctagtcttgaactcctggcctcaagtgattctcccacctagtagctaggattactggcatgagctaccatgcctagccatggaattgtcagtctttctactttcagatattctagtgggtttgagtgacatttcattgtggtttgtatttgcatctctctgataaggaatgatacagcacatcttt

SEQ ID NO: 643314 - DNA, 600 bp, Homo sapiens
cagctggttgccaggcaacccagagagagcccgtgggattattgtctccacgtgcataaacaccttatggtaagacttgccctcctagaggttgatttgatgcacaaccacacaagttatctacagaagtgcaaagtcaaatgcacagggccatagactcctatgttcccccatagacagacccactatgtgcagatgagcacggtccacaggatcacatttgcattcccagaggtcggcatccacatgcccagacaggtggatctgcactcacactggcatgagcacagtcacacatacacatrggaggcacacatcatcactcacaccctttcatacacagatgcacactgtgtgcacagcaacagatacacattcagtgtcatgtcccactgcccaaacaatctcagtgcagccagacccacaactgccctcacacagcctctcctgcccccattaatgcacagacacacacaaacacacacacatgcacaaacaccactcacttcttcagacacgactgtgtcttcccaacacactgctgtgttgggggcctcagaccccaccagggtagtggaacaggactcaagaaaggaccca

SEQ ID NO: 643315 - DNA, 600 bp, Homo sapiens
tgactccttgtatatctgactagtcctcttctctctggctcttcagatggaagtgcagtgttccggggctgcttccgcaggcccgacaacctttccctggccttacccgtgacagctgccatgctgaacatgtctgtggacaaatgcgtggacttctgcactgagaaggtgagcacaaggtggggcccatggaactcagggggagggaaccatgcagcagagctgcaggaaccacatgcttggctggagaagcaacagctcagtcgggatagatgtagtcgttgactgggatctatgacgtgggagagggatgagaccatttcacgtggatctaaggggctgcagctacacagaatagattttcctgcctttraggaagtgagtttaatactgacgaatacttaggaatgagggttattagtccattttcatactgatcctgctatgaagaaatatcccagattgggtaattcatttgaaaaaaagagatttaatggactcacagtttcacatggctgaggaggcctctcaatcatggtggaaggcaaaggaaaagcaaaggcacgtcttacatggcagcaggcaagagagcgtgtgtac

SEQ ID NO: 643316 - DNA, 458 bp, Homo sapiens
ttggcctcccaaaatgctaggattacgggtgtgagctaccgcgcccggcctcccatgacttttttattcacatttgctcaaggcagaaactgtccaagcatcagtttctacatctgtgaaatgggaatcataccacctacctctcagaattgctgttagtactagacgagattctgcaggtatagccttgctttgtgaatgatgaattgtgtaactaacataggatgttttctgtagtgatgcagcaaggtcgtcccagcaatgcccttggcagagcacgaagtcattcagaattttcccctttaaaccttaatycttggtcacagtgtgcctcttcctattccctcctctaccaccttccgaccccactgccttctccacccagtaaagacaatcatagagtgcttattcctttaaaaataaaatagttatgggtcagaaaaatcctccaagaattc

SEQ ID NO: 643317 - DNA, 594 bp, Homo sapiens
cagttttggctatcacaactcaggagatgacactcctggcatctagtgggcagagttcagagatgctgctaaacatcctaaaacgcacaggacagcatgtctatgrcaagaatcacttgacccaaaataccaatggttccaagttgagcaatcctgctttagatgaaaaacaagccacctatggggttgagcctcaggggaagtggaacgaggtgggaagagagcttggggatgaaaagagaccactcttttgggtcatcaacgatagccatatccactttagtgagaatcagtaagggagccctttctcctaagcttatgaatctaggtcttgggttattattttctttttaatagggacttcatgaatggggagtgtaattaatgtcaagtaattgtcaacacacattttcagtgtttcattgaccctgaagtcaccaaagcctccatccagttgaccgttaacaataatgccacttccactgggggaaggtccacctccactccactgacaacagcagtgcgctgggcacacttttgatgttgaagctagatttcagggagcgcatttcagcttcttcagaagagtaactg

SEQ ID NO: 643318 - DNA, 611 bp, Homo sapiens
gagctaggctttgaaaaagacataggatgtcgactgctttagaagaaaggggttggggaaggcatttcaggcaggataaatatcacttgcaaaagtgtaggtatatgaaaactatcggcttgttggagagacagctggaggagtagaaactgaagacagaaaagcaggtggggcaaagccttgaatgcmgagctaaagaactgggggcctttcatctgagagccatagggagtcactgaaaaagtttgagctgaggacagtcatcatataagctgttcttgaggaactggctaggaagcaatgccctgtgatggcaagggtcagagagtgcatatgggagcatttcagcttggagaactgtttggaaactgatccttataaattgctggggaggagaaaagagtcctagagggctgtgatcattgacttaaaatgttcaaaaagctccaagtgggtgggtgagtgagtgggaatcatgggtattctaagagagcaaaagtgggttcaaagatagtgatggctgggaggtatatttgttccagcaaacagaacttcctgacaatgatagcaactatattcattttcttttgctggcctaacaaattaccata

SEQ ID NO: 643319 - DNA, 663 bp, Homo sapiens
aatccccctgctgtgtgttctcatagcagcctgggcttttcttcaatagcatttcccacaattatgattaaggaattattcctatccaggcgaagagaaaaaaacagcttggaaaagacccacataaataccatatgtcaacgcagcacagaacggaggtgccgttacaagacaccgtggaaacgatgggctactcaaacaaaggtattgggaccaatgactttccttagagaagaaaaaaattagattagacccccatctcacgctacacacaagaagaagttccaaatggatgaatgacctaaacatgaaactgaaacacaaacttcaacattattagaagaaaagagaggagagtatctttacattatcaggtcttaatcaaggcaagaaaatcgtaatcataaaagaaaasatcaatttgaccataacaaaattttaaactgtacaacaaaaagcccaagaaatataccccatgataagcaatacacccagaagaggcatttgcaacttatacaacaggtaaagaatcagtccaaaaatctatcaggaacacacacagacacacacacacacacagacaagcaatccaatagaaaaaaataataggtaaagaatttgaacaggtcttttactgaataggagacccaaatattcagaaaa

SEQ ID NO: 643320 - DNA, 526 bp, Homo sapiens
agcgcagctgccatgttgtgagaagcccaagctacaagaagagcccacatgtaggtttcagttgagcctagcattccaggtatcccagcccaggcaccaaagagatggttaagaggtgggtggattacctgaggtcagtagttcaagaccagcttgaycaacatgtaggtttcagtgagcctagcattcagggtatgccagcccaggcaccaaagagatggttaagaggtgggtggattacctgaggtcagtagttcaagaccggcttggccaacatggttaaaccctgtctgtacttaaaatacaaaaaaaaactaggcaggcatggtggggggctcctataataccagcttcttgggaggctgaggcaggaaaattgcttgaacccaggaggcagaggttgcagtgagcctagatcgtgccattgcactccagcctgggtgacagagcaagactccgaaaaaaaaaaaaaaaaaaaaaagaagcttccagatgctcccagctcccactgttcaagtcactgcta

SEQ ID NO: 643321 - DNA, 610 bp, Homo sapiens
cccagtatacccacataagcatatgagagtcccagaaaaaggactctaagaggaggaaaagttatttgaagaaataatggctgaagacttcacaaatttgatgaatgaattaatctacacatacaggaagctccattaactgcagccagaaaaagctgtataagaaagactacagacatagtgcagtggctcatgcctgtaatcctagcactttgggaggctgaggtaggaggatcatttgagcccaggagttcaagactagcctgggcaacatagtaagacccccatctctaaaaaaattaaaaatgaaaaataaaaattagccagacatggaggcatgtgcctgtagtcccagctactcaggaggctcaagtgggtagatcacttgacccccagaattggagactgcagtgagccaggattgcrccattgtactccagactgggcaacagagagagattctgtctcagaaaaaaaaaaaaggaaggaaagaaggaagactacttattagacattccatttatatgaaatatctataacagtcaaatttatatataaagaaagcagatcagtgtctgcacgggactgggtgtggaagcagaaaatgact

SEQ ID NO: 643322 - DNA, 519 bp, Homo sapiens
actggggggcagattacatatgttcttatataaacccctgtaagacctttggctttttacaaagcatgaaatggggagacactgtaggttttgagcaaaggagtgacatgatatggcacagtttatcattagttctctgtctactataaaggaaagagagtaggggcaggagaatgaggcaagcatgaagaaaagaccagttaaggagatttttttcagcaatctggggggtaaatgatagtgccttagacaacaatagtagcagtgaaggtgaagagacattgtcaggttctatgcaaatactctagtcaatgccttttaaatgattaaattatcaagtcaaaccactggagtattatttaaaaatagataatagaaagcaccaagggagtaaaatatctcccwgtcttaaccatgccatatttttattcttgagcaatttagtaataatgatatctttagtaaagatgtttaggttctgagatcatattggaaaagaatcctaattttcattttgca

SEQ ID NO: 643323 - DNA, 516 bp, Homo sapiens
gaccacccaactcaaagtactaacactctatctagtccttttcttgtttgtttttcatgtttattttatttcccaccactagaatctaagctttttgagagccggcactttgtccatctgggtcactgaatcccaatgagttattcacagatgtttttagtacatagtaggtgaaatgcatagataatatttcaactaagaaagtgaacagaagaaagttggtcattgacttattactagtagctcactactctctatgtatgaagacatcacttactgatggttatgaagcagatgctcaataatttttttttaataaacaggagggcaaggagccaatgtcgtttgtagtggagggtagtcatggacactgagagtatgttttagacacaatttatcartggccagcctcaggctgagataaaatataacagagtttgccaaggtctttcatgcccaggcagtcagtgctcacatgttccctgtaactgcctgggtacctttccctgagtcatc

SEQ ID NO: 643324 - DNA, 665 bp, Homo sapiens
ctaggtcattatatccctggatatttgcatctagctgataggggagggaagcaagggcatggagaattatgtaggagtttgttaagaggcaggcccaccttccattggccagaactccatcacacgaccctcacttaactgcaagsgaggctgggaaatgtagtctatatgtgtacctgggaaaagaggagaaccaaggctactgtgagccctatggcacccactgccatgaacactttcaaataatcctcgtgacacctaataagagaagcagcatttttacccacacttgacataagggaaaacaaggtcagagagattatgttgcctgcccaagaccacagggctagtggaaggcagagctggagttcgaacccaggtctacctgattctaagacttaaacaggaagcacacaagtctgggcacaagtctttactatgtgccatgatgatgcttggtccacacttttgcatctcttttcagtgctcacataaaccccatgagctcagcagtgtgtccacactttacagatgtgcaaaccgagactccaagagaggaaatggctgtgtgtggtcacaaagctggccggtatgaggcagacccagatcacaccgttatgcagcacggcaagcagcaggtagggcctggcctgcagggtgagtgg

SEQ ID NO: 643325 - DNA, 561 bp, Homo sapiens
aggaactcaggagttgcttagctgagcaattctggctcaggatctttcaggaggtggcagtcaaaatatcagccagggttgcggtcctctgaaggttggatctgggggattggcttccaccatgggacactctcatggtggacaaggtgatgctagctgatggmgggaggcctcagttcctcataagtggacttctcactagggttgcttgagcgtcctcaaaatatggcatctggcttacctcagagaaaatctcttagtccattttgtgttgctataaaggaataaccgaggctgggtaatttataaacaaaagatgattttttggcacacagctttgaaggctgcacaagaagcatggtgcagtatccactcagctgctggtgagggctttgatgttacatcaaaacatggcagagaaggtcaaagggaaagtgggaacgtgcaaagagaacccaaacccaaggagcatcctggctttaaaaatacccactctcttataaatgaatccattcccaagagaactaatccagtctcaccagagcataaactcagtcacca

SEQ ID NO: 643326 - DNA, 561 bp, Homo sapiens
aggaactcaggagttgcttagctgagcaattctggctcaggatctttcaggaggtggcagtcaaaatatcagccagggttgcggtcctctgaaggttggatctgggggattggcttccaccatgggacactctcatggtggacaaggtgatgctagctgatggcgggaggcctcagttcctcataagtggacttctcactagggttgcttgagcgtcctcaaaatatggcatctggcttacctcagagaaaatctcttagtccattttgtgttgctataaaggaataaccgaggctgggtaatttataaacaaaagatgattttttggcacacagctttgaaggctgcacaagaagcatggtgcagtatccactcagctgctggtgagggctttgatgttacatcaaaacatggcagagaaggtcaaagggaaagtgggaacgtgcaaagagaacccaaacccaaggrgcatcctggctttaaaaatacccactctcttataaatgaatccattcccaagagaactaatccagtctcaccagagcataaactcagtcacca

SEQ ID NO: 643327 - DNA, 329 bp, Homo sapiens
agcttaaatgtcattaggttatttttttagaacaagtataattgagtcaaagaggtctgggaaccaagaaggttgacgtttggtaaatacgcacctcaagatgaaagagaacctgcacacttctctttcctcttgaggtgcatatttaccaaagcgtgcaataagctttgcacagcagttagtctacttgcagaggggatagagaaggccaactcttcattgaacagaggatggtaaagagaggttctactgtaattaccaatatttgctgagcttctactacataycagacagtgtgctaagtgtctgatagaacaacatcatgatac

SEQ ID NO: 643328 - DNA, 655 bp, Homo sapiens
tgacctttttggacaaaagcttgcgtggtaaaaatttaaagattagaaagctcactctgattaaaaccataagtctgtaactccatcccagggcagggaatggctaccttgttcgggttagattaccagtgcccaccaaataacaaatactcatcgaacattaagtcacctagaaatgccagatctttcatttatattatttcatctgccagtgacccaagaagccatctcttatagcccccagtttgcagaggctgaacctcagagagatgragttcttactaaaggtcatagagttattagcaagtaacagagtcagagaaagtctattcaaggccatgagcgataggccaaatcatggccctccaaaaatgtctgcatcctcatccaggcaacatgtgcatacactaggtcatatggcgaaagagattttgcagatatgattaagtcaaggatcttaaaatggggcaattaccctggattatccccatgaaattgcaagggtccatcaaaaagtcagagaaggaggtgtgaccataaaaccagagagagaggtgaggatgctgcgctgctggccttgaaggtggaggacggggccacaagcagaggcatgcaggctgcctctagaaactggaaaaggcaaggaatggattct

SEQ ID NO: 643329 - DNA, 655 bp, Homo sapiens
tgacctttttggacaaaagcttgcgtggtaaaaatttaaagattagaaagctcactctgattaaaaccataagtctgtaactccatcccagggcagggaatggctaccttgttcgggttagattaccagtgcccaccaaataacaaatactcatcgaacattaagtcacctagaaatgccagatctttcatttatattatttcatctgccagtgacccaagaagccatctcttatagcccccagtttgcagaggctgaacctcagagagatggagttcttactaaaggtcatagagttattagcaagtaacagagtcagagaaagtctattcaaggccatgagygataggccaaatcatggccctccaaaaatgtctgcatcctcatccaggcaacatgtgcatacactaggtcatatggcgaaagagattttgcagatatgattaagtcaaggatcttaaaatggggcaattaccctggattatccccatgaaattgcaagggtccatcaaaaagtcagagaaggaggtgtgaccataaaaccagagagagaggtgaggatgctgcgctgctggccttgaaggtggaggacggggccacaagcagaggcatgcaggctgcctctagaaactggaaaaggcaaggaatggattct

SEQ ID NO: 643330 - DNA, 655 bp, Homo sapiens
tgacctttttggacaaaagcttgcgtggtaaaaatttaaagattagaaagctcactctgattaaaaccataagtctgtaactccatcccagggcagggaatggctaccttgttcgggttagattaccagtgcccaccaaataacaaatactcatcgaacattaagtcacctagaaatgccagatctttcatttatattatttcatctgccagtgacccaagaagccatctcttatagcccccagtttgcagaggctgaacctcagagagatggagttcttactaaaggtcatagagttattagcaagtaacagagtcagagaaagtctattcaaggccatgagcgataggccaaatcatggccctccaaaaatgtctgcatcctcatccaggcaacatgtgcatacactaggtcatatggcgaaagagattttgcagatrtgattaagtcaaggatcttaaaatggggcaattaccctggattatccccatgaaattgcaagggtccatcaaaaagtcagagaaggaggtgtgaccataaaaccagagagagaggtgaggatgctgcgctgctggccttgaaggtggaggacggggccacaagcagaggcatgcaggctgcctctagaaactggaaaaggcaaggaatggattct

SEQ ID NO: 643331 - DNA, 530 bp, Homo sapiens
aagtgattgtattagaggagctatgtagttatcgtgaaaaaatatatacagttgattctcatgattagcagtagttctataaagatgctgcaaacatgaattagtgaatactgaatcattgctgctagtggaaatgctgggtccagtttcttcaagcctccggtcacaacattttttatcaactgattaatccataaccttgtttatgtgtttctgttaatgacaccttagttaatatatattgttgattcattaacaatgaactcatggccaacagcactggaactcatgcctgaacaaagctaatctaacacatatatttkctctgtaaggcagttgggaatactagataacacttcagcactataattaggcaccaacaaacagcacaaaaatgtgaaaatgtcatactaaataggctggaaggagcccacttgcttatagtactagagaaggcagtgcatcacttgttcgacctcagctaggaacactcacatgtcacacaactgaaatttgttgccactgcttgt

SEQ ID NO: 643332 - DNA, 601 bp, Homo sapiens
tcccacaccgaggagggccactccacaacccagggctggtgaagaggctcaacaatagtgtggctatggacactctgtaaacctgaaagctccacagcagtaggggttcctagtgctaccgttattcctgcaagccttaggccagggttggcaaatagtaccatgcttcctctgctcctcacatatctatggcagacattactaatcaacccagcactctccccattgccttttgactagtgatgtctktgggagagtgggagggagacaggaatattacaaggaaagctgcttgccattgtagccttgtacaaattttatagctcaggatgccaatacaaggctccaaataaattcttaatgcccactcctggaccaatcagttatgattggggatggggcaggaggtaaaatatatagaaagatagtagctaccactcaaactacatatttaccagaaggcagcatgtttatctgctcaagatgttctgtttttagcctccagaaaagccacgtccctaggttctgagggtagtaccaagtccatgttagagatgagcaaagaagcccagataggttaagtggagtggccaaaataacc

SEQ ID NO: 643333 - DNA, 601 bp, Homo sapiens
tcccacaccgaggagggccactccacaacccagggctggtgaagaggctcaacaatagtgtggctatggacactctgtaaacctgaaagctccacagcagtaggggttcctagtgctaccgttattcctgcaagccttaggccagggttggcaaatagtaccatgcttcctctgctcctcacatatctatggcagacattactaatcaacccagcactctccccattgccttttgactagtgatgtctttgggagagtgggagggagacaggaatattacaaggaaagctgcttgccattgtagccttgtacaaattttatagctcaggatgccaatacaaggctccaaataaattcttaatgcccactcctggaccaatcagttatgattggggatggggcaggaggtaaaatmtatagaaagatagtagctaccactcaaactacatatttaccagaaggcagcatgtttatctgctcaagatgttctgtttttagcctccagaaaagccacgtccctaggttctgagggtagtaccaagtccatgttagagatgagcaaagaagcccagataggttaagtggagtggccaaaataacc

SEQ ID NO: 643334 - DNA, 604 bp, Homo sapiens
aagcttttattgctgcaggaggctaacagagaggcttgcaattcaacatcttgatcatataaagttaaattaattgtaatgtattagttaacaaccaaccaaccaattggtggagttaaatatctgttgtaacttaatatagtccctgtttaatcccctaagggaaaatttctctttatcttcagaagttgcttagtaggcacagttaagttttacagcatcaggaaaccagtggtagcttggtaacctaaaggctatctctctaggaaaaacagaactcagatgatctaaaaggcatctgaaagatgaccaagagccattatgaaaaaactcctggtttttatttttgtattttttccacatttacttccacataaataatattttctccagttcttaattctcattatttccacaccaatcattcctaatatttggcttatttaataattttstatttgttattaaacagaactaatgatattataactgatgtcttcttgaatatgaagaaacagtaatgtacatcacttgatgtttttaggagtttacttaacggtgtacacaggaaatgtcaggctgttaatgtttctaaaaagtgggg

SEQ ID NO: 643335 - DNA, 593 bp, Homo sapiens
gtttgttttttgcatgttaatttaagtccttcatagattctggaaattgaacctttgttatatgcacaaatgcttcctagaattttatatctagagcttgtgagaaagaacatctttcatctctggggacagaaatattagagtataagggcaaaattgccatatggtcatgatctccttctggtgggtacaaaaaggggaaaaaaatatagagtaggaaaccgaatagaaaacgcagaaagagagagagaactctgatttggtttaaggcccaagtgtagctcttccaccatccttttgtgagacaatatatttctccttttaacttaaccttgtttgagatggtttctgttacttgcaaccaaaagtattgaccaataactacatactccccaaatagaaaacctttgaaatagaaaagattacaaagcaaatgtctttatgtgagaataacaaaaatatgcctatgtgctcacttgaaaattrtatttaccaggtttataaattttgttttgttttaatctctctaattcacttagacttggatatttaaccagaccactcagtgtttaattaatgatgacttaggttgc

SEQ ID NO: 643336 - DNA, 562 bp, Homo sapiens
tttcctttgttcacttggttaaagtgatgtctgccagttttctctgcttgaatgttaatatatttatgtatttgaaattaatacacgattttaggaggaggagatactttgagattaggagactgtcctgttgctcttcaaactttcagccagtggttttatttaataataatctttgaatgaatgttgcctgaataacagttattgttaggtggttgcaaaatgctgagtttttccccctaattttattactccttactcatttatttagtattcttctgtaggaaaagctttcttcttcctctcatttctcctttctgcctttctaatccrtatgggataacacatggttatttttcttcactagattataatctcttactatccttattcatactgatgttcaaattgtcccaggtttggctgtgggagccccttcaggttgtctcccatgtcttttgtaaatggtttcattcattatttttggagttcttgcttattttttggtattagaaaatgttcatcttagactttccctgttctagccctagaataagctgat

SEQ ID NO: 643337 - DNA, 598 bp, Homo sapiens
actgctgctttcttgatgtttttagacatactctttctccttcagaaatgccaaaggtgaaaaatactatttcactgctataatttgtcacccttgctgcctgagcaagacgtgcatagacagtttagtaattaagcttttcaacactgcatcataaagttttattctggcaaaggctatatttatcagctaacaagtattaaatcaccccactgctcaagccgtttctcacttgaatacgctcctttcaaaacagaacagctttccttggctggcttgattaataaaagttcttgtttggaaatactgtgatgatgtgtggccccgtggggctaacatacatacaccttggccactgttctacctggtgctgactcccatctcccaggggagtttgatatcttagccttgtgtctctcagagcatcctggccagctgaattttatggccrtctgggatggcttccaggaggagatatttctaccatttcatttctaatggggaagaattgaaagaaaatctaaatgtaaaataagttttcaaaataattaaaatagcaaagtaacaatgatctacatatcaagtagggtttttcctc

SEQ ID NO: 643338 - DNA, 640 bp, Homo sapiens
ttgtgctgttacaaatagttatgatacaaatatttttataagtacgtatttggaataaatccttgagtgcttttctatgttgattgtccagaagtgcaatttcctggtcagaggacagacatttaaaaaccttgaataagtattttcagattgctctccagtaaggctgtactcaagattggggtaccttttaataaattcaacaaaacatgtctgactgaacatccttcatcatccttgacaatgtaacaatgattcaccacaggataaagttcttctgtggatcaaaaaaaccccacctagaacaagaggtctgacatttggctttttcaggcagtgaaacctgagagaagcagagaaggaagttctcagctcacctgcctgttttcatgactgattgtctgtcaactgtcatgattttcttactgaggcaacctgccttttctttgagaagcattttgtgaaggctcttgtttgaaagacatccacattttaattggctggtcttctacatcattatgtyacatctctaactgaaaaatgacattaaaaaacaaaaacctattaccctgaaaacacctccagtctggagattagttcttacccctgcatagcttatgatagctatgatttccttagg

SEQ ID NO: 643339 - DNA, 615 bp, Homo sapiens
tgctgcataacaaattatctaaaatttagcagtttaaaacaacaagcatttgttatctcacagtttctgtaggtcagaaatctgggggtagttattggcaggattcagctcctcaagggctgttggactggcagcctaagctcytcaatgaccattcactggagactgcctcagttcctccctgtgagcctttccatagggcagctcataacatggcagccagcttccaacagagaagcaagagagcaagagaggggtaggtagcaagatggaaaccatagtcttttggttacctaatcatggaaggaatataccatcacatgtgccacatgtgaagcaagttgccaagcctggtccacactcaaggggaactgattccacaaggtgtaaataacagcaggcggggatcactggaggtcattttattggttctttcaacctagcaagctggagatagtgaggaattgcagtaggtggttcctgttggcaaggagcgaggggaatggcatgaaaatgaagacagaattagaattgccaggacttgcaaacagattggattgggaggatgattggaagaaaggagtcaagcctggctgattgggatgattgccgagg

SEQ ID NO: 643340 - DNA, 603 bp, Homo sapiens
aatattttgaatgatgaaaatagcaagtagagaagtgtatctacagatttcgtatctatactgtggttttcttattttgcaatgtacggtcaaagacaaattagaaaaccgactagatatggtccacagattcctttttctgcaacaacctaaaatctgattatgaagtctttcactgataattacatttgtgtttaaggcaatgtttccctgttgtttgatgatatggtttggctgtgtccccacccaaatctcattttgaattgtagttcccatatttttcttgaggtctgggagggacccagtgggaggtaattgaatcgtggaggcagttaccygtatgctgctgttctcataatagtgagtaagttctcagaagatctgatggttttataaggagattttccctcttttgcttggcacttcttgctgccaccatgtgaggaagaacatgtttgtttcccctttccccatgattgtaaattttctgaggccttcccagccatgctgaactgtgagtcaattaaacctccttcctttataaatttcccagttttgggtacgtctttattagcagtgtgagaatggactaatacatttggt

SEQ ID NO: 643341 - DNA, 380 bp, Homo sapiens
ctccacacctgtgggtgtttctcgttaggtggaacgtgagacttggaaaagaaaaagacacagagacaaagtatagagaaagaaataagggggcccaggggaccagcgttcagcatatggaggatcctgccagcctctgagttcccttagtatttattgatcatttttgggtgtttctcagagagggggatgtggcagggtcataggataatagtggagagaaggtcagcagataaacacgtgaacaaaggtctctgcatcatagacaaggtaaagaattaagtgctgtgctttagatatgcatacacataaacatctcaatgcsttagagagcagtattgttgcccgcatgtcccacctccagccctaaggcggttttc

SEQ ID NO: 643342 - DNA, 600 bp, Homo sapiens
aaaaagggcattccagttaatatggtttgtcaggaagaaatacttattaaaatgtcttggaataaatggaacacaaatgtttgaaaaggcccatttcacagcttttattcaagttataaaatgggaattacttcaggtgtaaataattcatcccaataaatttgtttcatttggtgtctatcttcctgaccgcctgtgaatatgagattttatttttggagccctgtgttgttaaccacttgttagtttaacacctctcatgaatcagagttctgaccctcaagggtccagacctctaagtcctttttcactgaagtgtttgtgcttttctataggcagtcttccaaacagaagaaggccattcaaactgctatccgcaaaaataaagaggcaaacgcagtgctggctcggctgaacagtgagctccagcagcagctcaaggtaaggaatgagtcccagatttggatgaccaggcttttccctggcttttaaaaagctttttttwaatttaataggcatataataattgtacatatttatagggtggggtacatagtgatgtctccatacctatcatgtacagtgatctgatgtgtccat

SEQ ID NO: 643343 - DNA, 462 bp, Homo sapiens
gaaaataaatatccccaaaatcaaagtcaagctgggaactgcgtagagcaaacctgcctcccattctattcctaaataagatagctacaaagagtttaaaaagctacatacctccctcacaatctgcccaccaggaaattccctgtggacaaagtacaggctgaactcaaagtcatcgctctgcttacatgagacaaatgcatatctgattgctccctgtgccctgctgtttcattaagccagactaagacataagtgaygattcctgtaaattgtgcattcagtgaaagactactcagaaactcaaaagaaaccatttgtctcttatctacctacgacctggaaacctcctccctgcttcgagttgtcccgcctttctggactgaaccaatgtacatcttacaatgtacatctgacatgtctcatgcctccctaaaatgtataaagccaaactgtgcccca

SEQ ID NO: 643344 - DNA, 594 bp, Homo sapiens
catttggaactcaatttttagccactctgagtatagatggctggcctgcctctgcattttgatgacactgtatgttttgacatcctgggtgacatgtccacgtaaatacattaagacaggaacagcaaaggtcrtaactttccttattactgaagataaaatgtaatgagctagatcacaggctgctttaagaatggctgtgccaggttaatggggctctgccactgaagccaattacacttggtacaattacatcctattctaatgctgtaagtcagggttacacaaagattctgtctctgggtaattaccagctaggaagcaggtgaggggaaactaagcaaattgtcactgatcatacaagagacacacagagagcatagagcttgtagctattccgggtgcgtgtgtgtcatctgttgctaagaaggagctggtttcacagtcagaaagccctcttcttctagcactgaccaaaaggatatgtgatttcaatgacgcttttagaaaagtagctgaaaagtgaatagtagaagagggggaggaataactcagaaagcccttctctattgagactgtttccctgatgatttt

SEQ ID NO: 643345 - DNA, 519 bp, Homo sapiens
tcatctgtttatgatatacactgcctaatttggctgcacatatatataacttctttaagcatctttcaaggacatgttagaattttgtgttaaagaaaaaccataagatctacaggctcctgagggaaagctagaaggagtttcctttcttccactaygcagaacattcaatcattttattccaaaatcaaagagaaagaatggtttttactgaattctagtactgggttttaaagcctgcaagaggagattaaaggacaggcctaaacctttaaaaacctgtttccttcgaggcagctggagatgtttagaaggaaagaccaatctgaaggccacaggggtcttcagaggcctgaggctggtagaggggtgcccatgggcacagactggtggtgaagcaggggcagcctgaagagaggtcattgccttgtcccatggctgacaccttcattctagtgcccctcattagtcatctcttctcagagaggactctgatcaatgagcaactttttcccagaa

SEQ ID NO: 643346 - DNA, 543 bp, Homo sapiens
aatgaacaagcaaagcagacacacaggaaggctcctgtgcacttgattttttcaagaatcaagtgttcttgtccgaggaggttcacagtaaaaggggacttcattctcaatagtccaatttgattctgttaatatgttaatatacatcatattggactttttctcaactatgttaaatcttttcatttttgtgccatttcataaacgtactttgtatttggcatagagtcaatgatgtgctgcacctgctgtgcccacagaccccttggggaaccccttatacttaggtcactttgactttcatgtctggaccccacagtcctcatcacagtcaagcgggcagagactgggactaagccaggaactgctgtccagcaacagctccctgcargtcaccaccacagttgggggtcagcctccacaggactggaggagctgactcattcagatgcctcagtgtgagtcctaaaagtaagtgccagatgcccacacacaggtgtgtgcatatgcacagaaagttctagaagaacccaggaggcagtg

SEQ ID NO: 643347 - DNA, 621 bp, Homo sapiens
gtgttcagccatgtatgaggtcctctgggaacccacaaagaaagtgaacagtctatgtaatatagactcatggcaaaaggcacaaacattagtatatgcataaacaataactgatttacggctatacctgtgcatgagtgaaatgggtactaagaggttatttgatgacaataaattccaaggataatcagttgttcatgatgaaatatgaaagataattttttataccagcttaaatcttttattcttgcttaggagtttcctccctcccaagacagcaaaaatgtttatgatctgttttacatcattaacaattcaaacatgaatttatgaaatgggtctgcgtatctatggacaaaactattttgcaaaaatggtaagaattatttaaatttctaaacaaaattggatgatcccacattagtatgatacccatgctgtctggggatcaaaatgaaatcgctccccgaagaagtatttaagaaagcacaagagacgtcatcccaaattgccagtgtacctatttcagacagatgartattgcttaaatgccatttttaaaaggcagaaagaggtaacaaagtgtaaacatatttatttttcctttaagaaggaaaagcc

SEQ ID NO: 643348 - DNA, 559 bp, Homo sapiens
ttggactacttgttctttttaaaacgcatcctaaattactttccagattttcttgcctttttaaatctttgtgcccaaagcctgaattccctcctcatctctactcccactctgttcaataaaatcctatacatccttcaaatgtgcccttaaatctcaccacatttgtgcatacttccctgtcctgacagctggaatcactgaatctcttctttatgaacccatagaattttaaaatttctacaccactgayacttattatgctgtgcattcatgcttggatctctaaccatggcactgaaaatcctggagagcagattgaccatctttcgatattgcaaaacccgaggcttatttctccacctttaggatacaataagagctcaagattttatggtggaaataaattcaaattaaggctccttcttcctctaaaatgccttatcatgtattagtgaattagtgctgcatactgatgaacttactctatactcaactccaacttccagtaaataatcaatagattgttattggaggagaaaattaacattattgtgca

SEQ ID NO: 643349 - DNA, 594 bp, Homo sapiens
acccacgtttttagaggaaggtttgttgggaacatgtcattgccaaccttcacacaaggggaatcaatattctgtcatgttgatttcaaatcaagtatttatttaatgtgaccctcaggtaagtgcagaaatatgtgattgtgtgctggatttatttgatcaccttcagtaagaccctggtcaagtgactttctttctttgtgtctcaggattctcttcattaaaatgagcatttgtgaaatacagtataaatgatttagttttggatgtacagtgyagacccaggatggatggatggatggatggatggatggatggatggatggatggatggataggtaggtagatagatagatagatagatagatagatagatagatagatagatagatacacatatacactaagtaacaccacaccttgtttgctcagcaagtaatgccaggtgtagatgatacaacagaaagaaagccaggcaaacacagtgcccttcctctttatcaaagttcagtctagtcatcatgagtcttgtggattaccccagtcaaatcccaatgaacagatgatgttagaaccttttgttcaggtctataa

SEQ ID NO: 643350 - DNA, 606 bp, Homo sapiens
aagtatgattgaaatacagcgataaagcatcaaccagagaaataatattaatactcagcaacatatcattaaacattcccatccatccattatcctaggcaaagtatattctgctttagagatttttaaagagagaatgtactattggccggaaaggttagagaaggcttaacagaggattttgaactgagtttagatgagccagtagattctgaaagatagaatgagagatacttgctttctgggagacaagatctgggtggagaagaacagaggctttcctgtcagattgcctggagtggagtctgttccatagtatactaccatcgtggccttggggaaatcctttaacccctatatacctctaatttctacctggaaattgaaaataatatactgtgtatccaatagttattgtaagaattgaattacttatgtatataaaatgcttaggcacatagtaatgttcaatgaggttaattattgctactactataattattatagcagttaagagtattaaatatgaaattgctgaacctagaatccaatagtgcctcarccatttattatgtgtgttttgcagcaaggtacttgcttgctgtg

SEQ ID NO: 643351 - DNA, 582 bp, Homo sapiens
cagatcaaaactaaaattgactccttgctagggcgcctggagaagattgagaaacagcagaaggcggaggcaggtaagtgatctctgatcacagacaggtcagaattgaaccagtgaaacgttgtcaatcacagaagcagtacagggccaggaagacactggctgagtttaacagtgtttaatacagatgtgccaacaatgtctttaagcccagagttgcaataataaaatgtgattttttttcttttagagaacatgaactaatttttctaaggttcatactaaaaataaaaggcaaggacaagtgttttggtggaataatcagtagtagttgagtcacagttgaaactttatctcaatatcaagtaacctttcagaaaataaaatcaattaacagaataatgctatcaggctaacataatattcatatataattaaattaactgcagcaaaatttgacaggtttcaacaattattataatgcccaactcctgcctttgctgccaccctgaaagacttcagtacccaagttcaggaacatcaagactaagascatgcacctggctacccacaggccaagtt

SEQ ID NO: 643352 - DNA, 516 bp, Homo sapiens
gtgcagttcttcatttatttggtagaatttggctgtgaatccatcttatcctgagcttttatttattcaaatacttttttattactgattcaatctgtactaaatattagacttttcaggttttctgtatctccttgctttaatcttgggaggctgagtgtttccagaaatttgtctgtttcctgtagattctctagtttgtgtgcctatagttgttcttatactctgattaccttttgtatatctgtagcatcaaatgtaatatcatctttttcatttctaatttcatctatttggagcaactctcttattttttaggttagtctacctaagagcttgtcatttatctttttgaagaaacaactttttttttcattgatccctttaactgtttytttttttttggtctctattttatttagttaattaagctctgaactttattttttttttttaattctgttaattttgtgtttgaccactcttgcttttctagttctttgagatgtgacatta

SEQ ID NO: 643353 - DNA, 533 bp, Homo sapiens
ggatgtgccaaaagatgtattctggatagacactgaaatgtattctgaatacaccacagctagagaaccttcctgggcacatgatagcttagtaaaagaagaaaatctaaaactttacattatgatgaataattatttattacagataaaagaatatttcaaacattgtacgacagtatttatgggtcctaamcataaatcctagatggcacttttctcagcattgtttcaacaggttctcctagttccttggaagttagccctacatctgcctaacattttcttttaacttcaaattctcaatgatctattatgcactatatgggcaattaataaatactcattgactggatataaggcctgtatcactgttttcaaaaagtcaacaaaaaggagccatgagcagtcactttggagaaatatgcttctctctcccctttatgggtatttgcccccctgccttttttgaaatttacccagttatgacacattatattaattaataatgaatctactgagtattttgtaaatga

SEQ ID NO: 643354 - DNA, 518 bp, Homo sapiens
gcccttcttgtgatagtgagtgatttctcatgacatctgattgttttataaggggctctttctccttcacttcctcttttatgctgccatgtgaagaaggcccttgctttcccttcaccttccaccatgattgtaagtttcctgagtcctccccagccatgtggaactgtgagttaattaaatatttttcttttacaaattacccaggctcargtatgtctttatattagtgtgtgaaggaactaataggaaaaaattggtactaatgtagtgaggcactgctatgaagacacccaaaaatgtggaagtgactttgtaattgggtaacaggaagaggttaaaagagtttggaagaagaagaagaagacaggaagatgttggaaagtttggaacttcctaaagacttgttgaatggttttgaccaaaatactgatagtgacatggacaatgaagtttatgctaaggaggtctcagagggaaatgagatacttattgggaactggagcaaaggtcactct

SEQ ID NO: 643355 - DNA, 597 bp, Homo sapiens
cttttccttcatagaaattaaaggcagactgagaagcatcattgtaaaaatctgctagtccaagcttctcactatgtatatgacagagctggacctagaattgggggcggctttgtcttcccaatccactgtaatgatctcttgctttgccagattccaatctcatgtagttctctttactccaccccctacttatcccctcccaagcaatagtttcattttagttgaaggaatgtaaactagatttaaaaatcagtgtattaactgtttaagttatagtgcctcagacttattttccttgtctatgaaataaggtgtttgtactagcttactttatcagttaactttcaayggtattataattccatcagtctctctctgtccctgcccactctcaaccacttatcacttctcctacactatcttaatagaactgctcaaggcagaaagacagggtaacatcgtgtttggtaagctgattgcttttttcttcaacatcttcttctctgatttcagatatgagtacctttatactgtcctgcccaatacactgtggcatccatatttcaaatatgttgatgtagaagcatccaaata

SEQ ID NO: 643356 - DNA, 597 bp, Homo sapiens
cttttccttcatagaaattaaaggcagactgagaagcatcattgtaaaaatctgctagtccaagcttctcactatgtatatgacagagctggacctagaattgggggcggctttgtcttcccaatccactgtaatgatctcttgctttgccagattccaatctcatgtagttctctttactccaccccctacttatcccctcccaagcaatagtttcattttagttgaaggaatgtaaactagatttaaaaatcagtgtattaactgtttaagttatagtgcctcagacttattttccttgtctatgaaataaggtgtttgtactagcttactttatcagttaactttcaatggtattataattccatcagtctctctctgtccctgcccactctcaaccacttatcacttctcctacactatcttaatagaactgctcaaggcagaaagacagggtaacatcgtgtttggtaagctgattgcttttttcttyaacatcttcttctctgatttcagatatgagtacctttatactgtcctgcccaatacactgtggcatccatatttcaaatatgttgatgtagaagcatccaaata

SEQ ID NO: 643357 - DNA, 556 bp, Homo sapiens
atctatttaaatacaggattaatattaatatgtgaggttttgttccggtcatattattaattgttttctagttgttttataagttatttctttctttttctctgtttgactttctggtttggtgaaattctgtcatgttgacacttgatttctttttcttccttatttgtgtgattttttttataagscctgtgatttatattattttctgtggtttcatgatgatgaatattgaacttttgttttcctatttaggactcctttgaacatttcttttagagacagtctagtggtgacaattcactcagcatttgcttctgtgtgaaatattttatttctcctttatttataaagcttaattttgctggatataaaatacttggcttttatttcttccagcaatttgaaagtaccctcccattttctttgccctcttaagttttctcctgagcactccactgtttgtctgatacagttttctttataggtgactagatatttttctcgctgatttatttattttttcttcattttggccttagacattctgataata

SEQ ID NO: 643358 - DNA, 567 bp, Homo sapiens
catgccaacactaatcaaagaaaaggtatagtagctatatcaatttcagacaaagaagcttcagaacaaggaaaattgtcagggattaaagagggacattacattatgataaaagggtcaattctccaagaaggtacacaatccttaatgtgtatgcaactaacaaactaatggcaaaatgtatgaggcaaaaactgatagaactataaagagaaatagacaaattcactactattattgaaggcttcaacacttcttttttattaattgacatatcacacagscagaaaaatcagtaagggtgtagttgacctgatgagcaatagcaatcagcttggtctaactgacacttatacggtactccatttaacaatagcagaatgcatgtactttttaagctcacatagaatatttgccaagatgtacttcattttgggccataaaacataccttaacaaatttaaaagaatagaaatcctaaaagtttgttctcagaccataaactagaaatcagtaacagaaaaatagctggaaaattccaaaatatttccagattaaccaaaagag

SEQ ID NO: 643359 - DNA, 584 bp, Homo sapiens
aaaactcttcacataataacatattattttccctttatctttctcattctctcatgaatatacaatgaaatttttcagaggctaaatggcctgtgatgtcacaacggattgaatgcagaagcagataggagggtctagctgccttctacttatatttaaaagacrtataaaaatgtaaagcaatgctaatcctctggctaatttatttctattttgaaaagttttattatttttcataaaaacacatcacatattcacgggtaataaattcactactattatttctaaatgaataaatacatattttaagtgttcaaagttttaatttctaatatcgtaaatagcaacagatataacccaataaacaaaagccagttctttggggttctcgataatttttaaaaatataaaaatatcctgaacccaaatacttgagaagcactgttctaaaaagagaggatatatactgcatataataaaattatagtaatttcaatcttaaactttagattctattttaatgttttttttgttttgttttgagacggaatctcgctctgtcacccaggctggagtgcagtggt

SEQ ID NO: 643360 - DNA, 564 bp, Homo sapiens
agggactcagataagacaaatgttagtttctagttttaagactgaaagttcatttctatatttatcctcaaagcagtacacatcagttctatgggacaattgagctggctttaatattttctcccattaggtgagctatctttccatttattttttggcagtgtcctcttaagtataaagtttttaaattttgaagtgcaatttatttattttttcctatgttacttgtggttttagtattacattgaataatcttttgaaaaatctagggcmgtaaatatatacttctatgtttttaactaaaagttttagtttttacatttaggttttggatacttttttttttaatacagtgtgagataagagtacacctttattcctctggatgtggctatcttttcaagaaagttgattctttccccattgtatagtcttggcaccctggtcaaaaatcatttaatcatagatgcataattttatttatggattctcaattatattccatttatctacattttactcttgtaccagtatcacaggttttgaatccaagaaatgtgagtc

SEQ ID NO: 643361 - DNA, 564 bp, Homo sapiens
agggactcagataagacaaatgttagtttctagttttaagactgaaagttcatttctatatttatcctcaaagcagtacacatcagttctatgggacaattgagctggctttaatattttctcccattaggtgagctatctttccatttattttttggcagtgtcctcttaagtataaagtttttaaattttgaagtgcaatttatttattttttcctatgttacttgtggttttagtattacattgaataatcttttgaaaaatctagggccgtaaatatatacttctatgtttttaactaaaagttttagtttttacatttaggttttggatacttttttttttaatacagtgtgagataagagtacacctttattcctctggatgtggctatcttttcaagaaagwtgattctttccccattgtatagtcttggcaccctggtcaaaaatcatttaatcatagatgcataattttatttatggattctcaattatattccatttatctacattttactcttgtaccagtatcacaggttttgaatccaagaaatgtgagtc

SEQ ID NO: 643362 - DNA, 505 bp, Homo sapiens
  misc_feature 65: n = A,T,C or G
acttcttgaaacacacttgctgaaatctgcttggtagacatcctcaatcactgcccttatacctntacctctgcagcttcttaattgttgctgctcacacctacagtgctcatacagttaagagcccagaatccagggcacggaactaatcaattacattgcctagcaagactttcctgtttgctgataaactgtaaagtgttattttttctgagacagggtctcactctgtcacacaggttggagtgcagtggcacgatcttggctcacagcaacctctgcctcccaggctcargccatcctcccacctcagccccacaagtagctgggacttccaggtgcatgccatcccgcccagataatttttgtacttttaatagagatgggatttcaccatgttgttcagactggtctcaaactcctggcctcatgtgatccacccgccttggcctcccaaagtgctgagattgcaggggtgagacaccacacctggtctaaactgtaa

SEQ ID NO: 643363 - DNA, 575 bp, Homo sapiens
tctatatctcatagccaatatccacagtgtttttccttttaggagactcataaattcttcccctagaggagcctgatatgctaaatttcacaggaaggccttagaatagactacatcactgggacctttggtataggctgacttaatccctctgttcaaaacttgcttcaaatattgcctagaatatactcaattattaataaatgctgaaaggaataagacaacatctaaacccatctctcagctcttatatttgtttttgtttgcttgttttatggatgtgacattgatgatatacttgtgtgacgtctttatgagtgattctcaaattattgtgcaatttccataggtagaatctttccatttatattaattctaagtagtataattccttctctctgtttttatagcatcayttgctttataaagatagatgaaaaacaggagtctgaacgtttttcctgttttctctgtcactgaaagaagaatgtcagtatacttaaagataagcaattgaatgcaaataatttggaagaaccattttaatcaccataattgtactgaagcacttaaaa

SEQ ID NO: 643364 - DNA, 544 bp, Homo sapiens
aatttggaaattagttggagaaatctaatagttgatttattcagtcaacaaataggccagtatgcacactctcaatttaaggcatgagagatataatgtgactaaaacgtccaaaaccaaataagactctgctcctttttttttttctttgaggcatagcctggctctgtcgcccaggctggagtgcagtggcttgatcttggctcactgcagtctcaaactccctgagctcaggtgatactcccacctcagcctccctagcagctgggacctcaggtgtgtaccatcatgcccagctaatttttgtagagacagggttttgtcactttgcccaggctggtctggaactcctgagctcaagtgatccagctgcttaggcctctcaaagggctggtattacaggcatgaaccactgcactgagccaactctctgstctttgttattcaattgctgtgtgcctcactaatctgattcttagtactcccaaactctgaccttagtgatataaccatattctaaattcatcatcatggaatgcccatc

SEQ ID NO: 643365 - DNA, 535 bp, Homo sapiens
actggactgagaggatgctccttttgtaaattaaacaaaatgagcaactctttacgtgcagacactcttgctccaaattagagagaggaccagtgatttgattttcatttataaaatcatggtctgtttccacttatggttccttgcaattacctcaggtctctcagaaatatccagtggcctaaatcactcattcacagttgattaagctcgtccactttgcagattttagcagtttaaccatcagaggaatcccatttctaatataaaagacattgagtcaatctcactcattgtaacaccaactagggaaagactcagttaaggaagaaactgcagtggctrtggttgatggcaaagtttatgaaacatatcataagtattgtatagtgaataaagaagaagtttgggatcaaaatacaattatagggaaatcagtagcatatttttaccataagagcagctgattttgtatcctgccctttgtgggataattggattgtcttgacttttttattccatctcttccacttaa

SEQ ID NO: 643366 - DNA, 569 bp, Homo sapiens
ttatttcttccaatgttctcctactctgttctctcttcytcttcaggtattccaattaggcatgtgttatgccttttgattgttccttagctcctcaatgttgtgttgttttgtttgtttgttttacttgtttgttactttgcacttcgggttgggaagtttctaatgaccaatttttaggctcactgattttttcctttactgtgccaagactactaatgagtccatcaaaggcattcttcatttctattacatttttttatttttttatggtttcttagagttttcatctctctgcttacattatccttctatttttgcatattttctagttttccactagagtccttaatatattatacacagttaatttaagttccctgtctgataattccaacatctacattatatctgagttttttttttttttttttttgagttggagttttgctcttgttgcccaggctggagtgtagtggcgcgatctcagctcactgcaacctctgcctcccaggtccaagtgattctcctgcctcagcctcctgagtagctaggattacaggcaccca

SEQ ID NO: 643367 - DNA, 569 bp, Homo sapiens
ttatttcttccaatgttctcctactctgttctctcttcttcttcaggtattccaattaggcatgtgttatgccttttgattgttccttagctcctcaatgttgtgttgttttgtttgtttgttttacttgtttgttactttgcacttcgggttgggaagtttctaatgaccaatttttaggctcactgattttttcctttactgtgccaagactactaatgagtccatcaaaggcattcttcatttcyattacatttttttatttttttatggtttcttagagttttcatctctctgcttacattatccttctatttttgcatattttctagttttccactagagtccttaatatattatacacagttaatttaagttccctgtctgataattccaacatctacattatatctgagttttttttttttttttttttgagttggagttttgctcttgttgcccaggctggagtgtagtggcgcgatctcagctcactgcaacctctgcctcccaggtccaagtgattctcctgcctcagcctcctgagtagctaggattacaggcaccca

SEQ ID NO: 643368 - DNA, 569 bp, Homo sapiens
ttatttcttccaatgttctcctactctgttctctcttcttcttcaggtattccaattaggcatgtgttatgccttttgattgttccttagctcctcaatgttgtgttgttttgtttgtttgttttacttgtttgttactttgcacttcgggttgggaagtttctaatgaccaatttttaggctcactgattttttcctttactgtgccaagactactaatgagtccatcaaaggcattcttcatttctattacatttttttatttttttatggtttcttagagttttcatctctctgcttacattatccttctatttttgcatattttctagttttccactagagtccttaatatattatacacagttaatttaagttccctgtctgataattccaacrtctacattatatctgagttttttttttttttttttttgagttggagttttgctcttgttgcccaggctggagtgtagtggcgcgatctcagctcactgcaacctctgcctcccaggtccaagtgattctcctgcctcagcctcctgagtagctaggattacaggcaccca

SEQ ID NO: 643369 - DNA, 569 bp, Homo sapiens
ttatttcttccaatgttctcctactctgttctctcttcttcttcaggtattccaattaggcatgtgttatgccttttgattgttccttagctcctcaatgttgtgttgttttgtttgtttgttttacttgtttgttactttgcacttcgggttgggaagtttctaatgaccaatttttaggctcactgattttttcctttactgtgccaagactactaatgagtccatcaaaggcattcttcatttctattacatttttttatttttttatggtttcttagagttttcatctctctgcttacattatccttctatttttgcatattttctagttttccactagagtccttaatatattatacacagttaatttaagttccctgtctgataattccaacatctacattatatctgagttttttttttttttttttttgarttggagttttgctcttgttgcccaggctggagtgtagtggcgcgatctcagctcactgcaacctctgcctcccaggtccaagtgattctcctgcctcagcctcctgagtagctaggattacaggcaccca

SEQ ID NO: 643370 - DNA, 649 bp, Homo sapiens
acagaaccttgaggttcacaaaaaatccccacattaagagaacaaaatgctttcttctaaaggatcaagacaacgatttattcatatagtatgactctctgttaaatgtgtaaaagatgttctgtaggtgaagcaccaattgatgctgaagagtgcactatgaagtttccagtagcagcatcagttaatagcatttactgaataaccactgtgtacmaaatggcattcagcattcaactctggaagttaagtgtctgtattttacccattacttccagtaagggaaatggagtgtttttgttttgttttgtttgagagagaatataaaaaactgagatgtatatatcaaaacataatatatgtatccatttcacagttcttactctttttactctttttattcctgcttttgtgaactataattgtatatatttacgatttacaacatgatgatttggtatgcatatatattgtaaaatgatgagcatgatcaatttagttaacacatccgtcacctcacatagctaccatttttttctgtgtagtgagaacacttaaagtctactcttttaacacatttcaagtataaaatataatattattaactatagtcacgatgctttatattaaatccccagaatttaccttt

SEQ ID NO: 643371 - DNA, 649 bp, Homo sapiens
acagaaccttgaggttcacaaaaaatccccacattaagagaacaaaatgctttcttctaaaggatcaagacaacgatttattcatatagtatgactctctgttaaatgtgtaaaagatgttctgtaggtgaagcaccaattgatgctgaagagtgcactatgaagtttccagtagcagcatcagttaatagcatttactgaataaccactgtgtaccaaatggcattcagcattcaactctggaagttaagtgtctgtattttacccattacttccagtaagggaaatggagtgtttttgttttgttttgtttgagagagaatataaaaaactgagatgtatatatcaaaacataatatatgtatccatttcacagttcttactctttttactctttttattcctgcttttgtgaactataattgtatatatttacgatttacaacatgatgatttggtatgcatatatattgtaaaatgatgagcatgatcaatttagttaacacatccrtcacctcacatagctaccatttttttctgtgtagtgagaacacttaaagtctactcttttaacacatttcaagtataaaatataatattattaactatagtcacgatgctttatattaaatccccagaatttaccttt

SEQ ID NO: 643372 - DNA, 479 bp, Homo sapiens
acattttcctaattgaagcagctgataaaacggtatactctctcccttcctcatttacatcatccctgtattgtttatctagggttgttataacaaattaccaaaagttggtggcttaaaacagtacaaatttatttwcttacagttccgaaggccagaagtctaaaattagttccactgggctaaagtcagaatgttggcagggccagtccttctggaggctccagggaagaatccattttctcgtcttttccacattggtgtgactgccaacatttcttagttttggccacattgctcttatccttgctgccatggtcacattgctttcttcttttctgtagtcgaatctccctctgctatcctcttctaagcgcatttgtgattacattttcaacgaatccaagatcattccatttcaagatccttaactaatcacatctgcaaagcccctttggccatatacgattatttgcagg

SEQ ID NO: 643373 - DNA, 559 bp, Homo sapiens
aattaaactgtcacaggctggtggggaatgcacacagccaggaatttttgcatgcttgaatcacattaattgcatgcactagggttcaggaaggatgacaaatgaaagaagactractccaaaaggaatattccagcagtccacaggccttaactactagcacatgctgagtcatgccggctcgctttctcctttcaaggcagtgagattctatcagtagaacagatacatctaattacttaccagggatgctgagaagattgatctggatcaattaattcagtgcttttggaaagtgctatattcttgctacattatgaaaattacctagaaaccacactaatgatgtgctgttgaattcagaaaatgagaatgtcaacaaacaacataaaaatgaaagatacttcttggtaaaatgtatcacatccgtttattttgtcaggcaaacttgggttcctctcatttaggacagactgctttgtggcaaactggcagagtatatattttatggttagcaataaaatcttattagtataaaatctcattacagctaatgatc

SEQ ID NO: 643374 - DNA, 590 bp, Homo sapiens
aaggggaaaaactgaaagatatttctttaagatctggtacaatgcaagattgctcacttttgccacttacgttcaacattttaatgctggaaatactaccaaagacaatcagacaagaaaaagaaacaaacgggattcacattggaaaggaagaagtaaaactatccacatttacagacaacatgattctatacatggaaaacccaaaagacttctcaaaaaattctgttggaactaataaatgaattcagtaaagttgcagaatacaaaattaacatacaaaattaattacttttctttataccaataaccttatccaaaaacataaattaaaaaaaaaccatttacaatgccatcaaaaacaataaaatatttaggaataaatttaaccaaggagatgaaagatctctacactaaaagctataaaccatgacaaaagaaattgaagatacaaacaaatggaaagatataccatgttcatgaattggaagagttgrtattattaaaatgtccatactttccaaagcaatatacagattcaatacaatccttaccaaaattccaatggtatttttcactgaagtagaaaa

SEQ ID NO: 643375 - DNA, 538 bp, Homo sapiens
gctgggattacaggcatgagccactgtgcccatcygcaacaacagcaaatattgacaaacgggatctaagtaaactaaagagcctctgcacagcaaaagaaactatcaacaaagtaaacagacaacctacagaacgggagaaaatatttgcatcctatgcagctgaccaaggtctaatgtttagcatctataaggaacttaataagcaaaaaaaagcaaccccattaaaaagtgggcaaaggacatgaacagacatttttcaaaagacatacgtagccaataagtatgtaaaaaaatgctcaacatcactaattattagagaaatgcaaattgaaaccacaatcacataccatcttataccagtcagaatggctatcataataaagtcaaaatatagcagatgcttgtgaggttgcacagaaaagggtatgcttatacactgcaggtgggaatgtaaattagttcagccattatggaaagcagtttggtgatttcacaaagaactcaaagcagaattaccatttggctcagcaatccc

SEQ ID NO: 643376 - DNA, 541 bp, Homo sapiens
ctattgttctttgagagtgttttgagaaagttttgtgaaagctttagaagaaaaacactcaggaaaatttcaccagagtgtccaccatgacagtgctcctgctcatttctctcatcaaacaagggcaattttgcaagtgtttcaaagggaaaatatgargcagccaccttacagtcctgatttggctctttcctccttgacttatttttgtttcctgatctttaaaaaaaaatctgtaaatggcacctatttttcttcagttaataatgtaaaaaagactgtattgacatgaataaattcccaagacccccagttctttagtgatgggctaaatggctgatatcattgttaatgaaagtgtcttgatcttaatggaggttgtgttggaaaataaaggtgtgtatttcttatgtttagatgttaattccattgtgcattaactttttgaagtccccttatataaaatgattatgaaccactcctggatttataggtaaagttagtacttttgcaaatattcaaaacatttatgaaaacttta

SEQ ID NO: 643377 - DNA, 541 bp, Homo sapiens
ctattgttctttgagagtgttttgagaaagttttgtgaaagctttagaagaaaaacactcaggaaaatttcaccagagtgtccaccatgacagtgctcctgctcatttctctcatcaaacaagggcaattttgcaagtgtttcaaagggaaaatatgaagcagccaccttacagtcctgatttggctctttcctccttgacttatttttgtttcctgatctttaaaaaaaaatctgtaaatggcacctatttttcttcagttaataatgtaaaaaagactgtattgwcatgaataaattcccaagacccccagttctttagtgatgggctaaatggctgatatcattgttaatgaaagtgtcttgatcttaatggaggttgtgttggaaaataaaggtgtgtatttcttatgtttagatgttaattccattgtgcattaactttttgaagtccccttatataaaatgattatgaaccactcctggatttataggtaaagttagtacttttgcaaatattcaaaacatttatgaaaacttta

SEQ ID NO: 643378 - DNA, 616 bp, Homo sapiens
aactgactgctctggtccaattaatgtgggatgaaggcaaggtgtatacacatggctgtctagggtccactccttgtgtgtacggagaggggtaattctcagaggaagagggttaacatgagccttgcagatactccaccaatacccagctttccatgtctgacacactaaaggsagtgaaagacaagacatgggccccatattcaggaactggtagtgagataagaagtgtggacaatgagaggacctcttcactgtcttctgaaacaggccagacctacattcatatgtctgttgattccatctaaaaatggcaggaagaataatatttttacaaacaaggggtgacttcaggagacaaatgtgtgaaatgcagcattatgttacaaactatagaattcctggctatgtaatcccagaccccatggacatcagggatattttcagcccaacatccagtaagtctttgatttgtttgtcggtaaggtgatagctcttgcaaagattggtttaaaaataaatacatcgtgggtgaactccttgagcaaagcatgaacaaatggagtgtcaggacgagttaaaaccaggcttggaaggagttcctgtagagtttcca

SEQ ID NO: 643379 - DNA, 616 bp, Homo sapiens
aactgactgctctggtccaattaatgtgggatgaaggcaaggtgtatacacatggctgtctagggtccactccttgtgtgtacggagaggggtaattctcagaggaagagggttaacatgagccttgcagatactccaccaatacccagctttccatgtctgacacactaaagggagtgaaagacaagacatgggccccatattcaggaactggtagtgagataagaagtgtggacaatgagaggacctcttcactgtcttctgaaacaggccagacctacattcatatgtctgttgattccatctaaaaatggcaggaagaataatatttttacaaacaaggggtgacttcaggagacaaatgtgtgaaatgcagcattatgttacaaactatagaattcctggctatgtaatcccagaccccayggacatcagggatattttcagcccaacatccagtaagtctttgatttgtttgtcggtaaggtgatagctcttgcaaagattggtttaaaaataaatacatcgtgggtgaactccttgagcaaagcatgaacaaatggagtgtcaggacgagttaaaaccaggcttggaaggagttcctgtagagtttcca

SEQ ID NO: 643380 - DNA, 575 bp, Homo sapiens
tcaacggtaagcgtcactacatgtggaacagcataaacaacgtcctgtgctaaagtgaagggacatggstttcccagtaagttctttatttcaaaatcacatatattagggactttttgttttctaatgatgaatcgatattctgcctgctattttgggatgtcactctgactcttgctctcatacaatagaaaaatggaactacatagcaggaatccttggaagattgtattagtctgttttcgcactgctataaagaactacctgagactaggtaatttatgaagaaaagatgtttaattgactcacagttctgcaggcttaagaggaagcatgactaaaaggtctcaggaaacttacaatctggtggaaggcaaaggggaagcaaggaccttgaacttctttacatagtggcaagagagagatagtcgggtgaactgccacacacttttaaagcatcaaatctcatgagaactcccctacaatcatgagaacatggagaaaaccacccccatgatccaatcacctccacaaggtccctcccctgacatgtgggggttacaattcaacacgag

SEQ ID NO: 643381 - DNA, 575 bp, Homo sapiens
tcaacggtaagcgtcactacatgtggaacagcataaacaacgtcctgtgctaaagtgaagggacatggctttcccagtaagttctttatttcaaaatcacatatattagggactttttgttttctaatgatgaatcgatattctgcctgctattttgggatgtcactctgactcttgctctcatacaatagaaaaatggaactacatagcaggaatccttggaagattgtattagtctgttttcgcactgctataaagaactacctgagactaggtaatttatgaagaaaagatgtttaattgactcacagttctgcaggcttaagaggaagcatgactaaaaggtctcargaaacttacaatctggtggaaggcaaaggggaagcaaggaccttgaacttctttacatagtggcaagagagagatagtcgggtgaactgccacacacttttaaagcatcaaatctcatgagaactcccctacaatcatgagaacatggagaaaaccacccccatgatccaatcacctccacaaggtccctcccctgacatgtgggggttacaattcaacacgag

SEQ ID NO: 643382 - DNA, 541 bp, Homo sapiens
gaattcctttataatgtctgcatttaataaagtaaaaggagtgagaaaaaagatctgggaacagggcactggctatgtaaggagggcaaggtgggggcagggagttgggggcttggaatttggtgtttgatgtttgaaaggagccatggctagggcacatgtcaatacattgtgtaaaccaaaaattaaattctaagctcccgactgactgatgatggacccccattctcagccaaggacattccaaagtaaacctgaaaaactagttcaggccacattgacaagggagggttcaacaggccacatcataccctcctgcctttggaatttaggcacaactgaccagcattaatattaaaacagagatcttaagaccgacaaaatagactctttgtaataataaggtatccaattccaacatgactccagtataacatcacatggcagatagcaggtccttaaagaaactgaagtattttaccyccaaatatatttctttgaaatattttgaaatggtcctgcaaatcaatctcttacgggg

SEQ ID NO: 643383 - DNA, 602 bp, Homo sapiens
ctgtcccataacatttctactaaaaaaatatgggatttatttttgcctaaatcaattttaattaacaaacattgactgggagcctggcatgcacccaacaaggtgccatagaaggayatagagtgtcagatataatgcttaggagtccactttctagtggtacacatacttaaaaagataatacaaaaaaatgaatgtaggtcagcattcaccaaagtattgaaaggtgttacctgcatagaataaaggagtcccatgcttatataaatttgagaacactgggttaaatgaagttcaaaaaccttttcaagtactttctggagtttttaaaatgtgaatgtgagttgttgagctgtgaatctctaaaagcagaatagccctataatgtattatccaaccttgaacacttattggaggaaaatggaaaactaatatgcatatgcgagattaatagacaaaaaacagaactatcctaggcgtcctggaatgtatggcaattcctttgaaaaggcagtagagtgttgctatttgctaaaattaattccatgtaacttcttgttgttaagctaagcttccataaaagaaacattaagaacaatgct

SEQ ID NO: 643384 - DNA, 602 bp, Homo sapiens
ctgtcccataacatttctactaaaaaaatatgggatttatttttgcctaaatcaattttaattaacaaacattgactgggagcctggcatgcacccaacaaggtgccatagaaggacatagagtgtmagatataatgcttaggagtccactttctagtggtacacatacttaaaaagataatacaaaaaaatgaatgtaggtcagcattcaccaaagtattgaaaggtgttacctgcatagaataaaggagtcccatgcttatataaatttgagaacactgggttaaatgaagttcaaaaaccttttcaagtactttctggagtttttaaaatgtgaatgtgagttgttgagctgtgaatctctaaaagcagaatagccctataatgtattatccaaccttgaacacttattggaggaaaatggaaaactaatatgcatatgcgagattaatagacaaaaaacagaactatcctaggcgtcctggaatgtatggcaattcctttgaaaaggcagtagagtgttgctatttgctaaaattaattccatgtaacttcttgttgttaagctaagcttccataaaagaaacattaagaacaatgct

SEQ ID NO: 643385 - DNA, 602 bp, Homo sapiens
ctgtcccataacatttctactaaaaaaatatgggatttatttttgcctaaatcaattttaattaacaaacattgactgggagcctggcatgcacccaacaaggtgccatagaaggacatagagtgtcagatataatgcttaggagtccactttctagtggtacacatacttaaaaagataatacaaaaaaatgaatgtaggtcagyattcaccaaagtattgaaaggtgttacctgcatagaataaaggagtcccatgcttatataaatttgagaacactgggttaaatgaagttcaaaaaccttttcaagtactttctggagtttttaaaatgtgaatgtgagttgttgagctgtgaatctctaaaagcagaatagccctataatgtattatccaaccttgaacacttattggaggaaaatggaaaactaatatgcatatgcgagattaatagacaaaaaacagaactatcctaggcgtcctggaatgtatggcaattcctttgaaaaggcagtagagtgttgctatttgctaaaattaattccatgtaacttcttgttgttaagctaagcttccataaaagaaacattaagaacaatgct

SEQ ID NO: 643386 - DNA, 602 bp, Homo sapiens
ctgtcccataacatttctactaaaaaaatatgggatttatttttgcctaaatcaattttaattaacaaacattgactgggagcctggcatgcacccaacaaggtgccatagaaggacatagagtgtcagatataatgcttaggagtccactttctagtggtacacatacttaaaaagataatacaaaaaaatgaatgtaggtcagcattcaccaaagtattgaaaggtgttacctgcatagaataaaggagtcccatgcttatataaatttgagaacactgggttaaatgaagttcaaaaaccttttcaagtactttctggagtttttaaaatgtgaatgtgagttgttgagctgtgaatctctaaaagcagaatagccctataatgtattatccaaccttgaacacttattggaggaaaatggaaaactaatatgcatatgcragattaatagacaaaaaacagaactatcctaggcgtcctggaatgtatggcaattcctttgaaaaggcagtagagtgttgctatttgctaaaattaattccatgtaacttcttgttgttaagctaagcttccataaaagaaacattaagaacaatgct

SEQ ID NO: 643387 - DNA, 557 bp, Homo sapiens
acatgttttcctaactaagaaaaaaatgacgtcttggattgatatatttatttatttatttcccatcaggggatttttggaaggccatgtctcttggcttcctgagtctcttcctcctctgttttagggagggtgataygtaaggcaaagcttacaaaacaagatttggaccattctcctttatgttttccagaggctacatactagtgatgaaagatctgacccaggaatttaagttcatgagtggggtggggcggtgaggggatgctggggggccttccatccccagcttctgtctgtccctgtggctggactccaaccactttatttttgaagggctgagccagtcctgtggttcactggtggatccatctttccttacaaggaagtggctttttgcttctttctgggatgtggggtctgggatgtgtttacgctcagcagagctttggatgagtctcagtatccactcatttattcagtgagtactaattgaacatgactgtatgcctggcactctgctaagcattgaagatgtcagaaacaaacaacactat

SEQ ID NO: 643388 - DNA, 598 bp, Homo sapiens
ataaagaggtacctgagataggtaatttataaacaaatagaagtttaatggactcacagttccacatggctggggaggcttcacaatcatggtagaaggcagaaggcacgtcttacatggctgcagacaagagagaatgagagtcaagtgaaaggggtttccccttataaaaccatcagatctcatgagacttattcactatcatgagaacagtatgggggaaaccaccccatgattcaatgatctcccacccagtccctcccacaacacgtgggaattatggaarctacaattcaagatgagatttgtatggggacacagccaaacctcatcacttagaaaactacaaatggaactaccatatgatccagcatcccactagtgggcatttatccaaaggaagggaaatcggtacatcagagacatctgcacccccgtgtttattacagccaagatataaagtcaacctaggtgtctaaagatagatgaatgaataaagaatgtggatgaatagcatggaacactattcagccataaaaaagaatgaaatcctctctttcatagcaacattgacagaactggaggacattatgttaag

SEQ ID NO: 643389 - DNA, 493 bp, Homo sapiens
aaggcaacatggtcatatacccccaggactgcaccccttattagatacattcatagttttgcagcatcacctatacacattcacattaagatcgtttttttattcatgatgaagatcatctttataggaaaatgaaagacgtttttaaaatttttttacattgtaattgtayatatttatacattacaatttgatgttttaacatacctataggttgcataattatcaaatcacctcatgcatttatcattcctttgtggcgagaatactcaaaaacttctcttctggctagttcacaatatacaatgcctgactcctaaccatagtcaccccactgtgcaacagagtgacaggacttgtttctcctctcttattgcaattttgtacccattgaccaatatctcccatcttcccctattcctgctgccccttcctagtctctggtatccactgttctactctctacttctatgacataaattttttagattgc

SEQ ID NO: 643390 - DNA, 595 bp, Homo sapiens
ggggtacaaacatggaataagtcacagctgcattcaagaaacttatattctaatgggggagactaagatggaaagtaataaatgtaaacataggmgtttgcaggggataaagagagggcacaaagaaaagagtgattccacatggtgatggtacatgatggttctgcactgaggggtagggggataatgaggtctgacactcaagagtgaaagaagcaagaccagaacccagctcaatttctagctctgtgaatattacaaagtctctggccattctttccacattgaatggcgaattcccttgcataaggtcccagggttaagaattgacagagccagaattcgaaactagatctgtagaaagtcaggctcaagctcttactaatgccagcttattgccgttttctcccgagtccccagctgatacagtgtggatacttgtctcctccaaatcttatgtaaatgtttgatctccagtgttggagttggggcctggtagggcatggtggggagtttggtccttgggggtggatccctcatgactggcttggtgcctcatgagagtagaatgctggatgccagtgacagggagcag

SEQ ID NO: 643391 - DNA, 583 bp, Homo sapiens
tactagcacaccactgccagacatgactgtgtgtgtccctgaaacaaaattgctctggctcagagctcctttggccactcatattacaatagcaacagacatttgcttcctggtggcaagtaactgtgcaccctccaacatcccaaccccagaggaaccagtgggattgaaaaccagcagaagccaagacaggatgcacagctgaattggaggagagtagctcccttctcacacaaacgctttcaaagttgggcaaaagtggcccagtgcrtgaggtcagtcaacagccaaattccagcagcaaaatacattttcatcaatatcactttgggagaataactgtggcacatgctctttctgctttctctgtactgtataggcaacatgttgtactcccagtagcaactagatctcttttacctcttctttagccaagaagcaagatctgtcacccacaacaccacatatcttgaaaagatgcttttcataattttcactatacctctaaaaccaattgtaccgacatcacgtagacaaaaactccagataaatccattgattgggtattttcattattatttgg

SEQ ID NO: 643392 - DNA, 600 bp, Homo sapiens
tgtgagcctgtagtcccagctacttgggaggctgaagcaggagaattgcttgaacctgggaggtgaaggttgcagtgagctgaaattgcaccactgcaccagcccgggtgacagaacaagactcagtctaaaaaagaaaaaaaaaaagagaagtaaggaataataaagatatgactgaacaatcaaattattggcatggaagaagtgctgaaattattcatggcaaacacacaagaaaaaggcaaagattacagtaggttagaggagatgctagttatggaggacaaagatgatccaatataattataattgatgtctctgaattaggtacccaacaaaaaaaatagggaaaaatatgttcagagatgtaggtcatcagaaataaattgcaaatttttagatcaaagggcatcaaggggaaaaaaygatatgtaatgactgacattaacctgtatcctggttaagatattgaacttggaggataaacaaagactccttcagacttgcaggctgcctgcaagggaaaaaaagtcaggtgtcccagacttattaagagaagacaatagagtaatgtctagagtgtactgaaggaaagaaagc

SEQ ID NO: 643393 - DNA, 600 bp, Homo sapiens
tgtgagcctgtagtcccagctacttgggaggctgaagcaggagaattgcttgaacctgggaggtgaaggttgcagtgagctgaaattgcaccactgcaccagcccgggtgacagaacaagactcagtctaaaaaagaaaaaaaaaaagagaagtaaggaataataaagatatgactgaacaatcaaattattggcatggaagaagtgctgaaattattcatggcaaacacacaagaaaaaggcaaagattacagtaggttagaggagatgctagttatggaggacaaagatgatccaatataattataattgatgtctctgaattaggtacccaacaaaaaaaatagggaaaaatatgttcagagatgtaggtcatcagaaataaattgcaaatttttagatcaaagggcatcaaggggaaaaaatgatatgtaatgactgacattaacctgtatcctggttaagatattgaacttggaggataaacaaagactycttcagacttgcaggctgcctgcaagggaaaaaaagtcaggtgtcccagacttattaagagaagacaatagagtaatgtctagagtgtactgaaggaaagaaagc

SEQ ID NO: 643394 - DNA, 192 bp, Homo sapiens
ctagtttttttagtaagaagagaacattctattgaacttgttttaatgtttaatgctttacagctttaaaatctatgctaattgagaaaaaacagaatgagcaatgktagtgtaacactggaaaaagggagaaattgttaccttactcatgaggcacttagtagccttatatggtatttagggtgtcttgaa

SEQ ID NO: 643395 - DNA, 528 bp, Homo sapiens
ggaatgaaccaggtgtgccaggagaatcactcattggctgtcctggctgaggaagcatgaacaagggagccagaggaggtcagagaagaatgggagtgatcttttccagggtatatgtcatattgaaagactgaatttcaacctgagtgaaagtaaaaactgctgtttgtttgtttgtttattttctgtgcaaagaagtgrtattttctgacttcgattttaaaggagtaactctggctgctgtttggaagaatggtggctttcagaatgtattttatagagccaatttaattaactagtagttgtaaatgggagtaagaaaaagagcatcaaaacgtagatttgaggcagaaagaaatttgctgcccgaacctccttacacgtggcaaaactagtctgtctggatgtcctccccttgtgagactcaagagaggaccctggttggccagaatcatgagtctgccagccacaggcaacaagtcccctttctgcagggcagtcaggagcctcaggtctggaagaaatgtc

SEQ ID NO: 643396 - DNA, 568 bp, Homo sapiens
tgggagaatatatttgcaaactatgcatcttacaaagaactaatattcagaatctataaagaacttaaatcaataaaatgtaaataagcccattaaaaagtgggcaaagaacatgaatagacacttctctaaagaagacatactaacatgaaaaaatgctcaacatgactaatcatcagagaaatgcaaatcaaaaccacaatgagataccatcttacaccaatcagaaaggctattattaaaaagtcaaaaaaatagattttggcaaggttgyggagaaaagagaatgcttacatactgttgctgagaatacaaattagttcagcctctgtgaaaagcagtttagaaatttctcaaaaagctgaaaatagaattaacgtttgacccacaatcccattactgggtatatacccaaaggaaaagaaatcattctaccaaaacacacccgcactcatgtttatcgcagcactattcacaacagcaaatacatggaatcaacctaggtgcccatcaacagtgaactggacaaagaaaatgtggtatatatacacatggaatactatgcaac

SEQ ID NO: 643397 - DNA, 535 bp, Homo sapiens
ttttcttcttacacatatattgtctgtaactgttggcagggttggaactactatcagaagttargaatagaggtgttatagatccccatcagccactattctaataccaatgaggccttgggatatagcctgacatacatgtgagatagccatcccttctcacctttaaacctgaggctcaggaaaattgcttcaaccctgtcaagtaaggatgaccttacttgagaatattggctcttctatccatttagaagcatattgaggccaggtgtggtggcacacacctactgtaatcccagcagtttgggaggctgaggtgggaggatggcttgagctcctgaggttgaagcttcaatgagccctgattgtgccactgcactccaacctgggtgactcaaaacaaacaaacaaacaaacaaacaaacaaacaaacagagcatatggagaatagtggactctttcatgatcttcaatctttataaacgactttttgttgcccttttgactactttgcaagtcaagattgactttgatg

SEQ ID NO: 643398 - DNA, 535 bp, Homo sapiens
ttttcttcttacacatatattgtctgtaactgttggcagggttggaactactatcagaagttaggaatagaggtgttatagatccccatcagccactattctaataccaatgaggccttgggatatagcctgacatacatgtgagatagccatcccttctcacctttaaacctgaggctcargaaaattgcttcaaccctgtcaagtaaggatgaccttacttgagaatattggctcttctatccatttagaagcatattgaggccaggtgtggtggcacacacctactgtaatcccagcagtttgggaggctgaggtgggaggatggcttgagctcctgaggttgaagcttcaatgagccctgattgtgccactgcactccaacctgggtgactcaaaacaaacaaacaaacaaacaaacaaacaaacaaacagagcatatggagaatagtggactctttcatgatcttcaatctttataaacgactttttgttgcccttttgactactttgcaagtcaagattgactttgatg

SEQ ID NO: 643399 - DNA, 322 bp, Homo sapiens
aaatggaactttaattgggtgggacctatcacttaccaaatgtaaaaaggtgtgataaaaccgcsctttacttttttcagcactaatgaatgtcaaatacctagtgctgaagtgaaactattatggtcaaattgacgctacacatgtcaaatcgtcattcttctcagcaacagtaattgcttagattgtttaaaactagctttggttgtgatggtacatttgtgatccagccttaaggaatgaaaaagctgtaggaattctccccacttataaccaacatccatttctacatgattgaataagaacataataatcacttctt

SEQ ID NO: 643400 - DNA, 435 bp, Homo sapiens
gcagtctggggcacacagttatgggacacatagattggttctaggtcatcaaggtggctttggctgcaaggttcacagcccaggagaaattgcagctatagcagctctcctcctgcygcaggtttgagatgggggagagcaaaattccattgcttactgctgaggcactttccacagttctagctgtgaatgtccttacccatctccaaaacgagcactcaaatttccagcctgagactgaaatgtttgcatggccacactgccggatcaccaaagaatggctgactttgttgcacccagattaaaaatggtgttctgttctcagtcccaggtctgggaaaacgcctgcagcttttattcatgtcttttcctcacagcatctccaagcttcttctcaggttagctctcgtcttgggagaaaaaaaaaatgctctg

SEQ ID NO: 643401 - DNA, 435 bp, Homo sapiens
gcagtctggggcacacagttatgggacacatagattggttctaggtcatcaaggtggctttggctgcaaggttcacagcccaggagaaattgcagctatagcagctctcctcctgctgcaggtttgagatgggggagagcaaaattccattgcttactgctgaggcactttccacagttctagctgtgaatgyccttacccatctccaaaacgagcactcaaatttccagcctgagactgaaatgtttgcatggccacactgccggatcaccaaagaatggctgactttgttgcacccagattaaaaatggtgttctgttctcagtcccaggtctgggaaaacgcctgcagcttttattcatgtcttttcctcacagcatctccaagcttcttctcaggttagctctcgtcttgggagaaaaaaaaaatgctctg

SEQ ID NO: 643402 - DNA, 532 bp, Homo sapiens
cacttaaccccatgctgaaacaaaatacaactaattctcaaggtgatgttcaaatgctccaccaggaaagggaaaaaagtagtagctgcagagaatttattatgtatataataatacgtccaatgcacttaaactcttaatttttatactatctacactgttaggtaaacaatattagctcctatcttaaaatgagagaaasggatgcagggaataacagctggaatttgaaccagatctgactccaaaaatgttttcttaacacaactctgctgccttgacaagatggcagatagatacaatgccgtctagtgtagctatgtggctacctcatctctgctgaagaaaactaaatgacagcaccatacccaaccctagaacctacaaaatgtccccttacaaaacagacacttaacaggaaattctttttccaaagaaattgtagtggtatcagaaaacaggtaaattttgaaaagtttcaaacttctctgtatcagcccaggaatccgaccagttctaacaagtgaggtca

SEQ ID NO: 643403 - DNA, 568 bp, Homo sapiens
gtgcttggatcatggggatggagccataatgaatagattaattcactccctggaggaaggatgagcaaggttttcactctattagttcccaaaagagctgatcgtttcagagagcctggcacctcccctgtctctctcttgcttcctctcttgccatgtgatctcagcacatcctggctccccttcaccctccaccatgaatggaagcwacttaagctcctcaccagatgcccagtcttaaaccttccagccaacagaaatgtgagtcgaataaacctcttttctttataaattatctagcctcaggtattccattatagcaacatcaaacaggctaagacaaagccaaatgcatcaaggggtccgctatgataataaccaccatcaacatgtaatgaacactcactgtgaggtaggaggtgcattaggaggcgcattaggaggcacattaggagtggggctttatgcacattgtctcgctgaatactctgaactactatttaaggaagctactacaattctcatcctcattttcagatgatgaaactaaggctttaaaaagtcaaat

SEQ ID NO: 643404 - DNA, 482 bp, Homo sapiens
tgctttacgataaagctaattaaagcaacacctgtttggaatgatatagttggtgctgggtcaacatttccactggtttataatccagctgtgaaaactcaatttgaactaaaacttgggtgtataatatccaaacccagggtaattcaaaagaaacactaatataccagtgtgcatattagggggcaaaacaaatagacacaaagtggtttcaggtgctctttagcacttgtgtagtgtgcagactttttttatgatcacrgtttgtaggccttcagctcctcatgtaggtgggatacctttgggtatttaaaacgcatgaaaacaggccagttagtctgtgtaaaatatcagctactgtgtacacatggtaatgaggtttttctcatcaaggggtcttaagatgtgaaatgactactcccatgtttctctggatttaagactccctaggggcatcctgatgtgacagatgacaatatgtc

SEQ ID NO: 643405 - DNA, 618 bp, Homo sapiens
tatttagtaaatatttattgaaagaaggaattaattaattgtgtatgtccagttgtgaacctatggagaacctatctagaatggtggctttagaaaaaatgaagggaagagagattgctatagattgtctttctttaagagggaaaaacatagatgaacctgatgacagagcaaaggtgaagatggcactctggtttttgtcctgggaaacagaagtggggaagaatgcaatggggaagtaaagtgcttggaaaggtgactctgtgcctccagagtttgtctttatattcgccactatgacatgctatacatgtcaaatccaaaggtttgaaagttaaaaatgagagaaataaaaggagggttgttgtcctattcctgaaggaaacatgcagtgcttagataagcacctctgatcttaatccctttcatgacagcgtgatcccagcaagaattaaaatgtagcagagacattataatagaatgatatgcatagggctctctgctcaggttcttgcaataacatctcttgaataattaattgatccaattatttcttcattcaatgactrttttactgaatagctgctacaagccaggcaggcactatataagtaagtg

SEQ ID NO: 643406 - DNA, 427 bp, Homo sapiens
tttcacttgaaaatcctggcttctcacttgttgtctgacaccacaccagtggtagagaggttwtgtggtgggtgggtcaggttccatgttacagccaggtgaagaaggtaaaagtccaggcttcccactcagtctttgctgatgaggttggaggtatggccatttttatcccatggtgtttctctagggcagagaggtcaatgtctaaacttctctgtcttgccaggttgtcccttcctgttcctttatctagagagaactggcactagttggaattttattttgcttatttgtttgttttggttggtgtttttggattgctggcttctccagcgcccgatctgggatagattaggcaagaaaaaaaccaagggaactctctatcatgttattacctgggtcctgaggctcctagtcagtctgaatc

SEQ ID NO: 643407 - DNA, 578 bp, Homo sapiens
gctgtgctaagctccatttacattagaactatagtgctttcttgggggtaggggctcttctgattgtaaaaacaaagagtaacagagagtgtcactggtctctgtgaaggtgtgaagggtawagatggtattaacatgtcttgttcaccaaatcatggaattctggaatgaaggtggacattagctgaagctgagaaagatagtttgataaaaagttaagaaaactatagttatttcatccaataagtttaaaaactaagaaatgaaaataccttcaaactgagaacatagaaacccaaaatctaaaggtctctattggttgttttttgttttgttttgtcttgttttgttttttttgagacagagtctcactctgttgcccaggctggagtactgtgatgtgatcttggctccttgcaacctccgcttcccagcttcaagcgattgtcctgccttagcctcttgagtagctgggattactggcacgtgccacatcccggctaattttatatttttaatagagatggggtttcgccatgttggccagcctggtctcgaactcctgacctcagatgatc

SEQ ID NO: 643408 - DNA, 508 bp, Homo sapiens
  misc_feature 67, 111: n = A,T,C or G
gcaggagagagaaaaggggtctgtgggactccagcctttattgggcccagacattatccaataagtnttcccacgggcactagtcggtggggtgagtgccagcaggcacanttcttgactcctgctgcaatcgagcaggtcactctggcgtgtggggctgtccatgtgcactgtgaggtctgtggggtgagtcaggtaggttgtatccaackgttccatagctggtagtcaccaggaggaggcaactgtgtagggtcaatatctggccagccacactgaggaactgtgagggttagaactggaaattgtcaagggaatccgaacccagctaccatatgagagagttcaacttatgttcaatgtgaatgccatggcaatattaaaaggtaagaattcgctccatacgtgcttgaggtaaataggagaaatctagaatttatgtgaacagtgagaaggttggatgcgttttatgtcacgtattttaatactagcagcttattatatatgt

SEQ ID NO: 643409 - DNA, 508 bp, Homo sapiens
  misc_feature 67, 111: n = A,T,C or G
gcaggagagagaaaaggggtctgtgggactccagcctttattgggcccagacattatccaataagtnttcccacgggcactagtcggtggggtgagtgccagcaggcacanttcttgactcctgctgcaatcgagcaggtcactctggcgtgtggggctgtccatgtgcactgtgaggtctgtggggtgagtcaggtaggttgtatccaactgttccatagctggtagtcaccaggaggaggcaactgtgtagggtcaatatctggccagccacactgaggaactgtgagggttagaactggaaattgtcaagggaatccgaacccagctaccatatgagagagttcaacttatgttcaatgtgaatgccatggcaatattaaaaggtaagaattcgctccatacgtgcttgaggtaaataggagaaayctagaatttatgtgaacagtgagaaggttggatgcgttttatgtcacgtattttaatactagcagcttattatatatgt

SEQ ID NO: 643410 - DNA, 508 bp, Homo sapiens
  misc_feature 67, 111: n = A,T,C or G
gcaggagagagaaaaggggtctgtgggactccagcctttattgggcccagacattatccaataagtnttcccacgggcactagtcggtggggtgagtgccagcaggcacanttcttgactcctgctgcaatcgagcaggtcactctggcgtgtggggctgtccatgtgcactgtgaggtctgtggggtgagtcaggtaggttgtatccaactgttccatagctggtagtcaccaggaggaggcaactgtgtagggtcaatatctggccagccacactgaggaactgtgagggttagaactggaaattgtcaagggaatccgaacccagctaccatatgagagagttcaacttatgttcaatgtgaatgccatggcaatattaaaaggtaagaattcgctccatacgtgcttgaggtaaataggagaaatctagaatttatgtraacagtgagaaggttggatgcgttttatgtcacgtattttaatactagcagcttattatatatgt

SEQ ID NO: 643411 - DNA, 508 bp, Homo sapiens
  misc_feature 67, 111: n = A,T,C or G
gcaggagagagaaaaggggtctgtgggactccagcctttattgggcccagacattatccaataagtnttcccacgggcactagtcggtggggtgagtgccagcaggcacanttcttgactcctgctgcaatcgagcaggtcactctggcgtgtggggctgtccatgtgcactgtgaggtctgtggggtgagtcaggtaggttgtatccaactgttccatagctggtagtcaccaggaggaggcaactgtgtagggtcaatatctggccagccacactgaggaactgtgagggttagaactggaaattgtcaagggaatccgaacccagctaccatatgagagagttcaacttatgttcaatgtgaatgccatggcaatattaaaaggtaagaattcgctccatacgtgcttgaggtaaataggagaaatctagaatttatgtgaacagtgagaagrttggatgcgttttatgtcacgtattttaatactagcagcttattatatatgt

SEQ ID NO: 643412 - DNA, 613 bp, Homo sapiens
tatctcatttcatctcatcccatctcatctcatcatttcatatcatctcatcatttcatctcatcatttcatcaaatctcatatcatctcatttccatttcattttcattatttcatttcatcatttcatttcactatttcatttcatttcatctaatttcatttaattcattatgtcatttcatataatctcatttcatttcatctcatatttttgatatcatttttcatctcatttcatctcaattcatctcatcatttcatctcctcatctcatttcctcctttcattacaacatttcatctcatttcttctcatctcatttcaatttcattatttcatctcatttcattatttcacctaatttcattatttcatctcatctcatctcagttcatctgatctcatttcatctcagcatttcatctcatcatttttcatctcatcatttttcatctcatcatttmagctcatttcatttcatttgatctcatcatttcagctcatttcatgtcacatctattcatttcatcatttcatttcaacatttcatcatttcatcgcatcatttcatctcatctttcaatttcatttcaatatcatttcatcattt

SEQ ID NO: 643413 - DNA, 613 bp, Homo sapiens
tatctcatttcatctcatcccatctcatctcatcatttcatatcatctcatcatttcatctcatcatttcatcaaatctcatatcatctcatttccatttcattttcattatttcatttcatcatttcatttcactatttcatttcatttcatctaatttcatttaattcattatgtcatttcatataatctcatttcatttcatctcatatttttgatatcatttttcatctcatttcatctcaattcatctcatcatttcatctcctcatctcatttcctcctttcattacaacatttcatctcatttcttctcatctcatttcaatttcattatttcatctcatttcattatttcacctaatttcattatttcatctcatctcatctcagttcatctgatctcatttcatctcagcatttcatctcatcatttttcatctcatcatttttcatctcatcatttcakctcatttcatttcatttgatctcatcatttcagctcatttcatgtcacatctattcatttcatcatttcatttcaacatttcatcatttcatcgcatcatttcatctcatctttcaatttcatttcaatatcatttcatcattt

SEQ ID NO: 643414 - DNA, 554 bp, Homo sapiens
tatttttgtatggaagctataaacttagtgccattttataaagaacatgtctagaaagaattaactcaataaagacattatatttttaagttttataagcaaaaacaatgttcttttatttaagggtttgaactactatacgttattaatgctagaaatgatctactgtaaatacagtgcattttttcagacagtcaaaactgatttaataaaataagtcacagttaaacaggagattaaaaagataatgccaggctcagtggctcatacctgtaaccctaacactctgggaggccgaggcgggcagatcacttgaggtcaggagttcaagatcagcctggccaacgtgatgaaaccctgtctctactaaaaacacaaaaattagccgggcgtggtggcacgtgcctgtaatcccagctacttgggaggctgaggcaggagaatygcttgaaaccaggaggaggtggagactgcagtgagccaagatcccatggctgcactccagcctggcaacagagcaagactgtctcaaaaaaaaaaaaaaaaaaaggatt

SEQ ID NO: 643415 - DNA, 572 bp, Homo sapiens
tccagagaccacactcagccacaagtctatgctgcaatcaagactaatctatgagaaggatgaaaatttattaattggtgattgttggggagtaggaaccccaagttaatatgcccaaaagagacctcttggtttcttcctgcctgtctctaatttctctttcttcaggcttccctctctcagcaaacaccaacttcattcatccagatatgcatctccaattcttggagttacccttgttcctactcctctcatcgctatcyagttagtcagcaaagcctactggctttgccttcacaatacaaacctaaccttgtctctctaccctccaccactgccatcctggtctaagacaccattatcttttcccagattattgtaataactcatatctggtttcctggtttctactgttaccctcaattgtctattctcactacagctggagtgactcttttaaagcaaaagtcagattatgttccctctgctcaaagtcctctgatggcatcccaactctctcagaatgaaatcaagttgtcattggctcacatggccttacataaatctatcca

SEQ ID NO: 643416 - DNA, 572 bp, Homo sapiens
tccagagaccacactcagccacaagtctatgctgcaatcaagactaatctatgagaaggatgaaaatttattaattggtgattgttggggagtaggaaccccaagttaatatgcccaaaagagacctcttggtttcttcctgcctgtctctaatttctctttcttcaggcttccctctctcagcaaacaccaacttcattcatccagatatgcatctccaattcttggagttacccttgttcctactcctctcatcgctatccagttagtcagcaaagcctacyggctttgccttcacaatacaaacctaaccttgtctctctaccctccaccactgccatcctggtctaagacaccattatcttttcccagattattgtaataactcatatctggtttcctggtttctactgttaccctcaattgtctattctcactacagctggagtgactcttttaaagcaaaagtcagattatgttccctctgctcaaagtcctctgatggcatcccaactctctcagaatgaaatcaagttgtcattggctcacatggccttacataaatctatcca

SEQ ID NO: 643417 - DNA, 209 bp, Homo sapiens
gcctggcgaggagcaggctggggaggaagggagaggtcagatgggtctgtagaaaaggaagattakaaagactcagcgacgcttggggttggtactgaggggacaggcgggagggaaagaaggaagatttgggacgagttgcactgggcacagagactaggacgggactgatgtgtaaaagaatgcctggacatcaggcacctcagacc

SEQ ID NO: 643418 - DNA, 209 bp, Homo sapiens
gcctggcgaggagcaggctggggaggaagggagaggtcagatgggtctgtagaaaaggaagattataaagactcagygacgcttggggttggtactgaggggacaggcgggagggaaagaaggaagatttgggacgagttgcactgggcacagagactaggacgggactgatgtgtaaaagaatgcctggacatcaggcacctcagacc

SEQ ID NO: 643419 - DNA, 512 bp, Homo sapiens
tccagcctgggtgacaaagtgagagtccatcttaaaaaaaaaaaaaaaagaaaaaaagttataacccctattaattatcttcaacacttaaaatatatcttttgtgattcctctaacagctcaaacatcacataaaacaatgcagagggtcaaagcattgtcatgttcagttatttcagcagctagtcayatatgacagtaggaatctattctttgaataaatacgttgagacagttgtgtagaatccactcacatgatacccaacatataactgaaaattacaattgaaactgatggtttaaaccattaattgcaccatccactgaattttgtatatttgttatttatgcttgataacttgaattgactaattggttcatagattgcccgctactaattcaccacctccaaaacacgaacatccctttgagtacttctgtacttgatcacacaaacagaaaggagaaagcacaggttttgattctatccactgtgctaagagcagtattca

SEQ ID NO: 643420 - DNA, 512 bp, Homo sapiens
tccagcctgggtgacaaagtgagagtccatcttaaaaaaaaaaaaaaaagaaaaaaagttataacccctattaattatcttcaacacttaaaatatatcttttgtgattcctctaacagctcaaacatcacataaaacaatgcagagggtcaaagcattgtcatgttcagttatttcagcagctagtcacatatgacagtaggaatctattctttgaataaatacgttgagacagttgtgtagaatccactcacatgatayccaacatataactgaaaattacaattgaaactgatggtttaaaccattaattgcaccatccactgaattttgtatatttgttatttatgcttgataacttgaattgactaattggttcatagattgcccgctactaattcaccacctccaaaacacgaacatccctttgagtacttctgtacttgatcacacaaacagaaaggagaaagcacaggttttgattctatccactgtgctaagagcagtattca

SEQ ID NO: 643421 - DNA, 512 bp, Homo sapiens
tccagcctgggtgacaaagtgagagtccatcttaaaaaaaaaaaaaaaagaaaaaaagttataacccctattaattatcttcaacacttaaaatatatcttttgtgattcctctaacagctcaaacatcacataaaacaatgcagagggtcaaagcattgtcatgttcagttatttcagcagctagtcacatatgacagtaggaatctattctttgaataaatacgttgagacagttgtgtagaatccactcacatgatacccaacatataactgaaaattacaattgaaactgatggtttaaaccattaattgcaccatccamtgaattttgtatatttgttatttatgcttgataacttgaattgactaattggttcatagattgcccgctactaattcaccacctccaaaacacgaacatccctttgagtacttctgtacttgatcacacaaacagaaaggagaaagcacaggttttgattctatccactgtgctaagagcagtattca

SEQ ID NO: 643422 - DNA, 607 bp, Homo sapiens
ttgctaccagctcaactgcagtaaaatggagcaycaagtagattcctaatgtttctgactccaggccatggcttgtgcatggcatttctggactctccctgggctgaagggagctcacatcaataaagagaaggacacacgcctggctggatttccacatgctgaatgaagagcccttgggccttgaatgaacataggtgggagccaggcaatggttgctgtgggccttgagagagacccagtgctatgctggctctaagtctgaaccagagcagttccaatggtggtagcacctccctcagctgaaggcagctcagcacagaggagaatgacctcatttgtttgagggaaagtaagagaagaaaacaggaatctctgcctggtaatccagagaattctctcaggttttacccaagaccaccaaggcactacctctgtgaatctgcaagtcagtgttactgggcttggtgtgtcccctaatgctgataaggttgcagtgacaaaaaaacttagatcacagcactctattccatttgaatacatgaaaagcctttcctagaagaatgggtacaaagaagcctaggctgcaaagactacaaaaaatacc

SEQ ID NO: 643423 - DNA, 607 bp, Homo sapiens
ttgctaccagctcaactgcagtaaaatggagcatcaagtagattcctaatgtttctgactccaggccatggcttgtgcatggcatttctggactctccctgggctgaagggagctcacatcaataaagagaaggacacacgcctggctggatttccacatgctgaatgaagagcccttgggccttgaatgaacataggtgggagccaggcaatggttgctgtgggccttgagagagacccagtgctatgctggctytaagtctgaaccagagcagttccaatggtggtagcacctccctcagctgaaggcagctcagcacagaggagaatgacctcatttgtttgagggaaagtaagagaagaaaacaggaatctctgcctggtaatccagagaattctctcaggttttacccaagaccaccaaggcactacctctgtgaatctgcaagtcagtgttactgggcttggtgtgtcccctaatgctgataaggttgcagtgacaaaaaaacttagatcacagcactctattccatttgaatacatgaaaagcctttcctagaagaatgggtacaaagaagcctaggctgcaaagactacaaaaaatacc

SEQ ID NO: 643424 - DNA, 478 bp, Homo sapiens
tagcccagtgagatgcactgtggatttcttacctttagaactgtaagataacaaacgagttgttttaagccactgaatttgtggtaatctttcatagcagcaagaggaaackaatacaatacttaataaatgtactatcagtaaccctcacaaccacaaataattgagaaagtctacctgagcaagatgaatatacaaaactacaccagaacagattacaaagcacatagctttaattacactttgctgtgaacggtacagcctcatatatcaaggcaagaaaacaaaaacaaaaacaagaattgtaataaatattccagtttccctgctttacttttgaaaaataaacgtttttgaaaaaataaatcaagcatgtaaagttccctcaattcccacttttaagcagagaatgcccattagtgagcttgtggttatgctgtttgtatattttccccctcttgctaagaatcttcatgtt

SEQ ID NO: 643425 - DNA, 478 bp, Homo sapiens
tagcccagtgagatgcactgtggatttcttacctttagaactgtaagataacaaacgagttgttttaagccactgaatttgtggtaatctttcatagcagcaagaggaaactaatacaatacttaataaatgtactatcagtaaccctcacaaccacaaataattgagaaagtctacctgagcaagatgaatatacaaaactacaccagaacagattacaaagcacatagctttaattacactttgctgtgaacggtacagcctcatatatcaaggcaagaaaacaaaaacaaaaacaagaattgtaataaatattccagtttccctgctttacttttgaaaaataaaygtttttgaaaaaataaatcaagcatgtaaagttccctcaattcccacttttaagcagagaatgcccattagtgagcttgtggttatgctgtttgtatattttccccctcttgctaagaatcttcatgtt

SEQ ID NO: 643426 - DNA, 559 bp, Homo sapiens
ctaaaacttataacaatatatctatatatagacaacaagcggtaaacctatatgcactaaaatgcttatagtaattatctcttggtggcaggattagagatttttttgcttctttaaggagaagtagagtagcacatttattatctactgttgctataacaaattaccacaaagttaatagtttagaacaacacaaatttatctcacagttccatagtcagaactctaggaggcccagctcgtttctctgctctgggttccatgatgccaaaatcaaggtgctagtcagctagggctcttacatgaaggctctgaagaagaatctactttaggctcatttaggttgttgaaagaattcagcttcttgtggctgtaggactsaggtccccgtttccttgctggctgtcagccagggttgttctcaacttctaaggactgccacactttccggctcatggctactttcatcttcacatccagcaacagtgggtgaggtctcatgatttacacctttcctgactttttattccatggcatctctctgactgaatccagctgg

SEQ ID NO: 643427 - DNA, 544 bp, Homo sapiens
gctctcctgtatgaggtgtctgtcagcccctactgagaggtgtctcccagtcaggatacatgggggtcagggaccgacttgaggaggcagtctgacccttagcagagctcgaacgcygtactgggaggtctgctgctctcttcagagccatcaggcagggacactaaagtctgctgaagctgcacccatagccgccccctccgccaggtactctgtcccagagagatgggagttttatctataagtccctgactgaggctgctgcctttttttcagagatgccctgcccagagaggagaaatctggcagtctggccagagcagccttgctgagcagcagtgggctacacctagttcaaacttcccagtggctttgtttacactgtgagtgtaaaaccacctactcaagcctcagcaatggcggacgtccctcctcccaccaagctagagcatcccatttggatctcagactgctgctgtgctggcagtgagaatttcaagccagtggatcttagtttgttggctccatgggggtgggacctgct

SEQ ID NO: 643428 - DNA, 524 bp, Homo sapiens
taacactgtcagtgggctgttgaagtccctcacaattgtgtggctgaaatgacgtgatatcttaactcaaggaacatataatcttattgtaagttagaactaacatacacaccactgtgggcttccacatatggcctcttatattttcacttcacacgtaaccaatgtcagcttcacatgctcacttccaaatcaggatcttgagcagagaatcatcttctaaatggtgtacttgcatgtcagagtatctccaaattgccccacttggatgttctacaggtacttcaaacacactgtgtccaagtttgagttcagtgtttcccatgctacagcctagcctgctccctctcctgtgatccctggcctcagtaaacactccctcatgcaatctgttatccaagccagaatactgccattgcttttgaattcccctactctttctccacttcctttacygcacagttctgataatgctttcatcttatctattctcccctcattcctgatctgtgcttacaataccc

SEQ ID NO: 643429 - DNA, 590 bp, Homo sapiens
cctggcgtggtagcgggtgcctgtagtcccagctactcaggaggctgaggcaggagaattgcgtgagcccgggaggcggagcttrcagtgagccaagatcgcaccactgcactccagcctgggcaacaaagcaagactctgtctcaaaaaaacaaacaacaacaacaaaaaaaaaacacaaaaaacccccatagatttattatcttatagttttggaggtcagaagtctgaaatgaatgtcactggactaaaatggaggtgtcagcagggccacatcccttctgaaggctgtactggaggatccgtttccttccctatccagtttctagaggctgctgcattccttgaatcatggtctcacatcattctgacctctgcttccatcttcacatctctgtttctggctcttaccctcttgcctcccctcttataagaacacttactattatattgcgcccataagaataatccaaaatcatctctccatctcaagacccttaacttagtcacatatgcgaacaccgtcttgccatgtaatgccacatattcacagctttctggggttcagaggtagacatctttggggacca

SEQ ID NO: 643430 - DNA, 551 bp, Homo sapiens
gttggtaggtgaatgtatcttatgttgaatagctgcattcaaaaacacctgatttcctgaggaaaccaagkcagaacttccaatttggccacttatataacacttggatcaaccagtcagaaactacacagagaacctctcacctgattttctcctcctcatctcatgggaggcttccctggcccctgactcacactgaaattccagcacactcctaactcagacctcctttggcgttgtccctgctacccttcctgaacgtgtatccctgggtctctggtctctgagtcacttaccagctatgctgcagctgcctgccgtgggagtacatctgcaggtgtccagagattcatgtgtctttggactaggcaaggcctcaggcatcattctgggggatggtgtcagacattcttggagcttggacatacttggtgcggctggatacaccagtgattcatgaacagtcgggaattgaagttcttctctcccccaaggaaaggtcactttgctgaattttcttctttcttggttgaactatgcattgacacatt

SEQ ID NO: 643431 - DNA, 608 bp, Homo sapiens
ctgtcccagtgatttcctcaaaccccagaagcaagggagcacttggtcctaaatggcctgtgcaggacccataaattaattacttaatatcagttacagaaggccagttgctctccagatgaatggagctaatgctgttcttggcatccaacttaaagattcaaggtgccagaaatacaaaggaaggtttctttcaacttccagactagactgctaaataaaagtggaaggatgggatgagggtccctattcaaggaagraataaaggtttctttggttaagaaatattaatctcaatattcacatggcgttaaaatatatgtttgagatctccagaatgagatgttcataaatagataagctctaagtggatgattttttagccttgattttcctttactgaaatataattaacacttcctgaaaccagctagcttggaataatttagttcaattgtaagtatgcaaaacacttaacaattagctccatgaaatgagaccagcaagcactgagccgacttcattaatgccctaagtgcatatgctctattataagagctttcagaaatattgtataaatctgaaatggccccacagaatggaacagg

SEQ ID NO: 643432 - DNA, 608 bp, Homo sapiens
ctgtcccagtgatttcctcaaaccccagaagcaagggagcacttggtcctaaatggcctgtgcaggacccataaattaattacttaatatcagttacagaaggccagttgctctccagatgaatggagctaatgctgttcttggcatccaacttaaagattcaaggtgccagaaatacaaaggaaggtttctttcaacttccagactagactgctaaataaaagtggaaggatgggatgagggtccctattcaaggaaggaataaaggtttctttggttaagaaatattaatctcaatattcacatggcrttaaaatatatgtttgagatctccagaatgagatgttcataaatagataagctctaagtggatgattttttagccttgattttcctttactgaaatataattaacacttcctgaaaccagctagcttggaataatttagttcaattgtaagtatgcaaaacacttaacaattagctccatgaaatgagaccagcaagcactgagccgacttcattaatgccctaagtgcatatgctctattataagagctttcagaaatattgtataaatctgaaatggccccacagaatggaacagg

SEQ ID NO: 643433 - DNA, 570 bp, Homo sapiens
ttaagccactcagtctatggtattttgttatggcagcccaagctaagacactcagtcatttaatccgatgtacaaaaaaaactgatgtgtgtaatcataatattttggagatacttatcaaaaatataatatttattaagacagttaatcttttccatcagtcaaactttaggtgcaaaaatgatgactcagcaatttctgaagaaataaatgcttatgagataggatagttcagtgctgttctcatgcatcctggatctttatacaatccccctcccaccttgatcttgggtgtgaggcaagagccctcttttaaatttccagggaaattaaaaagaacataggttytttgaaaaagaccaaagcagacttgaagtggacaagaaattagacttcaggaaagaaatgaaagaaaacaataaaattaattatagaaatgcaaactgtgttattatagaaacagttataatagaaacagtaagaagtagatacaggatcaagacgtgaagacaactttagagaaatatgcaaaataaaaaaatcaaagagataatctctattggtaaaatg

SEQ ID NO: 643434 - DNA, 512 bp, Homo sapiens
aggaccaaccccttgcgcaaccctgatccttcccagtaaccctcagggccaccatagaaacagccctkcctctggcctgcacttcactattgccactctacgtggcatctcatagccagtacccttggtaactaggaacaaaggataacttctcagccaaagcaagaagctgcaaagaaacctaaaggaaaggttttgtgaacagacctagcaagaagaggcccgagagaagatgccctgtccccagcaggtataaaaacaccaatcacaggcattcaaaggcctgacagtgtttgcatacgagcctgtactgcgcagcctcacaccccaccaaaggcaccaacaagccaatgtaatctaagactgacggggcggggctgtatggcttaacaggcacaggagcagctttataaatggccagcatcccaagccctcaggcagctggtctgggcaggcccctgcaggagtcctggcagaagacacagcccagccccactgagaagcatctgagg

SEQ ID NO: 643435 - DNA, 607 bp, Homo sapiens
cgttatagccattttaatgtattttcattgtgacaggattgactttagaaggcttaagaattttgacgaagaaaaaaggggaaaaagaaggcataatagagagaaaggaaggaaagaagaaaagacaaaagtgtagccacaaaattgtcaacaataagaattgtataagaatacatattcttcaagaaatgaaaataattagaacacacattatgcctaaatacgttttaagaaatcaaataaacatgtagtttctaatggaagttcttccatgtattagtaaattcttcccacaaagcagtttatctatttattgtgaaagcgattgagttttgcagtaccaagggatcttttgcttttaaaccagttaattagtttttattagatgcaatgcartgttttgaccagacttttctctgtgcttttgggtgtgtttccctattagcaggtaaaacatttatctcttgactaaaagtagatgacatctttccccaaccatgagtcctcaggttgttacagaggctgccttcctgtctcactctgtaccccccattgcctctccaagtttaaaaaggaaatgattaattagtcaaaagaatatgttaaa

SEQ ID NO: 643436 - DNA, 607 bp, Homo sapiens
cgttatagccattttaatgtattttcattgtgacaggattgactttagaaggcttaagaattttgacgaagaaaaaaggggaaaaagaaggcataatagagagaaaggaaggaaagaagaaaagacaaaagtgtagccacaaaattgtcaacaataagaattgtataagaatacatattcttcaagaaatgaaaataattagaacacacattatgcctaaatacgttttaagaaatcaaataaacatgtagtttctaatggaagttcttccatgtattagtaaattcttcccacaaagcagtttatctatttattgtgaaagcgattgagttttgcagtaccaagggatcttttgcttttaaaccagttaattagtttttattagatgcaatgcagtgttttgaccagacttttctctgtgcttttgggtgtgtttccctattagcaggtaaaacatttatctcttgactaaaagtagatgacatctttccccaaccatgagtcctcaggttgttacagaggctgccttcctgtctcactctgtaccccccattgcctctccragtttaaaaaggaaatgattaattagtcaaaagaatatgttaaa

SEQ ID NO: 643437 - DNA, 451 bp, Homo sapiens
gaattcgttatggatgaggagaatcaccctcaaactattttcaaacactgaatagctttggaaattagcttttgctgcaaacttaataatgctttctaataaattcaacctacaattatgaggcaaaacagcacttayatgtgaaacatactgtgacaaggtcattttgatggcaacaaatgttgtttaaatcacaagtaatatcaagctggctttatatatttcccatgctgtcaagataagaaacaagatctccattcccgcacaaacttgcagtgaacgtattttccaagttctactatagttcaagctgcattactgaaccttaaggcaactgcaaaggaaatttttctatttaattattcacttaaatatacaattgagcatccacctaaccttcaacaggaagtgattaatatgcaatgtaatgacagctaaaaggcaaatggca

SEQ ID NO: 643438 - DNA, 545 bp, Homo sapiens
gctgggaccacaggcatgtgccaacacacccggctaattttcatattttttgtagagacaggattccaccatattgccgaggctagtcccagactcctgggctcaagagatccacccgtctcagcctcccaaagtgctaggattacaggcgtgagccactgtatctggcatcattttattttaagatgtaaagaaaagtattctggtggtgggagtagggggatatctatcctcaataagtcaagcatagtattaccatgtgacccagcagtttcactcttgggtataaatccaaagaattgaaaacaggtgttcaaacaaaacttgtacataaatgtttatagcagcaccattcacatagctaacagatggaaacagcacaaatgcccatcaatggttgaatagataaattaaatatagtatatccatacaatggaatattattcarccatgaaaaggaataaagtactgattcatgctacgacatggatggaccttgaaaacattatgctaagtgaaagatgccagatgcaaaaggtcacata

SEQ ID NO: 643439 - DNA, 617 bp, Homo sapiens
gtgaatgatcccagctttacactctagttgtgccctaaagctccattaggcagtcaattgttggaagttaagtactttaatgaaggactttctttttctaggtaatatagtatagaaggtagaccttagagccagactgcctgggttcaaatcctggctgatacttgccctgtgcagttttgggcaagtcattcagcatctctgtgccgttttcctcatgtattaacataaatggtgttcataacagcacttacttcatggagtggtagtgaggatgaaattagttaatatgcatgaagwgcttagaataatgcctggctcctcataaacactgtctatgcgctatgatctgggttaggacagcaggcatcacatgccatccttatgcacgacattcccatgggcatgcttaggattctgggcatttcttggcttgtagctatggctctgttcctttctcttccactcagggaagcatttcagaatgctaaaaaagaaagtgacattactctaggggtaagtctgaacgaggactgattttttaaaattaaatgatctataaatttcagttctcctaagtagtaataataatgacagctgaatttgagcatttactg

SEQ ID NO: 643440 - DNA, 571 bp, Homo sapiens
tttgtggcttgtttttagttctcttaacagtgtctgttgaagagccaaagtttttaattttggtaaagtcaatttactcttttataggttttggtgctatatctaagaatatatgggaaaagargaaaagaggctttaaaaatgtgtgtgtatgtactttttctttgattagtttgtagtagactaagcttaaggataaggaacacgttctacttgtatccccaacctagcacattgtaggttatgaacaaacttctgcagaaaatagaatgaatcaaaattaaggagtgatatttgtgcaaaactatcaagttgaaattatacttcaaactttctataaagaaaaataaagccaaaataaatttcagtgaatatatttgccctcattccagtatgacaaaaagatccaaggccatctttttcctgacttccgtaaagacaattgtgtagctacaatgaagctttctctacctcttattggatgcagaagacagggacttaaagcagactgcaagacaacatttgatgtggactttggacttgtgagattaactgaaattacatacaccta

SEQ ID NO: 643441 - DNA, 571 bp, Homo sapiens
tttgtggcttgtttttagttctcttaacagtgtctgttgaagagccaaagtttttaattttggtaaagtcaatttactcttttataggttttggtgctatatctaagaatatatgggaaaagaagaaaagaggctttaaaaatgtgtgtgtatgtactttttctttgattagtttgtagtagactaagcttaaggataaggaacacgttctacttgtatccccaacctagcacattgtaggttatgaacaaacttctgcagaaaatagaatgaatcaaaattaaggagtgatatttgtgcaaaactatcaagttgaaattatacttcaaactttctataaagaaaaataaagccaaaataaatttcagtgaatatatttgccctcattccagtatgacaaaaagatccaaggccatctttttcctgacttccgtaaagacaattgtgtagctacaatgaagctttctctacctcttattggatgcagaagacagggacttaaagcagactgcaagacaacatttgatgtggactttggrcttgtgagattaactgaaattacatacaccta

SEQ ID NO: 643442 - DNA, 495 bp, Homo sapiens
cctgtgacctttgtgaccaactccacctacgcagcagacaagggggtgagcctgggggtccccaccccatttctccctgcctttgcctgggcttgtcctgaagcctgctcatgggaacagctggaaagaaccatgtgctgccagtctgagctttttattttgttttacttagaaagatagagacagggtcttgccatgttgcccaggctggtctcgaactcctgggctcaagtgatcctcctgcctcggccttccaaagggctggggttacaggcgtgtgccaccgcaytcagccgcagccagtctgttttcaaagatggtctttgggttaatgacaattctctctctgcttactctccaggcagtgtggctttctgaatccaaggaggctgggcatagggagatgggatttgtttgcccggtttggactcagcattttttgtactcgatttaatagactcataaaatgtcaaaggtttaagtgagcttagagtt

SEQ ID NO: 643443 - DNA, 581 bp, Homo sapiens
ctcacaccaaagccttggacccctcccagcctgtgacctttgtgaccaactccacctacgcagcagacaagggggtgagcctgggggtccccaccccatttctccctgcctttgcctgggcttgtcctgaagcctgctcatgggaacagctggaaagaaccatgtgctgccagtctgagctttttattttgttttacttagaaagatagagacagggtcttgccatgttgcccaggctggtctcgaactcctgggctcaagtgatcctcctgcctcggccttccaaagggctggggttacaggcgtgtgccaccgcactcagccgcrgccagtctgttttcaaagatggtctttgggttaatgacaattctctctctgcttactctccaggcagtgtggctttctgaatccaaggaggctgggcatagggagatgggatttgtttgcccggtttggactcagcattttttgtactcgatttaatagactcataaaatgtcaaaggtttaagtgagcttagagttgatctggcccaaacctggctgatcagaatctccaggggaagttttattgaaatgcca

SEQ ID NO: 643444 - DNA, 495 bp, Homo sapiens
cctgtgacctttgtgaccaactccacctacgcagcagacaagggggtgagcctgggggtccccaccccatttctccctgcctttgcctgggcttgtcctgaagcctgctcatgggaacagctggaaagaaccatgtgctgccagtctgagctttttattttgttttacttagaaagatagagacagggtcttgccatgttgcccaggctggtctcgaactcctgggctcaagtgatcctcctgcctcggccttccaaagggctggggttacaggcgtgtgccaccgcactcagccgcagccagtctgttttcaaagatggtckttgggttaatgacaattctctctctgcttactctccaggcagtgtggctttctgaatccaaggaggctgggcatagggagatgggatttgtttgcccggtttggactcagcattttttgtactcgatttaatagactcataaaatgtcaaaggtttaagtgagcttagagtt

SEQ ID NO: 643445 - DNA, 416 bp, Homo sapiens
ttttttgtggatctggtttgcagataccgatatctcatatagtgattcacttgatccaaaggcatttgatggaagctgtcttctcccaaagactatttgcttttggaagaatcctcagagtcattagttagaagtttttggtagggatactttcctgtaayatgaagatgacctaaacctctttacttgagagataggaatcaaaggatcagtcttttaaagactatgggtttgctagttgttagctgtgcctgatagtgacttttttcctatgatctttccctgccgtgtctcttagaagacaaggtatccaggtatgaaaaccaattttgcagacattgtttaggatactaatggggaaagtcttcagtaacttttgttgaaagaatggatttcctgagtccttacagcattta

SEQ ID NO: 643446 - DNA, 416 bp, Homo sapiens
ttttttgtggatctggtttgcagataccgatatctcatatagtgattcacttgatccaaaggcatttgatggaagctgtcttctcccaaagactatttgcttttggaagaatcctcagagtcattagttagaagtttttggtagggatactttcctgtaatatgaagatgacctaaacctctttacttgagagataggaatcaaaggatcagtcttttaaagactatgggtttgctagttgttagctgtgcctgataktgacttttttcctatgatctttccctgccgtgtctcttagaagacaaggtatccaggtatgaaaaccaattttgcagacattgtttaggatactaatggggaaagtcttcagtaacttttgttgaaagaatggatttcctgagtccttacagcattta

SEQ ID NO: 643447 - DNA, 416 bp, Homo sapiens
ttttttgtggatctggtttgcagataccgatatctcatatagtgattcacttgatccaaaggcatttgatggaagctgtcttctcccaaagactatttgcttttggaagaatcctcagagtcattagttagaagtttttggtagggatactttcctgtaatatgaagatgacctaaacctctttacttgagagataggaatcaaaggatcagtcttttaaagactatgggtttgctagttgttagctgtgcctgatagtgacttttttcctatgatctttcyctgccgtgtctcttagaagacaaggtatccaggtatgaaaaccaattttgcagacattgtttaggatactaatggggaaagtcttcagtaacttttgttgaaagaatggatttcctgagtccttacagcattta

SEQ ID NO: 643448 - DNA, 263 bp, Homo sapiens
aaatcatttaaaacttgttttgtcatttgtaaaaatggagataatatcacctayggcagaaagtaactaggtactcaccaatcttgttttttataccataagtattatttcccagcctcccctgcactttggccagaactagtcacaaggccccagcctatgtaatgtgggcaaaaatgatgtatctacttctaagtttgacacttaagaatctcctgaaagatccacagctcactctctcttcactcaccaactggcacagc

SEQ ID NO: 643449 - DNA, 555 bp, Homo sapiens
atgcccttgacgtaaatgttaaaaattactcctaattcaaaggtgggaaactgaggcacagaaagagttggttgcataaattagcacagaagcctcattgtttatatttttgtagtcctttattattccaagatgactattttatgttaatattgatgaacctcaattgccacacattaacaagtcctgataccaaatcaattaaactgctgttttttgtttttgtttttactaaatatccgtgaaacaaaatcccagcactaacaggaatctctgtgcctaggctcctgacattttacacatgaacaagccgtttggtggcctgatttttattatgtaaggctcaccrtgtcaactaacacaaaccttttggggaggccaccctagtattttaaatttgcccccaaatgctcaagaaactgttttctgtccatcaggttcttcttattggtctaagcctacaaggagctctcaaatgctgatttgactttagagagaaagagacacaaatgctgtctctgagatacattaaaccaatttatactacaaccggtt

SEQ ID NO: 643450 - DNA, 557 bp, Homo sapiens
ttaaacatgggactctaagaccaaaaaacctttaggayccagaggaattatactcaactgtgtattttagactctgactagaaactagtggaaatgtttttgcttgggggactggggtgagaagaggaaactatttaattctggctgaattataacatccactcatgagaccagatgcattgccaatttcctggaaaacatatcagaactgctctaaagatggtcctttagcttaccttttaaaaattactcatatatatttttcaagatagagtaaattagcattaaaagatgtgctgctgagcacaaaaaataacactgagcaactaacaaacaagcaaatggaactcatgaggtgacaagtaagggatcagggaacacataacaaaagttttaaagatttttccatagaaaaagaaaaaaagaaagaaagttctgaggaatgctttgactccaagagatgtcaattggtgcttacctgaacacatacttgggttgaggggtacagctggcaggggggcatgaataacttttgaacacatctatacaagttactt

SEQ ID NO: 643451 - DNA, 609 bp, Homo sapiens
taaaatacttatcatacagtactgtgacagcttgaacagcttagcagaactggtcccctgtgaaattagtgaaagttataaaaactcaatcatttgaaatctctgcaaattgtcctaaaagaatacaacaactgaataaacatctatctaagaaaatctacaaaatcctgtaaaaaagtgggagtcaggtgcatttcaaccaagaccactccctctctccttcctcccagctcagcaagccaaaaactccgcttcaatctggtgcagcgaagagcacagggccttcttccagggaggagtaggatgtcagcttttctcatcttgcccccagctacctgttgctgaggctaagttcctggtgagtgttgttatgaggtgagggttgtcttctaatgcccagctcccactcatgtaatggaggtsctaaccttgagtgcagtgccaatgggaacactgggacactatcacctcgctctagttcataaggttgtggttccatgacagaagaagcaagctgagaagaaaggctactgcctgcctgccacctccacgtagtactcaacttgtaaagagagggtgtcagccagagagaattaattgtgccattgt

SEQ ID NO: 643452 - DNA, 609 bp, Homo sapiens
taaaatacttatcatacagtactgtgacagcttgaacagcttagcagaactggtcccctgtgaaattagtgaaagttataaaaactcaatcatttgaaatctctgcaaattgtcctaaaagaatacaacaactgaataaacatctatctaagaaaatctacaaaatcctgtaaaaaagtgggagtcaggtgcatttcaaccaagaccactccctctctccttcctcccagctcagcaagccaaaaactccgcttcaatctggtgcagcgaagagcacagggccttcttccagggaggagtaggatgtcagcttttctcatcttgcccccagctacctgttgctgaggctaagttcctggtgagtgttgttatgaggtgagggttgtcttctaatgcccagctcccactcatgtaatggaggtcctaaccttgagtgcagtgccaatgggaacactgggacactatcacctygctctagttcataaggttgtggttccatgacagaagaagcaagctgagaagaaaggctactgcctgcctgccacctccacgtagtactcaacttgtaaagagagggtgtcagccagagagaattaattgtgccattgt

SEQ ID NO: 643453 - DNA, 545 bp, Homo sapiens
aataatgttaccctaaatgagagaagatagggaagaccatgtcaaatgaatcactttttgatgtggtttggctgtgtccccacccagatctcattttgaattttagttctcataatccccatgtgtcatgggaggcacctggtgggaggtaattgaatcatgagggcggttaccctccrtgctgttcttgtgatagtgagtgagtctcacaagatctgatggttttataaggggattccacatttgctcggctctcattcttctccttcctgctgccatgtgaagaaggacttgattgcttccccttccaccatgattgtaagtttcctgaatgttccccagccgtatggaactgttagtccattaaagttcttttccttataaattacccagtctcgggtatttcttcatagcagcatgagaacagactaatacacacttcaatattgatttacatttctatgatcatcagtgatcttgagtattttttaatgtttgttggcaacctgcatgtcttcttttgataaatgtctgtttatgtcatt

SEQ ID NO: 643454 - DNA, 545 bp, Homo sapiens
aataatgttaccctaaatgagagaagatagggaagaccatgtcaaatgaatcactttttgatgtggtttggctgtgtccccacccagatctcattttgaattttagttctcataatccccatgtgtcatgggaggcacctggtgggaggtaattgaatcatgagggcggttaccctccatgctgttcttgtgatagtgagtgagtctcacaagatctgatggttttataaggggattccacatttgctcggctctcattcttctccttcctgctgccatgtgaagaaggacttgattgcttccccttccaccatgattgtaagtttcctgaatgttccccagccgtayggaactgttagtccattaaagttcttttccttataaattacccagtctcgggtatttcttcatagcagcatgagaacagactaatacacacttcaatattgatttacatttctatgatcatcagtgatcttgagtattttttaatgtttgttggcaacctgcatgtcttcttttgataaatgtctgtttatgtcatt

SEQ ID NO: 643455 - DNA, 554 bp, Homo sapiens
caatcctgtgaatttttttctattattccatgagacagctcaaactttgactctgttgctgtgtgctttccaggcctttggatcacaagacacaacttccattttcctagttaaatctcatccataggccgggcatagtggctcaagcctgtaatcctggcactttaggagactgaggtgagtgattcacttgaggccggaagcttgaaaccagcctggccaacatggkgaaaccccatctatactaaaactacacaaaattagccaggtgtggtggcaggcacctgtaatcccagctactggggaggctgaggcagcagaatcgcttgagcctgggaggtggaggttgcagtgagcaaatatcacaccaccacactacagcctgggtgacagagtgagactaaatctcaaaaacaaacaaaaatctcattcatagcttttacaaatggtttagtagagagaaagaaaaagaagcatcttaacctctatgtagggcaaaaccttacatgatactattctatagccttttcttggtgacccattttaaacttcca

SEQ ID NO: 643456 - DNA, 515 bp, Homo sapiens
gaattcttttgtttgtgtctctgttggagattgtttgaaattttgcattaatttttattagttacaacttttaactcctgygtaagcaccaagtacgaagatgatggttgtgtgttcctgaagttgcttaggtacactgttgtctcattatgggaagggatggaatggagggagccctgtctgctctgtgcaggaatcatcaggtcttccacctagattgtggagtgaggtactgcctccctgaatgcatccatccatgcctcacatccctagttgtcttttccaagcactcggaactctggagacttacattgaggtttcagattcactttagtacctactagtatcaaaggaaacagatagctttgcttttgtgcgagtggttggggtgtgggtgtgtgggtgggggaggtgagatatgaaattctacctgatacttcaaagacatgtctgaaactctatgaagcctagcatggtgatctcttattaagtagttgttctttgattacttcaat

SEQ ID NO: 643457 - DNA, 515 bp, Homo sapiens
gaattcttttgtttgtgtctctgttggagattgtttgaaattttgcattaatttttattagttacaacttttaactcctgcgtaagcaccaagtaygaagatgatggttgtgtgttcctgaagttgcttaggtacactgttgtctcattatgggaagggatggaatggagggagccctgtctgctctgtgcaggaatcatcaggtcttccacctagattgtggagtgaggtactgcctccctgaatgcatccatccatgcctcacatccctagttgtcttttccaagcactcggaactctggagacttacattgaggtttcagattcactttagtacctactagtatcaaaggaaacagatagctttgcttttgtgcgagtggttggggtgtgggtgtgtgggtgggggaggtgagatatgaaattctacctgatacttcaaagacatgtctgaaactctatgaagcctagcatggtgatctcttattaagtagttgttctttgattacttcaat

SEQ ID NO: 643458 - DNA, 534 bp, Homo sapiens
ggataaataaacaacagtacacccagacaatggaatgttattcagcactaaaaaaaaataaataaagctagaaaactacaaaaagatatgtaggaactgcartcctcttactgagtgaaagaagccaatctgaaaagccttacatactgtataatcccaactacgtgacattctggaaaagggaaaactatgaagacagtaaaagctcagtggctgccagtggttaggggacagtgaaggatgaataggcagagcagaggatttggaggcattgaaactctgtgtgatactataatggtggatgcatattcattatacatttgtccaaacccataaaaggtacaccaccaacagtgaacgctgatgtaaactatgacattgactgataatgatatgtcaatataggtccagattgtaacaaatgcaccactctagtgggggatgttgatagtagggaagctgtgcatgtgtgggggcaggagatgtatggtaatcgctgtacctctctctcagctttgctgtgatccttaaact

SEQ ID NO: 643459 - DNA, 550 bp, Homo sapiens
agccacctcttcccctaggtgctctgtccctagaagatgggagttttatctgtaagcccctgactggggctgctgcctttctttcagagataccctgcccagagaggaggaacttagagaggcagtctggctacagcagctttgctgagctgcggtgggctccacccagtttgaacttcctggtggctttgtttacactgtgaggggaaactacctactcaagcctcagtaatggcggatgtccttccccctaccaagctcaagtgtctcaggtcgacttcagacttctattctcacagtgagattttcacactagtggatcttagcttgctaggctccgtgtggttgtgatctgytaagctggaccacttggctccctggcgtcagcccttttttcaggggagtgaacagttttgtcttgctggcattctaggcacccctgaggtatgaaaaaaacctcctgcagctagcttggtgtctgcccaaatggccacccagttttgtgcttgaaaccctgggccctggtagtgtaggcacctgagagaatccc

SEQ ID NO: 643460 - DNA, 400 bp, Homo sapiens
aattcaaaaatatagagaatggggagtatgaagttacatgaagggcagaagtaaaatgtggacaaaatcacagaatcaagaaaatatatgaagaataataatagtttatgttgcacttaaaaaaaaaaaaagagatatctgaggacaaagcctcagagcactccaaacatttaggaatcatgaaaaagagaagaccctagcaaagaaaattcagttagtgtgttttctgccaaggcctctcctaaraagtctggctggagactctgtgtacatgggcaggcctaacttcagccagagtgtgcaaagaaccagcaatcaggatagcagtatcctcaaatcccaaacaagaagagactggggcacctacaatagtaacttaattagaactctccaagatatc

SEQ ID NO: 643461 - DNA, 575 bp, Homo sapiens
ttgtggtgtgtcacatttattgacttgtgtatgctaaatcatctctgcatccgtggtatgaaatccacttgmtcatggtggattatctttttgatatgctgttggatttaattagctagtatttcgtggatttttgcatctgtgttcatcagggatattggtctgtagtttgtttgtttgtttgttatgtcctttcctgtttttggtgatactggcttcatagaataacttagaaagggtttcctgtctctctatcttttggaatagcgtcaataggatgggtaccaattcttctttgaatgtctgatataattcagctgtgaatctgtctggtcctggattttttttttgttggtaactttttaattaccttttcaattttgctccttgttattggtctgttcagagtttctatgtcttcctggtttaatctatgagggtggtatatttccaggaatttatccatctcttctaggttttctagtttatgcaactgaaggtgttcatagtagccttggatgatcttttgtatttctgtggtatcagttgtaatatctcccgtttcatttctaatt

SEQ ID NO: 643462 - DNA, 506 bp, Homo sapiens
aaagggtgactgaatagaattgaactggttgtaagcaatgcaccacgtgagtgtaaacacacaggactacagctttatcgaggtgcaagtttcaagagtggcaaaaaaatgagaccaagtttatatgctctatctgcgctcattcaagggcattgacgggttctagatttgtttcacttaattttatgttttttttttctttcagtcattcattgaacacactaaatgagccccagtggagtcaatattgaaactgcacaataaccgtgtacactttggatctgtcctctttctaggatggtccatggtcccatgtcaytgtgatgacctacttcagagtgctgctggcatcttagaggacaggttttagtaactagcaaagtcatggaccaataggaaggcctgagaggaatgtgtaagaaaagcaatagaagaatggaacttggtgggccatgagtacaaacatctcatttttttaaaacaactaaaaaaggaggcagggcaca

SEQ ID NO: 643463 - DNA, 562 bp, Homo sapiens
cacgctggaattacaggcatgagccaatgtgcccagcaagtatggggtctttctatggcaagatgtggtgcccatcactgtgagggacaaagataatattattaataataataggcctgtaatgstgcctcacacctgtactcccacctactcaggaggctaaagtgggaggattgcttgaccccaggaggttgaggctacagtgagccatgatcacaccactgcactccagcctgggcaacacagcaagacgctattccgaataataataacaataataataatatctaacattttaatagaccttacttggagccaggcatcattctaagcatattgcatgcatgaactcatttaaacctatagccatctattattattcctgtcatgctcatcagccagaagccaccagaaacacacctgtagttgaacagaaatgggtttagtaacctgttgcaacaaggaagaccacacaccatggggagtgggagctgtgtcccagtaagagtgtgttggggcgcttctggttagctggcagaaagcagtgttaattccatggctg

SEQ ID NO: 643464 - DNA, 562 bp, Homo sapiens
cacgctggaattacaggcatgagccaatgtgcccagcaagtatggggtctttctatggcaagatgtggtgcccatcactgtgagggacaaagataatattattaataataataggcctgtaatggtgcctcacacctgtactcccacctactcaggaggctaaagtgggaggattgcttgaccccaggaggttgaggctacagtgagccatgatcacacsactgcactccagcctgggcaacacagcaagacgctattccgaataataataacaataataataatatctaacattttaatagaccttacttggagccaggcatcattctaagcatattgcatgcatgaactcatttaaacctatagccatctattattattcctgtcatgctcatcagccagaagccaccagaaacacacctgtagttgaacagaaatgggtttagtaacctgttgcaacaaggaagaccacacaccatggggagtgggagctgtgtcccagtaagagtgtgttggggcgcttctggttagctggcagaaagcagtgttaattccatggctg

SEQ ID NO: 643465 - DNA, 591 bp, Homo sapiens
aaagcacacatttttaacagaatttgtaacaatttcatttaatgttataaaattgcagaagtgacatgtgcagtgttttgtaaattatcaaagagaatataatcatgtccctctgcggttcactgtgttttggggtaaaatatctttaacctttcttaaaatacggtgcacatttagagtttttcaggtgttccaaaaaaaatacaactaacgattctttttgacattaagcacggaaatcgaaattaacctttttactttkatcatttatgtattttgaaaatatctaagtgttactcatatgcattctacaaatttttaactacccaggatgtcgagtttctatctccttccacagctgcaacgcttttatttcttgaggcacagaaatggtctctgaacgaactcctgttatttcagcactttttgcaaaatacaatacttcaacctgaaagtaaagaaaatgcttttaataacaactcatactcgttttctgactgtcaatgttgagcagttttctcattttccaaatgtattgctttaatcaaagacaaattttataaagaaaattaaataacccgtaaaaaattt

SEQ ID NO: 643466 - DNA, 591 bp, Homo sapiens
aaagcacacatttttaacagaatttgtaacaatttcatttaatgttataaaattgcagaagtgacatgtgcagtgttttgtaaattatcaaagagaatataatcatgtccctctgcggttcactgtgttttggggtaaaatatctttaacctttcttaaaatacggtgcacatttagagtttttcaggtgttccaaaaaaaatacaactaacgattctttttgacattaagcacggaaatcgaaattaacctttttacttttatcatttatgtattttgaaaatatytaagtgttactcatatgcattctacaaatttttaactacccaggatgtcgagtttctatctccttccacagctgcaacgcttttatttcttgaggcacagaaatggtctctgaacgaactcctgttatttcagcactttttgcaaaatacaatacttcaacctgaaagtaaagaaaatgcttttaataacaactcatactcgttttctgactgtcaatgttgagcagttttctcattttccaaatgtattgctttaatcaaagacaaattttataaagaaaattaaataacccgtaaaaaattt

SEQ ID NO: 643467 - DNA, 620 bp, Homo sapiens
ctgctttaaatcagatagggagaaaggacatgtacccaggttggcccaaattcccctccccctacagcttgaaggggacataactgatagcccagggggttttgtggtcctttggagatttatttgcttgtttctttstgggcaggggagattagaggaggcttatcattaataggaaggagaactatagggaggctaggatatgggagtaagctgagaggtcctcttgtgggatgtaaattgcaagctttgcatagctgtgtattctccttcaatgaaaagaaagcttggatataaggtattcactccatttgccttccctcttacagaaaaggtcaagctacaggatagtattgtaatttatacttccctcaggtggccatttttccccatcagagagagaatattggggccaggccatagtgcagaaaaaaatgaacctcctccttctcagggtttgcgggtcaaattggtcccaatggcttaggatgcatttcaagggtgagcctgttgatacctgagggtttcccatctgaaagacaaaaccacccgtggttttgtttgtttctacccccagcccaagaacccacaaaggtccctggaccctgctgattggaata

SEQ ID NO: 643468 - DNA, 606 bp, Homo sapiens
gccgcttgtacatcttcttttgaaaaatgttcatgtcttttgccagctttttaatggggttatttttgtttttgtcttgttgacttgaattccttataggctctggatattccctctttcattttaaatattgattgatactggcaaatgtctgcagtcaaaagaaggaaatctgttggaattatttactattatagcactaataaccatgtaataaccatgcattaaatgtttgctaaaaaaggttttgactaccacattctgtgtgactaacrgcatttcatggcaagggaaggtaacatttgagacccaaataactgacttttatttccaggagcaggaaggagttaataatcattctttgtaatttgtgagcattattttatgacattgataatgggcagtggtgtagattatcatttttcttggaggaaaagtaagtttaggccttccttaaaaacagtatgtattcactgcataaactagaacaacacattgggttatgaataatttataaataataaaatgaaatctaatatattgagtaaaagaattcttcagtcaacagggaaaaccagttgtattgcataataaataaaagtttct

SEQ ID NO: 643469 - DNA, 572 bp, Homo sapiens
  misc_feature 90, 98: n = A,T,C or G
gcaaagttcttcatgcgctcagcctcttgcgtaactgggattacaggtgtgtgccaccacacccggctaayttttgtatttttagagtcnaggatttncgctatgttggcctgactgggtctgcaaacgtcctggccccaaggtgaacctgcctgcctcgtgtcttttattcctttattatagaatttttatttaacatgaagtttatttgtggtgaataaaagtgcttcacattctaatgtgtgttctgcaaacttattctgtgtttgcagagatcacttagatgatccactggatgatactgccactgtgtttcagcagttggagcagttgtgcacggtcagcagatgtgaatatgaaaagacatgtgctcttcttgtgcagttattcgacccaaatgcacagaattaccaaaaacttctgcatccatattctggtgtaactgtggacatcaccattcaggaaggtcagtaaactttatatgactactgagtattatgttgaatattaagtaacatcattaatcactttaatagttttactgcaagttatttttatgtattttccccaat

SEQ ID NO: 643470 - DNA, 379 bp, Homo sapiens
ttttttcaggtagctcccaagcaatggcagagcatgcaggggacacttgggcatggccatggccatttctgcccaatgcagacctcctctaatgggcaacctttgctctggaggttgctattgggcttgctgaaattttgttagatgtgcatcattgttcaagkctcctcctgctcaatattgtctccttccgcttttcttttcataaaggtgtatggcagatgaacctgacagcaataacataagtgtatcccaagaatgacactgtatggcagatgaacctgacagcaacaagttaagcataccctgagaatgaccatatggtctaagaagaatgcatattcagagttgggagctacagaatctgggtgtggccaac

SEQ ID NO: 643471 - DNA, 607 bp, Homo sapiens
tccataaacaatgtctggccttgggcaactgagtttgtctctacgggcttcagcttcctccctgcaccaaaggtttcttccaacgtgcacagacagcagtatgtacagtggctatcttaagtctgactgctgctttgaaatctcactttacgtcccctgctatgtttggttacgtgatttttctgtgcttcccttttcctaccctaaaatggggatgataatggtgtatgtctacgttgtcatgagggtatcttgagggtggaacatagagaacagcactgtggctggcaatggcaagtccgcaccccrtgctctctgttactactgttaatttcttaaggctccaatggcccccttgctatgggctgaagtgtgtccccctaaaatccatgttgaagttcaaatccccagtatctcagaatgtgactgtatttggaaacaaggtcttttaaggaggtgattaaattaaaatgaggctcttagggtgggtgctgatccaacctgactggtgttcttacagaaaaggaaatagggagatagacagctatacggagaatcagcaagagggtggccatctgcaagccaaggacagaggccccagaggaag

SEQ ID NO: 643472 - DNA, 607 bp, Homo sapiens
tccataaacaatgtctggccttgggcaactgagtttgtctctacgggcttcagcttcctccctgcaccaaaggtttcttccaacgtgcacagacagcagtatgtacagtggctatcttaagtctgactgctgctttgaaatctcactttacgtcccctgctatgtttggttacgtgatttttctgtgcttcccttttcctaccctaaaatggggatgataatggtgtatgtctacgttgtcatgagggtatcttgagggtggaacatagagaacagcactgtggctggcaatggcaagtccgcaccccgtgctctctgttactactgttaatttcttaaggctccaatggcccccttgctatgggctgaagtgtgtccccctaaaatccatgttgaagttcaaatccccagtatctcagaatgtgactgtatttggaaacaaggtcttttaaggaggtgattaaattaaaatgaggctcttagggtgggtgctgatccaacctgactggtgttcttacagaaaaggaaatagggagatagacagctatayggagaatcagcaagagggtggccatctgcaagccaaggacagaggccccagaggaag

SEQ ID NO: 643473 - DNA, 551 bp, Homo sapiens
caacaataaatttaatcttttgacctcctcctcacctcctcacatttaattcccataatatccatttgtttcagaacttggtgtattaattctgttaagmtaagaccaaacaatgcgcgcgcgcgcacacacacacacacacacacacacacatcacctcatcctacatattcaaagcaagttagcgagtatcagttcttcatatcaggactcatgaaactccacgatgggatcatgtaactgcatcatctggaaatcaaaggttcttcaatcaccatggcaggtcaagaaacagcttggaaaccaagcactagaaatgtcatggttcagctttaaagttacacagatgatttccactcacattttatcagccagaagagtcacagggccatacctaacttcaaagtagtgggagacattcacaacgtcattcacaagggctcccttctttaaaacactttttttcctcctgcatcttctgtaacattttgggctaaacttcaatagtatatagcaaccactgactgcagggagaggagtctgtggaaaca

SEQ ID NO: 643474 - DNA, 395 bp, Homo sapiens
aggggctttttccttgtagactaatggttgcatctagctgtgtcttcacaacccatgatrcaaggggcagggtagctctctgggacttcttttataagagcaccaattccattcataccatttatgcccccatgacctaatcacttctcaaaggcctcacatcctgatactatatgaccccatacctgataccttgggaatcagaatgtcagcatatacatttgggaggacacaaacattttgatcataacaaggtcctagaaaagaaaattgaaatcacagaagtagatttgattatttaacatttgcatctagattgccaacattttatttctgttaatgagtttgcaaattcaactctgttagagcgataccagcttcataccatcccacag

SEQ ID NO: 643475 - DNA, 247 bp, Homo sapiens
tgcaccattgaatactatgcagccataaaaaawagaatgagattatgtcctttgcagggacatagatggagctggaggtaattatccttagcaaactactgcaggaaccaaaaaccaaatactgcatgttctcacttataagtgggagcgaaatgatgagaacacatggacacctagaggggaacaacacacactggggttttttggagtgtggagggtgggaggagggagaggatcaggaaaaaca

SEQ ID NO: 643476 - DNA, 583 bp, Homo sapiens
atgccaaccctgggacttcctcacatagttaatctcccttttctaaaacagaatttggcctggccctaaggatayctgtccaggctggagtgaacactgagttttcactacttcctctcatctctcagaaatcactgaagcaggcccaaattcgtggttagtccaataacaacccactctatttgagccaaaaattatagcaggccaggtcctgggtcagggagctcatttccttctctgccctctctccaccttgtccttcctgcccaggtgtgaatctttccccagagccaggcccacaccagaataagccctgggaagcaggagagtgggacatggcaaggtatttgtctctgtgtgtgggattgcactgggagaggaggacggagggaaggcattcctcatgcagtaaacagcccagaccaatttgcaccccagccactgagccttaatcttttcatgatgctttgcatatttataaccaagattcctattgctctggtacaaacaagattgcaatcagcctgccaacagattctctttaaactgtcagtctttatggagaaaaaacagtcactgacat

SEQ ID NO: 643477 - DNA, 410 bp, Homo sapiens
gaattcttcctaattcatcccatgaggccaagcattatcctgataccaaaactaaacaaggacacaaaaacaacaaaagctaaaggctaatatccaygattaacatagaagtaaacatccttaacaagatactagtaaacaaaattcaacagcacatcaacaagacaatacaccaggatcaagataatttattctagggatgcaaggattcttcaatatacacaaataaataaatatgatacaccatgtcaaaagaataaaggacaaatgccataagatcatctcaatagaagcatgaagagcatttgataaagtgcaagacctattcatgaaaaaaactctcaataaattagttatagaataaacatacctcaacacagagtgcaaagtttggaatatgtgcagtctgg

SEQ ID NO: 643478 - DNA, 566 bp, Homo sapiens
aattccagcccccttaaaagactagcttatttaatgctaggtttgacttaatactcagtctctaggtstagaatatcttctaatgaaaacctcaataaatgtatattgcctaaagaggttaggatataataaaacccattttggattatggaaataacaagtcatcagtgcattctgaagaaggtatatttatcttaagcaaatgcatactgacattttcatttttagtttagaaaatttatgtatatagttcttgctgaaggaaaagaagcagaaaattcactatgtatttacacttgatcatctgttagcagagctgaaaaatatgtaaatagaatgagttggttgcatatattacaacctcttcttatgattccactttcatttcaccataaaactgagaagcttctgagaattgaaagatctcagcttgctcttggttacttactttcatcattgatgaagcacttagattacaaagcacctgcatatttttgaaacgttttgctttacagtttgcaatagactgtaagaatgtgtgcatgtgtttatggccacaggtaaca

SEQ ID NO: 643479 - DNA, 572 bp, Homo sapiens
aataacaactcagggatgccacggccaatctcacctggggatttaaacatgatattagtaagcacatccgtaaggaaatgacagcttgcaaaatcctgtgaaacagtcatggactccaaataaaggagaaaaatactgagtgctgtgattcacaaggcctactttgaattggaatgtcctttttggtgtgaccaaaatattccgcataaagtcataatgtaattataaaaggatgcatcactgaaaccatttgggaaggggagaacaaaaacttttctattacaaacgaaactttggttgtttcattaatcatattcattaggaaagagcatgcctggccactgcttcccttgatagaatcaaaygctgaaaggtactcaaaagcactctccccacagtgtactcttgggtttaccccaaccaccttccttcctctcctggtgtatgttttcctcaaaaccatgttctgtaagaatgaaaagacaaatttttaaactcattggcaccatactctgacttcttgtaaatttctgtcagagaacatgtattatttttgccccaaacaccaagtg

SEQ ID NO: 643480 - DNA, 572 bp, Homo sapiens
aataacaactcagggatgccacggccaatctcacctggggatttaaacatgatattagtaagcacatccgtaaggaaatgacagcttgcaaaatcctgtgaaacagtcatggactccaaataaaggagaaaaatactgagtgctgtgattcacaaggcctactttgaattggaatgtcctttttggtgtgaccaaaatattccgcataaagtcataatgtaattataaaaggatgcatcactgaaaccatttgggaaggggagaacaaaaacttttctattacaaacgaaactttggttgtttcattaatcatattcattaggaaagagcatgcctggccactgcttcccttgatagaatcaaacgctgaaaggtactcaaaagcactctccccacagtgtactcttgggtttaccccaaccaccttccttcctctcctggtgtatgttttcctcaaaaccatgttctgtaagaatgaaaagacaaatttttaaactcattggcaccatactctgacttcttgtaaatttytgtcagagaacatgtattatttttgccccaaacaccaagtg

SEQ ID NO: 643481 - DNA, 651 bp, Homo sapiens
ctgccttcttgctgtgacttggcctattttatgctgcagtagaccacagactgggtaacttacacaaaacagaaatttatcagctcacagttctggaagctgtaaagtccaatatcaaggtgatggcagggttggcagttctcattccaggaaggagccttgaacacggcagcctctgcaggggaggaatgctttgtctcccatggcagaacacaaaagatcaaygggaaaaaaagggattaactcccttttataacggtgttaatcacacccatgaggtcacagccctcatgacctaatcactttgtaaaagttctacttcctaatagtgttacaatggcaattaaacttcaacatgagtttcagaggggacaaaaattcagtgacctcacagggtctcttctctgtgagcacacaaccctggtgtctctgtgtgtcctaatctcctcttcttatagagacaccagtcagattgcattagggcccaccctaaagatctcattttaccttagccacctcttcaaaggccctttgtttaaatacagtcacattctgaggtggttagccttcaacataggaattttgagggaacacaattcagtccatcacaatatgacattaagttttaaagacattttatttacacatcac

SEQ ID NO: 643482 - DNA, 628 bp, Homo sapiens
atatttaaaataattgctttctcatgaataagttaaatcattttctttgaaaatttttaaattactgtattcatccttacactaccagttttccatttatatctgaaatgctacttccaaagtacttttaaaatattgaaatagaagatttctattggaaaatttgaataattgtcttcaaaactaaattgtgcatatgctgtatcttctcagtatctcagccagaaatgaaaaacraaatactttgggagcatagtggaaaagaggaaagagaaatttggattcgtttcaaagtttaaaaaaaaaaaaaaagcctactggcagattcaaaggcctggattatattcaaaatatcacagatcgctaaaactgaaaattatcttataaatcattattcagtccaatctctgagtagatggagagatgtaatatatgagaaggctgaaatccagagaaaattgataacatgctctaggcttcccagttagtcaggtatatctctgtttattctactgccaagaccaaaacaaataggtttggaaatacacgttttcctaaataccccatgtccttctgtgtaccggtgtaaagtctaagaagatctgcagtattaatacaaattggtgac

SEQ ID NO: 643483 - DNA, 628 bp, Homo sapiens
atatttaaaataattgctttctcatgaataagttaaatcattttctttgaaaatttttaaattactgtattcatccttacactaccagttttccatttatatctgaaatgctacttccaaagtacttttaaaatattgaaatagaagatttctattggaaaatttgaataattgtcttcaaaactaaattgtgcatatgctgtatcttctcagtatctcagccagaaatgaaaaacaaaatactttgggagcatagtggaaaagaggaaagagaaatttggattcgtttcaaagtttaaaaaaaaaaaaaaagcctactggcagattcaaaggcctggattatattcaaaatatcacagatcgctaaaactgaaaattatcttataaatcattattcagtccaatctctgagtagatggagagatgtaatatatgagaaggctgaaatccagagaaaattgataacatgctctaggcttcccagttagtcaggtatatctctgtttattctactgccargaccaaaacaaataggtttggaaatacacgttttcctaaataccccatgtccttctgtgtaccggtgtaaagtctaagaagatctgcagtattaatacaaattggtgac

SEQ ID NO: 643484 - DNA, 646 bp, Homo sapiens
tttggcaatttgagcgacatttccaacgttaattttcacattttgaataaaagcagtaattaccctacctgcatgtgtcatgtacaaggtattgccctcatgtttctgtatttttttttggtgcatgtatggccacaggaagagagagtttttctcatagcaataaaaaatcaagtgaaaccgtttctgtatttatggtgtttcctcccactgtctacagtttatttatgtgaatgtctatgaaatggtttccttggtaactaaaaggagcctgggtctgatcaactgtatcacaggctcacagttttagacatcygttgcttacaaaaactaactactcaataacaaaatgtaaaaaatcaataccaattatttattgaattgatatctttctagggtttttccatttggctattttaggatcctactctatgctagatttccatgtaaacagttacaattcaggagaaatttacatttattatagatactgttttaggaagttatactagtgaggccctacccctttccaaatccatttgctattaattgccaaatgctttggctctcatctgagtaacaactagcactcaaatatttaatgactcaaaatcacagaaaaaataagacttgatgtgcctccata

SEQ ID NO: 643485 - DNA, 646 bp, Homo sapiens
tttggcaatttgagcgacatttccaacgttaattttcacattttgaataaaagcagtaattaccctacctgcatgtgtcatgtacaaggtattgccctcatgtttctgtatttttttttggtgcatgtatggccacaggaagagagagtttttctcatagcaataaaaaatcaagtgaaaccgtttctgtatttatggtgtttcctcccactgtctacagtttatttatgtgaatgtctatgaaatggtttccttggtaactaaaaggagcctgggtctgatcaactgtatcacaggctcacagttttagacatccgttgcttacaaaaactaactactcaataacaaaatgtaaaaaatcaataccaattatttattgaattgatatctttctagggtttttccatttggctattttaggatcctactctatgctagatttccatgtaaacagttacaattcaggagaaatttacatttattatagatactgttttaggaagttatactagtgaggccctacccctttccaaatccatttgctattaattgccaaatgctttggctctcatctgagtaacaactagcactcaaatatttaatractcaaaatcacagaaaaaataagacttgatgtgcctccata

SEQ ID NO: 643486 - DNA, 513 bp, Homo sapiens
tatttagaggggcagatgccacctcgtcatagaatgccrgggtccactctccaggcatttggaacgagttgccacgaggtcctcgggagggtgtgacagttcacacgcccaccagcagctttccacgtctccatttcctctgcccctgacagcatctaatgttatgatttttgtttgtaaatttggcttttggttcctttatgaggggattaattaatacaggctgctggctccttcccacgaatccaaaccttggagatgccatcaaagggatgacagttgatggagcccagaacctaagaggacccctgagagccttgcggaggctgggcaaacgtggtggagtctgggacaggaggggaatcacagtctgagtggaggaggccacacagcacaaccggggccagactgcagctctctgctccggggcccacctggggctgtcatctgccagccctgctttcctgtagaagatcccacccgtaccagccccaggaatctaggcaaggccag

SEQ ID NO: 643487 - DNA, 533 bp, Homo sapiens
aaaaaggcagagacatcaataataagctcaatgcatctgtttttctggaaactatttttcttatacagttgtccctcagtatatgtgggggctgagttccaggaaacccatgtatatcaaaatctgagaatactcacgttctgccattggccctgtggaacccccccacaaaagaaaactcagccaaaaaagtcagccctccctatataaggatttctcttcccacttttcartctgagtttgggtgaaaagtctgcctacaagtggacatacgcagttaaatcagtgtcgttaaaggatcaactgtactttctctactggatgcttttcagcggtcctgtgacatgaaatattaaaacaatttctaccaggctttaacaacatatggtcaaacactgaaaaaagtcctctgctcctgcactttagttgcagattgtgggtaggaggaagaaactaagatgtgagaatgatgacacttaatcttgatgctgctaactgtagcaaagtaatagtaaactcagattttttttttt

SEQ ID NO: 643488 - DNA, 580 bp, Homo sapiens
caaattctctctctgtactacatggccactgctggagaatgggggaggggtgttgtaggtgattcaagactgtttctcctaccctcctcattgcttctttctttaatgtgatgttaaattcgggtactatgatcactcacctgatttttggttgttttgaatgtgcttttttgtgtgtggatagttgttcaatttggtgttcctgttgcgggggataattgctgtaggcttctacttagccaccttgctccatctttgtaacaaacattttttaacatttatttctcccttagattctgtaacacttggttcttctcttacttgtacatttattacatgtcttcttctctgttccttctttctccaccagcccytgaattgatgattgtccagaatttcatccccagccaacctcccttgtgtctctggtctgcctttcaaatctgtgctttattcctgtcaaaagtactgtcatccacccaattgttcaaaacatcaacttgagtatcattttagatgcccctcttcttctatgttcccttttcatccaaatgatcctccagtactgtccattcagctt

SEQ ID NO: 643489 - DNA, 597 bp, Homo sapiens
gcttcattctttattatttttgtcttttgtctcctctgactgtattttctaatagcctgtcttcaagttcaatagttcttccttctgtctgatcacttctgctgtcacaaaactctgatgtattcttcagtatgtcaattgcatttttcagctccaaattttctgcctgattcttttcaattatttcaatctcttggttgagtttatctgatagaatcctaacttccttctctgtgtaatcttgtatttcattgggcttcctcaaaatagttatttcgaattatctgaaaggtcgcatatctctatctcttcaggattggttactggtatattatttagttatttggtgaggccatgttttcctggatgtctttatgcttccagatgttgtcagtrtctggtcattgaagagtcaggtatttattgtagtcattgcagtctgggttgtttgcacccactcttttgggaaggctttccaggcattcaaagggacttgggtgttataatctacatctttgtcaatacagctatatctgcattagggcacaccccaattccagtaatattttggctgttacagactcgaagaggtactgc

SEQ ID NO: 643490 - DNA, 568 bp, Homo sapiens
gagcgtgaattcaggtgttgaaagtctgataatggatgcataggtatttagtagaaaaacraaacaattttaaagaaaacatgtaccagcaaattatacatacaccaagtaaataaattcctgtacaactctaaagtttaatttttgtgtcttcattccattatcttcactaatgtaatattgtatttaaaaacttgtaacaatagagaaaataggattttaccctttgtataggctgggtaataagcattaagcattaaaaggtaaatggagacagtgtaaagaataaaagtttttagtaattcacaaagagatcactgtctcctgaatacttccttttcagacagattgacttgataccctgaaattggactacaggacttgacatatcttcactttttttctctttttaaagaaagtcaagccatgtgatttccatttttttttctgaagtggggaaatggtttaacatttatatatgtgcaagctttatccttataatcctagagggttaaggagaccttggtttacccatcacataactttcatttgaccgtgggtggcttta

SEQ ID NO: 643491 - DNA, 568 bp, Homo sapiens
gagcgtgaattcaggtgttgaaagtctgataatggatgcataggtatttagtagaaaaacgaaacaattttaaagaaaacatgtaccagcaaattatacatacaccaagtaaataaattcctgtacaactctaaagtttaatttttgtgtcttcattccattatcttcactaatgtaatattktatttaaaaacttgtaacaatagagaaaataggattttaccctttgtataggctgggtaataagcattaagcattaaaaggtaaatggagacagtgtaaagaataaaagtttttagtaattcacaaagagatcactgtctcctgaatacttccttttcagacagattgacttgataccctgaaattggactacaggacttgacatatcttcactttttttctctttttaaagaaagtcaagccatgtgatttccatttttttttctgaagtggggaaatggtttaacatttatatatgtgcaagctttatccttataatcctagagggttaaggagaccttggtttacccatcacataactttcatttgaccgtgggtggcttta

SEQ ID NO: 643492 - DNA, 568 bp, Homo sapiens
gagcgtgaattcaggtgttgaaagtctgataatggatgcataggtatttagtagaaaaacgaaacaattttaaagaaaacatgtaccagcaaattatacatacaccaagtaaataaattcctgtacaactctaaagtttaatttttgtgtcttcattccattatcttcactaatgtaatattgtatttaaaaacttgtaacaatagagaaaataggattttaccctttgtataggctgggtaataagcattaagcattaaaaggtaaatggagacagtgtaaagaataaaagtttttagtaattcacaaagagatcactgtctcctgaatacttccttttcagacagattgacttgataccctgaaattggactacaggacttgacatatcttcactttttttctctttttaaagaaagtcaagccatgtgatttccatttttttttctgaagwggggaaatggtttaacatttatatatgtgcaagctttatccttataatcctagagggttaaggagaccttggtttacccatcacataactttcatttgaccgtgggtggcttta

SEQ ID NO: 643493 - DNA, 629 bp, Homo sapiens
ccttcccacccctgagctctacctctaacctcatcccttctcttagtctcgggtatgcctgccttcgtggattggatcagactgcatctgcctcttcatggcaagaatttccctcctcctctccttttctggaataagccagtctaataccacataaatgacctgcttgggtgaatgttggagggtaggggatcagaagaggggtggaatagtggggaattgggaaggggaaaggaggtggagataaaatgactacttacccctttggatgaacaatcttggccgtcctttccttgtatcaggatgggaagaaataagctatgttttattttttctttaaaaacagctcattttaacacaaactcaactctcacgtcacctacttttattaggcatcttttacagctcagttccatctaggcacagaatctctgcgtctaccatctccatgttcttttytcttcctttgcctcattgacttccgctagtccttcatatctcaagtcaaactgactcagataatccttctctgatgcaccaggtgatgaaaaatccacctgttatatattttatatttctgtgtgtttctccacccacccattgtagtttgaagtgatcttttaaatgta

SEQ ID NO: 643494 - DNA, 629 bp, Homo sapiens
ccttcccacccctgagctctacctctaacctcatcccttctcttagtctcgggtatgcctgccttcgtggattggatcagactgcatctgcctcttcatggcaagaatttccctcctcctctccttttctggaataagccagtctaataccacataaatgacctgcttgggtgaatgttggagggtaggggatcagaagaggggtggaatagtggggaattgggaaggggaaaggaggtggagataaaatgactacttacccctttggatgaacaatcttggccgtcctttccttgtatcaggatgggaagaaataagctatgttttattttttctttaaaaacagctcattttaacacaaactcaactctcacgtcacctacttttattaggcatcttttacagctcagttccatctaggcacagaatctctgcgtctaccatctccatgttcttttttcttcctttgcctcattgacttcygctagtccttcatatctcaagtcaaactgactcagataatccttctctgatgcaccaggtgatgaaaaatccacctgttatatattttatatttctgtgtgtttctccacccacccattgtagtttgaagtgatcttttaaatgta

SEQ ID NO: 643495 - DNA, 552 bp, Homo sapiens
caactttgcaagtcctgggatgaagcaagtgtattttgcatgaaggaaacatgtaaataatttggggtagaacatcgattgtgctgcttttaaaatacatccacaaattctgtgatactcctcccatgaaaaggtggagtctaattgtcccctccttgaatatggggcagccctagtttactcacttctgacaaatagaaggtgacaggaaaaatactgtgtgactcacaaagccaagtcatagacggtgacaccataacttttgcttgtgtctccttctcccttgggacatgtgcttttggagccctaaagccaccatggtgaagagaaagatacycaaggattcccagctgtgccaacccccatctatttaagtcttccaggtaccaaccaacaaggctcttaacatgattccagtctccagccttcaagctgcctcgtctgatgcgaaggggaatagagacatgctatgctcactgaggcggttccagccacttcagcaagccagaaagaggaagaaaagaaagaaatggaaaagatatacaactgtta

SEQ ID NO: 643496 - DNA, 587 bp, Homo sapiens
gaacctatgagaggctctctgagtatgaggcactttagaggaccatgtttgagaaggggcaagaacctaacaggacttgggaggattgagcagcagggaaccctgcaatggcctcatggaagtaagagtctggcttstctcctggttggtctaccatcaactcttcttctctccctgcatttgttctagactcaaagtcccaaaagacaactagctaagcctaggctgcaggtctgtgccctggttgttttgtaactggaggggaatcctctggtgacttcagcttttgtgctggggggtgggtacctggaattattttcccatgattatacatattggtgtggtaaattcccaaaaggaaatatattagagtgttattaggatgggggaaatggatataggcatgtgtagcatgtaaaatgacaaggttgatgacttattagctaagaatcaacttgttttattgttcctttgaggtttgtttaaatgttgctttcctttctgggtttctccaggtagctcctcatcttcagtgttctcattgcactttgtattctcttagcttttaattctcagggacaaggact

SEQ ID NO: 643497 - DNA, 554 bp, Homo sapiens
atgtgaggccctgctgacactggcattagaatcagtgtacttccccttcaagtgaatgactttgatatttctgcattgcaatattacttaatactcaaagaagaaacctcaaaatttccatagcactgattccctttgaaatatagcgataagagcttcaaatattaagtacaaattattccagaatgattctatcagagaggtataaaatgatcctcttattgctactacaggctgctagattaattttatgcatatatgaattggtcagagttctccagagaaacaggactaacaggatacacatacacaaacacatatgaacacaactcacacacagagagaaggggggggattattttaaggaattggctwatatgattatggggatggcaagtctgaaaactgccaggtaggtcagcaggctggagacacagggaagagctgatattgcagtctctagtacaagtggcgactggactttgaggagggagccaagatggccaactacacaccgccagtaagagtttctcctactaagagagaccatacta

SEQ ID NO: 643498 - DNA, 626 bp, Homo sapiens
attccttgttgctcattaatattcttttcttctgggttgaagatttcctttgagcatttcttgtaagactggtttggtgttgatgaaatccctctgctttttttgtggaaagtctttatttctctgtcatgtttgaaggatatttttaccagatatgctattctagaataaaagttttttttcccttcattgctttaatattgtcatgccacactctcctggcctgtaaggtttccactgaaaagtctgttgatagatgtattggagctccattgtgtgttatttgtttcttttctctagttgcttttaggatcctttctttatccttaaccttttggagtttgattattaaatgccttgagacagtcttctttgcattaaatctacttggtgttctawaaccttcttgtacttgggtattgatatctttctctaggtttgggaagttctctgtcatacatttgaattaactttctacccctatctctatctcctctttaaagccaataactcttagatttgcccttttgaagctatcatctagatcccacaggtgggattaattgtttcttagtctcttttcttttgtgttctctgactgtgtattttcaactagcctgtcttca

SEQ ID NO: 643499 - DNA, 594 bp, Homo sapiens
aaatatagaagtctgagaaaagagtacaaactgaattttaatagaagtcatttacatatgtgaaaaatcagcttaactagctgggggaaagataaagttggccattaaaataaagttggaactgatggcattcaaattttgaattgtaaacaaccgtatcaaatgtgaytaatttcttgaggtgactagctaggaaaatctgaaattaaacttcaacacttattaacggggattggtttggtcaagttactctatctctttttacctctgttttcctgtttgtaaaaaggggatgcttcatgtggttgttgtaatgattaaatgaggtaataatggattattgtataaaggtacaataaacattagctgttttattattgatggtaatgtgaaaacattaaattgtttagacagtagcttgctgataaggaagaaatacatggtttttcttgcaggcaaactctgtggaaaaactcacattcaccttgcagtggtttatacaacgggtaacaaatgccgtggttgtgatgtgaccttcttttgtaattactgtaatggctgatatgatggttctatattctcaagcatcataac

SEQ ID NO: 643500 - DNA, 512 bp, Homo sapiens
gcttttccaggcacacagtgcaagctgtcagtggatctaccattccggggtctggaggacagcagccctcttctcatagctccactaggcagtaccctagtggggactctgtgttgggggcttcaaccccacatttccattccccactgccttagcagaggttctccatgaagacctcacccctgcagcaaacttctgtctggagatccaggcatttccatacattctctgaaatctaggtggaggytcccatacctcgattctggacttccgtgaatccacaggctcaacaccacatggaagctgccaaagcttgaggcttgcaccctctgaagccatggcctgagctgtaccttgaccccttttagctgtggctggagcagctgggacacagagcaccaagtccctaggctgtacacaggcaaacagcagaggggccctgggcccagcctatgaaaccattttttcctcctaggcctctgggtgtgtgatggaaggggctgccacaaaga

SEQ ID NO: 643501 - DNA, 511 bp, Homo sapiens
tggatattgtctcatttttagaacagartactgaagggatcatgaacactatctggtatgtcacgtaggtaatttacaagggctacaatttcagctcagatttaccttttcctggatacaggtcttgataggtctcttgatgtcatttcacttcagattcttctttagaaaacttggacaatagcatttgctgtcttgtccaaattgttactaagaatcaagagagatatctgacatgaaatgacattggaaaacattaaacacgattgaaataatgctagccaatatggttattattagaaaccaattacattttcaacttaaaaacagtaatacttattgcagactcaaatgtgcttattctaaaacaagtaaatgtttgcctatggtctgagattctaatccacggagttcattctaatccacattcaacactatcatgtaccagtgggcctcataacccacctagccctgtgatttttcaggttcacttttctaaacttgtgaatta

SEQ ID NO: 643502 - DNA, 508 bp, Homo sapiens
atgacattggaaaacattaaacacgattgaaataatgctagccaatatggttattattagaaaccaattacattttcaacttaaaaacagtaatacttattgcagactcaaatgtgcttattctaaaacaagtaaatgtttgcctatggtctgagattctaatccacggagttcattctaatccacattcaacactatcatgtaccagtgggcctcatracccacctagccctgtgatttttcaggttcacttttctaaacttgtgaattaaatatttattttcttagttcagaagaggaaaaaaactcttgtaattgttgcccatttcaggagaaatcttgcatatgaaaacaagagataaatatacacaactgaggactgtggtttaaacaaaatcttgagaatgttttttgaccttatacatttgtgctttagtataacaaaatgatatagacaaaggtaacttttaatagaaccagtcactaaattaaaaaaatgacaaattct

SEQ ID NO: 643503 - DNA, 570 bp, Homo sapiens
tgtttctattgaatagaatagaacaaaagaaatgagatgccacttctgagattagattataagatactgtgaatttcatcttgtgccctctccctctctctctttctcttgccctctcatttgaatgaagccaacyggcatgctgtcagtggcccagtgtaagtcctgttacaagaaattgatgattacctgtagccaaccctaagtgaagaactgaggtcctcagtcctacaaatggagagaaactgaatctagctaagaaccatgtgagtgagctgggaagaagatccaccctcagttgaaatttaagatgacatattgagcagacatactgagacacactgaaagtaagagagcaggaggaaacaaaaccagggtcatacaaagaacacaactgattttgagattctcacataagtattacaccttcagtgagcacgtgtactagaaatttaaaaaataaataaaataaaccttcaaagtgagctagcaaataaatttccctatggtctcagctctgagtggagagagaaaatgttccctgtggagtttatagccagaatccagctc

SEQ ID NO: 643504 - DNA, 585 bp, Homo sapiens
gaggtcttcacataaagcaggcttaaggattagacatagcaggtttgacagatgtgatggcttgcagaatcctttatgagctcccactgtccatctggataagatttacagacctttcagaaattcctataagcttgggttctgtgcccactctctagactstcaggctaagatctctgatataaaacagacctcttctgattttgtctagctgcttttctaatatctattcaccaagctcttccaataatagcataaggccctaattaatattaaacttttatcattataatacataggatgtcttctgttttcctgatcaaattctgactactattaaaatataaagaattgtccagaaatatataaaaaaagaatcacacattgatcttctttaaatgaaaatataacaattgtatggactaggatgattacagttgttcagttctgactgttatttgaagaaaaaagcaataagaagcctcagcaacttaacagaaggagctgccatttactaggagaaaagattgtggatgagagtgtagcaaaggtcagaattctgtgaagcttgagatgtttattata

SEQ ID NO: 643505 - DNA, 515 bp, Homo sapiens
acagacctttcagaaattcctataagcttgggttctgtgcccactctctagactgtcaggctaagatctctgatataaaacagacctcttctgattttgtctagctgcttttctaatatctattcaccaagctcttccaataatagcataaggccctaattaatattaaacttttatcattataatacataggatgtcttctgttttcctgatcaaattctgactactattaaaatataaagaattgtccagaaatatataaaaaaagaatcacacattgrtcttctttaaatgaaaatataacaattgtatggactaggatgattacagttgttcagttctgactgttatttgaagaaaaaagcaataagaagcctcagcaacttaacagaaggagctgccatttactaggagaaaagattgtggatgagagtgtagcaaaggtcagaattctgtgaagcttgagatgtttattataatgaattatcttttatactcactacaatttcctaaca

SEQ ID NO: 643506 - DNA, 406 bp, Homo sapiens
aatcacacattgatcttctttaaatgaaaatataacaattgtatggactaggatgattacagttgttcagttctgactgttatttgaagaaaaaagcaataagaagcctcagcaacttaacagaaggagctgccatttactaggagaaaagattgtggatgagagtgtagcaaaggtcagaattctgtgaagcttgagatgttwattataatgaattatcttttatactcactacaatttcctaacaattttggggtttatatttttgaaagagatatacctttaattttctttctttgtactattgttaggtaactttaatgtgcagattatactacagtgaaagttgccaatgacaaggcaaagtcacttacatcagacccaaagcaaagtggagccgggtcat

SEQ ID NO: 643507 - DNA, 406 bp, Homo sapiens
aatcacacattgatcttctttaaatgaaaatataacaattgtatggactaggatgattacagttgttcagttctgactgttatttgaagaaaaaagcaataagaagcctcagcaacttaacagaaggagctgccatttactaggagaaaagattgtggatgagagtgtagcaaaggtcagaattctgtgaagcttgagatgtttattataatgaattatcttttatactcactacaatttcctaacaattttggggtttatatttttgaaagagayatacctttaattttctttctttgtactattgttaggtaactttaatgtgcagattatactacagtgaaagttgccaatgacaaggcaaagtcacttacatcagacccaaagcaaagtggagccgggtcat

SEQ ID NO: 643508 - DNA, 406 bp, Homo sapiens
aatcacacattgatcttctttaaatgaaaatataacaattgtatggactaggatgattacagttgttcagttctgactgttatttgaagaaaaaagcaataagaagcctcagcaacttaacagaaggagctgccatttactaggagaaaagattgtggatgagagtgtagcaaaggtcagaattctgtgaagcttgagatgtttattataatgaattatcttttatactcactacaatttcctaacaattttggggtttatatttttgaaagagatatacctttaattttctttctttgtactattgttaggtaactttaatgtgcarattatactacagtgaaagttgccaatgacaaggcaaagtcacttacatcagacccaaagcaaagtggagccgggtcat

SEQ ID NO: 643509 - DNA, 647 bp, Homo sapiens
gtatttatagtaaaagtgaaatttttatgatggcttgagaaacttttcccattagatgcccaagtgctggtctggtctgatcttctcatcttcccttgggtgattctgtggcagtcacactagcctccttgctgctccacaaaaactccagcatgatcctacttcaggatatttgccattgttactgcatctgcctggaaccttttctcccatataaacatagagattgctcttgcctgtccttcaagtctattcttaaatgtcccattctctgtgaagctttcctgcccaccctatttaaattacagacttcactcccaattccccatctactttaagagtcttcatttatcattccttgacaaactgtaaatayacatgttcacttttttatcgtctgtctccaaatactggaatgttaagttctgtaatgtcagatatttctgtttggttcactggtgtattcttaaagcatgttacatactaggtatactcaatgaatatttgttgaataaatatcacattgggcttattccagaaattcaagcttgtttcaatagttagagcaatctacaaatgtaattcattacattaactaattaaaggagctaaatcacatcaccaccacaataatgcagaaaaccaca

SEQ ID NO: 643510 - DNA, 576 bp, Homo sapiens
acaaacactaatttttttttagaaaaaattataaaaagagtaaaaatatgccttatactaccgtaatttcatgttttacagctctgggaaaatagaaaataaaatgttctgttagcatgaatccctctgtgcccccaaaaaaccctatggattgcatcattattacctaaaaagtctattctcaaatgcagcagagtgatattttttacaaggtagatattaattttagatatggaataatattgrtgatttcaattttataacactgggttaagatgaaagaatgagaagataaaggtccctcagcaatataactcacaaacatgttcagaagcagtaagaagttacattaattatcttttgaaagtcgataatctacatctttaatgtatgcatatagcatagctaatgtactatcgctgggtccatttattcaatgaataattgccgctatgtgtcagacatttttctaggcctaggaatggatacataagtgaacaaagcaaagattctggttcttgtagagtttccattaaaagacaatttagtaaaacttttcttcccccaaattataaa

SEQ ID NO: 643511 - DNA, 513 bp, Homo sapiens
tgttttagtttgagatcttataggcctgtctcatcaggytggtgtcagcccagctaggattaggcagaattgggtgggggctgtagtgcatttttggcacagcatgtacctgtctgactaattctctgtcttttctttcctgttgcaattcatgggtcttagcatcttctgaatggtgtttagtaggtcatcctgttgatttcctgctagggagtagcatactctggccctgtaccattggccaagggacttaaggatagatgaagggctgcagttttgttaaatggaacaatatgaagagatggcattgttaaaaaaaaaaaaaaaggcttggcagcagggcccatttgaatggttggtccttggctcctttgttgatataggcagatccttgatgggaatttggaatgatcccaaatattgtagatcactggtacatcaagtcatcctcaaggttgtctgtgtaacagtcttgaatgatattttgtcagtctttggagagtctctgtatag

SEQ ID NO: 643512 - DNA, 457 bp, Homo sapiens
ttacagtttatatctaaatagaagctggaggctttgttggggactcataggcataaaatattatttattatagagttaaatgctacaaagacaaatctaattaataggcctattttcctttttaaattctactcataatttcttcatagtttttatgataaaaggttggattttgattagaactcccatgcttttgtgtcagaattaaaactggtattagaataaataattcaaaagctagagaaagagtacaatgagaagccatgagttgcatttgaattataatattatgtcttacagatttggggtatatrctaaagttaccaaagttgtagaaaataaggccgggcattgtggctcacatctgtaattccagcactttgggaggccgaggtagatggatcatttgaggtcaggagttcgagaccagcctggccaacatggtgaaactccgtct

SEQ ID NO: 643513 - DNA, 457 bp, Homo sapiens
ttacagtttatatctaaatagaagctggaggctttgttggggactcataggcataaaatattatttattatagagttaaatgctacaaagacaaatctaattaataggcctattttcctttttaaattctactcataatttcttcatagtttttatgataaaaggttggattttgattagaactcccatgcttttgtgtcagaattaaaactggtattagaataaataattcaaaagctagagaaagagtacaatgagaagccatgagttgcatttgaattataatattatgtcttacagatttggggtatatgctaaagttaccaaagttgtagaaaatmaggccgggcattgtggctcacatctgtaattccagcactttgggaggccgaggtagatggatcatttgaggtcaggagttcgagaccagcctggccaacatggtgaaactccgtct

SEQ ID NO: 643514 - DNA, 536 bp, Homo sapiens
ttatgtttgtttatgtatttacctttaccagagagctttgtatattcatacagcttgcttatttacttayatagttattgcctagagttcatttatttcaacctgaaggacttaacacttcctgaatgtcaaattcagggataaatggatttttttcagttttaaaaaaaaatccggaaatgtcttaatttctccttcatttttgaaggataagttttccagctatatatttctcaattgacaggtttcttcattattttaaatatataatccactgcctactggccttcaaggtttctgccgagaaatcagctgctaatgttatctggatccctatctgtgagagttgctcttctctctgagttttcaacattctcccattatcttttttttgtttgtttttgagacaaataattgtacatattcatgggatacagagtgatattttgatacatgtatacaatgcccaatgatcaaataaggataattagcatatccatcacctcaaatatttgtcatttatttgtattgtgaac

SEQ ID NO: 643515 - DNA, 443 bp, Homo sapiens
agtggcacagtctcaactcactgcagccttgacctcctaggctcaggtgatccttccacctcagtagttgggactgtaggcacatgccactatgcctggccaattatttttatttttttatttttactagagaggaggtcttgctttgtttcttaggctggtctggaactcctggcctcaagcaatccccccaccaccccctcccaaagtactggtattataagcatgagccaccatgcctggggtatctgtgtcttttccatttatttatagagttactttgtcttttactaattcaatgatctgtttaatcttttattaaattataaaaatrataaatacttttaaataagtgaaaaatgtccttcactctttagacccataatcttatctcaggaaataattgcagttgagaaaatgggccatatccttcaagatacgta

SEQ ID NO: 643516 - DNA, 429 bp, Homo sapiens
tagtggcacagtctcaactcactgcagccttgacctcctaggctcaggtgatccttccacctcagtagttgggactgtaggcacatgccactatgcctggccaattatttttatttttttatttttactagagaggaggtcttgctttgtttcttaggctggtctggaactcctggcctcaagcaatccccccaccaccccctcccaaagtactggtattataagcatgagccaccatgcctggggtatctgtgtcttttccatttatttatagagttactttgtcttttactaattcaatgatctgtttaatcttttattaaattataaaaatgataaatacttttaaataagtgaaaaatgtccttcactctttagacccataatcttatctcaggaaataattgcarttgagaaaatgggccatat

SEQ ID NO: 643517 - DNA, 438 bp, Homo sapiens
aagtcacttttcagagtagtaagttagtgacctagtaaccttccctctaatgaccagtagtttttttttctgaataccattatgaactcatagattattgtttgcatttgatgtatttcaggccattgcagtctttattgttttggatgcttacattgtctcatctaggttaataattatctcttcaagttgactttcatgtctttttgamgtgatcctgttggactttgatggctttcttgctttctggcaaaacagatgttccaggatcaatatactgcaccatacatggagtcagccgtttctctagggaaccttgattccttttagtagagaacgcagtttgaggtcttggactgaatgacttttgtgaacctcctctcctgagactacagcctgcatccctgcatatagcccgtttggagctcttgctgggca

SEQ ID NO: 643518 - DNA, 560 bp, Homo sapiens
gactctaggcaggacaaatagccaacacctctggcttttaagctacttttttttgttagtttgtttttctgcaaaagtattttcccaagtaaaaccaataagccttaactaaggttatggcttaaccatggacccatgagatgtctccaaatagatggcaagcagtttttacaagatctagaatcacccctaaagtaactcagaaaaaaaaaaaaaaaaagaaagaaaattcaaggcaggaaatcaaaagctgtccatggaggkgtaaagtttaagtaaatggcaaaagtcccataagagtcaaacaggaaaaaactcattctctaagacaaaaattgaatgcaggcctccatcaagtaagagcaaacttttactcactaagctacagtatgaggcaagcaccataatgcttttcccagaaggagtatagagcagacatttttgagcttgcaaaggatatatcttttccaaggaaaagggacagatataaatctgagaaaccttaaaaggaaacatattttagaattgatagccaatatttcttgcaatcttactgaaag

SEQ ID NO: 643519 - DNA, 634 bp, Homo sapiens
tgctcttttttttcaccgcctactatctctgtaccaccaaggtcccttgccttggttctgagtgtttgttttcctttcgcattagtaaagtaaacccactttgtagtcagcacacagcatgttaaagagaaagtgtttgtcttacagtgtgttaaagggaatataattactccctccaagggaatcttctggctgtttacaaaccccagattataattggtaggcagctgattatcacaacaacccagagagaacccaccacagtctgtgctgcttgtgggggggtggggagataccctcttctgagtcctatataccactattgttaaatattcccaactctggtactccctggtggaacgtggaaagagccacagtgcatggcatatctccaaataaacacaataaatcaatttttaatttgtaaaattgattccttggacattcactcagagcctccgttgtggaatttcttacattattgtrgaataatgtgcattatgtacatcattgtacataatgtcaaacagtagccactgatggtaaaacagagtattacagctcagctctgttaccttgcaaatggtctggggcagggtatgtgcacgtgggggtgtgtgtggggggtgggggg

SEQ ID NO: 643520 - DNA, 634 bp, Homo sapiens
tgctcttttttttcaccgcctactatctctgtaccaccaaggtcccttgccttggttctgagtgtttgttttcctttcgcattagtaaagtaaacccactttgtagtcagcacacagcatgttaaagagaaagtgtttgtcttacagtgtgttaaagggaatataattactccctccaagggaatcttctggctgtttacaaaccccagattataattggtaggcagctgattatcacaacaacccagagagaacccaccacagtctgtgctgcttgtgggggggtggggagataccctcttctgagtcctatataccactattgttaaatattcccaactctggtactccctggtggaacgtggaaagagccacagtgcatggcatatctccaaataaacacaataaatcaatttttaatttgtaaaattgattccttggacattcactcagagcctccgttgtggaatttcttacattattgtagaataatgtgcattatgtacatcattgtacataatgtcaaacagtrgccactgatggtaaaacagagtattacagctcagctctgttaccttgcaaatggtctggggcagggtatgtgcacgtgggggtgtgtgtggggggtgggggg

SEQ ID NO: 643521 - DNA, 293 bp, Homo sapiens
cagctcatccccttggctgggaacatcctccactgacttcctcccactgtctgccctgaacccactgctgcccccagaaaaaggccgggtgacaccggggggctcccagcccgtgcaccctggaagggcaggtctggcggctccatccgtggctgcaggggtctcatgtggtcctcctcgctatgttggaaatgtgcaaccactgcttctygggaggagtggtgggtgcagtccccccgctgtctttgagttgtggtggacgctggcctgggatgagagggcccagaagacct

SEQ ID NO: 643522 - DNA, 627 bp, Homo sapiens
ccagtaacacatcaaaggtgacctttgattgtacttttggtttatgctccaaaatattgattataaatttcatcaccgtcatattttatgtcaaaataaatctgcataatctgaatgtcaatacattttggaatctactaaataactgaaattgcagaaatattacccactccaaataactggagagatgggcatgtccagaattgcagttagcacttgcttaactgrtgcagaagctgcagaagctgcagaagccacaagctgttgagggcacttacatggtaaccactatagacgtctgaaagacaaatgtggactcggtaaatgtgaccattccagagggtcttatacttctaaggtttctggactttctctccagaaacctccagattctaaaatatacaatccaaataaatttcctgtgggtcagaattgaagatgaaatgaagatgattaattacagaaaactataccaggagcctacttcaaaagcttctaaagggaatgacttttccagaaccttatcctatgtgaaggaagacaaatctcccattccagattctctcccattcttccattattatatgaatgagtaaagttagccaaaaggggtaagatgtatgtaaa

SEQ ID NO: 643523 - DNA, 627 bp, Homo sapiens
ccagtaacacatcaaaggtgacctttgattgtacttttggtttatgctccaaaatattgattataaatttcatcaccgtcatattttatgtcaaaataaatctgcataatctgaatgtcaatacattttggaatctactaaataactgaaattgcagaaatattacccactccaaataactggagagatgggcatgtccagaattgcagttagcacttgcttaactgatgcagaagctgcagaagctgcagaagccacaagctgttgarggcacttacatggtaaccactatagacgtctgaaagacaaatgtggactcggtaaatgtgaccattccagagggtcttatacttctaaggtttctggactttctctccagaaacctccagattctaaaatatacaatccaaataaatttcctgtgggtcagaattgaagatgaaatgaagatgattaattacagaaaactataccaggagcctacttcaaaagcttctaaagggaatgacttttccagaaccttatcctatgtgaaggaagacaaatctcccattccagattctctcccattcttccattattatatgaatgagtaaagttagccaaaaggggtaagatgtatgtaaa

SEQ ID NO: 643524 - DNA, 627 bp, Homo sapiens
ccagtaacacatcaaaggtgacctttgattgtacttttggtttatgctccaaaatattgattataaatttcatcaccgtcatattttatgtcaaaataaatctgcataatctgaatgtcaatacattttggaatctactaaataactgaaattgcagaaatattacccactccaaataactggagagatgggcatgtccagaattgcagttagcacttgcttaactgatgcagaagctgcagaagctgcagaagccacaagctgttgagggcacttayatggtaaccactatagacgtctgaaagacaaatgtggactcggtaaatgtgaccattccagagggtcttatacttctaaggtttctggactttctctccagaaacctccagattctaaaatatacaatccaaataaatttcctgtgggtcagaattgaagatgaaatgaagatgattaattacagaaaactataccaggagcctacttcaaaagcttctaaagggaatgacttttccagaaccttatcctatgtgaaggaagacaaatctcccattccagattctctcccattcttccattattatatgaatgagtaaagttagccaaaaggggtaagatgtatgtaaa

SEQ ID NO: 643525 - DNA, 406 bp, Homo sapiens
ttacagaaaactataccaggagcctamttcaaaagcttctaaagggaatgacttttccagaaccttatcctatgtgaaggaagacaaatctcccattccagattctctcccattcttccattattatatgaatgagtaaagttagccaaaaggggtaagatgtatgtaaatagtccagggaggccaaaaccacaaaagggagtaacagccaaaaatgagcttttcccctggagatgctttttcaaggtcacagcccagaagaggaagcctatcgaatctctaggtttccattggaagaacaggcagtgcttacctgcactgcacaatccattctaactaggatgatgactatggattaaagatgaaagtgtggcaatgcacagactctatctgaggagaatacaga

SEQ ID NO: 643526 - DNA, 406 bp, Homo sapiens
ttacagaaaactataccaggagcctacttcaaaagcttctaaagggaatgacttttccagaaccttatcctatgtgaaggaagacaaatctcccattccagattctctcccattcttccattattatatgaatgagtaaagttagccaaaaggggtaagatgtaygtaaatagtccagggaggccaaaaccacaaaagggagtaacagccaaaaatgagcttttcccctggagatgctttttcaaggtcacagcccagaagaggaagcctatcgaatctctaggtttccattggaagaacaggcagtgcttacctgcactgcacaatccattctaactaggatgatgactatggattaaagatgaaagtgtggcaatgcacagactctatctgaggagaatacaga

SEQ ID NO: 643527 - DNA, 574 bp, Homo sapiens
cagtaaaataaaaaaattgtgataccgtgtataattacttctaggacctctcaacctactggcctagcagaygtgcatgtttatatgaacccatgtttatggacgcatcaaaactacttatgtacttaatcttctgtaactttattatattaaaaatgagaacacactggtctcctgacccaactatgctaccacgtggacctttctagccttccttccttgactgtccataaccatccactttaaagtgaggaatcctatcccaccaattgccttattattacctggttgcacaattttaggacacatgcatagcggtatcagaaatgtaaagctcattggaaatatgtttatctactagaatagagtgctatgtgtagtttctttacattttaaacatacagaatttcctcattttcaaagttaattagactagcaacttcattttctactttcttcagtgaagtcatttcaattacaccatataatatcatttatttgaaatttggtataaaccaaactatagtcaagtaaacagatagaggatattcaaggaatttagagaatgagtatt

SEQ ID NO: 643528 - DNA, 595 bp, Homo sapiens
aacaaattctaagttcattttctatattacctcttttgtacatagaattagccatttttctaaagcttgcttgtttctaacgttaacgaatagcagtaaaataaaaaaattgtgataccgtgtataattacttctaggacctctcaacctactggcctagcagacgtgcatgtttatatgaacccatgtttatggacgcatcaaaactacttatgtacttaatcttctgtaactttattatattaaaaatgagaacacactggtctcctgacccaactatgctaccacgtggacctttctagccttccttccttgactgtccataaccatccactttaaagtgaggaatcctatcccaccaattgccttattattacctggttgcacaattttaggacacatgcatagcggtatcagaaatgtaaagctcattggaaatatgtttatctactagaatagagtgctatgtgtagtttctttacattttaaacatacagaatttcctcattttcaaagttaattagactagcaacttcattttctactttcttcagtgaagtcatttcaattacaccrtataatatcatttatttga

SEQ ID NO: 643529 - DNA, 574 bp, Homo sapiens
cagtaaaataaaaaaattgtgataccgtgtataattacttctaggacctctcaacctactggcctagcagacgtgcatgtttatatgaacccatgtttatggacgcatcaaaactacttatgtacttaatcttctgtaactttattatattaaaaatgagaacacactggtctcctgacccaactatgctaccacgtggacctttctagccttccttccttgactgtccataaccatccactttaaagtgaggaatcctatcccaccaattgccttattattacctggttgcacaattttaggacacatgcatagcggtatcagaaatgtaaagctcattggaaatatgtttatctactagaatagagtgctatgtgtagtttctttacattttaaacatacagaatttcctcattttcaaagttaattagactagcaacttcattttctactttcttcagtgaagtcatttcaattacaccatataatatcatttatttgaaattyggtataaaccaaactatagtcaagtaaacagatagaggatattcaaggaatttagagaatgagtatt

SEQ ID NO: 643530 - DNA, 441 bp, Homo sapiens
ttgtataaacaagcaaatgttatactagttttaatactgatgtttagacattgtatcttattttagcattgaatattttcacaattaktataaatattatctaataataatgtacctgttaaaaatatttaaaattttacctttgaattattttattgttgaattaaaattcctttaatatgatagtaaatttctatgttatgctctctctatgcatatgctaattaatctatccacttctctctttgtagtgacatatgaaaatcaggcctctcttctaatggacatacacatgtttgcatatagaatatcagactcttcatagcatttaaaatctttaaagacatgaatattgccttttaacaaatatactttagcatgtactgagaatcccctatttatttttaatttgggctaatcaatatgattattaatattatt

SEQ ID NO: 643531 - DNA, 441 bp, Homo sapiens
ttgtataaacaagcaaatgttatactagttttaatactgatgtttagacattgtatcttattttagcattgaatattttcacaattagtataaatattatctaataataatgtacctgttaaaaatatttaaaattttacctttgaattattttattgttgaattaaaattcctttaatatgatagtaaatttctatgttatgctctctctatgcatatgcwaattaatctatccacttctctctttgtagtgacatatgaaaatcaggcctctcttctaatggacatacacatgtttgcatatagaatatcagactcttcatagcatttaaaatctttaaagacatgaatattgccttttaacaaatatactttagcatgtactgagaatcccctatttatttttaatttgggctaatcaatatgattattaatattatt

SEQ ID NO: 643532 - DNA, 441 bp, Homo sapiens
ttgtataaacaagcaaatgttatactagttttaatactgatgtttagacattgtatcttattttagcattgaatattttcacaattagtataaatattatctaataataatgtacctgttaaaaatatttaaaattttacctttgaattattttattgttgaattaaaattcctttaatatgatagtaaatttctatgttatgctctctctatgcatatgctaattaatctatccacttctctctttgtagtgacatatgaaaatcaggcctctcttctaatggacatacacatgtttgcatatagaatatcagactcttcatagcatttaaaatctttaaagacatgaatattgccttttaacaaatatactttagcatgtactgagaatcscctatttatttttaatttgggctaatcaatatgattattaatattatt

SEQ ID NO: 643533 - DNA, 596 bp, Homo sapiens
tctgttttcatctaaatagaatcatacaataggtggccttttgtgcctggcttctttcagttggcataatgctatcaaggttcatgtacgtattggtactttmtttctttttataactgtataacattcaatttcttggatataacattttgtttatccaataatatttttattgacatttgagttgtgttcagccttcggctattttaaatactgctgctaaaaatacttgtgtacaatttgtgtttgaacacctctttccaataatctgggtgtatacctaggaataaatttctgggtcatatgacaattctatgtttcatatatttagaagccatcaaattattttccaaggtggccagttctacccatagagtatctaactgtggttttgatttgtagttgcctgatgagtgatgctattgagtatatttttatgggattattgaccgttcgtgtatcttcttgggaaacacatctattcctatcatttatcagttttgagttgggatatttgtgacggagttaaaacaatttttctatattcaagatacatatatatatacagacatatagatacgtgtttttcaaatatc

SEQ ID NO: 643534 - DNA, 237 bp, Homo sapiens
tgctgacaagaaaaaaagttaggtaccacctttcttctctgcagatggcctgagatgggttaatttgaaagaatgcttccaaacatgaggtgagccctgagaacagcataatccactgctgtctcccacattcagtttctcagtttgtgctcttttmattttggggggagggaagccagtcctttaaagcgatcttcagcatgatggcagagccaaggagtgtggacaggtggcacg

SEQ ID NO: 643535 - DNA, 417 bp, Homo sapiens
ttcaaaatcacatttttgaaccttgatgcttgaagtgtagcttgggtaacagatgggctttaagccaattttggcatgcaaggggytgagtttattaggcatcagcactgctgaaaatcgtggggatgcaggcttaatttcaacactattctaaatacttgaaagatattatataagtctttaataaactcctgtgtctacaaatggttcacattaactcaatatccatgattaaacatctacaaaatcaaggcactgttatttagtggagacttgctggctattctatgagaggaggtattgttattgtaatctcgtcatctcataaaattgtatcatattactcataaccagcccttcatatcctattcctattttggtattttaaaataagatatctttgaaactcttgaattc

SEQ ID NO: 643536 - DNA, 394 bp, Homo sapiens
gaattcctcaaactcttgcatattcaaaatcacatttttgaaccttgatgcttgaagtgtagcttgggtaacagatgggctttaagccaattttggcatgcaaggggttgagtttattaggcatcagcactgctgaaaatcgtggggatgcaggcttaatttcaacactattctaaatacttgaaagatattatataagtctttaataaactcctgtgtctacaaatggttcacattaactcaatatccatgattaaacatctacaaaatcaaggcactgttatttagtggagacttgctggctattctatgagaggaggtattgttattgtaatctcrtcatctcataaaattgtatcatattactcataaccagcccttcatatcctattcc

SEQ ID NO: 643537 - DNA, 378 bp, Homo sapiens
ttcttccctgggaagctaatatttcaaacacttaaagagtatatagatttccaacttgtatcccgtttataaaactatctctaggctgctgatttcaggaggaggctcatgaatattctctttkcagagaatatatcaggagttaacaacagcttcaatatttgtggacgaccagttaactaagccacctcttagtgtctttagttgggaaatcttagctgaagatattcaataatgaaccaagagtgactaaaaaattcaatatttaagtatatttcattgtaattaatttgaattgaaatagccatatacagctagtatttactatattgaacaatgcaaataagaggagaaaattaataaccatctctaatacca

SEQ ID NO: 643538 - DNA, 582 bp, Homo sapiens
tgacccgagatcttacagcctcaagaaatgtgaaaaaagaaatatctgttgttttttagtcacccggtttatgttattttgttataagagtcctaatagascaagatattccacttaatatgtaggggaaggcaacaaaaactgccacacttaggatcctcctgatgctgggagtatgaaaacaggaaaaacaaaacaaaactgctcttgaaggtgaaggaggaatatcactgagctcaccaacacagccaggaaaagaacggaagtgtgagaaggctacattcctgagaccctgagaaaaagtacctgcataagactgagatgaaattacctactctagttatgattgaaatcccaaaaagaaaagagggaaaaataatggagcaaaagaaatatttttcaaaataactgccaaaaatattctaaaagaagtgacagaaaatcaaacttcaaatataggaaactcagagaatgtcaaatagaacaaaaagaaataagaatcgcatcttgaaaaatctttaaaaaatcagtctaaattttatatcttgctccaaatatatagagatataaagaggttatcat

SEQ ID NO: 643539 - DNA, 582 bp, Homo sapiens
tgacccgagatcttacagcctcaagaaatgtgaaaaaagaaatatctgttgttttttagtcacccggtttatgttattttgttataagagtcctaatagagcaagatattccacttaatatgtaggggaaggcaacaaaaactgccacacttaggatmctcctgatgctgggagtatgaaaacaggaaaaacaaaacaaaactgctcttgaaggtgaaggaggaatatcactgagctcaccaacacagccaggaaaagaacggaagtgtgagaaggctacattcctgagaccctgagaaaaagtacctgcataagactgagatgaaattacctactctagttatgattgaaatcccaaaaagaaaagagggaaaaataatggagcaaaagaaatatttttcaaaataactgccaaaaatattctaaaagaagtgacagaaaatcaaacttcaaatataggaaactcagagaatgtcaaatagaacaaaaagaaataagaatcgcatcttgaaaaatctttaaaaaatcagtctaaattttatatcttgctccaaatatatagagatataaagaggttatcat

SEQ ID NO: 643540 - DNA, 504 bp, Homo sapiens
gagaaaaggggtctgtgggactccagcctttattgggcccagaacattatccaaataagttttccacggggcactagtcggtggggtgagtgccagcaggcacacttcttgactcctgctgcaatcgagcaggtcactctggcgtgtgggggctgtccatgtgcactgtgaggtctgtggggtgagtcaggtaggttgtatccaacggttccatagctggtagtcaccaggaggaggcaactgtgtagggtcaatatctgggccagccacactgaggaactgtgagggttagaactggaaattgtcaagggaatccgaacccagctaccatatgagagagttcaacttatgttcaatgtgaatgccatggcaatattaaaaggtamgaattcgctacatacgtgcttgaggtaaataggagaaacctagaatttatgtaaacagtgagaagattggatgcgttttatgtcacatattttaatactagccgtttattatatatgt

SEQ ID NO: 643541 - DNA, 504 bp, Homo sapiens
gagaaaaggggtctgtgggactccagcctttattgggcccagaacattatccaaataagttttccacggggcactagtcggtggggtgagtgccagcaggcacacttcttgactcctgctgcaatcgagcaggtcactctggcgtgtgggggctgtccatgtgcactgtgaggtctgtggggtgagtcaggtaggttgtatccaacggttccatagctggtagtcaccaggaggaggcaactgtgtagggtcaatatctgggccagccacactgaggaactgtgagggttagaactggaaattgtcaagggaatccgaacccagctaccatatgagagagttcaacttatgttcaatgtgaatgccatggcaatattaaaaggtacgaattcgctmcatacgtgcttgaggtaaataggagaaacctagaatttatgtaaacagtgagaagattggatgcgttttatgtcacatattttaatactagccgtttattatatatgt

SEQ ID NO: 643542 - DNA, 604 bp, Homo sapiens
gaaaagttctagaacaccttagcatatcactaataattttcttggagagtttataggaatttcactaggatcccttatggggtgatagtttaacaaacaaggaaccagaaaaaatgaaaaatgtcaaaggattaagactatgggaacttaatctgactctgccattaccagcatggggacttgagcaagagttgctaccgtgaatggggccctcttcctcccctggttactcatctgtgaaataattggattaggcagcaggtttcaactcacgtgtcagttctaaccygattgagaacaaatgcctgaagaaggacattgggaaggtccctgaggcataggagggctcaatgaaaaacagggcttccgtcagttaaaactatttaccacttacatgggacaaaggatgtccctgtgtgcctggcattggccattccagagccagatagcagtcaacaaaaaaaaactggtaaatctatgaatcagccaagaatcattcatttttcaagaaataaagtctgttctgggaaaaacacctttatatgaaacagaaacctcacactgcttctcggatgagacaatgaaaatggctacactgagtgat

SEQ ID NO: 643543 - DNA, 530 bp, Homo sapiens
cagttcccagatggtgcggaggctgagccagaggtgctccttacttctgagatggtggggtggccagggagagtcggttctcacttcccaggcagtggggcgggcaggcagaggcactccttactttccagatgatgcgggggctggccagaggtgctcctcacttcccagatggtgcaatggctgggcagaggtgctcctcacttcccagacagggcagtggccagggagaggtggttctcacttcccagacggtggggcattatcttctattgttatcatccccattttacagatgaggaaatggagacttagaaacattaactattttgtttgtaaatttgcttaaattccttctagattctgggtattagacctttgtcagatgaatatacagcaaatttttccccattctgtaggttgtctgctctgatgatagtttcttttgctgtgcagaagctctttggtttaatcatatgccgtttgtcatttttgctttkgttgcagttgtttttggcatttcatcataa

SEQ ID NO: 643544 - DNA, 577 bp, Homo sapiens
taccttttggaaaggttcatgtggcaagaaactaagggagtcctgtgatcaacagccaagaaaaacgagaccctggtaacagccacatgaatgcaaccacatgaatgagttagaaaaggacactcacccatccaacgctttgaatgaaaacgctaacctttgctgacagcttgactaaaacttcaagagattatttaagccagagaaaacccaactgatctgtgcccagattcctgacccaaatgcattttgagataatamatctttgctattttaacttgctaagttctggtccaatttttaatgcagcaatagataactagtacaagtataaatttaaaaaaaaagacttatttgactttgaatcatacacacatataatggataagattctcaaaaattattttttgttaattgaattaataatattctcttaaacttttacttctaacccttaccaaaatgtttgaggcattcaaactaactttaagcattctgaaaaatagtttaaaactttgttcattagataagagtaaatcttttcttcaaaatggaaaacaaagtcctccaatcatgc

SEQ ID NO: 643545 - DNA, 600 bp, Homo sapiens
caagttgtgaaaacatgtaagtctggcttacaaagattttaagtgstaccctgttaaatgacagtgagtcccctttgataaaggtatttcctcttcaattctcttttaatcattgcagttaacttgagaagaatgtctcaatttggttctctatgtcaactcattaacacttgccaatctctcctcctagaaaagggagagtaagacatttagctgtattttcatgatgctttgtttttgttgcactttttctttgccttttacagtacttatcttcttttagagaatgtaataaaagttttttatttatggctgtggtagaaagatttctttttttcaaatatatttatttaagcgtaggcaaaaacaagtggtttcacttgaagaaaagggtgaaaaatggggtatgcgtatgtggcaaataatcatgaaggtggtcaagaatgactgacagttgattaacattcatctaattaaaacttgtttttgattaggtggggaaacagagcccagggagaagggacttgagtggcccttggagttttctgcaaggaccctcagtatagtgctcattacgtacaaatccagtcatggtacata

SEQ ID NO: 643546 - DNA, 600 bp, Homo sapiens
caagttgtgaaaacatgtaagtctggcttacaaagattttaagtggtaccctgttaaatgacagtgagtcccctttgataaaggtatttcctcttcaattctcttttaatcattgcagttaacttgagaagaatgtctcaatttggttctctatgtcaactcattaacacttgccaatctctcctcctagaaaagggagagtaagacatttagctgkattttcatgatgctttgtttttgttgcactttttctttgccttttacagtacttatcttcttttagagaatgtaataaaagttttttatttatggctgtggtagaaagatttctttttttcaaatatatttatttaagcgtaggcaaaaacaagtggtttcacttgaagaaaagggtgaaaaatggggtatgcgtatgtggcaaataatcatgaaggtggtcaagaatgactgacagttgattaacattcatctaattaaaacttgtttttgattaggtggggaaacagagcccagggagaagggacttgagtggcccttggagttttctgcaaggaccctcagtatagtgctcattacgtacaaatccagtcatggtacata

SEQ ID NO: 643547 - DNA, 594 bp, Homo sapiens
tggtccttggacatgccaagcctgatcttgcttcgggtcatttgtggttgctctttcctctcctgggattctcttccccagtattggtttactttatttttgcctacctttcctgacttcactgtaatgtgcaaaagggcaggaaccttgtctttcttgctcactgctgtgtctttaacatttacaatagtgcctagcaagtggaaactgttcaatgagtgtttttagagtgcatgagggcaaagtggaagatgggctatgatgggataaggcagttcccgtgggcaggggccctacaatgaagatcttgaaatgactgtaagccattcctatgactccttttctaacagtggtycttcaccagggcaatattgcctctccccttaggggacatttgacattagccggagcattttgttggtcacaatagaggagagggagcattgctgacactaagtagggaggtcagggtgccatatgtcttgtgacatacagaacaatcctgccctgcacaacaaaaagggtctcatcgaaaatgacaataacatttccaaatccccttaagaaacacaatgagcagcctccatggggctg

SEQ ID NO: 643548 - DNA, 521 bp, Homo sapiens
aatgcaaacaaacatagttaytcagtatccatatgtcatagtcgaatttactcctccccctaaaaatgaacaagacggagggtaatttcttttctaattatttatttattttaaattaacagataacattgtatgtttttatcatgtacaacatgacatttcagagtatataaacattgtagaatggttaaatttcagtaattaacaaatgccttacctcacatagtaattgtggcgaaagcacataacatccactttatattttttaaggaaacaaataagcatacaatgtgtcatcattaactatcgtcaccttgctgtactgtaaagctcttgaaatttattgcttctatctaacttctgtctatctaattattatgactgaccaaatctccctcctgtctaaccgtccaagcctctgctaaccaccattttactctctactcccattagatcagccttttcagatttcacatgagtgagatcatgcagcacagtagtccctccatatgcacagtttt

SEQ ID NO: 643549 - DNA, 521 bp, Homo sapiens
aatgcaaacaaacatagttactcagtatccatatgtcatagtcgaatttactcctccccctaaaaatgaacaagacrgagggtaatttcttttctaattatttatttattttaaattaacagataacattgtatgtttttatcatgtacaacatgacatttcagagtatataaacattgtagaatggttaaatttcagtaattaacaaatgccttacctcacatagtaattgtggcgaaagcacataacatccactttatattttttaaggaaacaaataagcatacaatgtgtcatcattaactatcgtcaccttgctgtactgtaaagctcttgaaatttattgcttctatctaacttctgtctatctaattattatgactgaccaaatctccctcctgtctaaccgtccaagcctctgctaaccaccattttactctctactcccattagatcagccttttcagatttcacatgagtgagatcatgcagcacagtagtccctccatatgcacagtttt

SEQ ID NO: 643550 - DNA, 521 bp, Homo sapiens
aatgcaaacaaacatagttactcagtatccatatgtcatagtcgaatttactcctccccctaaaaatgaacaagacggagggtaatttcttttctaattatttatttattttaaattaacagataacattgtatgtttttatcatgtacaacatgacatttcagagtatataaacattgtagaatggttaaatttcagtaattaacaaatgccttacctcacatagtaattgtggcgaaagcacataacatccactttatattttttaaggaaacaaataagcatacaatgtgtcatcattaactatcgtcaccttgctgtacwgtaaagctcttgaaatttattgcttctatctaacttctgtctatctaattattatgactgaccaaatctccctcctgtctaaccgtccaagcctctgctaaccaccattttactctctactcccattagatcagccttttcagatttcacatgagtgagatcatgcagcacagtagtccctccatatgcacagtttt

SEQ ID NO: 643551 - DNA, 577 bp, Homo sapiens
atgagaacaggatgggggaaactgtccctgtttcaatcatcttcacctggtccctcccatgatgygcagggattatgggaactacaattcaggatgagatttgggtgggaacatagccaaaccatatcaactgtatgggaagcatagtggcatctgcttctgcagaggcctcaggaagcttctggtcatggcagaaggtgaaggggaagcagatgcaccacacggagatagcaggagcaggggtgtgtgaggtgccgcacttttttttcttttttttttgagacagagtcgagactgtgacccaggctggagtgcagtggtgcagtctcagctcactgcaacctctgcctcctgggttcaagcaattctcctgcctcagtctcccgagtagctgggactacaggggcacactgccatgcctggctaatttcttttgtgttttagtagagatggggtttcaccgtgttgcccaggctggtcttgaactcctgagctcaggcaatctacctgccttggcctcccaaagtgctaggattacaggtgtgagccactgcgcccggccgtgccacacacttct

SEQ ID NO: 643552 - DNA, 423 bp, Homo sapiens
ggactattactattactataattactattttcattatgctgaaggtatatgataaattttgagatgtgattgatggatgcttaggtttgaagaagcaaaattagagaaagagcttaaaggtgtctccgatatcttcctttctccctggatatgggctctgtaactactacattcaaatataatctggaatatctaaggtcctttcttcacaatcttccacaaggggctgagaatcataatgagacacattaatgaagcctagttatcatctgataatactgtcattaacatttattatcacataattagattgtgcattagccgtttctcagagccactttaaaaggaaaaaaaataygaagacatatatgagaacaaacactgtaaggagtgcctgtatagtgataatgtttcggagtgaat

SEQ ID NO: 643553 - DNA, 595 bp, Homo sapiens
taatctgttctcacactgctgataaagacatacctgagactgggcaatttccaaaagaaagaaagttaattggacttacagttccacatggctgggaagcctcactatcatggcagaaggcaaggaggagcaagtcacatcttacatkaatggcggcaggcgaagagaggaaacttgtgcaggggaattcatctttataaaaccatcagatctcatgagacttattcagtgtcatgagaacagcatgggaaagacttgcccccatgattcaagtaccccccactgggtccctcccacaacatgtgagaattcaagatgagatttggatagggacacattaaaaccatatcagcatgacatctaggattttcttcaaacatctagtccaagatgaaaaaagtggagaagaatatgaaacaaatttggagaatatgttgattattcttgaagctgggagctaaatacattaaactgtttactgttttatttttgtgtacatttttaaatgttcataataataatattttaatatatgcatgcagttgaaccattgtaatgactgaataaactaaaatcgttccttatcttataaaat

SEQ ID NO: 643554 - DNA, 595 bp, Homo sapiens
taatctgttctcacactgctgataaagacatacctgagactgggcaatttccaaaagaaagaaagttaattggacttacagttccacatggctgggaagcctcactatcatggcagaaggcaaggaggagcaagtcacatcttacatgaatggcggcaggcgaagagaggaaacttgtgcaggggaattcatctttataaaaccatcagatctcatgagacttattcagtgtcatgagaacagcatgggaaagacttgcccccatgattcaagtaccccccactgggtccctcccacaacatgtgrgaattcaagatgagatttggatagggacacattaaaaccatatcagcatgacatctaggattttcttcaaacatctagtccaagatgaaaaaagtggagaagaatatgaaacaaatttggagaatatgttgattattcttgaagctgggagctaaatacattaaactgtttactgttttatttttgtgtacatttttaaatgttcataataataatattttaatatatgcatgcagttgaaccattgtaatgactgaataaactaaaatcgttccttatcttataaaat

SEQ ID NO: 643555 - DNA, 595 bp, Homo sapiens
taatctgttctcacactgctgataaagacatacctgagactgggcaatttccaaaagaaagaaagttaattggacttacagttccacatggctgggaagcctcactatcatggcagaaggcaaggaggagcaagtcacatcttacatgaatggcggcaggcgaagagaggaaacttgtgcaggggaattcatctttataaaaccatcagatctcatgagacttattcagtgtcatgagaacagcatgggaaagacttgcccccatgattcaagtaccccccactgggtccctcccacaacatgtgagaattcaagatgagatttggatagggacacattaaaaccatatcagcatgacatctaggattttcttyaaacatctagtccaagatgaaaaaagtggagaagaatatgaaacaaatttggagaatatgttgattattcttgaagctgggagctaaatacattaaactgtttactgttttatttttgtgtacatttttaaatgttcataataataatattttaatatatgcatgcagttgaaccattgtaatgactgaataaactaaaatcgttccttatcttataaaat

SEQ ID NO: 643556 - DNA, 588 bp, Homo sapiens
cttgggtcaagatgtgcagtctgacattaaatgaattggctgctaatataactaggtgaaaggtacacagaactctacaattattgcaactactatgggagcctaaaattatttcaaataaaaggtatacaaattaaactgaacagtatgtagaattttgtaataaatgtcagaaatgattgattattaatggctatgatgaggtgagcttgacaatgaagttaatatttaacgttattggtaaatgttgaggctaatatctgagctaagggacagagtcacaggtccgyttccagagacatgagagcttgatttgattttgaaatggtgatactatctgcgtaagaaaatctgtcgttttaaactttatacttgccagtattcttcctccacctttgggtaacaaatttgggatattacacctttcctgttttggacagttttagtgacacttagcattgacttgctctgccttccaaaacaactaatgactcactcttgtttgggaatttgcctctcatgttggtgaggctagaagaaaaaaacaggtgacactgacccactgtaatgcagaaatgcttacgacat

SEQ ID NO: 643557 - DNA, 588 bp, Homo sapiens
cttgggtcaagatgtgcagtctgacattaaatgaattggctgctaatataactaggtgaaaggtacacagaactctacaattattgcaactactatgggagcctaaaattatttcaaataaaaggtatacaaattaaactgaacagtatgtagaattttgtaataaatgtcagaaatgattgattattaatggctatgatgaggtgagcttgacaatgaagttaatatttaacgttattggtaaatgttgaggctaatatctgagctaagggacagagtcacaggtccgcttccagagacatgagagcttgatttgattttgaaatggtgatactatctgcgtaagaaaatctgtcgttttaaactttatacttgccagtattcttcctccacctttgggtaacaaatttgggatattacacctttcctgttttggacagttttagtgacacttagcattgacttgctctgccttccaaaacaactaatgactcactcttgtttgggaatttgcctctcatgttggygaggctagaagaaaaaaacaggtgacactgacccactgtaatgcagaaatgcttacgacat

SEQ ID NO: 643558 - DNA, 552 bp, Homo sapiens
atattcccctttattaaacatttacacataaagtctgatcacacccccattcttgtctggtcattctcttcctccacagagacacatagctattatcmatttggtaagtaacctacgatttttttccctatgtatttcttatatatgaacaaatgtgtctatttatctgatatatattttatatataagaatatatacaactatacatatataaaattcacactctattccatggcctgcaaggctctatatcacctggcctagctgacctctttgactttatctcccatcactcttcccgcactcgttccactagccatgggggcttcatgccattcctccaaaattttaagcttttacaatttcaattaatcataaaacttctaaggtaagaagaaaaactactagataaggccactgcctgctcaatcactgctttttctctaagggaatctgctctgcccagagactctcttttcctttccccaggaggggctgaactagggattggcaatggacccaagggcagccaatggagactaaccagaattc

SEQ ID NO: 643559 - DNA, 655 bp, Homo sapiens
ctttaaccacatcatcagcaatttctgaaagacaatggcacacacttctaacttagtaatataatgatatcaactggcttctccatcacataaatgacaaggattttaaatttttttatacttagtaaacacattttaaacagaatccaatgtttagttaaactcaaaagtagtttgttcgttcttaaaagacaatctccactctacccctaggcagaaattcagatttttggggcactcacgcacctggatcagcagcctaacccaccccacccatcctgtgcagagatcccggtgcagcaaggccctcttcactccacactcaggcagatctccaggcagctgaagcgtccactctcctggattaagaattaaggtcactccctgaccaacaagcagagaacttggagctgaagaggtttctcagcccccatgcataggcacacccctaggtgcttggtggacaccctcttgattcttcctccacgctagtgcttatgcctgccatcaggggacctataggagaaactgcctggcctggccctgcccatcatggcccctaccccacaggactgagcagggagttcagascactgtgcattccatgaatcagcccattgcctgaggcaacagagagcttctgccagtaaacaaa

SEQ ID NO: 643560 - DNA, 625 bp, Homo sapiens
ttatgtaaaccctgaactggtttttgtctctatagttaagttatgccttcactagagtttcataaaaatgtaatcatacagtatctacacttttgtatytcctgttttaaatagctttgcttaaatatcatattagaatttctcaataatataatttttatttatctttatttttttcacagtttttctatgttggcccctcctcttcctttgtttttaccctcttttgggggtagtagagtgaaagtgaaatagtccctctttttctttaagcctgatgatagaatatagaacccaaaagacaataaaactacaataatcaaaaagataatttggtgcaaaaataatagtttcttcagaatgctataaaaattcaagtgctaaattggagataaaagtgtgtgtgagacttgacccttgctttaagtaagttttcattcctgaaatacagataagacatgttcttaaacaaccaaaaaagcaggcattatgtggttaaaactgtaaaattctaataaaatattacaggatttcaaaaaaacgaagtgctagcaagagaaagtttagaaaatatttaatgagaggtatatcatgctcatatttaataattcacacatttgatatt

SEQ ID NO: 643561 - DNA, 625 bp, Homo sapiens
ttatgtaaaccctgaactggtttttgtctctatagttaagttatgccttcactagagtttcataaaaatgtaatcatacagtatctacacttttgtatttcctgttttaaatagctttgcttaaatatcatattagaatttctcaataatataatttttatttatctttatttttttcacagtttttctatgttggcccctcctcttcctttgtttttaccctcttttgggggyagtagagtgaaagtgaaatagtccctctttttctttaagcctgatgatagaatatagaacccaaaagacaataaaactacaataatcaaaaagataatttggtgcaaaaataatagtttcttcagaatgctataaaaattcaagtgctaaattggagataaaagtgtgtgtgagacttgacccttgctttaagtaagttttcattcctgaaatacagataagacatgttcttaaacaaccaaaaaagcaggcattatgtggttaaaactgtaaaattctaataaaatattacaggatttcaaaaaaacgaagtgctagcaagagaaagtttagaaaatatttaatgagaggtatatcatgctcatatttaataattcacacatttgatatt

SEQ ID NO: 643562 - DNA, 569 bp, Homo sapiens
tttattagcactatactattacatgtgtagtgcaagttaacttggaatattattaacttgtctcacaactcttacaagtgttttgccattcattttacttatccatgaaacataatcacgttgttatgatgattttggttaagttatgtataagaaatataaytgatattctaataaggacataaaatgaaatataaaatgttcagttaaaactacaaaaggcagaaaaagagtggaactaacagaaacagagggcaaaaccaataagtagaaaaaagtaacaaatatggtagatattaatccaactatgtcaatattcactttaaatgtcagtggtctgaatactccaattaaaagaaagatgctaacatagtggatttaaaataatcataaacatatgttctcttcaatacacccattttaatataaaaaatagattaaagttaagaattgggaaatattctatcatgttaacactaataacaagaaatattgagtagttatattaattttagatacagcccgctttggagcaaaaaataaaatgactagagacaaagaagtatatt

SEQ ID NO: 643563 - DNA, 569 bp, Homo sapiens
tttattagcactatactattacatgtgtagtgcaagttaacttggaatattattaacttgtctcacaactcttacaagtgttttgccattcattttacttatccatgaaacataatcacgttgttatgatgattttggttaagttatgtataagaaatataactgatattctaataaggacataaaatgaaatataaaatgttcagttaaaactacaaaaggcagaaaaagagtggaactaacagaaacagagggcaaaaccaataagtagaaaaaagtaacaaatatggtagatattaatccaactatrtcaatattcactttaaatgtcagtggtctgaatactccaattaaaagaaagatgctaacatagtggatttaaaataatcataaacatatgttctcttcaatacacccattttaatataaaaaatagattaaagttaagaattgggaaatattctatcatgttaacactaataacaagaaatattgagtagttatattaattttagatacagcccgctttggagcaaaaaataaaatgactagagacaaagaagtatatt

SEQ ID NO: 643564 - DNA, 569 bp, Homo sapiens
tttattagcactatactattacatgtgtagtgcaagttaacttggaatattattaacttgtctcacaactcttacaagtgttttgccattcattttacttatccatgaaacataatcacgttgttatgatgattttggttaagttatgtataagaaatataactgatattctaataaggacataaaatgaaatataaaatgttcagttaaaactacaaaaggcagaaaaagagtggaactaacagaaacagagggcaaaaccaataagtagaaaaaagtaacaaatatggtagatattaatccaactatgtcaatattcactttaaatgtcagtggtctgaatactccaattaaaagaaagatgctaacatagtggatttaaaataatcataaacatatgttctcttcaatacacccattttaatataaaaaatagattaaagktaagaattgggaaatattctatcatgttaacactaataacaagaaatattgagtagttatattaattttagatacagcccgctttggagcaaaaaataaaatgactagagacaaagaagtatatt

SEQ ID NO: 643565 - DNA, 567 bp, Homo sapiens
gcctttacatttttttctcttcttgaatcatgttttcctgaaaaaaaaaaaaaaggtttttctttcttgtcagttgactgaatagttgttctccattttgtcttcttgccactcttratgcacacataagagaacctaagataattcctaagacagtttctccttgggataaagagaggaggcaatacagaccccattttgggaaaaacttcctttttccctcatgaagctctaggaatcaaaagcagataaaattcctctcaaaatctaaagctctgttccactttgaatgatgttatctgattttttttttttaacttttgggggtatcagaaattactttgaattatgagagagttttggtgtgtaataactgggtaagaaatatacttttagggatggctaatggcagttacggtgagatactcagtgctttacacatttggatcagagaagcgtgctcttggccacctagaaagtctggaaatgattccacctctcactgagagataagaatcccatgggaaatgggccgatttttctctttttttgggatctaggatctgg

SEQ ID NO: 643566 - DNA, 567 bp, Homo sapiens
gcctttacatttttttctcttcttgaatcatgttttcctgaaaaaaaaaaaaaaggtttttctttcttgtcagttgactgaatagttgttctccattttgtcttcttgccactcttaatgcacacataagagaacctaagataattcctaagacagtttctccttgggataaagagaggaggcaatacagaccccattttgggaaaaacttcctttttccctcatgaagctcyaggaatcaaaagcagataaaattcctctcaaaatctaaagctctgttccactttgaatgatgttatctgattttttttttttaacttttgggggtatcagaaattactttgaattatgagagagttttggtgtgtaataactgggtaagaaatatacttttagggatggctaatggcagttacggtgagatactcagtgctttacacatttggatcagagaagcgtgctcttggccacctagaaagtctggaaatgattccacctctcactgagagataagaatcccatgggaaatgggccgatttttctctttttttgggatctaggatctgg

SEQ ID NO: 643567 - DNA, 567 bp, Homo sapiens
gcctttacatttttttctcttcttgaatcatgttttcctgaaaaaaaaaaaaaaggtttttctttcttgtcagttgactgaatagttgttctccattttgtcttcttgccactcttaatgcacacataagagaacctaagataattcctaagacagtttctccttgggataaagagaggaggcaatacagaccccattttgggaaaaacttcctttttccctcatgaagctctaggaatcaaaagcagataaaattcctctcaaaatctaaagctctgttccactttgaatgatgttatctgattttttttttttaacttttgggggtatcagaaattactttgaattatgagagagytttggtgtgtaataactgggtaagaaatatacttttagggatggctaatggcagttacggtgagatactcagtgctttacacatttggatcagagaagcgtgctcttggccacctagaaagtctggaaatgattccacctctcactgagagataagaatcccatgggaaatgggccgatttttctctttttttgggatctaggatctgg

SEQ ID NO: 643568 - DNA, 567 bp, Homo sapiens
gcctttacatttttttctcttcttgaatcatgttttcctgaaaaaaaaaaaaaaggtttttctttcttgtcagttgactgaatagttgttctccattttgtcttcttgccactcttaatgcacacataagagaacctaagataattcctaagacagtttctccttgggataaagagaggaggcaatacagaccccattttgggaaaaacttcctttttccctcatgaagctctaggaatcaaaagcagataaaattcctctcaaaatctaaagctctgttccactttgaatgatgttatctgattttttttttttaacttttgggggtatcagaaattactttgaattatgagagagttttggtgtgtaataactgggtaagaaatatacttttagggatggctaatggcagttayggtgagatactcagtgctttacacatttggatcagagaagcgtgctcttggccacctagaaagtctggaaatgattccacctctcactgagagataagaatcccatgggaaatgggccgatttttctctttttttgggatctaggatctgg

SEQ ID NO: 643569 - DNA, 587 bp, Homo sapiens
acattcattttttatacaaaaaccaacaagcaattatcatttttgtagaagtaattttgttcaaatatgttaataaatgcatatcttaaatgataatgttgtgggatgcagaaagtccccttaggttttgcacagaaacaagtagctctgaatttttgtaactctgcatatttcttatatctctctaataagccttatttatatctagtgtgttttgtttaatgattatgagaatataagctttttgaaagaggatgtaaatttaatgtgtctctataatctctatagcacctacacacagtagacgcacaatagatgtttactaagraataaatataagaaacttaaatgagtgcctgtcaaaggactttaatgatcagctacttagtcatatatacaatattaaaagaattctgactataaaagatgttgtagagagtctctcacaaattagtcaacaataaacctgaataagaaagtaagattataaaaaatgtatataataaaattaggcatgtgttaatttacagttctggccaagatggaggtacagaaaccagaattaccctcatacatgaagcagccaa

SEQ ID NO: 643570 - DNA, 587 bp, Homo sapiens
acattcattttttatacaaaaaccaacaagcaattatcatttttgtagaagtaattttgttcaaatatgttaataaatgcatatcttaaatgataatgttgtgggatgcagaaagtccccttaggttttgcacagaaacaagtagctctgaatttttgtaactctgcatatttcttatatctctctaataagccttatttatatctagtgtgttttgtttaatgattatgagaatataagctttttgaaagaggatgtaaatttaatgtgtctctataatctctatagcacctacacacagtagacgcacaatagatgtttactaagaaataaatataagaaacttaaatgagtgcctgtcaaaggactttaatgatcagctacttagtcatatatacaatattaaaagaattctgactataaaagatgttgtagagagtctctcacaaattagtcaacaataaacctgaataagaaagtaagattataaaaaatgtatataataaaattaggcatgtgttaatttacasttctggccaagatggaggtacagaaaccagaattaccctcatacatgaagcagccaa

SEQ ID NO: 643571 - DNA, 589 bp, Homo sapiens
attaacagcagaatagaccaagcgggggaaagactctcagaacttgaatactggatctcttaaataagccagtcacacaaaaataaagaataaaaagaataaaagcccaaataaaaacccaaaacttctgagaagtagggtttctgtaaagagggcaaatcttcaaatcattggtattcctgaaaaggaaggggaatgtattgttagtctattctcacactgctaataaagacatacctgacatttgataatttataaaggaaagaagtttaattsactacagttccacatggctccagaagcctcacaatcatgctggaaggtgaacgaggagcaaactcatgtcttacatggcgtcaggcagtagcttgtgccggaaaactctcattataaaaccttcagatctcatgaaatttattcactcccatgagaacagtatgggggaaactgccctataattcatttatctttacctgaccctgcccttgacacatggagattattacagttcaaggtgagatttgggtggggacacagccaaaccatatcggggagaaagcaaacaacttggaaaatatatttcaggata

SEQ ID NO: 643572 - DNA, 597 bp, Homo sapiens
ttctggtaacaccattctactctctagctccatgaaagaaatacatttttgtagctactgcatatgagtgaaaacatgcagtatttttctttctgtagctggcttatttcatttaaaataatgtccttcagttctattaatgttgccagataatgacaggattttatttttatgactgaataatattccmttgtgtatataagccacgttttctctatcatttatccattgatgaacacctagattgatttaacatctttattactgtgaatggtgttgaaataaacatggagggcagatatcttttcaatatctagatttccttattttggcactgggcagtgagatggtctggatcatatggtagttctatttttagtttgtgaggaacttctgtactgtttttcataatagctatactaagttacattttccttgagcttcctaattatagcacactcactgtaatgtgaagaagctatacaatcttagacttttggaaagaaaatattacttataacaggtacattcattttattgtagtcacccatcactgctgtatgacttctgagtcagttttggttgtcatgttacatt

SEQ ID NO: 643573 - DNA, 597 bp, Homo sapiens
ttctggtaacaccattctactctctagctccatgaaagaaatacatttttgtagctactgcatatgagtgaaaacatgcagtatttttctttctgtagctggcttatttcatttaaaataatgtccttcagttctattaatgttgccagataatgacaggattttatttttatgactgaataatattccattgtgtatataagccacgttttctctatcatttatccattgatgaacacctagattgatttaacatctttattactgtgaatggtgttgaaataaacatggagggcagatatcttttcaatatctagatttccttattttggcactgggcagtgagatggtctggatcayatggtagttctatttttagtttgtgaggaacttctgtactgtttttcataatagctatactaagttacattttccttgagcttcctaattatagcacactcactgtaatgtgaagaagctatacaatcttagacttttggaaagaaaatattacttataacaggtacattcattttattgtagtcacccatcactgctgtatgacttctgagtcagttttggttgtcatgttacatt

SEQ ID NO: 643574 - DNA, 597 bp, Homo sapiens
ttctggtaacaccattctactctctagctccatgaaagaaatacatttttgtagctactgcatatgagtgaaaacatgcagtatttttctttctgtagctggcttatttcatttaaaataatgtccttcagttctattaatgttgccagataatgacaggattttatttttatgactgaataatattccattgtgtatataagccacgttttctctatcatttatccattgatgaacacctagattgatttaacatctttattactgtgaatggtgttgaaataaacatggagggcagatatcttttcaatatctagatttccttattttggcactgggcagtgagatggtctggatcatatggtagttctatttttagtttgtgaggaacttctgtactgtttttcataatagctatactaagttacattttccttgagcttcctaattatagcacactcactgtaatgtgaagaagctatacaatcttagacttttggaaagaaaatattacttataacaggyacattcattttattgtagtcacccatcactgctgtatgacttctgagtcagttttggttgtcatgttacatt

SEQ ID NO: 643575 - DNA, 430 bp, Homo sapiens
ctatctagaaattataccacatccacccatgtctcttcatttccacagtatccaccttaagctgagccaccaacatctctttcttaggaaatgacaatatttactccttggtttcctttctctaactttagctccctctgatccgtttgctacagtgaaaagtgatcttaaaacaaaacaaaaacaaaaattgaccaagttactcttctcctcaaaatccttcaacaacttccccactgcagtaaaattgaaaacccctcatgaggcctgcaagtgcctgcatgctctgagccctgctcccttgagtgtctgcacagtctgagccctgttccctcaagtgtctgcacactctgagccctgttcccttcaggcctcatgctgtctcagtctccccrctgtacccaccacaaattaggcttctggaagccat

SEQ ID NO: 643576 - DNA, 587 bp, Homo sapiens
gttaaatgcaacattttttggaattttgtaagctggtttwtaaactactggaagcttaaaatttgccatgctgggaatatttacacaactgaaattggcaaacactaccttttttgtttgtctgtttttcataaagccggtttgctaagataccattggacagaatgatagaaaatatagttatttgttgattatttcttggaacttatttcttctgatcaactattaaataagcatatatcatgttaataagaactgaaaaatattatattttaaaaaaacaaacacaaaccacatttctaatttttcgtgattttctttttactttttgatccctcaaaacaagatccttttttcacatatatgatagcatcttcagtttggaggaagaattgtatcttgcttactaaagggttttcatgttctacaatctctatgacttcatgaaaaaaaaggacacttccaacatctacaaattctaggtaaaagcctgtcaataaattcctcatttctcagatacacattaaaacatgcttttaaagggctagagaaaatgggtttatctgtggtggggagagaattacttt

SEQ ID NO: 643577 - DNA, 583 bp, Homo sapiens
ctttttatctaaaaaaaaaaatgatgtacagtaatctcttaatgaaaacaaagcgtcataggtagagagtgaaagtctgctgttttttagtgttgttgttattcaaccatttacacaagtattctggggttgctactgtgttgcttagttaccctgaacacattattttttcactttataatagcatgtcatatgttttactgttaagtacgtatgtgtaagtataagaaaatgattgtttatcagttgcgtataaattcagaatcaggaatgatggtgataccaaacaaccacagatcgtacagaagtggctgagatagtgacacctttgctttctgttggttcagtatattcaaactttgttgcatgcatataattgaaaatattatataaaatcaccttcaggccatgttaaggaatatatgaagracccagtgaattttgtatttagatttgggtcccatccccaagatatctcattatgtacatgcacatattccaaaatctgaaaaaattttaagtccaaaacactctagtctcaagcatatcagataagggatactcaaccagtacttcatgattc

SEQ ID NO: 643578 - DNA, 516 bp, Homo sapiens
ttgctgattttaaacatagtagctcarcagcagttttgaaagaaagaggagtaggagagactgaaagaaaaaaaaagagattaaaagacatttaaaagtaactgaaagaaaatataggagttatatagggaaaaggagtcctgaagcatattttgtatttgactgctgaggatcctgagctatttggaaacaatattcaatgagacaagattgcatatgaggttaacacctatttcttctacactaacctgccttatccctgcccattatttaagtcagagtttctcaacctgatggagttctttattcttggcactattgacattttgggccagataatccatgtgggagtcaggggctgggggctgtcctgtgcattgtaagatgtctaaacagtacaagatgccaatatatgtcctcagttgtgaccaccaaaaatgtctctgggcacttccaaatgtcctccaaggggtgaaattgctctcagtccttattccaattatggcctccatgaat

SEQ ID NO: 643579 - DNA, 596 bp, Homo sapiens
tagtagtgatggactactttataagatcattgtgggagttaaatgagctatatgtaaaacatctagaatcaaacttggcatatagtaagtacaatgtgttttctgtttacctaaacattttttcagcccttatgattttgccaactggtgatgactgagcgcaatttgactttgctggtataggacgccgattatttaaagattttaggaatgtgaaacatattctccaattgaaggactttgcacgataaggaagcaattgtttaaattcaattctttttgtggtggcaggtgacagtaatcccagctacttgggaggctgaggcaggagaatcacttgaacccaggaggcggagattgcagtgggccgagatcacgctgttgcactccagcctgggtgacacagtgacacttcctctccaaaaaataatagtaattaaaaaataaaataaagaataagttcagttctttttatgagaaatttatctatctaatctttctatctacctatgatttatttaaggatatgtmagttatgtgtgttctggagaaagaataccacaattataccagtccttttacggaaaattatattg

SEQ ID NO: 643580 - DNA, 596 bp, Homo sapiens
tagtagtgatggactactttataagatcattgtgggagttaaatgagctatatgtaaaacatctagaatcaaacttggcatatagtaagtacaatgtgttttctgtttacctaaacattttttcagcccttatgattttgccaactggtgatgactgagcgcaatttgactttgctggtataggacgccgattatttaaagattttaggaatgtgaaacatattctccaattgaaggactttgcacgataaggaagcaattgtttaaattcaattctttttgtggtggcaggtgacagtaatcccagctacttgggaggctgaggcaggagaatcacttgaacccaggaggcggagattgcagtgggccgagatcacgctgttgcactccagcctgggtgacacagtgacacttcctctccaaaaaataatagtaattaaaaaataaaataaagaataagttcagttctttttatgagaaatttatctatctaatctttctatctacctatgatttatttaaggatatgtcagttatrtgtgttctggagaaagaataccacaattataccagtccttttacggaaaattatattg

SEQ ID NO: 643581 - DNA, 189 bp, Homo sapiens
tattctgtgtaagcttgagaagaatgtgtgttctgctgttggatcaaatattcygtgtatgtctattagattcatttagtctgaagtagttcaagacaatgttttcttaataatattctttctggatgatttatccattgttgaaaatcagatattaaagttctctattattgcattgcagtctatctc

SEQ ID NO: 643582 - DNA, 189 bp, Homo sapiens
tattctgtgtaagcttgagaagaatgtgtgttctgctgttggatcaaatattccgtgtatgtctattagattcatttagtctgaagtagttcaagacaatgttttcttaataatattctttctggatgatttatccattgttgaaaatyagatattaaagttctctattattgcattgcagtctatctc

SEQ ID NO: 643583 - DNA, 189 bp, Homo sapiens
tattctgtgtaagcttgagaagaatgtgtgttctgctgttggatcaaatattccgtgtatgtctattagattcatttagtctgaagtagttcaagacaatgttttcttaataatattctttctggatgatttatccattgttgaaaatcrgatattaaagttctctattattgcattgcagtctatctc

SEQ ID NO: 643584 - DNA, 582 bp, Homo sapiens
tggcccaagacaccccttgggagcttggtcgcagggaggtataatactgctacccatagctgagtgaagttctaagatgtgggtcttatccagtgaggtgccatggaagcaaggtctgcagactgtggctgctcaggcccctgtattcagcccctttcctagaggtatgtatggaggtctaacctcccattttgccagagctgcagccacttttattgggaagctcacttggggctccatgtgtgtctgagcagctgcwcttctaatactctgtgtagctctgtgtgtctaactgaaggccctggtggaataggttcatgaaggggtctcctgactcaagagttgcaaagatccatgggagaaacatcagtacctgggagtgttcactcacttaccacttccttgggctggggaggctcccctggctccacattgctcctgggtgggagatatcctgccattcttttctccattctttgtgggttgaattgtttttctgatgaaccctaatgagtgtacctggatgtttccactgaaggtgctgtatttactcacccctctatttctctccatgggagtggc

SEQ ID NO: 643585 - DNA, 605 bp, Homo sapiens
tggatgtggcagtatgtgcctgtagtcctagctatttgggaggctgaggtgggaagatcgcttgagtccaggaattcatggctgcagtaagctatgattgtcccgtgcattccagcctgggtgacagagtaagaccttgtctctaaaacacaatgggcataatcaagaaagtgaagtaaaaatacaacctacagaatgggagaaaatatttggaaattatatagctgataaaaatcttgtatccagaatatataaagaactcctgcaattcaacaacacaaagaaaaaaacccaataaatgaatgaacaaaggacttagacacttccccaaagaggatttacaaaagacccagacacacaaaaagatcctcacatcattagtaattagggaagtgcaaaccaaaaccacgatgagttaccacctcacaccaactragatggctacaatttaaaaaatggaaattaacacatattgctgaggatgtggaaaaatggaatatatgtacattgttgctgggaatgcaaaaatggttcggcaactatggaaaataatttgacagttccttagaaagttatcatgagacccagaaattccactcctattt

SEQ ID NO: 643586 - DNA, 532 bp, Homo sapiens
aatttgttttatttcctcccccccaaaaaacaatgaaaggtatggaaatgacctgtgttggataagcatagattcttcaagaatgacatttgtaatctgcaacagaaaatatctagttctagaaaatgatattctgttaagtatagtaaattccatcaaccaaccatacagaatcatttcaaatagtcattcagcaacatccccaaaataactgctagtaccaatggtattatctcttattcataaagaccatgaatgtactttttaagtaaatcaagttagtgttgagttgcctactagttaattccacataaatataaatataagcacttactctgtgccaggcactcaggatgcaaggtaaatgtgcctgaaattgtccctgcccacacataaaatatacattgcaggacatgttttggctcatttgctgagagccrtctgtttggttttctggcatagtctgggcactggttcttccttcattcattgctgctgttgctctgattgctgtttcctcaattccaaggga

SEQ ID NO: 643587 - DNA, 574 bp, Homo sapiens
tttttggccgtcatccatgcccccagtattgaaggaaataaaaattggtgctatattccagtattacttgttattcagcagagcacaaactattgattacttggatattgagaggataatgtacccaaacaagtgttgatgaggaaatctggtctcacaaagagatgccttcttacaactcattagaaaagcagacctataatatagatttggaargtatatgcctattaggctgcatagaagcaatttatatattttttatttaaattttttaattgatacataatatttgtacatatatatggggtatatgtggtattttgctacaaacatacaatgtgtaatgatcaaaccagggtacttagtgtatctttctctttatcatttctatctgttagaaacattccaaatcttcttttctagctactttgaaatacacatttttgttaaccagtcaccctagtttgatattgaacattaaaacttattccttttatctaattctatgtttttacctattaaccaatctctcttccctcccctcccactcacccacacatcctcccaagcctct

SEQ ID NO: 643588 - DNA, 592 bp, Homo sapiens
ctctacttgatttaatagatatgtcattagaatatagatgagtgaaatattttggaaatttgatagcttatcataaatggcaaaaaatctcatgtataaattgttaaacgaattaaccctaggtctcctgaaactgatkagccaatgattctctgttaactctcacaaggtttaacaattcaattttcaagtcttgtttaatgcctagtgtacatttcataataggcactgaagagggaatataaatgaagtgtaatatgtttacctaaatgagttttcaagttgaatggaaagcataatatgcattcaatattagactcaatgataatatcacattgcatgtaatgaagggcagataatggttggacagaaggtattgtgaaagctcaacagaccagtatggaatggaatagttgcagaaaacatcatgaagtaaagaaatcttaggctcttcccagatttctatgtttttttttttcgtggttattactgtttcattatttctaagtgattacattaagtttttctgcagtctactgatacggaattatttattaacaaataaaatgttggggttaggtttcctttagct

SEQ ID NO: 643589 - DNA, 538 bp, Homo sapiens
cggatcataaattttgaattcttgaaaaaaggaaagacaactctaattggtggggtgaaaacaccatgcaaaatatataacccgtctagggtggaagtggaacaattctggaggtgtgccaagtatggagtcagtaggggcaaaacaggagagcgtctttcagtgatctcttaaggggccggagagcaactgggcatgtccttatttcctggcttcggcttggatgaggtaattggcattgatgatgactgtccctggggttaattcactctctttagaccctgaagcgagagtggtacacagtgttttatgtcttgtactctagatggagattgcctgaaggaaagggataaataaattctacatggaggaaagttaaaggactgttasacttggttcagtagcacattctgcatcccttctgagaatagaagtttcattctcaatcaagaacatgaagtttcccatgtgtgaatagaagctcaataaatatttaatcaaaagaaatgctaaataggagtggtgagagagggcatcc

SEQ ID NO: 643590 - DNA, 538 bp, Homo sapiens
cggatcataaattttgaattcttgaaaaaaggaaagacaactctaattggtggggtgaaaacaccatgcaaaatatataacccgtctagggtggaagtggaacaattctggaggtgtgccaagtatggagtcagtaggggcaaaacaggagagcgtctttcagtgatctcttaaggggccggagagcaactgggcatgtccttatttcctggcttcggcttggatgaggtaattggcattgatgatgactgtccctggggttaattcactctctttagaccctgaagcgagagtggtacacagtgttttatgtcttgtactctagatggagattgcctgaaggaaagggataaataaattctacatggaggaaagttaaaggactgttagacttggttcagtagcacattctgcrtcccttctgagaatagaagtttcattctcaatcaagaacatgaagtttcccatgtgtgaatagaagctcaataaatatttaatcaaaagaaatgctaaataggagtggtgagagagggcatcc

SEQ ID NO: 643591 - DNA, 462 bp, Homo sapiens
agccctaactggaggaaaagaaaacaatgtaaaagttgaatttatcttactatttcaatgatccagtaaagacattctatgcctgtacaccacatattttcttcgattgtggatttattttagatagaattttatgtctggctttcactttagcctggtccctacctcaagcataaggtaaagattttccatgsgttcttttctggtactactacctgccagtgtggggtcatgtcctagtctatcttgagggaatccccctgttcattattgtcagagtgagactgttaagtcttgatttccctggacaacttcactgcatgacttttaatatgattttttaatataccctttactggacaataaattatatagttatctgagtaagagatatggtcaggaagaggcattgcctcattcagcttttctctttggtgaactcgcatatgttctcctcacccg

SEQ ID NO: 643592 - DNA, 566 bp, Homo sapiens
aagctgatttttaaaatactgagatcatatagatgacagcacctgaaaaatagacaacaccaagctttatgttaaaaggtgtgagggtatcaatattgttgtggctattggggaggaaacattagtaaaaccatttagttaaagctattgctttaaactttggctttaatttaacaaatgttctatggagtgacagtatgtatgtaaccatgctatgcccattcacagatgcagtagagggaagaatttctcaaagacaactgttctaacactcaaattaaaccgtactgggtttgaaaagagaaagtccaggaattaccaaatattttagatatcagataaaagagaatgccaggtatgcgatgataatcagcaatggttgttcacacaayacatcaaatcagtatttgaattagcttttgaattacaaggacaaatggatcaagtctagactctttagtagataaatcttattaggctgagatgtgttttcccctgtttttccacaaggagattacaaatttgcaaacctcagctgctctcattttatgctctcaccaagccaa

SEQ ID NO: 643593 - DNA, 473 bp, Homo sapiens
tcaagtctagactctttagtagataaatcttattaggctgagatgtgttttcccctgtttttccacaaggagattacaaatttgcaaacctcagctgctctcattttatgctctcaccaagccaaaagctgaagttcatcaatcagtgtgtctaagtgttcactggttatataccattttgtagtttcagctatctttccaacttcctaaatcatcaccttcatttgatcttgtttttttccactatcacttctttattgaccatataaagaatrtaagtgagttcttatttggttattgttcattttagtctaacttcatcaaaatatcacaatcttttaatttcactttaatttcaaagattaaatgaaacctacatagaaatgagtgtaagatttgcatttgcattattttggcatcaatttgctatcctccctcatgcacatagagctcatttccatgtacgtgatttc

SEQ ID NO: 643594 - DNA, 473 bp, Homo sapiens
tcaagtctagactctttagtagataaatcttattaggctgagatgtgttttcccctgtttttccacaaggagattacaaatttgcaaacctcagctgctctcattttatgctctcaccaagccaaaagctgaagttcatcaatcagtgtgtctaagtgttcactggttatataccattttgtagtttcagctatctttccaacttcctaaatcatcaccttcatttgatcttgtttttttccactatcacttctttattgaccatataaagaatgtaagtgagttcttatttkgttattgttcattttagtctaacttcatcaaaatatcacaatcttttaatttcactttaatttcaaagattaaatgaaacctacatagaaatgagtgtaagatttgcatttgcattattttggcatcaatttgctatcctccctcatgcacatagagctcatttccatgtacgtgatttc

SEQ ID NO: 643595 - DNA, 473 bp, Homo sapiens
tcaagtctagactctttagtagataaatcttattaggctgagatgtgttttcccctgtttttccacaaggagattacaaatttgcaaacctcagctgctctcattttatgctctcaccaagccaaaagctgaagttcatcaatcagtgtgtctaagtgttcactggttatataccattttgtagtttcagctatctttccaacttcctaaatcatcaccttcatttgatcttgtttttttccactatcacttctttattgaccatataaagaatgtaagtgagttcttatttggttattgttcattttagtctaacttcatcaaaatatcacaatcttttaatttcaytttaatttcaaagattaaatgaaacctacatagaaatgagtgtaagatttgcatttgcattattttggcatcaatttgctatcctccctcatgcacatagagctcatttccatgtacgtgatttc

SEQ ID NO: 643596 - DNA, 473 bp, Homo sapiens
tcaagtctagactctttagtagataaatcttattaggctgagatgtgttttcccctgtttttccacaaggagattacaaatttgcaaacctcagctgctctcattttatgctctcaccaagccaaaagctgaagttcatcaatcagtgtgtctaagtgttcactggttatataccattttgtagtttcagctatctttccaacttcctaaatcatcaccttcatttgatcttgtttttttccactatcacttctttattgaccatataaagaatgtaagtgagttcttatttggttattgttcattttagtctaacttcatcaaaatatcacaatcttttaatttcactttaatttcaaagattaaatgaaacctacatagaaatgagtgtaagatttgcatttgcattattttggcatcaatttgctatcctccctcatgcacatagagmtcatttccatgtacgtgatttc

SEQ ID NO: 643597 - DNA, 607 bp, Homo sapiens
atacacacacacacacgcacacacgcacacacgcacacacacacacacattatggaagatttcaagaccaggcaataatttccactcaatccaaaaacaatgcaatcccagagctgaatatttaggtgaaaaatatatcaggaatgggaggcattcaggtttaattttcatgttttggtagagttaggatgtgagttttcatttaaaaatattctttattttttttgctactattgtggtttctgtattgttactatacaatctgtaaactaaatagtaaaggagagaaaagtgattttcaamgaagctggcttgggaacaggcactattctgggaagatgaaaggtttcacttaatgactggtacctgtgccactctggttattttaactgttaaccttttagcaagaggtttttcttttaaaagacatcctttaatatttgggaagctagtgcaatagtacacattgaggcccacataccacatgccaaatatttaaaaggcatatttctagctaaccactgtacatacatatattttttctcttattttcttattttagttttaacacttgacagcaatttatgtccacacatatcttctatca

SEQ ID NO: 643598 - DNA, 607 bp, Homo sapiens
atacacacacacacacgcacacacgcacacacgcacacacacacacacattatggaagatttcaagaccaggcaataatttccactcaatccaaaaacaatgcaatcccagagctgaatatttaggtgaaaaatatatcaggaatgggaggcattcaggtttaattttcatgttttggtagagttaggatgtgagttttcatttaaaaatattctttattttttttgctactattgtggtttctgtattgttactatacaatctgtaaactaaatagtaaaggagagaaaagtgattttcaaagaagctggcttgggaacaggyactattctgggaagatgaaaggtttcacttaatgactggtacctgtgccactctggttattttaactgttaaccttttagcaagaggtttttcttttaaaagacatcctttaatatttgggaagctagtgcaatagtacacattgaggcccacataccacatgccaaatatttaaaaggcatatttctagctaaccactgtacatacatatattttttctcttattttcttattttagttttaacacttgacagcaatttatgtccacacatatcttctatca

SEQ ID NO: 643599 - DNA, 535 bp, Homo sapiens
aaattcagtgttgatgagagcccatttcatggttcatagatggtgccttctttctatgtcctcacatagtggaaggcacacaagaactccattgagcttcttttataaaggcactaatccgattcataagggctcggcccccaagacctggtcacctcccaagtgttctgctctccctgatctgtgtcatatacagactctcttggattccttaccaattgcttgagagatcacagtgggtttgtggrgaaaaagttttcaagatgatggatctttcccaacttctgcagctgtcagccgtctcccaatctgaccagccccactttgtctttaggaatttattgattattccagctttacttgtcatagtggtgtctatttgcatctgtcctatgtaagtgcatctgtcctctttctccttgcaggtgcttgttttccctcacattttgactcagttcttggcaacctcgttgctataaaaataaagtcatgactttgaggttagtttggttctttcattgttgtcaggttagga

SEQ ID NO: 643600 - DNA, 535 bp, Homo sapiens
aaattcagtgttgatgagagcccatttcatggttcatagatggtgccttctttctatgtcctcacatagtggaaggcacacaagaactccattgagcttcttttataaaggcactaatccgattcataagggctcggcccccaagacctggtcacctcccaagtgttctgctctccctgatctgtgtcatatacagactctcttggattccttaccaattgcttgagagatcacagtgggtttgtggagaaaaagttttcaagatgatggatctttcccaacttctgcagctgtcagccgtctcccaatctsaccagccccactttgtctttaggaatttattgattattccagctttacttgtcatagtggtgtctatttgcatctgtcctatgtaagtgcatctgtcctctttctccttgcaggtgcttgttttccctcacattttgactcagttcttggcaacctcgttgctataaaaataaagtcatgactttgaggttagtttggttctttcattgttgtcaggttagga

SEQ ID NO: 643601 - DNA, 512 bp, Homo sapiens
agactgtctggtgtcggtggctaatgactgaagctattaatagaggtaggaaatgcagaccaaaagcaggcccggggtgagagatgataaatttgaattttaacatgttgagtttggacatccaggatgaaataaycacaaaacatttaaatatacgaatctgaaaaggtaagcatcataagcatatgagctattggtaaaattctgatacttaatgaagtctcgcagggaggcagtacagaggcaagcaatgggctggggataaaacatagggaaatattatttaaataaagatgaaagaaaaggagcccacaaaggaagctgaaaaggcatagtcaaaaaaagaggcttgccaaagtgccacctttgaagctctgctgttacactttataaggaaacttttggttacctgagattgcatgcatttataaaagtttctattattaggaagacaataataatgataaggctctttctcattgttgtcagtgtaatttatctatttaattata

SEQ ID NO: 643602 - DNA, 411 bp, Homo sapiens
aatcatctattgctccaactgctctttactaaaggtaatttgtctttttaacctcatcaggctccttttaagctctcaaactgaccttatttttttttttacagattsaatgcattaagtcaatttattatttatgatgaatttatttatgtatttattttcgctatcacaagtagaaaaagcctataagttgctatgccaaaaacctgcctctagatggcaaacaaaccccacaatacacaaaagagagccaaattcttagaaaccctgggaaaggaagagggctactgtcccattaacaactgggagcccttaaggcaagaatgaggtggaacatctggaacatctgggaggagacaccagggtgcggagtagtggggaacctgctctgtgctctgagactgaaagccc

SEQ ID NO: 643603 - DNA, 411 bp, Homo sapiens
aatcatctattgctccaactgctctttactaaaggtaatttgtctttttaacctcatcaggctccttttaagctctcaaactgaccttatttttttttttacagattgaatgcattaagtcaatttattatttatgatgaatttatttatgtatttattttcgctatcacaagtagaaaaagcctataagttgctatgccaaaaacctgcctctagatggcaaacaaaccccrcaatacacaaaagagagccaaattcttagaaaccctgggaaaggaagagggctactgtcccattaacaactgggagcccttaaggcaagaatgaggtggaacatctggaacatctgggaggagacaccagggtgcggagtagtggggaacctgctctgtgctctgagactgaaagccc

SEQ ID NO: 643604 - DNA, 571 bp, Homo sapiens
aagctctcaaactgaccttatttttttttttacagattgaatgcattaagtcaatttattatttatgatgaatttatttatgtatttattttcgctatcacaagtagaaaaagcctataagttgctatgccaaaaacctgcctctagatggcaaacaaaccccacaatacacaaaagagagccaaattcttagaaaccctgggaaaggaagagggctactgtcccattaacaactgggagcccttaaggcaagaatgaggtggaacatctggaacatctgggaggagacacmagggtgcggagtagtggggaacctgctctgtgctctgagactgaaagcccagccttgcctctcaccgctgccttgactgtgtccccatctgctgtgaagtgaatggtgtcttctaaattcatgctgagccctaattgctgaaaagtgtaagacatgcaatggggggattatgtgcatcttcccgacaccaacatgatgctcaggaaggagacttcttgttttctcttaggattcttttactaaccaagattttgcctctactacatatttccctttgct

SEQ ID NO: 643605 - DNA, 559 bp, Homo sapiens
tttttttacagattgaatgcattaagtcaatttattatttatgatgaatttatttatgtatttattttcgctatcacaagtagaaaaagcctataagttgctatgccaaaaacctgcctctagatggcaaacaaaccccacaatacacaaaagagagccaaattcttagaaaccctgggaaaggaagagggctactgtcccattaacaactgggagcccttaaggcaagaatgaggtggaacatctggaacatctgggaggagacaccagggtgcggagtagtggggaacctgctctgtgctctgagactgaaagcccagccttgcctctcaccrctgccttgactgtgtccccatctgctgtgaagtgaatggtgtcttctaaattcatgctgagccctaattgctgaaaagtgtaagacatgcaatggggggattatgtgcatcttcccgacaccaacatgatgctcaggaaggagacttcttgttttctcttaggattcttttactaaccaagattttgcctctactacatatttccctttgctgattgtccctcc

SEQ ID NO: 643606 - DNA, 571 bp, Homo sapiens
aagctctcaaactgaccttatttttttttttacagattgaatgcattaagtcaatttattatttatgatgaatttatttatgtatttattttcgctatcacaagtagaaaaagcctataagttgctatgccaaaaacctgcctctagatggcaaacaaaccccacaatacacaaaagagagccaaattcttagaaaccctgggaaaggaagagggctactgtcccattaacaactgggagcccttaaggcaagaatgaggtggaacatctggaacatctgggaggagacaccagggtgcggagtagtggggaacctgctctgtgctctgagactgaaagcccagccttgcctctcaccgctgccttgactgtgtccccatctgctgtgaagtgaatggtgtcttctaaattcrtgctgagccctaattgctgaaaagtgtaagacatgcaatggggggattatgtgcatcttcccgacaccaacatgatgctcaggaaggagacttcttgttttctcttaggattcttttactaaccaagattttgcctctactacatatttccctttgct

SEQ ID NO: 643607 - DNA, 376 bp, Homo sapiens
tatttccctttgctgattgtccctcccttttgacagaagatggcccagggcattcactactaagtctcaacctcttacccaaagccctcagtctagtgttgctctttccttcatgctatttttgtttgtttcttttcttgtaatcatcttggcaataaaataatcacttttttctttctacctattaaagatgttaccttagttaattacagtggtttccttcagaatgataaatggtctttcaaaatgatgtaaagagatctaaatccgtgtgctccagaagttgaatgaagatctgtctagcaygggtgccagtgactctcccagagtgctccatgcagctggccccacagagtccctctgtgctgtcatatca

SEQ ID NO: 643608 - DNA, 563 bp, Homo sapiens
atgtacagcttacacgtattgattgatatcttatgtctccctaaaacgtgtaaaaccaacctgtagcccgacgacctttgacacacattctcaagacctcctgaggctgtttcactgatatttctttaactttgaccaaataaatttctaaagtgattgagacttttctcagatacttatttgtttataggtatcactggatacacttaaggaattgaagagattgatgacattgagaaaaggaggaagccagggtgtgtggagagagagagagagagagagagagattgtgatgtatgtacaggactaacactgagacctggttatgtaatggtgtagtactgagtatcatccccaaatagtgaggtttcattccaagaagactatgcatgtatctcatttgggaaaacagcttttgcaggtgtaaattaaggagcytgaaacagggagatggtcttagattaatcaactgggacttaaatgcaaactcaagtgtcctaaaaaaaaacaagaggtagagagacatttagcatagactgaagtggagaaggtagtgtgaacac

SEQ ID NO: 643609 - DNA, 362 bp, Homo sapiens
ctgagacctggttatgtaatggtgtagtactgagtatcatccccaaatagtgaggtttcattccaagaagactatgcatgtatctcatttgggaaaacagcttttgcaggtgtaaattaaggagcctgaaacagggagatggtcttagattaatcaactgggacttaaatgcaaactcaagtgtcctaaaaaaaaacaagaggtagagagasatttagcatagactgaagtggagaaggtagtgtgaacacagagacagagattgcagtgatgtgtccacatcccgggagagagaagccaccagaagctggaagagctaaatcagactgctccctagagcttcagaaggagccagaactgat

SEQ ID NO: 643610 - DNA, 574 bp, Homo sapiens
tcatttgggaaaacagcttttgcaggtgtaaattaaggagcctgaaacagggagatggtcttagattaatcaactgggacttaaatgcaaactcaagtgtcctaaaaaaaaacaagaggtagagagacatttagcatagactgaagtggagaaggtagtgtgaacacagagacagagattgcagtgatgtgtccacatcccgggagagagaagccaccagaagctggaagagctaaatcagactgctccctagagcttcagaaggagccagaactgatgactccaagatcttagcccagtgaaactgatctggacttctgaactatgagagattccattcctgttgtttgaagctaccacatttttgagaacttgtyacagtagcccgaggacactaacacaaacggggctccgggaaaatccagactaaaggtgttgtgttggtttgcaatctccttgcttaactttctgatactagacgtaaatagattggtgaaaaattttgtgattgaagaaatgtacatgaaacctacagtgtacagagaagcatctgttagttataagataaatattg

SEQ ID NO: 643611 - DNA, 324 bp, Homo sapiens
gtaaaacacaccccttccccttgcattggtttcctgttgctgctgtaacaaattaccacaaccttactgctccmcataacacaagtgtattatcttacatttctggaggtcagaagtctcaatgaagtaaaatcaaggagtaatagggctctattcattctaggcttcgagagagaatccaatatcgagcattccatctttctgatgttcccacattcctagcagcatggccccttcctccatcactccagtttccctgtccattgtcccaggtcccctctggctgttaccttcctccttccctattataaggacccttgtgat

SEQ ID NO: 643612 - DNA, 351 bp, Homo sapiens
ctccacataacacaagtgtattatcttacatttctggaggtcagaagtctcaatgaagtaaaatcaaggagtaatagggctctattcattctaggcttcgagagagaatccaatatcgagcattccatctttctgatgttcccacattcctagcagcatggcccctwcctccatcactccagtttccctgtccattgtcccaggtcccctctggctgttaccttcctccttccctattataaggacccttgtgattatgatggtctcacccagataattcaggatactctcctgaccccaaaattctcaaccatgtctgccaagttatttttgacatattcataagtaatg

SEQ ID NO: 643613 - DNA, 351 bp, Homo sapiens
ctccacataacacaagtgtattatcttacatttctggaggtcagaagtctcaatgaagtaaaatcaaggagtaatagggctctattcattctaggcttcgagagagaatccaatatcgagcattccatctttctgatgttcccacattcctagcagcatggccccttcctccatcactccagtttcccygtccattgtcccaggtcccctctggctgttaccttcctccttccctattataaggacccttgtgattatgatggtctcacccagataattcaggatactctcctgaccccaaaattctcaaccatgtctgccaagttatttttgacatattcataagtaatg

SEQ ID NO: 643614 - DNA, 351 bp, Homo sapiens
ctccacataacacaagtgtattatcttacatttctggaggtcagaagtctcaatgaagtaaaatcaaggagtaatagggctctattcattctaggcttcgagagagaatccaatatcgagcattccatctttctgatgttcccacattcctagcagcatggccccttcctccatcactccagtttccctgtccrttgtcccaggtcccctctggctgttaccttcctccttccctattataaggacccttgtgattatgatggtctcacccagataattcaggatactctcctgaccccaaaattctcaaccatgtctgccaagttatttttgacatattcataagtaatg

SEQ ID NO: 643615 - DNA, 351 bp, Homo sapiens
ctccacataacacaagtgtattatcttacatttctggaggtcagaagtctcaatgaagtaaaatcaaggagtaatagggctctattcattctaggcttcgagagagaatccaatatcgagcattccatctttctgatgttcccacattcctagcagcatggccccttcctccatcactccagtttccctgtccattgtcccaggtcccctctggctgttaccttcctccttccctattataaggaccyttgtgattatgatggtctcacccagataattcaggatactctcctgaccccaaaattctcaaccatgtctgccaagttatttttgacatattcataagtaatg

SEQ ID NO: 643616 - DNA, 239 bp, Homo sapiens
tcttttgctatataaaacctgtatagaggactaaaaccarggaaattaggtgaatcattcatgcggattcattgtttgatattcagtactatgaaaacctcatccttcaaatttaaaaaattataataaaatagaaaagaacaccagacagagaaaaaagaaacaaaacaaatacattaaaaactgaccctgctgaagcagatgccactctttgaaataacaaagaaactgctgaacac

SEQ ID NO: 643617 - DNA, 527 bp, Homo sapiens
tttcccagaaatccagtcctctggaaaagcagcagcaggtttgtgcacaggctgcactaccttggtctggccactggtagtcrtgcatgagaactactccctggcgtatttctcagtccactgacactgatgtaattggctccacttcccctgctgttgagccaggccgacacgccctgggcaaaggcatctgtgtgaagtattgaggtgcaaatcagtgcttaagatatgtttggaggcaaaatactttttcatctacatgggcagtgtcttggcagaagatggagattctctctaaatggatgtgagacagggtggctggcatctgggtcaggatgatgccctggtgcatggcaagaacatgcattgggcagcagctgccctcgctaaggagagaggttcactgacctggcttttcccccctcacctgctctccagaaagccagactctagggcagatgctcctgagaccccaggaacaggctggtggggagcgcagctcagagcattactcaggggatgtggcc

SEQ ID NO: 643618 - DNA, 536 bp, Homo sapiens
taaaaactgaccctgctgaagcagatgccactctttgaaataacaaagaaactgctgaacacgcctttaattcagtgaggcagtaggtgtttttttctttgtttgtttttgtttctttttttttttttttttgagacggagtttcgctcttgtcacccaggctggagtgtrgtggcacaatctgggctcactgcaacctccgcctcccaggtccaagcaattctcttgcctcagcctcctgagtagctgggatcacaggtgcacaccaccacagcctgccaattttgtattttttttagtggaggcggggtttctctatgttggtcaggctagtctcgaactcccaacctcaggtggtctgctcacctcggcctcccaaagtgctgggattacaggcgtgagccaccacgttaaaaagggaaacttcctatttgccctctaaaggtttgcagaaaatgaatggacaaaacataaattaatagaagaaagaggcaaaaaaaaaaaattctgtaaaatgtaggcgaaaaaaaacaagg

SEQ ID NO: 643619 - DNA, 536 bp, Homo sapiens
taaaaactgaccctgctgaagcagatgccactctttgaaataacaaagaaactgctgaacacgcctttaattcagtgaggcagtaggtgtttttttctttgtttgtttttgtttctttttttttttttttttgagacggagtttcgctcttgtcacccaggctggagtgtggtggcacaatctgggctcactgcaacctccgcctcccaggtccaagcaattctcttgcctcagcctcctgagtagctgggatcacaggtgcacaccaccacagcctgcyaattttgtattttttttagtggaggcggggtttctctatgttggtcaggctagtctcgaactcccaacctcaggtggtctgctcacctcggcctcccaaagtgctgggattacaggcgtgagccaccacgttaaaaagggaaacttcctatttgccctctaaaggtttgcagaaaatgaatggacaaaacataaattaatagaagaaagaggcaaaaaaaaaaaattctgtaaaatgtaggcgaaaaaaaacaagg

SEQ ID NO: 643620 - DNA, 536 bp, Homo sapiens
taaaaactgaccctgctgaagcagatgccactctttgaaataacaaagaaactgctgaacacgcctttaattcagtgaggcagtaggtgtttttttctttgtttgtttttgtttctttttttttttttttttgagacggagtttcgctcttgtcacccaggctggagtgtggtggcacaatctgggctcactgcaacctccgcctcccaggtccaagcaattctcttgcctcagcctcctgagtagctgggatcacaggtgcacaccaccacagcctgccaattttgtattttttttagtggaggcggggtttctctatgttggtcaggctagtctcgaactcccaacctcaggtggtctgctcacctsggcctcccaaagtgctgggattacaggcgtgagccaccacgttaaaaagggaaacttcctatttgccctctaaaggtttgcagaaaatgaatggacaaaacataaattaatagaagaaagaggcaaaaaaaaaaaattctgtaaaatgtaggcgaaaaaaaacaagg

SEQ ID NO: 643621 - DNA, 496 bp, Homo sapiens
ggcctcgcctcccagcctacatctttctcccatgctggatgcttcttgccctcgaacatggactccaagttcttcagttttggaactctggctggctctttttgctcctcatccagcagatggcctattgtgagacttggtgattgtgtgagttaatacttaataaacttcctgtatwagccagtgacatctagagggacagaactaacaggatatatacatatatatatacatacacacacacatatatatatgcacacacacacacacacatatatatatttatttacaaaggggagtttattaacttacaggatcataagttacacaatgggctgtctgcaaactgatgagaaaggagagccatggagtccaatgtttgagggcaggaagaaaccagcatgggagaaaaaagatgtaggctgggaggctaggccagtctctccttttcaaatttttctgcctgctttatatttgctggcagcagattagattg

SEQ ID NO: 643622 - DNA, 389 bp, Homo sapiens
atatatatatacatacacacacacatatatatatgcacacacacacacacacatatatatatttatttacaaaggggagtttattaacttacaggatcataagttacacaatgggctgtctgcaaactgatgagaaaggagagccatggagtccaatgtttgagggcaggaagaaaccagcatgggagaaaaaagatgtaggctgggaggctaggccagtctctccttttcaaatttttctgcctgctttatatttgctggcagcakattagattgtgcccaccagattaagggtgggtctgccttccccagcccactgactcaaatgttaatctctttcggcaacactctcacagacacaccctggatcaatacttcatatccctcaa

SEQ ID NO: 643623 - DNA, 389 bp, Homo sapiens
atatatatatacatacacacacacatatatatatgcacacacacacacacacatatatatatttatttacaaaggggagtttattaacttacaggatcataagttacacaatgggctgtctgcaaactgatgagaaaggagagccatggagtccaatgtttgagggcaggaagaaaccagcatgggagaaaaaagatgtaggctgggaggctaggccagtctctccttttcaaatttttctgcctgctttatatttgctggcagcagattagattgtrcccaccagattaagggtgggtctgccttccccagcccactgactcaaatgttaatctctttcggcaacactctcacagacacaccctggatcaatacttcatatccctcaa

SEQ ID NO: 643624 - DNA, 455 bp, Homo sapiens
atatatatacatacacacacacatatatatatgcacacacacacacacacatatatatatttatttacaaaggggagtttattaacttacaggatcataagttacacaatgggctgtctgcaaactgatgagaaaggagagccatggagtccaatgtttgagggcaggaagaaaccagcatgggagaaaaaagatgtaggctgggaggctaggccagtctctccttttcaaatttttctgcctgctttatatttgctggcagcagattagattgtgcccaccagattaagggtgggtctgccttccccagcccactgactcaaatgttaatctctttcggcaacactctcacagacacaccctggatcaatacttcatatccctcaatcctatcaagttgacastcattattaaccatctcactccccttcatatatatatgtatatagtccttt

SEQ ID NO: 643625 - DNA, 573 bp, Homo sapiens
ttgtgtttggttatattttgattacagtatattatgctatgatttatatgcacatatctgtcttttgctgtcttgtttgtttttattgcttttgttttgatgttgtgatatttggaagagttaaacttttattctgatggctaccttatgtaatttcataaaatcatctctttctttrgacagtagctaatgtctctaaactaagaacaatggtattagctgtattctctttcttgtcctccctatgtgatttttcatcccacaatttgatttaatcatattaactttgtttcccctggtgccattaagtatgcttacatttctataaacaatatcctttgactcccaggcattacagatgagcagtcagtaaaatcattctgaggaatactttctctttccttttcttccatttttcttagttgtatcatttctatattgccagagcacctacagttgcatttctttctgtcagctttatccagcatttgtttttgtcttttatttgaagttaaatatattccttgctcactacaacactgggggaaggaaggtttctgttgtcattgttgt

SEQ ID NO: 643626 - DNA, 573 bp, Homo sapiens
ttgtgtttggttatattttgattacagtatattatgctatgatttatatgcacatatctgtcttttgctgtcttgtttgtttttattgcttttgttttgatgttgtgatatttggaagagttaaacttttattctgatggctaccttatgtaatttcataaaatcatctctttctttggacagtagckaatgtctctaaactaagaacaatggtattagctgtattctctttcttgtcctccctatgtgatttttcatcccacaatttgatttaatcatattaactttgtttcccctggtgccattaagtatgcttacatttctataaacaatatcctttgactcccaggcattacagatgagcagtcagtaaaatcattctgaggaatactttctctttccttttcttccatttttcttagttgtatcatttctatattgccagagcacctacagttgcatttctttctgtcagctttatccagcatttgtttttgtcttttatttgaagttaaatatattccttgctcactacaacactgggggaaggaaggtttctgttgtcattgttgt

SEQ ID NO: 643627 - DNA, 573 bp, Homo sapiens
ttgtgtttggttatattttgattacagtatattatgctatgatttatatgcacatatctgtcttttgctgtcttgtttgtttttattgcttttgttttgatgttgtgatatttggaagagttaaacttttattctgatggctaccttatgtaatttcataaaatcatctctttctttggacagtagctaatgtctctaaactaagaacaatgrtattagctgtattctctttcttgtcctccctatgtgatttttcatcccacaatttgatttaatcatattaactttgtttcccctggtgccattaagtatgcttacatttctataaacaatatcctttgactcccaggcattacagatgagcagtcagtaaaatcattctgaggaatactttctctttccttttcttccatttttcttagttgtatcatttctatattgccagagcacctacagttgcatttctttctgtcagctttatccagcatttgtttttgtcttttatttgaagttaaatatattccttgctcactacaacactgggggaaggaaggtttctgttgtcattgttgt

SEQ ID NO: 643628 - DNA, 573 bp, Homo sapiens
ttgtgtttggttatattttgattacagtatattatgctatgatttatatgcacatatctgtcttttgctgtcttgtttgtttttattgcttttgttttgatgttgtgatatttggaagagttaaacttttattctgatggctaccttatgtaatttcataaaatcatctctttctttggacagtagctaatgtctctaaactaagaacaatggtattagctgtattctctttcttgtcctccctatgtgatttttcatcccacaatttgatttaatcatattaacwttgtttcccctggtgccattaagtatgcttacatttctataaacaatatcctttgactcccaggcattacagatgagcagtcagtaaaatcattctgaggaatactttctctttccttttcttccatttttcttagttgtatcatttctatattgccagagcacctacagttgcatttctttctgtcagctttatccagcatttgtttttgtcttttatttgaagttaaatatattccttgctcactacaacactgggggaaggaaggtttctgttgtcattgttgt

SEQ ID NO: 643629 - DNA, 199 bp, Homo sapiens
gtgtcacttttctgacagcaaatttcacacatttgaactaacargcttcaagttgtggccatcagctggcttctttgggacacctagaatgcctgtattacccagaatggaattttattatcattggaggtaaacagccgtaggctgtgattagtcctggtatatcctcagcaaagcagttgactgactaatccttcca

SEQ ID NO: 643630 - DNA, 602 bp, Homo sapiens
acttaaaagtcatctagtcctagccccacattttatacttaggaagctaaagcccccgagacagtaaaggacttggacttgcccagggtaataccaatttctttcagttcaagttttcagtcaagagaatttttgagctaaaaagccagactttcaaagtagagaggcaaatagtacayattttgctcatccatgtgggctttaggacatccagaaaattagagcaaatgagttccctcatttgtaaagtcaaaactttacatcctttcataaaagccatgataattttgcctcatgagtggtggggagtaagtttctgaaccactcctcacaggaataaaaagggaaagtgggcatgtcactttctcaaagccctgccaggatcaacaaaaaatcttacacaggaggaggtgtttccttccccactctgcctcagttacaaatttttaaagtgattctattggtgtaaaaagcatgcaatactgtgctgcactacagaccagagaactcaaagacaaactactggcaaaccttgcttaggatctggaaagtagaataacctcagaaatctcacattgttcagtgaatctacattacacatt

SEQ ID NO: 643631 - DNA, 474 bp, Homo sapiens
taatacaagatttcaagacttactataaagctacaataatcaagaccacaaggtactgttgaaagaatagacaaatagatcaatggaacagaatacagtatccatataaatatatccacacaaatgtagtcaactgatctttagtaaagaagcaaagaaaattcagtgaagaaagaatattctttttcaaaaaatgataatggaacagaccttacacctttcacaaaawaataactcaaaatgaatcacagacctaaatgtaaaacacaaaaactctcaaacttctagaagataactgtattggtgcccaagagctgctataacatggtaccacaaactaggtggcttaaaagaagggaaaacaaatctggaaattagaagccttaaatcaaggtgtcagcagggctgcactctatctgaaggctctaggggagtatacttccttgtctcttcctgtcttttggtggttgccag

SEQ ID NO: 643632 - DNA, 474 bp, Homo sapiens
taatacaagatttcaagacttactataaagctacaataatcaagaccacaaggtactgttgaaagaatagacaaatagatcaatggaacagaatacagtatccatataaatatatccacacaaatgtagtcaactgatctttagtaaagaagcaaagaaaattcagtgaagaaagaatattctttttcaaaaaatgataatggaacagaccttacacctttcacaaaaaaataactcaaaatgaatcacagacctaaatgtaaaacacaaaaactctcaaacttctagaagataactgtattggtgcccaagarctgctataacatggtaccacaaactaggtggcttaaaagaagggaaaacaaatctggaaattagaagccttaaatcaaggtgtcagcagggctgcactctatctgaaggctctaggggagtatacttccttgtctcttcctgtcttttggtggttgccag

SEQ ID NO: 643633 - DNA, 466 bp, Homo sapiens
ttttcatgtctatttcccctactagactgtagcttgcaaaggcaggaactatgacatattcattttagcctcctcagtagacagttgcttctaaaaaatgaaccaatgactgttagggccagtaactgccaaataacctagttttaggctgtagacattgaaaaatgtttacatctctgatggctgggtattttaatggaattatctrattcacctgaaaaaaataattctaaacatctgtttactcacccattcaaccatgcattcattcactgtctgatgttatggtatatagacctaaatttcttaaccaaaactcttggggacagatatgtttcagaattcagatattttgtatttttaaaaagtaatatggtgcactcatcatgtatgttacaaaagaccccaacagcatctggggcagcatcccataatcaataattctgcggctagacgtataaacatt

SEQ ID NO: 643634 - DNA, 605 bp, Homo sapiens
ggtcatttctcattcctcagcttacttggactatctgtttcttgacagtattgatttatccagcctgttcacacacttccttgacttgattctcggggtactatacttttggttactttctatcttattagtcattccttctcattctccaactttagtttctcctccatgccccatccttttaatgtcacagtgcccatggtcagtgtttaatcttttttttttctcttctatataaactcaactcctctgctctataccatccaataccagagctttaaacactataaatgtgttgaagacatctaaatccatatctcaggcgatatttttctctgctactccagactcatatatttcactgcctactcacatctcctcttgggagtcgaagagccatctcaaactgaactcctggggtctctacccctagtcttccccatcacaaatgatggcaattgcaatctttcaactgacaagctaaactcctgcagtcatccttgtttctatctttctctcatatatccaggaactgactatgtttgaccacctcggtccaagtcacttttatctcwcccctcttactgtaattgactcctaacaga

SEQ ID NO: 643635 - DNA, 594 bp, Homo sapiens
aaattgcttattattctaagaggcatgataaaatttctggctggtccactttgtcccactgaaagatgaatcattcctttgtccagcatatatgtgctgtatatctactcactcgttagtcacttagtagcagtctaagttatggattgactgtcttagtatcacagtgcttatgtttaaataattcttattttatttaattgttctattttatcattagttattgtttgttaatctcttgctgtacctaatttataaatcaaactctatcataggcatataggtatatgaaaaaatgtagtgtatatagtgtttggtactatctgcwgtttctggcacctgctgggcatattgaaatgtatctcccacaaataaagggagactcctgtgatcagcatcacacctccactcatctgcaaatttccatcttcccctgcttgtattattgtgggatgctatgaaatggctcaaaaagctggaaaagcaactgaagaaacatttcaaaattctgactctagataaggaactgaaagacatgcaatacaagctgaagagcatcaaaataacttcagtattatttcctgaatgtggatt

SEQ ID NO: 643636 - DNA, 605 bp, Homo sapiens
ttgtcatctgtctttcttcttttaagatttcttggtcacatttcagcacaaaatttttttttattttacaatgcggaataatcagtcctatggggtaattcctacaatgttacaacacttaaaatatttctaaaatgtaacattttaaaaaaaggaacattttgcaaatattttcttttactttataacctcattcaggacttccccttcctcccaagctcaatatggtgtcaaaggatagttgatacaggccattaagatttacttttcagtggaacaggagtccattttcataaaacttctttatctgctgtatcagatgcaagccacacggataccatcattagaattttatktaataatttttacactttctgcaacagaaagtaagcttggggagagggataccaaaattcaggtaagagggcaaatatttacttgcagtttccagtgttaaaactttctattcctggaatgatagcaaagactgacctaaaatatttgaaatacaatttaaggatacatatatttagggcttatgttcaacatgttaaaaaatagtcttataaaatgtaacgtttgaagagcagagtgtaaatatcaca

SEQ ID NO: 643637 - DNA, 605 bp, Homo sapiens
ttgtcatctgtctttcttcttttaagatttcttggtcacatttcagcacaaaatttttttttattttacaatgcggaataatcagtcctatggggtaattcctacaatgttacaacacttaaaatatttctaaaatgtaacattttaaaaaaaggaacattttgcaaatattttcttttactttataacctcattcaggacttccccttcctcccaagctcaatatggtgtcaaaggatagttgatacaggccattaagatttacttttcagtggaacaggagtccattttcataaaacttctttatctgctgtatcagatgcaagccacacggataccatcattagaattttatttaataatttttacactttctgcaacagaaagtaagcttggggagagggmtaccaaaattcaggtaagagggcaaatatttacttgcagtttccagtgttaaaactttctattcctggaatgatagcaaagactgacctaaaatatttgaaatacaatttaaggatacatatatttagggcttatgttcaacatgttaaaaaatagtcttataaaatgtaacgtttgaagagcagagtgtaaatatcaca

SEQ ID NO: 643638 - DNA, 445 bp, Homo sapiens
cccaacttctcttgtccagtttcactttctcacccaccaacccctgctctcactctaccactaagtgccctcaacactgatctctccctaaaagtgactgaaataaatgtccaattttggggggatgactgattctaatgttgggaagagragcttaaaagatctgacctcctactcagtgagaaaggggtccttgaacacccttcttgagacgtaacctccctactcctacttaaatgctagcaattcctgctttttgccacagtaatgcaaggcatttctggaagttacgatgcaaactaaatctttttagatctctggtttcaaaactttggattttaggcacctagataggtgctacgttttcattttgttaaataaggacatttaaaaaataaataggtgcccccttctgcgcagtcacactgagccagtgcctaggcct

SEQ ID NO: 643639 - DNA, 445 bp, Homo sapiens
cccaacttctcttgtccagtttcactttctcacccaccaacccctgctctcactctaccactaagtgccctcaacactgatctctccctaaaagtgactgaaataaatgtccaattttggggggatgactgattctaatgttgggaagagaagcttaaaagatctgacctcctactcagtgagaaaggggtccttgaacacccttcttgagacgtaacctccctactcctacttaaatgctagcaattcctgctttttgccacagtaatgcaaggcatttctggaagttacgatgcaaactaaatctttttagatctctggtttcaaaacttwggattttaggcacctagataggtgctacgttttcattttgttaaataaggacatttaaaaaataaataggtgcccccttctgcgcagtcacactgagccagtgcctaggcct

SEQ ID NO: 643640 - DNA, 445 bp, Homo sapiens
cccaacttctcttgtccagtttcactttctcacccaccaacccctgctctcactctaccactaagtgccctcaacactgatctctccctaaaagtgactgaaataaatgtccaattttggggggatgactgattctaatgttgggaagagaagcttaaaagatctgacctcctactcagtgagaaaggggtccttgaacacccttcttgagacgtaacctccctactcctacttaaatgctagcaattcctgctttttgccacagtaatgcaaggcatttctggaagttacgatgcaaactaaatctttttagatctctggtttcaaaactttggattttaggcacctagataggtgctamgttttcattttgttaaataaggacatttaaaaaataaataggtgcccccttctgcgcagtcacactgagccagtgcctaggcct

SEQ ID NO: 643641 - DNA, 399 bp, Homo sapiens
ttttctgcttatcttctgcttactgatctaggtggagaaggaagtagctgacaatgacatctttaggtttcttacccaatcctcccattttttttctttgtaaattacccatttcaactcataaaataggctcctatagctgtattgtaaatatgactgtacccttacttkaccactctgattagagtgaaggacacctgatgtaggaaaagcaagtccattacataggcttagccaatcagattttgtcttctggaaatttctgttgggccccccaaaatacctcagttgctatagaaaataaacttataagaatatttagtgttggagatacagtggttgtgtttgagttatgctgaaatacagtagcaagtaatctgcaggaacagagaacactga

SEQ ID NO: 643642 - DNA, 540 bp, Homo sapiens
taggaatgttgatctttgggaaaacaaaatgaggatcagagtaagtaagggacaagagtcactggggaaaagagggttaccaaatacgtggagaaaaacataatgaaaagggaaaatactggagtaaaatgcaaaatcaaggattgacacagataaggtttcaatcttctgctgcctcctactaattgtgtgatttgggcaagtggcattaatgctctaagccacagttttctcatctgtgatgtggggattataactggagctacttcaaagagatattgcaagaattaaatcaaaccttgtggttaaatgtctggtctagtacccagaacatggagattagtaaatactaaagacttccttcccccagactcctttcatctcccccagctatgacatgggaakgaggaagaaaatcagatgcttaaaaagacaaaacgataaaggcaattggttattttgtatttctctcttctaagagtgttgaaattttaatatcttgttttgttcaagcatcactgtcccatgtcctccttgagg

SEQ ID NO: 643643 - DNA, 577 bp, Homo sapiens
ggttttcaatttactttgcccagattcatcaaaagaatcactatctatggcagcaatagctttacaaaatctatttcttaaataataagacttgaaagtggaaattattccttgatccacgggccacagaatggatgttgtgttaacaggcatgaaaacactaatctccttgtatatmttcatcagagctcttggatgactgagtgcattgtcaatgagcagtaatattttaatagaaatatttttttttcggagcacttggtatcaacagtgagctaaggtattcggtaaaccatactgtaaacagaagtgctgtcatcaaggccttattgttccattatagagcacaggcagggtagatttagtataattcttaagggccctaggattttcaaatgataaatgagcattgactttaacttaaagtcataagccacattagcccaaacaagagagtcagcctgccttttgaagctttgaagccaggtattgacttctcctctctagctatgaaagtcctaggtggcatcttcctccaacagaaggctgttttgtctacattgaaaatctgttgttc

SEQ ID NO: 643644 - DNA, 505 bp, Homo sapiens
tctaaggtacagctccttgagttttggatctcagtgtgttttgccatcatctgcacttggcataattttttcttgacccagctccaattttatcttgcaccagtaccccaaacaaaaaagtaaattgtggaagactaattgtcatcactgtgctttaaattattttccaaggtatttttaattattttccaaggtatttatctcctcgaactttctcagtttagcagtaactttattcaaacagctcaggttgtaaggtgtacatcaattctttaattcttatctgtagtgcattgtgaatcatggcttgagaggatgaaccttatttagttaggaagtatcttccaaacataaatgattcatttgtcagcaaagataatatcataaaagaaaatataacataaaacagctctcaaatattcccgctaaataatgaraatattagaaggagctacttcaggttaaatattgtgactcaaggccaggcacagtggctcatgcctgt

SEQ ID NO: 643645 - DNA, 505 bp, Homo sapiens
tctaaggtacagctccttgagttttggatctcagtgtgttttgccatcatctgcacttggcataattttttcttgacccagctccaattttatcttgcaccagtaccccaaacaaaaaagtaaattgtggaagactaattgtcatcactgtgctttaaattattttccaaggtatttttaattattttccaaggtatttatctcctcgaactttctcagtttagcagtaactttattcaaacagctcaggttgtaaggtgtacatcaattctttaattcttatctgtagtgcattgtgaatcatggcttgagaggatgaaccttatttagttaggaagtatcttccaaacataaatgattcatttgtcagcaaagataatatcataaaagaaaatataacataaaacagctctcaaatattcccgctaaataatgagaatattagaaggagctacttcaggttaaatattgtgactcaaggccagrcacagtggctcatgcctgt

SEQ ID NO: 643646 - DNA, 514 bp, Homo sapiens
cctctgtcgtcgagaccaaggtatttttcatgaaacaagatgggctcgctgcttacctaatactagtctctcacttaggtagatgctwtattttaagaaatgtgatttaatccatgatatatctgcacttgtaatttctcattttcagaaatgaaagttgtggcatgataaagtttgaaaacttagattcaaatctcagtttttctccttgcagtgagacacataagctcccagagcactaatttcttatcaaagaagaagagtactaaaacttcccatacagcgtgtgtgaggattgaatgagatcataaatgtgcacgccttaagaactgtgtctgacacaaaatcgctgctcaacaaatgccggctgaatcagcagccagggccataatggcatctaatgcattttaaatgtctgagatgaatttacaacatggtatgtcttcaggattaaaatctacttggaaagatttctcataatagccctctcttctcttgctggatccatttactc

SEQ ID NO: 643647 - DNA, 582 bp, Homo sapiens
gaattactatgtctagtttttttttaatagaaatcttttmtttttaacatgtttcttttcttttctggaatgttggaatattctgctcttgacccagatactgggtacaagagtgtacttgtactcagtttatgaaatctgattgagcagtgtacttataagttgtactgtttatatattttctatattgttatatttcaatgaaaagcttaaaaattaaaaaatggttaaaagagttttgttatatatattttaccacaataaaaaagtaaaaaaaagtgtctatgttctagaacaacaacaaaaaaggctaatagccaatataaaaatatttttaaagtttgaaggaaaaaacccactagaaaaatgaacaaaactatatacactggtggtttggaataagacaaatataaaatctttaaacatatgaaaagattattgatttcattcacaataaaataaatgcaaattaaaattacgttgaaatatgtcaattgagtggcaaaaatatagaagtttgacaatatacattgttgatgagactctggaaaaacaagcatactcatatattactaatggcaa

SEQ ID NO: 643648 - DNA, 582 bp, Homo sapiens
gaattactatgtctagtttttttttaatagaaatcttttatttttaacatgtttcttttcttttctggaatgttggaatattctgctcttgacccagatactgggtacaagagtgtacttgtactcagtttatgaaatctgattgagcagtgtacttataagttgtactgtttatatattttctrtattgttatatttcaatgaaaagcttaaaaattaaaaaatggttaaaagagttttgttatatatattttaccacaataaaaaagtaaaaaaaagtgtctatgttctagaacaacaacaaaaaaggctaatagccaatataaaaatatttttaaagtttgaaggaaaaaacccactagaaaaatgaacaaaactatatacactggtggtttggaataagacaaatataaaatctttaaacatatgaaaagattattgatttcattcacaataaaataaatgcaaattaaaattacgttgaaatatgtcaattgagtggcaaaaatatagaagtttgacaatatacattgttgatgagactctggaaaaacaagcatactcatatattactaatggcaa

SEQ ID NO: 643649 - DNA, 611 bp, Homo sapiens
ccatttcacaccaatcagaatggctattaaaaagtcaaaaacaacagatgctggtgaggatgcagagaaaagggatcacttatacacttagtgggaatgtaaattagtttggtcactgtggaaagcagtttggcaatttctgaaatagctaaaagcagaactgccatttgacccagcaatsccattactgggtatataaccaaaagaaaacaaatctttctaccaaaaatacaaatgcactctcatgttcatcacactattcacaatatcaacaacatggaatcagcctaggtgcccatccacggtggattggataaacaaaatttagtacatattgccatggaatactgtgtagccatgaaaaagaatgaaatcatgtcctttgtagcagcatggatgcagctggaggccattatcctaagcaaaatagtccaggaatagagaacaaaatatgtcatgtaatcacttaaaaatgggaactgaacattgggtactcatggacataaagatgtaacaatagaaaccggggactatcagagcggagaagagaagaggcaaaggtttaaaaactatcaggtgctatgttcagtacttgggtgatggaatcattc

SEQ ID NO: 643650 - DNA, 611 bp, Homo sapiens
ccatttcacaccaatcagaatggctattaaaaagtcaaaaacaacagatgctggtgaggatgcagagaaaagggatcacttatacacttagtgggaatgtaaattagtttggtcactgtggaaagcagtttggcaatttctgaaatagctaaaagcagaactgccatttgacccagcaatgccattactgggtatataaccaaaagaaaacaaatctttctaccaaaaatacaaatgcactckcatgttcatcacactattcacaatatcaacaacatggaatcagcctaggtgcccatccacggtggattggataaacaaaatttagtacatattgccatggaatactgtgtagccatgaaaaagaatgaaatcatgtcctttgtagcagcatggatgcagctggaggccattatcctaagcaaaatagtccaggaatagagaacaaaatatgtcatgtaatcacttaaaaatgggaactgaacattgggtactcatggacataaagatgtaacaatagaaaccggggactatcagagcggagaagagaagaggcaaaggtttaaaaactatcaggtgctatgttcagtacttgggtgatggaatcattc

SEQ ID NO: 643651 - DNA, 611 bp, Homo sapiens
ccatttcacaccaatcagaatggctattaaaaagtcaaaaacaacagatgctggtgaggatgcagagaaaagggatcacttatacacttagtgggaatgtaaattagtttggtcactgtggaaagcagtttggcaatttctgaaatagctaaaagcagaactgccatttgacccagcaatgccattactgggtatataaccaaaagaaaacaaatctttctaccaaaaatacaaatgcactctcatgttcatcacrctattcacaatatcaacaacatggaatcagcctaggtgcccatccacggtggattggataaacaaaatttagtacatattgccatggaatactgtgtagccatgaaaaagaatgaaatcatgtcctttgtagcagcatggatgcagctggaggccattatcctaagcaaaatagtccaggaatagagaacaaaatatgtcatgtaatcacttaaaaatgggaactgaacattgggtactcatggacataaagatgtaacaatagaaaccggggactatcagagcggagaagagaagaggcaaaggtttaaaaactatcaggtgctatgttcagtacttgggtgatggaatcattc

SEQ ID NO: 643652 - DNA, 595 bp, Homo sapiens
agccgtgagcgagcgtgaaatattcaggggaccacacaatgatttgtgtagctgcaactggagcgcaaggagactattataataacacaggagagccatgttcacatctgaggcagtagagaagggttggaggagatatttaaaaagcatacttcttagccttaatgattgatgggatgcagtagtaaaaaaaaaaaaaargggaaaagactatgatgactcttaggtttccggcttggacatatgaaggacagcagtaccatttactaatacaaggaaggaacacagggaagagacttattaagagtcaagggtaggtgagatgatgtattcagttttaaacactttgtgtttaagatgcctccaagacatcaaattggttgggtttgtccattatatttgttaggtgaggagctcagagaaggaaactgagctgaagctataaatgtggagctctcagcatagaggtagaagttgaagccacagaataggtgaaataaagagtaacaaggacagagcccgggagaagactgatgtttaaagaagagggagagcaacagttgtaaagcaagctgcaaaggtcctgcatgcaaga

SEQ ID NO: 643653 - DNA, 422 bp, Homo sapiens
aaataccaccatcattcttcacagaactagaaaaaacaatcctaaaattcatatagaaacaaagaagaacctgcatagccaaagmaagactaagcaagaagaacaaatcaggggatcacattacccaacttcaaactatactacaatgccatagtcaccaaaacagcatggtactggtataaaaataggtgcatagaccaatggaacaaaatggagaacctagaaataaagccaaatacttaacagccaactgatcttcaacaaagcaaacaaaaacataagataaggagatgacacgctattcaacaaatggtgctgggatatctggcaagctacatttggaagaatgaaactggatcctcatctctcaccttatacaaagatcaactcaagatggatcaaagacttaaatctaagaactg

SEQ ID NO: 643654 - DNA, 422 bp, Homo sapiens
aaataccaccatcattcttcacagaactagaaaaaacaatcctaaaattcatatagaaacaaagaagaacctgcatagccaaagcaagactaagcaagaagaacaaatcagrggatcacattacccaacttcaaactatactacaatgccatagtcaccaaaacagcatggtactggtataaaaataggtgcatagaccaatggaacaaaatggagaacctagaaataaagccaaatacttaacagccaactgatcttcaacaaagcaaacaaaaacataagataaggagatgacacgctattcaacaaatggtgctgggatatctggcaagctacatttggaagaatgaaactggatcctcatctctcaccttatacaaagatcaactcaagatggatcaaagacttaaatctaagaactg

SEQ ID NO: 643655 - DNA, 364 bp, Homo sapiens
aacctaatttttatacatgtgtgtccacttggtttgtcatgcacccacatccttacttagtaggcactgaacaagtatctgtacaaaggaaatttacaaattcaaaaagtattgacctgttttttaaaaaaaaaaaatcataaaactagaaactttcttaaaatgagatactcaagcaaactggcgaagaccagcctactgacttggtttttaatatgcacacctggaagtggacacatgttgtccactcctctacccacttcacgactccctactttstgacacacataagttcatacatttcttcaattcatctgggtcctgaaggctttcgagatgttgtaaccatacctagaaattaact

SEQ ID NO: 643656 - DNA, 604 bp, Homo sapiens
agcagtggttcttaacaagagctccttaaagttgtcttcaaagtaagccaataagcagacacagctgttggtgagaacaggtataatgcataagtgtctcagttctgaagaaaacaggtggtttacatgactagcttagaaaagagtggactgggttgtatttgaatgttgaaattacaaagtcaagagactataccctgtatcatagaagggcaatacatttttattgaggatagttatcaaatctttattgagtaccatctaaatgttgtaaactctgcactgggcaccatggatatagtagtgaataagacggacaaaatccctgtccttgtgaagctacatcctactrgaagagctagactaaaaataaatgcataatattatatttgatagtaataaatactattctccagaaaaataaaatgtggtaaggagatagagattgagtgtgtgtcaggggtaggtatcatggtgactgtttttataggaaatggaagtatctctggggagatgattttaaaggtaagaaggagctggcaatgcagagatctgggggaaaacattctggattgcaggcgtagtaagaggaaatctcctgagc

SEQ ID NO: 643657 - DNA, 604 bp, Homo sapiens
agcagtggttcttaacaagagctccttaaagttgtcttcaaagtaagccaataagcagacacagctgttggtgagaacaggtataatgcataagtgtctcagttctgaagaaaacaggtggtttacatgactagcttagaaaagagtggactgggttgtatttgaatgttgaaattacaaagtcaagagactataccctgtatcatagaagggcaatacatttttattgaggatagttatcaaatctttattgagtaccatctaaatgttgtaaactctgcactgggcaccatggatatagtagtgaataagacggacaaaatccctgtccttgtgaagctacatcctactagaagagctagactaaaaataaatgcataatattatatttgatagtartaaatactattctccagaaaaataaaatgtggtaaggagatagagattgagtgtgtgtcaggggtaggtatcatggtgactgtttttataggaaatggaagtatctctggggagatgattttaaaggtaagaaggagctggcaatgcagagatctgggggaaaacattctggattgcaggcgtagtaagaggaaatctcctgagc

SEQ ID NO: 643658 - DNA, 557 bp, Homo sapiens
gatagtcattaaaaattattccagacacccaaaaattgatatgggggagttctattaggaaaacaggcttcatttactggaaaatggggaggttaattaagaagtaagagtgtttataagtaggatgttcagaggaagtgctgatgttgtccttgtcattaaatgttttctgatataaaaatactcccttggtacttacgaagaaggctgattttcattattagacattcacttattcattgtaaaataaaagcgtgtgtgtatgtgtgtgtgcatgcatatgtatttccaatcaaaagtcaggagcgcggactatattatatagaacccagagattcaaaggcctgattatgaatggatagttacacggatagattaatgatggatggatggaagaagtgtggttcatctgtcatgactggtgcctctagctctaagatgtctgactttgaatccagaggaagaagtgggatcactggggttaggggagtatcctttaaaagttttgcaaaaaacattygcagtcacttttggtttatctctgccggttggattta

SEQ ID NO: 643659 - DNA, 522 bp, Homo sapiens
atcatatatatgattttcaaagcttttctcyattctgtgagttgtcttttcattttcttgatggtattctttgaagcataaatggttttaattttaatgatatcttctctaccttttagtaatatcccatatgataagttgcaccttcccaaggtagaagctagaaatcttccacaccgaaactcttttgtagctagggtaacctagattccaccaatcagatctacccatgatagtcttagattttggaaattagcaacccaaggaattggctgcatggagagaaattgatatgatgatggaggcctctagatcttcaagatcagaatagggagaagctgctggtatccatcctggtttcctcattgatacaaagcaatagtggcaaaggaaaatttgctcaagaagctcctgttgtgtgtccacgattgttcctgaatggctcagagcctactgtctgcccctccttgattttctgtgatctacctaatattcttgaataaacccccttcctgattaaac

SEQ ID NO: 643660 - DNA, 586 bp, Homo sapiens
ctcttggaaggtggaagactatctcatatccctatctgctttgcaatggcctgacattatgactaggactaagtasgtgctcaataaatatctcttactttaataaatagatgaataagtgaattaattgggcccttttacaacacaaacaaaatttgtggacctgggaaaactatgtcacttactttaaccttagtttaaccatctttaaaatgagccaatgtgatcagatgatctcaaagtcccttcaaattctgtcatcttgtaggcatgtaattcagtaagtatttctatatattgcctctgagtttgactaagaaacttccatatacatccaaagcttgttcattattccaaatgttatgtacaacatcaactccaaatatctcaggtagaggacttatgttagtgtaagagaaaagtcacattaatcatttaagcatccttttgatcattcggcttcattagccacagctttggaagtctggacagcaatctataaatttgagaccgggtgaaattagcttatttgatgctgttataaaacacctccaacatgtcttcttctacactttcattgagaaat

SEQ ID NO: 643661 - DNA, 586 bp, Homo sapiens
ctcttggaaggtggaagactatctcatatccctatctgctttgcaatggcctgacattatgactaggactaagtaggtgctcaataaatatctcttactttaataaatagatgaataagtgaattaattgggcccttttacaacacaaacaaaatttgtggacctgggaaaactatgtcacttactttaaccttagtttaaycatctttaaaatgagccaatgtgatcagatgatctcaaagtcccttcaaattctgtcatcttgtaggcatgtaattcagtaagtatttctatatattgcctctgagtttgactaagaaacttccatatacatccaaagcttgttcattattccaaatgttatgtacaacatcaactccaaatatctcaggtagaggacttatgttagtgtaagagaaaagtcacattaatcatttaagcatccttttgatcattcggcttcattagccacagctttggaagtctggacagcaatctataaatttgagaccgggtgaaattagcttatttgatgctgttataaaacacctccaacatgtcttcttctacactttcattgagaaat

SEQ ID NO: 643662 - DNA, 585 bp, Homo sapiens
aagaaacattggttttgtgtctcccaggagccagtcagagtattaggaattctatatgtatcattgtgtttaatattcagaatacccctgtaataagtattgtcattctcatctctagttatggagactggagctcagaggcraagggtaaacagcttgctcaagccacacagctaggctgagctgtggctaaaactccacgtttgtggattctaagccttttctctttctactacatcagggatgactggggcatggtttatatcactgagggcatcggagtctagtgagctgcaagtggggacagacttgatggaaggctgtaacactcagagcacactcagagcttctggaaatggaaggaagaggagaaggaggaggaaaatctcaaggtgtttaaacagttgattctgaagaattttcttgctaccaacactgtgaaaaggcatggaggccatttgggaagtgttctgaggatctgggttttctcatctgccaggagtattagactaagtgttccccaaagtcctttccatctcgaatccagaggaaacacatggggaaaatgaattccagtgggctgat

SEQ ID NO: 643663 - DNA, 573 bp, Homo sapiens
ggcatgtgtggggaggagcccaggcttgctctgacctctctctggggccccccactccagaaggttggaacagcattctacagcattccaggatgtggagggggcagcagtgtttgtgtgcagagtggcgaggccgacctccgatgmgcttcccgtaggaagggtgcagtggggggtgctcaccctgcccagggatgctatctgctccaggacttgtttatcagcccacggggtgatcggcatgacatcaatggtgaggttttttgggtttcgtggttttgtttttttctttttccttctaaggaacaattcgttttggtcaaataactagagcaaaagtgactggtgtttagacacctctttccccagcctctggcagtgccattggaggaaccgtcccctgagggtcatagaggaagctgtctggcagctcagagggttgcctcttgtccctgcccagccccaccggcttcccctggctgcctccctcacatgccaggcttgggcagcttcccatcacagaccgaggtccagccagagaggcctgtgctcagcccctccctggggcctctc

SEQ ID NO: 643664 - DNA, 573 bp, Homo sapiens
ggcatgtgtggggaggagcccaggcttgctctgacctctctctggggccccccactccagaaggttggaacagcattctacagcattccaggatgtggagggggcagcagtgtttgtgtgcagagtggcgaggccgacctccgatgagcttcccgtaggaagggtgcagtggggggtgctcaccctgcccagggatgctatctgctccaggacttgtttatcagcccacggggtgatcggcatgacatcaatggtgaggttttttgggtttcgtggttttgtttttttctttttccttctaaggaacaattcgttttggtcaaataactagagcaaaagtgactggtgtttagacacctctttccccagcctctggcagtgccattggaggaaccgtcccctgagggtcatagaggaagctgtctggcagctcagagggttgcctcttgtccctgcccagccccaccggcttccyctggctgcctccctcacatgccaggcttgggcagcttcccatcacagaccgaggtccagccagagaggcctgtgctcagcccctccctggggcctctc

SEQ ID NO: 643665 - DNA, 560 bp, Homo sapiens
tctacatctccattttacaaataatggcatcaaggcacaaaggaataaactcactaagggacacagttgtgaagtcactccgctgggacacaaagccagctgcctgccccacaccctgttctctctgccactctgctgcccttcccttcagtcttctcggactctccagctcattctgctttcctctatctatgaacttatatggtagctgttttcaaaaccgtacagtttatcatttcattgtgacgagttcatgcatgttagttttttctgagcaattacatagcaagatatcttgaaatgatttctatgcctcattctactttctttccaaagcagtcctggctcctggtaagaactcattaaatactttgtgattgatagataatacaaataatagagataggaggcaggggaattctgggcagaagaaggcaggtccccggcaagggccccaacctcaagcctgaaaccacagcccaaagtgagaacatacatmcctgttttcccactcaaatgttgccttttccaaaaccacccatggcctgtcccactcccaa

SEQ ID NO: 643666 - DNA, 552 bp, Homo sapiens
attcttgcactaaaatgagcaatttaaaaacggttggaaagaaatcagtggctatttttgaacaccatcctctgaaagtacagcagataaaaacaaaacagaacaaatatatggaaaaatatgtagctgatatcagggaagcccaaaaaccaccttagagttacacattttccaagatctcaactgagcttctgaaccactcccagtcaaatcaaactcgattatttgtaaagatgctgtctaatgatcagtagaaagtgaagacacacaggatatgtctccatcagctcttaacacacgttggctcccaaaccttacaatagctcaaacttctcctgcaagtttgatccacaaagtgatcctgaactaacacgagcagcccaggcatgatggcatcaccccagmacagaacacttcctccaggcatacattgtctgtgagcttcaaattgcttcttgtcctgtattgtttccagatgatgagttttccataaatgttgtctcttgctagaaaatgttatattccagcatctacctttaaaggcaactatca

SEQ ID NO: 643667 - DNA, 573 bp, Homo sapiens
cagaaagaaaaaaaaacagttgttcttgtgtgtgtaaggaaaatcatctctgtggaaataggttgtttacgttttcaagtcggcaaattcccttcacagccacaccacgtatcaaatagagaagggagacttttttttttggtccctggtgtgcacaaggaggatcccttgagatgcatcctcgtggagcaggaaagatcataatagcaataatgacaacaatgcatcaattgttctcaaaggcatctatggggcagagtatgcttttcaaaggacattcacttctattccatcccatttgatcattatgacaaccgcaggagggagataagatgggtttcattatcaccatttcacaagtaagcatcctgagatggggacaatgtagagttatttttctggaatcacagagctagctagtggcagytttggagccagagcccagttttttctaagaatttctgtcacataaatggattatgtgtactgcatgaacacagaaatgcccaggatgtggagaaagcccaaacctctctcttacttggaagtctggatcagtggttctgggaattc

SEQ ID NO: 643668 - DNA, 604 bp, Homo sapiens
ggaagtatatattatatatacatatattatgtatacatatatacatatatatctcatatatatacatatatatctcatatatatttatatgcacatatatatatcctcttggggagaggtcaaaagaagcaggggatacaaatctgactgcaaaaagattgaaggacagtctttattgaaagcctttggtggggatacagaggagtgaattatattgagagataactcagctgaattttctataaattcattgttgctatcttccattttcctaaccacctgctgacttaacctgggttctttctccatttgctctctgactctgcttacctttcctgwctctgtggtgcttctcggtctttctctcatgttccttccattagtctgtctgactgtctctctctgtctcccccagcccccactggatcttcctgcatgttctctccttccagattattctctcttggtgtttgttctatgctttcttgtaaaaaaacatgttggcctctctgggcttttgtaattaatacatctggtcataggggaaaagaatgcttctaaatgttatttgtttttccctgacatgtatcaaattttagttttc

SEQ ID NO: 643669 - DNA, 622 bp, Homo sapiens
cacatctcccactcagatctccaaaatccactctgctttgatccaggtccttgttctgactggagttatggagggtcatctggacatttcccaggggccggtagagccactgctccttgggcctttttcctgaggacaagaggaagaacagcgactatttcccctaggaatgccaccacatgcaccaacctgctggtcacccacctagctgcatgttctcacagagcagtgctccttaaatgcagattcttgggcatactttgaacctactaaatcagaattttcaatggcaggacttgggaatctacatttaacaacctcccttaggtaatattaacatagagttttatgaagctccaaagaataccaaagcatatggccagccactcaccyagaagctgcagacagctggatgagtgtggcttgaccattcattacccagcttgaaagcctccctgcagcagggccccttatacatgctacaggtcaagcagaaatgaattgaatccacctgttcctgtcaggggcacatagcacagggacaagggatgaggggtttggggagacagactctcagacaagtaatcacctgggtttgagtccctactctaccacttaacca

SEQ ID NO: 643670 - DNA, 632 bp, Homo sapiens
agtaaatgcttcaaagcttcaaaagttagtcgggcatggtagctcatgcctgtaatcccagcactttggtgggtggatcacraggtcaggagttcaagaccagcctggccaagatggtgaaaccccatctctactaaaaatataaaaattagccgggtgtgagtggcgggtgcccgtaatcccagctactcgggaggctgaggcagagaattgcttgaacccaggaggcggaggttgcagtgagctgagattgcgccactgcattccagcctgggcaacagagtgagactccatctcaaaaaaaaaaaaaaaaaaagagaaaaagaaaaagacaggctgactctcttgttaggggctaatgcagctggtgacttaaagttgaagccaatgctcattgaccattctgaaaattccaggtcccttaaaagttatgttaatctgctctgcctgtgctctataaatgtaacaacaccacctggatgacaacgagtctgtttacagcatggtttactgtacattttaagcccactgttgagacttcctgctcagaaaaaaaagattcctttctaaatattaatgcacactgaaaatgtacctggtcacacaagagctctgatggagatgtaagaaaa

SEQ ID NO: 643671 - DNA, 567 bp, Homo sapiens
ccagcaccaaaggacagtgggacatcattgatgtgcattgtccctggagggctcagcgctctcctacccgatgaagcctgtttgctgttgattcagaaacatttatttccatgcattgtgcgccctctatggggcaagacacagaaaggcagtgttgtcctccccttcatatgacactgtggtagaataagaaacgtatatttggtctctgccccccagttcctgacacggagctcctaaatcccttgggggttcctgagtgaagggagcatcttttgtttgaatgaagcaactcttggtgggttcttggatagtctcaggatggggctggttgccaaaggaaccaaccatgtgattgcagggttggaactgttcagccccccacgtccaacttccagggagggaayaggagctgaaggtgagctggtctccaatggccaacgatgtattcaactgtgcctctgtaatgaagcctccataaaaacccagcaagactgcacttggagagcttctgggttgctgaacacttggggtaccgggggctggtgcactgcgcagagggcatgg

SEQ ID NO: 643672 - DNA, 639 bp, Homo sapiens
cccatttttggtatcttccataagtctctttccagagatcctcaacccacaccagcgggtaaccacctattctgggcaattggggttggccaaagtgtcctcttcactccctatttactcattttataattagttattttcttttttgtctttttccattctcatccctattttctctctcattaccattcttttcacacctcctccttctctcactctctaactatagacttgaaggtctatagttttctgaggacttgaaggtatttcatacttggccctgtccatgcacaggacacgtgaaaagtctttgttgatgagagctaaggcctaggatacttacctgtcacaatctgtgtctctaatctgctgaagacactatgggaatagatattttggggcacggttatatctttgaataatattttctccatctagatgaatagagcaccaggtaacatgaacaatcccattgtctgatatgaagtaaatgttgataagtagccttaagtccaaacaggtaagactcaaactatgttttctggctctggggtggaggcctttgcaatttaraaaacgactccttatggctaggaataagtgattgcttgtctgatatatttttcttccagtctgttg

SEQ ID NO: 643673 - DNA, 613 bp, Homo sapiens
tgtgctccatacagagctgtattatgcacttttaaaagcaatttaagaatgtttggtctatttctatcttctttaccaaaaaaacccaaaactttgctttggattttagttatactttctaatagctgaattagccttttctctatttttctctctggttaattgacaatctggctactagagtattcttcatggggaaactggatgtggctggcagctgtcccttcatgccaccatctcatattataggtcctgctattattgttaaattggtttctacctttatcgatttttagtcatatatctttcctcttttcctcagagtgctatcctacttcattagtgccgctttgttgaaaaataagccactaycctgcctcttattgagatacctattccttgggaccccaagaaaattcatgttagattttgttgcttctgaagttttaactcttaaacaacctatttattgtaatcttaggatatgttcagtgcatgtcttctagtagacttttggggcaaaagaaacgatgtaaacatatttaaacataaaggtgatgattctaggagcaggtttttgaatagactgtgggaagaaaaatgtgaacagaac

SEQ ID NO: 643674 - DNA, 588 bp, Homo sapiens
tgttttttttttttttttttttttkttttttttctttagtggaatgtgaaaagtgtgattttgctaagagggtatttcagtcttttccaggcatgtgccatatgttggagctgccatacatgttggtgttatctctcagtgcagagacagaaatataaatatatgacactgttgtcaacagtcacttcattaccccctacactttttttttattactttttttttgagaccgagtctcgctctgttgcccaggctggagcgcagttgcatgatcttggctcactgcaacctccgcctcccgggttcaagcgattctcctgcctcagcctcctgagtagctgagattacagacacgtgccaccacgctaatttttgtatttttagtagaaacggggtttcactatgttggccaggctgtctcacactcctgacttcatgtgatccacctgtctcgtcctgccaaattgctgggattacaggcgtgagccatcgtgcccagccaattatctcttacacttaacacagcagaagtcacgcaaaatccagaatttcagaacaaacacagcagtagcaacagaggagtctggt

SEQ ID NO: 643675 - DNA, 588 bp, Homo sapiens
tgtttttttttttttttttttttttttttttttctttagtggaatgtgaaaagtgtgattttgctaagagggtatttcagtcttttccaggcatgtgccatatgttggagctgccatacatgttggtgttatctctcagtgcagagacagaaatataaatatatgacactgttgtcaacagtcacttcattaccccctacactttttttttattactttttttttgaraccgagtctcgctctgttgcccaggctggagcgcagttgcatgatcttggctcactgcaacctccgcctcccgggttcaagcgattctcctgcctcagcctcctgagtagctgagattacagacacgtgccaccacgctaatttttgtatttttagtagaaacggggtttcactatgttggccaggctgtctcacactcctgacttcatgtgatccacctgtctcgtcctgccaaattgctgggattacaggcgtgagccatcgtgcccagccaattatctcttacacttaacacagcagaagtcacgcaaaatccagaatttcagaacaaacacagcagtagcaacagaggagtctggt

SEQ ID NO: 643676 - DNA, 588 bp, Homo sapiens
tgtttttttttttttttttttttttttttttttctttagtggaatgtgaaaagtgtgattttgctaagagggtatttcagtcttttccaggcatgtgccatatgttggagctgccatacatgttggtgttatctctcagtgcagagacagaaatataaatatatgacactgttgtcaacagtcacttcattaccccctacactttttttttattactttttttttgagaccgagtctcgctctgttgcccaggctggagcgcagttgcatgatcttggctcactgcaacctccgcctcccgggttcaagcgattctcctgcctcagcctcctgagtagctgarattacagacacgtgccaccacgctaatttttgtatttttagtagaaacggggtttcactatgttggccaggctgtctcacactcctgacttcatgtgatccacctgtctcgtcctgccaaattgctgggattacaggcgtgagccatcgtgcccagccaattatctcttacacttaacacagcagaagtcacgcaaaatccagaatttcagaacaaacacagcagtagcaacagaggagtctggt

SEQ ID NO: 643677 - DNA, 588 bp, Homo sapiens
tgtttttttttttttttttttttttttttttttctttagtggaatgtgaaaagtgtgattttgctaagagggtatttcagtcttttccaggcatgtgccatatgttggagctgccatacatgttggtgttatctctcagtgcagagacagaaatataaatatatgacactgttgtcaacagtcacttcattaccccctacactttttttttattactttttttttgagaccgagtctcgctctgttgcccaggctggagcgcagttgcatgatcttggctcactgcaacctccgcctcccgggttcaagcgattctcctgcctcagcctcctgagtagctgagattacagacacgtgccaccacgctaatttttgtatttttagtaraaacggggtttcactatgttggccaggctgtctcacactcctgacttcatgtgatccacctgtctcgtcctgccaaattgctgggattacaggcgtgagccatcgtgcccagccaattatctcttacacttaacacagcagaagtcacgcaaaatccagaatttcagaacaaacacagcagtagcaacagaggagtctggt

SEQ ID NO: 643678 - DNA, 682 bp, Homo sapiens
ggtgccttgctggggatgacagggcaaatcgtattagtccggtctcatgctgctaataaagacatgcccgagactgggtaatttataaaagaaggaggtttaattgactcacagttccacatggctagggaggcctcacaattatggaagaaggctaagaaggaccaaacgcacgtcttacatggcagcaggtaagaaagcatgtgcaggggaactgccctttctaaaactatcaggtctcgtgagacttattcactagcacgagaatagcatggaaaaaaacccacccccgtgattcaatcacctcccactgggtccstctcatgacaggtgggggttatgggagcaacatttcaagatgagattttggtggggacacagccaaaccgtatccgcagggatgttaggattagcacccaaagttcatctcttttctttcccactgcttctcttaacatggacccttaggcaaggtggtgtgtttggcagagcaccagacttgcaacagagtctccctgaaaattcccgacatcccctgtcaaggtcactgatgcagaattttgttgttgtacctgtcatttcttgcacagactgtagttaggcaaattaataacatctgcctggtggcaccgggatacttgtaatctcactgccagtcaaagtcaacagtgtaggtcggctg

SEQ ID NO: 643679 - DNA, 607 bp, Homo sapiens
atatgcatatttaaaaatgttcaattcaatcccaaagtagaaaaaacattctacttaggactgtaggaatgtagttgtgatggtgtgataaaggctcaatgaaacattcaaaattaataactcttggggaatcaagtaaccatttgtcctttgcagttaaacaaaattgagtttaattyttccccggaagtggcattaggtattataaagtcttctctgccctgctttcccagagctatgagagaaaagcattcaccttcttgacttgttctagaagacgaggagaaagaacaactaaatgtaattcacaaaatgctttctccttgaaatgatctccttcattcattcatctgtgaattgtttgtattaaatttgaaattagagttctatcttgcacataaagattataaagatgggtagaactagtgatcactctagaataaggttaaaattattcagggaagattcccatccctataattctttcctgcgcgctttatactgaaacctgaaattgcatcataataaatagtttttctgccgtaagcagtgacatattctgcttatatgctaaaattcaatgacccctaatgcataaacacatttg

SEQ ID NO: 643680 - DNA, 675 bp, Homo sapiens
gttctaacccgcaaagtgaaaagggccagggatgatctcagagacaggtgccaagccctttcttttgtgatcaccacgctgtgcctacctttcccatccacaattccactcctgacaagtgagagtgcagacaggttgaacaatccagaagaagacagagatgccatatggactcaaaggtgagacaggagcctcactggcttgtgtattcccacagcagcagcaggcacttagcaagtgatgggaggtcactttgcaaatggcaggcacccaacccttgagcaagaggtcctctaccatacctcagtttttgtcataaaagacatttcatttgaacatgaattaaaggtaygaatttggtttgtatgtggatgaggaaagtttaacatgaaaatcagaaagaaaaaaagacattggtgggtaaggatgatggttgtgtttgtttttacggcaggcattaatgggagagaaaacgtatcattattatgaacataatctaatagtgaatatgtgcctattattcactgtgccatccaccctgctaagaattttgcatgcatcatttctctttaccccacttcaatcttatgagatatacatgcctattatctctggcacccatgaccaaactaagtcccctgctcctcccacttatcacaattgtgcaatataaga

SEQ ID NO: 643681 - DNA, 675 bp, Homo sapiens
gttctaacccgcaaagtgaaaagggccagggatgatctcagagacaggtgccaagccctttcttttgtgatcaccacgctgtgcctacctttcccatccacaattccactcctgacaagtgagagtgcagacaggttgaacaatccagaagaagacagagatgccatatggactcaaaggtgagacaggagcctcactggcttgtgtattcccacagcagcagcaggcacttagcaagtgatgggaggtcactttgcaaatggcaggcacccaacccttgagcaagaggtcctctaccatacctcagtttttgtcataaaagacatttcatttgaacatgaattaaaggtacgaatttggtttgtatgtggatgaggaaagtttarcatgaaaatcagaaagaaaaaaagacattggtgggtaaggatgatggttgtgtttgtttttacggcaggcattaatgggagagaaaacgtatcattattatgaacataatctaatagtgaatatgtgcctattattcactgtgccatccaccctgctaagaattttgcatgcatcatttctctttaccccacttcaatcttatgagatatacatgcctattatctctggcacccatgaccaaactaagtcccctgctcctcccacttatcacaattgtgcaatataaga

SEQ ID NO: 643682 - DNA, 673 bp, Homo sapiens
gtagaagttcttaaacaacattcccagaaattagcattggctcctagaaacacaagtagcaaagagcttgaattcaaaggtaggctgtctagactcagccaagaggcccccttgaatcaaaattgttcttaagatttacagggtggatgtgaaagtttttccttcattgttcacatatgtagctcaaaagctcttgtatttcctagaatttttttgaaacttaatttttaggtaygacattctctggtagccataacatttcctaaaatttattttttttcccccagggatttgcattattatccataaaaaaaaaaggtgcatttatttttttttcttttttttttcctttttgagatggagttttgctcttgttgcttaggctggagtacaatggcgagaccttggctcactgcaacctccaccttccgggttcaagagattctcctgtctcagcctcctgagtagctaggattacaggcgcatgccaccacgactggctaatttttatatttttagtagagatagggtttcatcatattggtcaggtctggtctcgaactcctgacctcaggtgatctgcccacctcagccacccacaggcccatttttgattgcagaaattactggtagctcctaataaaacttttatctacaatttcttttgttttgt

SEQ ID NO: 643683 - DNA, 397 bp, Homo sapiens
gaattctgccccaggatgtctcatacctagaggctccccatatctgatttaaatgatgaaatttgagagwtttgagctgatgatatttagacgagattttggacttggagttgatgtaaatggttgagtcattttagggttgggcagaatgtgatgagcacattttgcatggaggatagatgtaaatctttggggatcagagggtagattgtgggtgtgattaaagatattgagatggaagaattttcctggattatttggatgagccctatatgtaaccttgagtgccttataagaaggagacagagggagatttgacacagaagaagaaaaggcaatataactactaaggtagagattgaagcgatgtagccacacatcaagaaatgctggtagc

SEQ ID NO: 643684 - DNA, 377 bp, Homo sapiens
gaattcttctgaatcttatccaagatcaccaagacggtacctctgtaagtctccaagaaccatcacgttactgggcttgggtgcccccwaatgcagatatggctgtaataaaaccaaaacttggattacaacacccaagtcccttcaaatacgtgaaaagccttcccaagatggataagtacaaacaagcccagactgtgaagattataataaatgcttaattcttcaatgcccagacaccaatgaacattctcaagtatagagaccatccaaaaaagatggtctcaacaaataactaaatagggtacaagggaccaattctggagagacagagatatgtaatctttcacacagcgaattgaaaatagcagttttaa

SEQ ID NO: 643685 - DNA, 667 bp, Homo sapiens
tcaaaatggttactgtttttctcaaaagctgccaattttcattacagcagtgaactggaggagggctgaaatgtcagaggaaaagaaaattactgggcagccccctttttctcccattagaatttcagcaaagcaagtgaggcaagggcagacaagataatgaaggggttgcacaggcatttatttcacttttatttttcctttgagaaagtgttaataaaattagcagcgttccaataacagcaaggattataaaagatacatttatcaacaatgtacaattttcctactggaatgtataataaaacttttcaaatgcaaatctcctatcaatgaacgtacaaaggggcaagataaaaaggaggaaaatgacatgaagctaattctctgycatctctgaaaactagatggattaacattgtttaaagttaactgataaatctcccaaaacttaattttaaactttcattcagttttctctctgtcatggctttagccaaagcttcttacaaaaatatcatgctaattccgctgattttcagggattgggtcaaaatcagcaatgccttctcattgcctaccatacaaagccaaaaatcctcttatatcaggtattttccaacaatcaaagccctttgtaatccagtccacactgtctcccaaagtc

SEQ ID NO: 643686 - DNA, 642 bp, Homo sapiens
tttaattttcttatctgtaaaatgggggttaaacatgtgtatgtcagagagcatcatgaatattaaatgaggtaatgtatgtaaatcctctggcacagagctggcacacggaggtacttgataatctgggcatttcattccttctaccaaataaaaactccatggagttgcaggcatcagtgagctgggaagaaaggtacttttggaggagagaggctgtctgggtgctagctctctcccaagcctcatyctctgctctttcccccaaatcacattgtatcaggaatctcagataagtacaggaagcacattttgccagcagtgaagattgctagtcattgtaggacacatggaccagataattgcccttgtttctccttccttgaagttgcaaatttcaaatgtaaagttctcagatccctcagtttggaatatgagtgtattttggggtgaaactcagtgtcattttttttcctatttttttccagttaagttttacaataccctcctgactcccacctccattgtttgcaaagcttgctcagatgaatgtgaggaggcctctaagagctgcctaaccatatttcactaagtggctctatccactgttgtttccatgtctccttttaaagatgttccctt

SEQ ID NO: 643687 - DNA, 483 bp, Homo sapiens
gtacagacagggtttcaccatgttggtcaggctggtcttgacctcctgacctcaagtaatccgctcgccctggcctcccaaagtgctgggattacaggcgtgagcccccgcgcccagcctggaggtggtttttaaacgttcagttgaatgtatgtgcaaattcccctcacaggggctcgcacacaggaggctcataacaaatattaatttgttccaacttcttttcctcattccttccatcctccaattttgccacatctccaaagacctccaccctggatgtaaaactaggagctagagggaaggagttctctttgatgtagtgacatgtcatggttccttgaagttatggccatggtgggatgaaattaatctgtgaacccagagacagatgtcatggacattcaagccatcagacactgtaggcaagtgcctatgcacttttccaggaactataaaarattttaagacctggaaaaaaat

SEQ ID NO: 643688 - DNA, 567 bp, Homo sapiens
acttttctctttggctaaatgagtttggggtcgcaaaatttaatttcctttcacaaacctacaccaatggtttgccagggctcttgggcctttgaccacagactgaaggctgcactgttggcttccctacttttgaggttttgggactcggactggcttccttgctcctcagcatgcagatggcctattgtgggactttaccttgtgattktgtgagtcaatactccttaataaactccttttcatatttacatctatcctattagtcctgtccctctagagaaccctggctaatacaccctccttgctgatcctcatgtgtctagagcctttgctcttccccagatatcagcatggttttttccctcactttttttttttttttttttggaggtggagtctacgctgtcacccaggctggagtgcaatggcatgatctcagctcactgcaacctctgcctcctgggttcaagtaattcttctgcctcagcctcctgagtagctgggattacaggtgcctgccaccactcccagctaatttttgtatttttagtatagacagggttt

SEQ ID NO: 643689 - DNA, 567 bp, Homo sapiens
acttttctctttggctaaatgagtttggggtcgcaaaatttaatttcctttcacaaacctacaccaatggtttgccagggctcttgggcctttgaccacagactgaaggctgcactgttggcttccctacttttgaggttttgggactcggactggcttccttgctcctcagcatgcagatggcctattgtgggactttaccttgtgattttgtgagtcaatactccttaataaactccttttcatatttacatctatcctattagtcctgtccctctagagaaccctggctaatacaccctccttgctgatcctcatgtgtctagagcctttgctcttccccagatatcagcatggttttttccctcactttttttttttttttttttggaggtggagtctacgctgtcacccaggctggagtgcaatggcatgatctcagctcactgcaacctctgcctcctgggttcaagtrattcttctgcctcagcctcctgagtagctgggattacaggtgcctgccaccactcccagctaatttttgtatttttagtatagacagggttt

SEQ ID NO: 643690 - DNA, 431 bp, Homo sapiens
cccccaacaacactcttgatgcrtagagagcctgcattcctgctgcacttgtttagcaactagcagagctgtgactccaaattatctcgtgcatgtttcaaaccatttaaattgtcattgtaggattttgcctattagtaaaataccatcctgtgaatactgattttgtaaaatagtacaattgtctggtgataggaaagcaataacttcttgaatgtagtccagcagaatgactgctcctttttagtgaaatgtaaggaagttgcttgtgtaatattctttatgtaattggattcagggtccattcatattttaccacgttgatagaaaataaattggcatcattgcatatctaaatgtctgttgtcacagttcaggttaaagagaatgaaatatgacttggacttactttgcattctcttccctttctt

SEQ ID NO: 643691 - DNA, 431 bp, Homo sapiens
cccccaacaacactcttgatgcgtagagagcctgcattcctgctgcacttgtttagcaactagcagagctgtgactccaaattatctcgtgcatgtttcaaaccatttaaattgtcattgtaggattttgcctattagtaaaataccatcctgtgaatactgattttgtaaaatagtacaattgtctggtgataggaaagcaataacttcttgaatgtagtccagcagaatgactgctcctttttagtgaaatgtaaggaagttgcttgtgtaatattctttatgtaattggattyagggtccattcatattttaccacgttgatagaaaataaattggcatcattgcatatctaaatgtctgttgtcacagttcaggttaaagagaatgaaatatgacttggacttactttgcattctcttccctttctt

SEQ ID NO: 643692 - DNA, 537 bp, Homo sapiens
taaattaaaatggcaatgagatatcactacctatctgttagtatggccaacattgagaaaattggcaacaccaaatgaggatgtggcactttcattaacttctggtgggaatgcaaaatggtattagtattttgaaagacagtgaaacatattattttcatacaatccggtaatcatgaccctttgtatttacccaaaagagttggaaacgtatgtactcacaaaaacctacacacatatttttatagaaagtttattcataatctccaaaacttggaagtaatcaaggtgtctttcagtacatgaattcataaaaccatggtacatccagacaatggaatattatttagcttccaagtcatatatgtatattactaagtaaaatcttatctttgtactaagaaatcttacatgtgtagtactaagtgaaggaatataatgtgaagagatttcatgytgtgtgattaaaccatacaacattttggggaaggtagttaccagtggttatgtgggagggagagaaggatgagtttgcag

SEQ ID NO: 643693 - DNA, 536 bp, Homo sapiens
tgagtgagtgctactgcacagttatttctgcaagtaggtagtcattaaaaattttcttcagtcatgctgtgatggtttcaaattagagccgctggaccagttccttgcaaatttgtaccccaatactttctgcatgaaagtgagttgtgctcagccactaaaagcttgcaaataaagagtacacagttgtatatcccatttatgactattgactttcttcataattaattaaatgctaccctcaaattatacttcatagatccttccttatctgaccttttttcatttttgtcagacattcatgcattcttctttccttctatccatctatccagcaaatatttaaatacttactatgtgccacgcactgagaaaaaggtgagtacacggaacctgcccttaagaacacacgacamatagataaataaaaggattacacgttgaattaagtgctataaaagaaagaaacttgcttcaagagcacacaacaaaaggagatgtttcttctttatgaaggatgggctgggaagacctct

SEQ ID NO: 643694 - DNA, 536 bp, Homo sapiens
tgagtgagtgctactgcacagttatttctgcaagtaggtagtcattaaaaattttcttcagtcatgctgtgatggtttcaaattagagccgctggaccagttccttgcaaatttgtaccccaatactttctgcatgaaagtgagttgtgctcagccactaaaagcttgcaaataaagagtacacagttgtatatcccatttatgactattgactttcttcataattaattaaatgctaccctcaaattatacttcatagatccttccttatctgaccttttttcatttttgtcagacattcatgcattcttctttccttctatccatctatccagcaaatatttaaatacttactatgtgccacgcactgagaaaaaggtgagtacacggaacctgcccttaagaacacacgacacatagataaataaaaggattacamgttgaattaagtgctataaaagaaagaaacttgcttcaagagcacacaacaaaaggagatgtttcttctttatgaaggatgggctgggaagacctct

SEQ ID NO: 643695 - DNA, 536 bp, Homo sapiens
tgagtgagtgctactgcacagttatttctgcaagtaggtagtcattaaaaattttcttcagtcatgctgtgatggtttcaaattagagccgctggaccagttccttgcaaatttgtaccccaatactttctgcatgaaagtgagttgtgctcagccactaaaagcttgcaaataaagagtacacagttgtatatcccatttatgactattgactttcttcataattaattaaatgctaccctcaaattatacttcatagatccttccttatctgaccttttttcatttttgtcagacattcatgcattcttctttccttctatccatctatccagcaaatatttaaatacttactatgtgccacgcactgagaaaaaggtgagtacacggaacctgcccttaagaacacacgacacatagataaataaaaggattacacgttgaattaagtgctataaaagaaagaaacttgcttcaagagcacamaacaaaaggagatgtttcttctttatgaaggatgggctgggaagacctct

SEQ ID NO: 643696 - DNA, 354 bp, Homo sapiens
tgtaaccccagcactttgggaagctgaggtgggcagatcacttgmgctcaggagtttgagaccagcctaggcaacatggcgaaaccctgtctctactaaaaatacaaaaattagccgggtgtggtggtgtgccatgtgcctgtaatctcagctactcgggaggctgaggtgggaaggtcacctgagcctggggaggttgagggtctggtgagctgagatgatgcccccgcactccagccaaggcaacagagtgacaccttgtctcaaaaaaaagcaacccacaaaattagctgggcgtagtgctatgcacttgtagttccagctactcaggaggtggagctggaaggattgttt

SEQ ID NO: 643697 - DNA, 530 bp, Homo sapiens
ctacattttggctctgcagaactgagagaagaaatgtatgaataggatagtgatattgcctttgtctatgggaattcttgagtctaataaaaaaaactgggaaaaatctaacttcatgattacacttgggcacataggtgattaatacgaatgaagtaacaaccataaatacaatcataaccacaagaacaacagtaattcaaattttctcacttcatagatgttcttagaatgctttattggtatcttgtargtgctctccccaagcctcaggtgttcttccataatctcagttgatgcagaggcaaacaccacactctcctctgttcaatgtctgccattcctgtctttttggcctctgactcttccctatactactgtccatgcacttgagatcttcactgacatagctgggctctgtatttattgataagaatatctcttttctcttagactaggcatgaccaaaaggttaatctgggttcaaagattaatgacaatgaccactcagtttttattcaagatcaatt

SEQ ID NO: 643698 - DNA, 530 bp, Homo sapiens
ctacattttggctctgcagaactgagagaagaaatgtatgaataggatagtgatattgcctttgtctatgggaattcttgagtctaataaaaaaaactgggaaaaatctaacttcatgattacacttgggcacataggtgattaatacgaatgaagtaacaaccataaatacaatcataaccacaagaacaacagtaattcaaattttctcacttcatagatgttcttagaatgctttattggtatcttgtaggtgctctccccaagcctcargtgttcttccataatctcagttgatgcagaggcaaacaccacactctcctctgttcaatgtctgccattcctgtctttttggcctctgactcttccctatactactgtccatgcacttgagatcttcactgacatagctgggctctgtatttattgataagaatatctcttttctcttagactaggcatgaccaaaaggttaatctgggttcaaagattaatgacaatgaccactcagtttttattcaagatcaatt

SEQ ID NO: 643699 - DNA, 551 bp, Homo sapiens
agtgccttaatttgtactgtctgcgacattttttataatattgtacataataactgggacagatattgttattactgtacatagagtggcagggctacttgcctcmttttcctaagacttttgcttcttttatttttaatttttaaaaaagtcttttttaaaaagaaaagaaaaatccttattaaagacttttcaaaatagaactcttaaatagtaattgatagcactttacctctgttttcctgataaaaaaaattctaagagaataaaaacaatttcatcctgcctccatattataaccagaataattgaaataatatgcttcaattgatagtaaagtagcatttatgtttttggatcaatgaagctaagccagcactaagaattttcttactattcctccactacattacagttacttcttcatccctatacataccgcaataatgagtcggctacatccatttagattatcaacccaaccctaaaagaaagaaaatttccattggttacacatttcagaaaattgttgtatctttggaacatctgcc

SEQ ID NO: 643700 - DNA, 551 bp, Homo sapiens
agtgccttaatttgtactgtctgcgacattttttataatattgtacataataactgggacagatattgttattactgtacatagagtggcagggctacttgcctcattttcctaagacttttgcttcttttatttttaatttttaaaaaagtcttttttaaaaagaaaagaaaaatccttattaaagacttttcaaaatagaactcttaaatagtaattgatagcactttacctctgttttcctgataaaaaaaattctaaragaataaaaacaatttcatcctgcctccatattataaccagaataattgaaataatatgcttcaattgatagtaaagtagcatttatgtttttggatcaatgaagctaagccagcactaagaattttcttactattcctccactacattacagttacttcttcatccctatacataccgcaataatgagtcggctacatccatttagattatcaacccaaccctaaaagaaagaaaatttccattggttacacatttcagaaaattgttgtatctttggaacatctgcc

SEQ ID NO: 643701 - DNA, 551 bp, Homo sapiens
agtgccttaatttgtactgtctgcgacattttttataatattgtacataataactgggacagatattgttattactgtacatagagtggcagggctacttgcctcattttcctaagacttttgcttcttttatttttaatttttaaaaaagtcttttttaaaaagaaaagaaaaatccttattaaagacttttcaaaatagaactcttaaatagtaattgatagcactttacctctgttttcctgataaaaaaaattctaagagaataaaaacaatttcatcctgcctccatattataaccagaataattgaaataatatgcttcaattgatagtaaagtagcatttatgtttttggatcaatgaagctaagccagcactaagaattttcttactattcctccactacattacagttacttcttcatccctatacataccgcaataatgagtcrgctacatccatttagattatcaacccaaccctaaaagaaagaaaatttccattggttacacatttcagaaaattgttgtatctttggaacatctgcc

SEQ ID NO: 643702 - DNA, 402 bp, Homo sapiens
tttgcccaggacatttttaaagtttaaattttcaccatattttgctttctcatgtttattaatcagtaaataatttctgctactgagtctattatttatattttcccctaagaagtaattttcatttggatttcttttggcataccattgtaattgtttacgaatttttaaatattcattataatctaataataactagatattcattctccttttaatatttttgaggytgcagtttcttttgtttgttttgctgtacagatggccctcaacttaaaatggtttgacttacaattttttgactttaggatgggtttatcagaacataaatctaggataagttgaggagcatctgtattcatgaataatttctagtattaatacatcatgaccagagattag

SEQ ID NO: 643703 - DNA, 597 bp, Homo sapiens
tcttgggttagtgttttctctgcaaatagtctccctatctctttttaaaaatctgtactagtggccttacaaaaacaatattcaaagaataattctccactactcctgtctcttctaataggaattgtatgacatattgccatgtaaattagatttggctccttgttttatttatacaataaaactgagcaaagatatcaaccacaggataaattaattacaaggcagagaatcctgccagatatttcctttgggggacaaaccaaacaagaaaaccactccccaaaacttgttcttatctatttcattacgtgctttggcaagtctcaatgacctgcttatttaactaacctaatgggtttgtttttgttttgtaatctactcctttgcaaaagttaatgtctttttgctttagtattaaaaattctcccttcctctgttccagtcttccttatggaccttcctcccctgcattccttagatgagaaattgcaaargtcactgaaattaatgaaaaacacacagtcctaacaacaggaaaccagagacccaatttggccttcaaggggctctgcttaggtgtatcatattgcgtta

SEQ ID NO: 643704 - DNA, 659 bp, Homo sapiens
atttaaatccagggattgggtaaggtcacctacagagagaatgtgtaataatgaaagaataaaacccagggtaaaactatagtaaaaaagaaaagtactctaacacttagaagacatgcagacaagaagccagtaaaggaaagtaaaaaggaacagcctaagagggttggggaatgaaaaaagaaacataacaatcaagagaagaatgtgttctakaaagaaatgaacaattttgagtttagaaagaagtaaaaaataggatagtggctagaaaagggtctcagaccaagggaggtatttttaagacagaagatagtaaaatatatttgtatgctgaaaaaaaaaagatccagaaaagaaggtgaaattcgtgatgtgggagaagatgataatggcagaaatgaagaagaaaacagcaaatgagttgagctttgattacagcaaagacattcattcacagtcagagaaaggaaagcagaatgagtatgagtactaaggcaaatggtagatgtgttgatgggaaatgaagaatttttgtcctattgcttctattttctcaaaaatgctagtaaaagcctacttcaatcaactaattttagtgctaaatacagggacaactgttctccatattcttagatgtgtattatacagttattact

SEQ ID NO: 643705 - DNA, 605 bp, Homo sapiens
caaaggacatcattagctaataaatgctagactaactagataccaaagcttgctctgtgaaaatccccgcgtaacctttgaagtttgcaacaccctaaccccgccacctcactcctggtatcagagagcccagttaaacataactgtttagaggtgttggactcagtttattctagtaggcccaacctctgagaccacccttagatggtagactgggagctgtatgtggatggcagcagcttcgccaacccctgcaaagtgatctgaagaagatggcaaacactgctccrgtcacacccagaagctgactggtccacgcatggctgaagcatgaggaaactcatcgcgggactcattttccttaaaatttggacttgttcagtaaggacttcaactgaccttcctcagactgagggctattcccagtatatacatcaagtcactgaggtaggacaaaagattgctacagtcctattattttatagttattatgaatgcctaggaactccaaaaggaaactgtttgtataataacactcagtacaaagtatgtaatccaggaagtgaccagcccaatgtgtgctatgacccctctgaacctcccat

SEQ ID NO: 643706 - DNA, 527 bp, Homo sapiens
gttattctaacttgtttacatccttgagggtgagggtcaagggctcaaagtatgttttccttctcccaaagaaaggaaggatgaggaaaatggagttttgtggagctccctggtgtttccacacatgccatgtggcagtataaaaaacagcaaggttttcatctctcagacgtccatgcttacttcctgtcttacatgcactgctggtgtctggcccagaatctaacagctcctctgaatgtacaaaggattctgttgtattttctgtcatctctgttcttgcttgagccccacttatgttaccacagctcagcagtcagctgctcccacaatgacagcctgtctcttcatcttgcaatttcctgttctccattttccactaycaagatgcaacaaagggaattccttaaaggagttatgtgcttgcttattttcagaggcgggaggggacaaatttagctatttttgaccacagaggtctctcacaagagccactgaagtcagatctttcctcagttaacagtaat

SEQ ID NO: 643707 - DNA, 578 bp, Homo sapiens
aaactaatgtagtatgctaatgcaacatacagcaaatacaaacacaaatcaccatcagagttgaggtttactgatatttttgcccattcccaacacacatcctgggcatcaaaatataattcttaaagaattttgtgaggaaaataaaatgagtttgtctagaatgacatatttatattgttaatgcacatttttaaaattttgttttgatttttaaatccttatgtctcattaaaattgtgataagatacaaacaatatgaaatttaccatcttaatcatttttaattttatagttcagtgacattaagtacattcacttagttgtgccactgtcactaccagccatccaaagagctctttttattttgctgtaccaatatttttagacaacatactctatgtaggtttgggtattaggatccatttataatcactcagaatcttggaattacatttagrcattatggctagctgagactacaaggacaggtctgatgaggcttgggcctttcctgtgtatctcaaatggtcaggtcaacattgggagttgatcattacttgacgggccataccacc

SEQ ID NO: 643708 - DNA, 530 bp, Homo sapiens
cctaatagaatattctctatggaaaaaatgcagccctcaaataagaaactattaaactcttttcagatatcataaaaaaattgaggatggaaatgcaaacttggatattgtatatgatatattaaaggggtgttatatatgatatattaaggtcttatgcatttttctcagtgcatccatattcttctaatataaggaagatacttatgagtatcaaaaattatgaaaaccrtatttggaaaaattacaaagtcaacacagacacataccacacaaaaactgattttttctcttgcattgtagcttgaaacttcatttattattttaagtgggttttatagaaaatgattcctttttacattacttacaattcctacaaggattcttattcaatttagatttttcttttaacttgataacaatactctcactagaagtgatgagaattaatttgaaaaactatgaactctagaaattgaataaattattcaaaaaacactcatgcttcaaaattatggcagtgataggag

SEQ ID NO: 643709 - DNA, 515 bp, Homo sapiens
aaattacactaagccaatttcgataacagttgagttaataaaattattaatactaaactaaattttccaagttcacagccgtattttattatttaatgtgtatctttattgtgatctgctctttgaaccgagtacaagctgctggaccaaagctgccagtaattagaatgacggtagctgtttttctaggctaattcagacattaatatgcaccgtaaaagagatgatttttaagaggaaaaagatgatctaaagatcatgccctttacatttgttaaatttaaacatgagaacaagcataatgtgggtaaagtattattttatgctccataaaaatttaaagagactttacatattaaaatattcctctgatctcctgttcttgcacagtagatgtagattaaaattctacatctgtgctatataaattggagctcacttctcaaaagactagaaatacaagaatrttaaaaatgagaaggttacagaatcacacatcaaaagagcagtactta

SEQ ID NO: 643710 - DNA, 570 bp, Homo sapiens
agttatttatgtaaatatatattatataatcataaatgtgtttgattgtttacagataaccaccactttaaaaataactatcagacatataagaatatttaacttagttcacatgaaacataaaaatgtaaattatargaatgcacacatacaaaacaaggtagtatatttccaaatatttaagttgtagcatttaattcaatttcataagaaataaagtcttgagattaatttaaaaccataaatccaaactatatgctatttaccagtgatttatttaaaacaaagaactgagaatagtcaaaaataaaagatgacaaacaagtatgtcaaataaatgtatccctaaatcaggcaagaacaacaatattatttgcagaccaaaaataatctaaggcataaagctgtgttgcatattattccaaatacataaacaattatgtgtatcataacgtaaagtttcatgctccagtgcttttttcttatgtgtttgaaatttctttccccctgaccccatctgactggtgaaaatctattgtttaccaaaatttagttcaagaatcactttcc

SEQ ID NO: 643711 - DNA, 562 bp, Homo sapiens
tcaaattttattatgtaaactcttatttacattcaaatgactcctaggtccatatttctggcttagttctcacttttaagtttctaggaaaagtattttgcttgtttcaaaaggaattaaaagcccatgtttgttgaactactttatatttgtgatgggaaaaaaattgaaaagaaaataaaggaaatggtttttggtgtcagatgatagcagagtacactagtgaagcaatttgagctctactcagtaggtaatgaaaaatcatcaaatgttttctgaaaaagagtgattttatggataatgtactttggagaaagtaatgtatcattctatggtagacaaattagagagagatagaagagaatagagatggggagaagttagaataaaaaattagcataagaaattgatkacctaaagtaggatatcaaataaaaagaaaatgtaaatggataaaagatctcatggggtttataaaatgcattataaaatgatctatgaatattggagtgtgagaaaaaataaaaagagagaaagtatggtgttaaattatgcaatgtgg

SEQ ID NO: 643712 - DNA, 634 bp, Homo sapiens
ccgcgcccaactattttcattttctttaagtgaatacaagatacattttgataaaaaggctttatcagtacattcccccaccaccaccaaaaaaaggtatcagcatgactaattcattttatatgtctcattgatacatgtacgtgtgtgtacacacacacacacattatttttgctttgagacttcactaaaggaatcagtaataatttcgaggaatcactgaagttaccttaagcatgaggtaatctataccatgtaaattttattaaatagtatatactatgtggtttagttagtgagatatattttatatatatatacatatatacagtattttttatccctacttaaaaaatcaggctaaaaatggtaacttaattgactgacctattaatctttaagatttgtcttcaattgaattctagaaacgccgacatcttatcttgctctagtgatctacatttaccttctaataattttacatagaatccatctaaaatgatatttcactattaaaattatctagcatatctaaacaaacagtattcagcycatgactagtttccccttgagttttctctgtcagtgatcacttctatagttttacttaatggtgtttattaaccaatagca

SEQ ID NO: 643713 - DNA, 564 bp, Homo sapiens
atatatcttgctgtggggaagcacatggtaactagggagctgaagatattataacagaaaagtagctaaagtcaaatgtaaataaagacaccaatagggaaataagttyagattataagggaaggaatccgtgtcttgaaaacaagggtgaatttcattagttgagagaaagtgagaatttcaaggcagagctcttatcttttccaattgatcacagaaattctgcccttagtacacacaattttttggttctcagcccacaggctctgaagggagccctcttgagtaaaattattttagaatagctccagctattccctgtgtggccctcgctcagggaaacatttgtatttctcatgtacattcccactttgggcttttcctctacctcagcaattttcaaagtgtagtttctggatcaatagcaacagcatcacttaggaactttaagaaatgtaaattcttgtccccatccttgatactgaatcagaaactttgggaatgaaactcatcaatgtgttttaaaccctgcccccaccagaggattcagatacatgcttaact

SEQ ID NO: 643714 - DNA, 601 bp, Homo sapiens
attattaaaatttttcagtttaatatccagattcattgttatgtttgtttgctttacaattaccataaaggcggcaagacatagtggaaagaatttgagctacaaaattagagacctgaattcaaaatcaagatatttttatataacttctctgaccttcagttttctcatcttgaacaaggggataaaatcaggcttgaaaggagacaacatctataaagctacccagtatacttttaggcacatggtaggtgttcccgaaatgttaattttcatggcattacttttcaacttagattcacttgtggttttaattatctagagaayagtgcatgttcaaatgcataaaacacaattaattatattatcgtgcgcccttttggggctttttttttaatctatactgtaataaaggtcatttagtttgcatctggatctcttgggcatagttgcaaatatttgtatgatgtagctaatatcacaattgttaaataaaaaacagtttgctaccatcatctgtcaggcctacctttgtcaaagtttcctatgaataattaattaaattcctgaaaggagaagggaactaacataccaaaaaaag

SEQ ID NO: 643715 - DNA, 648 bp, Homo sapiens
ttttgttttttaatttggcaaagatttattgattttttattttcagtcttttgaagtagrcacagctcagtacagtggctcatgtttttaatcccagtgctttgggaggctgagatgagagaattgcttgggcccaggagtttgagaccagcctgggctgcctaatgagtctccttctttataaaaaattaaaatcaactagcagggcatggtggcacaggaggctgaggtgagagaatcatttgagcccaagagtttgaagctgcaatgagccatgatcacagcactctaccactgtactccagcttgggtaacagacggagaccctgtctctaaataaataagtaaataaaaaaaagtgtttttccatacataaaaataagtaaataaacagataaataaaatagacatggatttgctgagaataaagctaattacaagataacagaaaagtgagcaccaaagatggggttcaccctagcaaatgattccagcctattaggacactcacagaattttccctgcagcatgaccgacatgaaagtagaatgtcatcatgtcaggctgtaccagcgttggaagactaaacactgtggggaagaacctcccttatggaatattatcaacaggtgagagcccagctcctgc

SEQ ID NO: 643716 - DNA, 648 bp, Homo sapiens
ttttgttttttaatttggcaaagatttattgattttttattttcagtcttttgaagtagacacagctcagtacagtggctcatgtttttaatcccagtgctttgggaggctgagatgagagaattgcttgggcccaggagtttgagaccagcctgggctgcctaatgagtctccttctttataaaaaattaaaatcaactagcagggcatggtggcacaggaggctgaggtgagagaatcatttgagcccaagagtttgaagctgcaatgagccatgatcacagcactctaccactgtactccagcttgggtaacagacggagaccctgtctctaaataaataagtaaataaaaaaaagtgtttttccatacataaaaataagtaaataaacagataaataaaatagacatggatttgctkagaataaagctaattacaagataacagaaaagtgagcaccaaagatggggttcaccctagcaaatgattccagcctattaggacactcacagaattttccctgcagcatgaccgacatgaaagtagaatgtcatcatgtcaggctgtaccagcgttggaagactaaacactgtggggaagaacctcccttatggaatattatcaacaggtgagagcccagctcctgc

SEQ ID NO: 643717 - DNA, 648 bp, Homo sapiens
ttttgttttttaatttggcaaagatttattgattttttattttcagtcttttgaagtagacacagctcagtacagtggctcatgtttttaatcccagtgctttgggaggctgagatgagagaattgcttgggcccaggagtttgagaccagcctgggctgcctaatgagtctccttctttataaaaaattaaaatcaactagcagggcatggtggcacaggaggctgaggtgagagaatcatttgagcccaagagtttgaagctgcaatgagccatgatcacagcactctaccactgtactccagcttgggtaacagacggagaccctgtctctaaataaataagtaaataaaaaaaagtgtttttccatacataaaaataagtaaataaacagataaataaaatagacatggatttgctgagaataaagctaattayaagataacagaaaagtgagcaccaaagatggggttcaccctagcaaatgattccagcctattaggacactcacagaattttccctgcagcatgaccgacatgaaagtagaatgtcatcatgtcaggctgtaccagcgttggaagactaaacactgtggggaagaacctcccttatggaatattatcaacaggtgagagcccagctcctgc

SEQ ID NO: 643718 - DNA, 565 bp, Homo sapiens
cttttattactatagctttaatctaagtctgaatatatgtcattttaagctcacaaactttgttattcttcaggacagtttttacatttcttcgattttttatatgtatttaaattttttaaactgattagacagtttccacaagatttctgccaaaatattgtattgtgaaaatggaaatctatgaatcaatttagggagaagttacatagaaacaaagcaaaacaaaacactaataacatccaaaacaaacttaaagagaacaccacaataagaaaagaaattcccaaattggaataaatatttacaactcatgaaattacaaakgggctcgcatttccataaagggcactctctctctccctctctctctctttttttttttccacagagactaactctgtcaccatgtcttgagtgcagtcgtgcaatctcggctcactgcaacctctgcctcccaagtttcagcaattcttctgtctcagcctcctgagtagctggggctacaggcttgtgccaccattcccggctaattttttgtaattttagtagagacggggtttca

SEQ ID NO: 643719 - DNA, 565 bp, Homo sapiens
cttttattactatagctttaatctaagtctgaatatatgtcattttaagctcacaaactttgttattcttcaggacagtttttacatttcttcgattttttatatgtatttaaattttttaaactgattagacagtttccacaagatttctgccaaaatattgtattgtgaaaatggaaatctatgaatcaatttagggagaagttacatagaaacaaagcaaaacaaaacactaataacatccaaaacaaacttaaagagaacaccacaataagaaaagaaattcccaaattggaataaatatttacaactcatgaaattacaaaggggctcgcatttccataaagggcactctctctctccctctctctctctttttttttttccacagagactmactctgtcaccatgtcttgagtgcagtcgtgcaatctcggctcactgcaacctctgcctcccaagtttcagcaattcttctgtctcagcctcctgagtagctggggctacaggcttgtgccaccattcccggctaattttttgtaattttagtagagacggggtttca

SEQ ID NO: 643720 - DNA, 565 bp, Homo sapiens
cttttattactatagctttaatctaagtctgaatatatgtcattttaagctcacaaactttgttattcttcaggacagtttttacatttcttcgattttttatatgtatttaaattttttaaactgattagacagtttccacaagatttctgccaaaatattgtattgtgaaaatggaaatctatgaatcaatttagggagaagttacatagaaacaaagcaaaacaaaacactaataacatccaaaacaaacttaaagagaacaccacaataagaaaagaaattcccaaattggaataaatatttacaactcatgaaattacaaaggggctcgcatttccataaagggcactctctctctccctctctctctctttttttttttccacagagactaactctgtcaccmtgtcttgagtgcagtcgtgcaatctcggctcactgcaacctctgcctcccaagtttcagcaattcttctgtctcagcctcctgagtagctggggctacaggcttgtgccaccattcccggctaattttttgtaattttagtagagacggggtttca

SEQ ID NO: 643721 - DNA, 548 bp, Homo sapiens
gaatacttctggggcatttggggatccctacagtcccggaccctccctgtcccctgytgcctgtgcttcttcccttgcctgctgtcagagcctaacatggaggaggaggttgctgccctgtgagcctgagggagctgtgtctgactggggcttctgtctggggttttgcgaagagctacttatgaatatggtctgtccagataccttgtttcaaaggaagtgagcatgaggtagcaagtgtagccaccccacagctgataaacaactttgtcttgtttttaaatcatcagtcttcatttcacattggaataaagtaattgaaacatgctaccccagcctcgcccgtgtgttctgtaagccagactcatttcgttgtgtgggctgttgtcagaaatgttataaaaaaattatgcataaataagatcaaatgtaaaagtatgcttataatgtcacttgagtgtgtggtaagagggtagagtcacaggaaatctgttggggtttacacccctgctacttaccaagctcatgagagtgtggcagaggtgatc

SEQ ID NO: 643722 - DNA, 548 bp, Homo sapiens
gaatacttctggggcatttggggatccctacagtcccggaccctccctgtcccctgckgcctgtgcttcttcccttgcctgctgtcagagcctaacatggaggaggaggttgctgccctgtgagcctgagggagctgtgtctgactggggcttctgtctggggttttgcgaagagctacttatgaatatggtctgtccagataccttgtttcaaaggaagtgagcatgaggtagcaagtgtagccaccccacagctgataaacaactttgtcttgtttttaaatcatcagtcttcatttcacattggaataaagtaattgaaacatgctaccccagcctcgcccgtgtgttctgtaagccagactcatttcgttgtgtgggctgttgtcagaaatgttataaaaaaattatgcataaataagatcaaatgtaaaagtatgcttataatgtcacttgagtgtgtggtaagagggtagagtcacaggaaatctgttggggtttacacccctgctacttaccaagctcatgagagtgtggcagaggtgatc

SEQ ID NO: 643723 - DNA, 548 bp, Homo sapiens
gaatacttctggggcatttggggatccctacagtcccggaccctccctgtcccctgctgcctgtgcttcttcccttgcctgctgtcagagcctaacatggaggaggaggttgctgccctgtgagcctgagggagctgtgtctgactggggcttctgtctggggttttgcgaagagctacttatgaatatggtctgtccagataccttgtttcaaaggaagtgagcatgagstagcaagtgtagccaccccacagctgataaacaactttgtcttgtttttaaatcatcagtcttcatttcacattggaataaagtaattgaaacatgctaccccagcctcgcccgtgtgttctgtaagccagactcatttcgttgtgtgggctgttgtcagaaatgttataaaaaaattatgcataaataagatcaaatgtaaaagtatgcttataatgtcacttgagtgtgtggtaagagggtagagtcacaggaaatctgttggggtttacacccctgctacttaccaagctcatgagagtgtggcagaggtgatc

SEQ ID NO: 643724 - DNA, 638 bp, Homo sapiens
gacctacagttctgttgtcatgattgactagtacttgacatgaaataccttgaagagattaaattgaaacagtatataaattgtgacttcttttcatagactgtgagatatttgctcatttatttgtggaaacatctcatgatttctccagataggacaaatcataaatagcaagattttagaagaatccatttgatacagtctccaatccatagagtgtgtataattagtagtacccttaagtcagagcaaatgttaattttttaacttctacacaggtcattttttaggccyatatatatatatatatatatatatatatatatatgcacttacaatgagatcattattatgatggagtgtctatatatatgcacttacaatgagaacactattatgatggagtgatggatcccaggcttccatgttatcacttttcttccccagagtccaatagtggtgtggaggatttggtagtctgttcaacgagatgaacaggtcccagttctgtagcagagtgtaagaattcacgtgggggaaagatttcacaacatagtctaatagtttctgaggctccctttcaaatatattttgacattggtcaaaagaaaagacatttgaatgattgttgattgtaa

SEQ ID NO: 643725 - DNA, 533 bp, Homo sapiens
aggctgaggcaggagaattacttgaacctgggaggtggacgttgtagtgagcagagattgtgccatygcactccagcctggacaacaagagtgaaactccatctcaaaacaaacaaacaaaaaactttttaaaatttattgttttgaaatgaaataagaatccaatggatttttagctttatatctacgtgtataagatacatgtattaatgcattaattctataattaaaaataattttaaaattttgaaactactacataaatgtaattttagcatagaatactatatagggtcaaattaattattttaaacatttgtgagaaagctgtaagtcacactgcattttgcaccaaaacatttttgtgttccaatatataatttctgttgtgtcttttataccactagactgtacttctcaaaggaatcttgtgccctttttcatagaatttgaactggtcaccataagttttggcaaagtcatacatgttgctgtttccttaacatactcaaaattgctacttttacataatg

SEQ ID NO: 643726 - DNA, 637 bp, Homo sapiens
ctaataacagcccatcttctactacagtattttatttctatgcactgctggctctgcaccatacttcaagtgacacctcttctgccaaaataaagttactaccttagttcacatattaaagctccttcctcactctgcacaaaccactactctttggtcaatgcacatgctggtggtgggagctacattctggaaggagggtctggagaagaaaccagctttctgcctgaattgaatatagaagcagatctcaaaagagcaggatttgtccattgtaaacagagcaaaaaccatcatcaaaaccatggagaaagctattattgcattagatattgaggctgtaggtgcttttctttttaaattgactgacaagagcagagagttcatattagaaaacagtggcaattaacacaaaaattctyctttaatgatcctgcccattagctataaaattttgttacaaagaaaatcctggaattaaagtaaaaatttatccacaatcgaattctagaatatgttttctccctcactgaccattattttcttgtcccttaagtcttttttcttttcctgagaaaacaacatgatattttacttgacaataaaatttctcacttaaatctaggaaaagcttaga

SEQ ID NO: 643727 - DNA, 623 bp, Homo sapiens
tggtttggcttggaattcttgtaagacttggcacagtttttagtcctgatccaaaggagtttagtcatcagaagaaccaccagtggcacagtaaatgtcagtgctaggtaaaaatgtgacatcaacaaagtttgtttctagggctgccattctcctttttgttagtttctttggtcctacatttcttcatcttcacaataagaagttggtctggataatgtgtcaaatcattgcaaaaatgttctatgctttttwgccttaatgacgttccatcctgcctaaggcctgtgcctgggggatttcactctgccctttcttctctcacaggccatttaaatgttacagctctaaattcgtttttctcagagtcctgctacttactaatgctaatgtgtcaagtctgtattatttccagtaattcacaatacactatgattggcctaatatattcactcccagatggcttcttcactgggggtttcactgcctgaacctaaagtggtgctcaatggtagcatggcagaggtaagctaaacagggtgatattgttattatttattttcacaagtacttttctgatccatatttatctaacctttataaacataacattagaaatgtaa

SEQ ID NO: 643728 - DNA, 623 bp, Homo sapiens
tggtttggcttggaattcttgtaagacttggcacagtttttagtcctgatccaaaggagtttagtcatcagaagaaccaccagtggcacagtaaatgtcagtgctaggtaaaaatgtgacatcaacaaagtttgtttctagggctgccattctcctttttgttagtttctttggtcctacatttcttcatcttcacaataagaagttggtctggataatgtgtcaaatcattgcaaaaatgttctatgctttttagccttaatgacgttccatcctgcctaaggcctgtgcctgggggatttcactctgccctttcttctctcacaggccatttaaatgttacagctctaaattcgtttttctcagagtcctgctacttactaatgctaatgtgtcaartctgtattatttccagtaattcacaatacactatgattggcctaatatattcactcccagatggcttcttcactgggggtttcactgcctgaacctaaagtggtgctcaatggtagcatggcagaggtaagctaaacagggtgatattgttattatttattttcacaagtacttttctgatccatatttatctaacctttataaacataacattagaaatgtaa

SEQ ID NO: 643729 - DNA, 508 bp, Homo sapiens
agtttttcatagaaagggtagaacaccagttaatataaagattaagtgtatagtaaattcaccccacctgtattatggtcaagtcactagcataaagctattaagttttcagagatggcaaatgggtagttatggaataagactcttttttttttgagacggagtcttgctctgtcgcccaggcaggagtttagtggcgcgatctcggctcactgcaagctccgcctcccgggttcctgcctcagccttccgagtggctgggactacaggcacccaccgccacgcccagccaatttgtgtgtgtgtgtgtgtgtgtgtgtgtgtgtgtktttagtagagatggggtttcaccgtgttagccaggatggtctcgatatcctgaccttgtgatctgcccacctcgggctcccaaagtgctgggattaaaggcgtgaaccaccgcgcccggccggaatgagactcttacatttacgttgaaaagcataggtgctggagtccatggtaagat

SEQ ID NO: 643730 - DNA, 508 bp, Homo sapiens
agtttttcatagaaagggtagaacaccagttaatataaagattaagtgtatagtaaattcaccccacctgtattatggtcaagtcactagcataaagctattaagttttcagagatggcaaatgggtagttatggaataagactcttttttttttgagacggagtcttgctctgtcgcccaggcaggagtttagtggcgcgatctcggctcactgcaagctccgcctcccgggttcctgcctcagccttccgagtggctgggactacaggcacccaccgccacgcccagccaatttgtgtgtgtgtgtgtgtgtgtgtgtgtgtgtgtgtttagtagagatggggtttcaccgtgttagccaggatggtctcgatatcctgaccttgtgatctgcccacctcgggctcccaaagtgctgggattaaaggcktgaaccaccgcgcccggccggaatgagactcttacatttacgttgaaaagcataggtgctggagtccatggtaagat

SEQ ID NO: 643731 - DNA, 539 bp, Homo sapiens
ttaacaactattatattttcttttcattaatccttgtactatatttgcatgagtagaattttgtaaggttgtaagctctaggttactggaagaaacagragtccgattgatttgttctgagaaaaatgactggataacaaagctaggcatatagagttgaatttaaatccttgagatgatctaacctgataatgtaacatcatccatctgtaatattttctcagtcaatttttctggtattcttcattttctttttgagaaagtgaagcatatatttatagcattatagcatatatttatgccattctctattcttaaggaatagagacagtattattttctcttcaatctgtatttcatagtgacatcaaagtaaaattctacttaaattgtgtgctaatcatagctttttatgttttcccttttctgccttctacttttttctactatatctccacttcaggtgcttctctcacattttccttaaatgtttctgtcagttccttagtctctacaattcaagagatttctatgaatct

SEQ ID NO: 643732 - DNA, 623 bp, Homo sapiens
tcttgctctgtcacccaggctgaagggcagtggcgtgatctcrgctcactgcaacctctgtctcctgggttcaagcaatcctcctgcctcagcctcctgagtagctgggattacaggcacaccaccatgcccagctaatttttgtatttttagtagagactaggtttcaccatgttggcctggctggtctcaaactcctgaccttgtgatccacctgcctcagtctcccaaagtgttgggattacaggtgtgagccaccccactgcgcctggcaaaatttagttaattttaaagagggagaaaaaataaagcactaggtggtggccatctttctaataaacgttcccaaattttcactgataggaatgacaactatagattaaatttttaagacattgggactatctctggtgctttataaaaatcattacttcagaaactaagtgaagtatgtgttttcttttgttgatgtgagaacagctcattataggattgatatcctaattattttagagctaagttccacagaaaggcatacctaaaaaatgaaaaaatctgatttgtctgttattttaagagtgtttcattctcaagaacagtatcttgcttctgaacttgaacat

SEQ ID NO: 643733 - DNA, 386 bp, Homo sapiens
ctctccacccctaactccttcttcgttcctatgtgtggttgagaaacactggttaccctcaagaagcttgcaggaggcccaaaaatcagaaagacaggcatgatgtggggagctctcagttagctggaaacaggtgaatttcaggtgaacacattgagtccaggacatagaagacaagtcatcaacaatatctgctatagccagttttctttttctttttaagaatatatatactttttattggrggtccccaagtccccctttggtttaatgattcacataactcaagaaagctgattttttttgtggttatagtttctaacagtgaaagaaaccagattaaaataatcagaagcataagagcacataaagttgagtccaggaca

SEQ ID NO: 643734 - DNA, 474 bp, Homo sapiens
tccccctgcccaccttcccagccgctgccttggcttcaagcccattgggtctagaggtccgccctactctcctccacaggcagggtcagcctcacacagtgcccacctcaaaagccttcatgactaaccagttgagaaaaccctgggaaacaggcttggatgcgaccttttctttttactttccatttttctttctctctctctttccttccttccttccttccttcmttttttcgtggtggtggtgagacagggtctcactctgtcacccagactagggtgcagtggcacaatcacagctcactgcagccttgacttcctgagctcaagcgatcctcccacctcagcctcctgagtagctgagtagctgggactacaggcatgtgccaccacacccagctaatttattttttatgttttatttgtattatttgtagagatgaagtctcactctgttgcccaggctggtctcga

SEQ ID NO: 643735 - DNA, 387 bp, Homo sapiens
cttttctgtcttttttcaaatacaattataaatagccatcacctaattctgctactggtttatagcactttctgcggtgcttagttttctaagtcttcgagaggtgagctatttttattcaagacaacatctctctgtgaaagtctattatagaatagacctgtcatggcaaagggtcgcttgtacaaaaatcccccgttctgtttccttttgtttttaatgagaagttaaatgacttctaaaatcagtaattaaaagacaaagcaatactacaaaatgcttcgctgttgcacaggccatttaatgtctctgggcctttgcttcgttattgataaaccataaatggkgaggaacaaatagccgctgaggtccatttcagccagaata

SEQ ID NO: 643736 - DNA, 576 bp, Homo sapiens
gacttatgcaattatggagctggaaagtttcacatctgctgtctgatagctggaggctcaggaaagctgatggtcattcatagacctgagaaccagagagccaatgatgtaggttccagttccattccgaaggcccgggaaccagagagctaagggcagggaaagaccaagtcccatctcaagcaatcaggccsagagagagtgagttcaatcttcctctgcctttttgttccattcaggcccttaatggaatagataaagcctacccacactggagagggcaatctgctttactcagcccaccaatttgaatgccagtctcttctggaaataacttcacagacacagtggaaaataattcttaacctgttatctgggtatcccatgactcagtcaagttgacactcaaaaaattacctatcctgtctactaatactaaatagggaagctgcaacttgaagtttctttcctttttcaaacttaaatgactctatagatttttccatccacccgtttacctcatggataaaggttaacacaacgtagtgtccaaaatagaaagaatgattatcacta

SEQ ID NO: 643737 - DNA, 576 bp, Homo sapiens
gacttatgcaattatggagctggaaagtttcacatctgctgtctgatagctggaggctcaggaaagctgatggtcattcatagacctgagaaccagagagccaatgatgtaggttccagttccattccgaaggcccgggaaccagagagctaagggcagggaaagaccaagtcccatctcaagcaatcaggcccagagagagtgagttcaatcttcctctgcctttttgttccattcaggcccttaatggaatagataaagcctacccacactggagagggcaatctgctttactcagcccaccaatttgaatgccagtctcttctggaaataacttcacagacacagtggaaaataattcttaacctgttatctgggtatcccatgactcagtcaagttgacactcaaaaaattacctatcmtgtctactaatactaaatagggaagctgcaacttgaagtttctttcctttttcaaacttaaatgactctatagatttttccatccacccgtttacctcatggataaaggttaacacaacgtagtgtccaaaatagaaagaatgattatcacta

SEQ ID NO: 643738 - DNA, 645 bp, Homo sapiens
tctgtttatttcttctctcacctggcttcagttactgagttggggttatatctgttttattttcagttctatgattctttcctttattttctcccttctcctattgaccccatctattatgatttttttttttttttggagacagagtctcgcacagtcgcccagactggagtgcagtggtgcaatcatggctcactgcaacctccgcctcccggattcaagctattcttctgcctcagcctcccaagtagctgggattacagrcactggctaccacacctggctaagtttttgtatttttagtagagacagggtttcactatgttgaccaggctggtcttgaactcctgacctcatgatccacctgccttggcctcccaaattgctgggattacaggtgtgagccactgtgcctggcctatgatttttatttcagtaattgtatttaaaaatttttttcctcccatctctttctgtttcattgctgagacttgtgattttttttaatagtcatgtgccacacaacaatgtttctgtcaatgatggatagcatatacaatggtagtctcataagaccatataccatagctttactgtactcgttctgtgtttagatatgtttagatacacagatacttaccgttg

SEQ ID NO: 643739 - DNA, 645 bp, Homo sapiens
tctgtttatttcttctctcacctggcttcagttactgagttggggttatatctgttttattttcagttctatgattctttcctttattttctcccttctcctattgaccccatctattatgatttttttttttttttggagacagagtctcgcacagtcgcccagactggagtgcagtggtgcaatcatggctcactgcaacctccgcctcccggattcaagctattcttctgcctcagcctcccaagtagctgggattacagacactggctaccacacctggctaaktttttgtatttttagtagagacagggtttcactatgttgaccaggctggtcttgaactcctgacctcatgatccacctgccttggcctcccaaattgctgggattacaggtgtgagccactgtgcctggcctatgatttttatttcagtaattgtatttaaaaatttttttcctcccatctctttctgtttcattgctgagacttgtgattttttttaatagtcatgtgccacacaacaatgtttctgtcaatgatggatagcatatacaatggtagtctcataagaccatataccatagctttactgtactcgttctgtgtttagatatgtttagatacacagatacttaccgttg

SEQ ID NO: 643740 - DNA, 540 bp, Homo sapiens
aactatagaatttttgactgacaagaacatagggttctagggaaaagaaatcaggcagaaccagctaatttttttttatgaactcagtaatatcagtgcctttatttaaaactagttgcctttgagttagagacagtatrtaattttaacgttcaatcaaaagaggcacatggggagaaagagataaatggacacagaaggtgaatagtaacacttttttataactgattttcttatggttttcattaactgaattttatgaatatttttactgattccaaagtatttccacatatttttcctcattttacacaaaataacactagagataagagaatagaccctgttttttttttttttttttttagacagagtcttgctctgctgcccaggctggagtgcaatggtgcaatctcggctcactgtaacctccaccacccgggttcaagcgattctcctgcctcagcctcctgagtagctggggttataggcacacaccaccacgactggctaatttttgtatttttagtagagacgggg

SEQ ID NO: 643741 - DNA, 540 bp, Homo sapiens
aactatagaatttttgactgacaagaacatagggttctagggaaaagaaatcaggcagaaccagctaatttttttttatgaactcagtaatatcagtgcctttatttaaaactagttgcctttgagttagagacagtatataattttaacgttcaatcaaaagaggcacatggggagaaagagataaatggacacagaaggtgaatagtaacacttttttataactgattttcttatggttttcattaactgaattttatgaatatttttactgattccaaagtatttccacatatttttcctcattttacacaaaataacactagagataagagaatagaccctgttttttttttttttttttttagacagagtcttgctctgctgcccaggctggagtgcaatggtgcaatctcggctcactgtaacctccaccaccygggttcaagcgattctcctgcctcagcctcctgagtagctggggttataggcacacaccaccacgactggctaatttttgtatttttagtagagacgggg

SEQ ID NO: 643742 - DNA, 585 bp, Homo sapiens
aatatgcccaaaagcattttcatacattcattcaatggttatttatcgagtagcaactgtgccacatgctggaggtacagcaatgaaagtgacaaaagacgccctttctttatggaatgaacgttctactgggaaagagagacataaacatataaataaatagataaagcaatagtgagtgatgctaaactccaagctgagggctcagagtccttctggaggcagagagtcaggcactgccaaagtacccaagtggacacaggtgattaaatgtgtttatcgcattttgccattatttgtattcctttctcctgtagaatcagttctagggtgcctgagccgatctgattctctgagacatagttctacatgtgyatgttggatgtgtgtgtgtgtgtgtgtgtgtgtgtgtgtgtgtgtgctggtgggaatgcattcctgaaaatgggaacaatggctaaatcacagctgtctgagtccttatggagataccttatttctgactccctacactagaaaaattatgctccctttctcttcaaatgcttctggccatagactcaaaggtctctttgactttgggag

SEQ ID NO: 643743 - DNA, 511 bp, Homo sapiens
gcgcgccccaatttttgctccttaggaaatgtttctcctctccttttctacataagctgctttagagctgaaagaattcttaaagataatctaaaccgaacctctcatttttcagacgaggaaaagaacgcccccaaaggttagatgatttacctaaagccatgcagcgttttaacaacagggcctggactcgtcccaacctagggctgtctttcttttcactgcaccgtttaacctgtcttttctttctcttctttttcgttcctcgtcaacctggatttcatgggcatcattttgttctgtcggtagcacatagaacttaaagaaattgaacgatgtgaatggactattagaattgtacacttaaaaatgtttacagtggtgcatttatgttatgtgtgttttacaattttttttagaaaggcgcttgatacgtgttaagtaaatgttgacgartgttgaacttagacctagagtttcacatcagaaggtgaactgtgtgaacaggcct

SEQ ID NO: 643744 - DNA, 453 bp, Homo sapiens
cttcttcttgaaaggaatggcagcacccagtacataccgtctcatccacccttctttcttaatgtaacagtatatcctggagatccttccacagttgaatatagaaacatcctgctttccatttgcagctcatagtactgcattgtgtggagatgcaggagttgatgcaaccagttctctattgatagacatttggcttatttccagttaagtggagacaatcttttaaatcacaggaacaacaaactcaaacagacaaatagctatgcaaaccacctgagttttaaaaagatactttgtaattttcccactgctttccaatttacagaagaagaaaaagaaaccaaatraccccagacttcagccgacagtcacatgataagaaaaataaattgcaggacagaactaggctaagaaaagcacaatcaatggtaagtattgtttatgaaagat

SEQ ID NO: 643745 - DNA, 498 bp, Homo sapiens
taccctttaacccacttctcctcttcccccrcaactcaccctttccagtctcttttctccatctatccactctctaccttcatgtgatcaattttttagctcccacatttaagggagaacatgtgatatttgttataagggagaacatgtgatatttgtctttttgtgccttgcttatttcacttaatatagtgtatatttcatatactaaagagatatttgacactggcacatttctttttcagtggccatgtagtcaactgttatggatatgaaccaaaccttatttcatcagtctaccgttgaaggtcatttagattgtttttgatcttttgcatgaatatctcatacacatctttgttgtgctttcttatctgtagaataaaatcttagaatagagttgctggctaaagactatgtgcactgaaaattctgatagctgttgccaagttgtcctccacactgacataaaatgctggaccactcttaaagaccagc

SEQ ID NO: 643746 - DNA, 498 bp, Homo sapiens
taccctttaacccacttctcctcttcccccgcaactcaccctttccagtctcttttctccatctatccactctctaccttcatgtgatcaattttttagctcccacatttaagggagaacatgtgatatttgttataagggagaacatgtgatatttgtctttttgtgccttgcttatttcacttartatagtgtatatttcatatactaaagagatatttgacactggcacatttctttttcagtggccatgtagtcaactgttatggatatgaaccaaaccttatttcatcagtctaccgttgaaggtcatttagattgtttttgatcttttgcatgaatatctcatacacatctttgttgtgctttcttatctgtagaataaaatcttagaatagagttgctggctaaagactatgtgcactgaaaattctgatagctgttgccaagttgtcctccacactgacataaaatgctggaccactcttaaagaccagc

SEQ ID NO: 643747 - DNA, 650 bp, Homo sapiens
tcaaggtctctctttctcattagttatattaagtggttttggtaaagtgttgaatatcatttctcttgtttcttgatcttttaggaaggtgcttcaatattggatattcacacagagcccagtttttcaagtttgctttcacagtcatcgtrtgctgacatgggtgttccacttcctgcaaaaaacttaatatttaaagatggtgtcttatcagaatggagtggacggtcaccttcctcacttcttattgctaatctccatttgcaataatttggttacaccatttgttgctcacactttctgccttttttctttcttaacgttagctttatagtgtcagccactaaaaagcatcctgctgctgcagtgcaattcttgcttaactaatattaaaagttggggaacatattcatgttttctgaagttttgctcattattgcacatcttattgcgacaaagtgctttttagcagccagcactgtattttttaccttgagacaatctgcatttcttttataaaactaagtatatactttataggctttatgatgactgttatgtttataagcagtcactatgaaaattgcaatggtaattttatatgttagtttatcaaacataaatcttgtttaattttatattttgttacc

SEQ ID NO: 643748 - DNA, 562 bp, Homo sapiens
tattgttctcttcagagcatctgttgagtttttaatccaagagctattatcagtattttctaaaatgcaacctcttcttgcatgtctctgaagatatgaattacacttactgtaattacatttgtttcttgtcttaattctgattctctgaaattacttattctgtttgctaagttttgtattttgtatcttctttcttgtttttcttaaaagttgggtgacaatattttacatgggtagtttttctgttaatcatagcttatctccaatgattaggaaaataacaactatgaagtaggacaaagtaacctgggttcttgtgttttagcattgctgctccctgttccttcttggttttgttaattacctgagactctgccctgttgatgttagtcagattctaagactcaccttgccaagcaagcactgctttgttattccaaagtgaagttcattcttactttgtctggaaagcagtctctgcatcttttacctcattatttccctcctttcatattatgtttcttcctttaccaattttaatgsagcttcccctttttcg

SEQ ID NO: 643749 - DNA, 553 bp, Homo sapiens
gactgtggggtctgtgcctactagcctcgtttatttggggtgacatcgactggaaggagagcaggttaggggtgcaacaaggtagagcttttaaggagcgcaaatctatctgcttggccagggactccagtcaggtagtcgcctggctgagtggcagaaagttgagargataactggctcatgttaaacaaagtttatgggaagccattgttttagactgagctcctgcactaggccccagcagaccaggccaaagcagagtggagccacttgtgttcagtatcacataatcaaactgaacttggaaatgggtcactcttccaaacaacaggagcttcacagcaaccaatcggaaggggcccagtttacctgagcatgcatcataaggaagtccacttagctttaaccctgttaggagggtaactctgaaatgtccaatctgctttgtgttctctgtttctgccttcttcagccctttcctgcccataaagccaactccgtctgctcagctcagcagaacatccattctatttcatagcatgaggtgttgcct

SEQ ID NO: 643750 - DNA, 631 bp, Homo sapiens
caatgcctcatcccacccatgccttatggttccagctgggaaaggacaacacccttccaaggggatgatgcttggtaatgaccatcaacagygagtcaaggtccaccttcaaggaaggggccatagggaggagcacttgagctgagataggacttccaagaagacatccataaatactcaagtgagaagagacttttaggttgacaacccaaggaaaaaatggaaagtgaggctaaaagaaaaggatttgttaagaaatactttaggatggctatccctccaacctgtttatctccaagttgtgaactctcctctacccaaatttatatctcatggcttcaccctcatgcttcagtttagaagttaaacttctccaaggagtgtcacaactatatatgataccttggatatcttataggattttggacttgggtttcaattattttaaatccatccaaatgccttttctctgctgacagctccacactgcccactcaaataaaaaagactcaccaggagaataaattatttcttcccttgtcaatggtaatttgtgttcactaaattacctccagatctactttcctgagtcaaaaataacttcatagtttttttcccccctccatgttta

SEQ ID NO: 643751 - DNA, 631 bp, Homo sapiens
caatgcctcatcccacccatgccttatggttccagctgggaaaggacaacacccttccaaggggatgatgcttggtaatgaccatcaacagcgagtcaaggtccaccttcaaggaaggggccatagggaggagcacttgagctgagataggacttccaagaagacatccataaatactcaagtgagaagagacttttaggttracaacccaaggaaaaaatggaaagtgaggctaaaagaaaaggatttgttaagaaatactttaggatggctatccctccaacctgtttatctccaagttgtgaactctcctctacccaaatttatatctcatggcttcaccctcatgcttcagtttagaagttaaacttctccaaggagtgtcacaactatatatgataccttggatatcttataggattttggacttgggtttcaattattttaaatccatccaaatgccttttctctgctgacagctccacactgcccactcaaataaaaaagactcaccaggagaataaattatttcttcccttgtcaatggtaatttgtgttcactaaattacctccagatctactttcctgagtcaaaaataacttcatagtttttttcccccctccatgttta

SEQ ID NO: 643752 - DNA, 583 bp, Homo sapiens
cacataaattctaactttaaaaaatgcctctcatatctgaaaccttttcttactgtctctcattttccatctcctcctcattctatttatcttctgcaacattgttagtattccctttctcaaaatccatctagttatatcatgtttcaccatttgcaatgacttrctgttaattccttcttgtttatattctaaaagtcaacaacttggcatgccattcagaactggcccagtctggattcatctcacatcttatgttttggattttactgtaaccacattgcagttagtgttcaacaaacactcacacatctatgactttgtctacactaatccctctaactaaaatattattcctcaatgtctcattttcatatcccatgtcaatgtcatatctgtgaaaccttcctcatcagtgtttctatagtatacgtttctagtataaacttgattatgatatattgtgaaattatatggcatttacacagaattgtgagctacttgaattccaacagccagtcattctgtaaatagaaaacattagcatatagtagtttttgattaaataaaaacacctgcagat

SEQ ID NO: 643753 - DNA, 502 bp, Homo sapiens
  misc_feature 1, 2, 3, 4, 5, 6, 7, 8, 9, 10, 11, 12, 13, 14, 15, 16, 17,18, 19, 20, 21, 22, 23, 24, 25, 26, 27, 28, 29, 30, 31,32, 33: n = A,T,C or G
nnnnnnnnnnnnnnnnnnnnnnnnnnnnnnnnnctttccaaaggcagctactgattagcaacaagggtttggcatcaggaaggcctgagtcccacttctggttttcttacttactggttatatgaccttygtcaatattttaagtcctttaagcccctttatctttattattatgattatttattaatttttgtagagaccaggtctcgctgcccaggttactctcaaactcctgggctcaagcagccctcctgccttggcctccaaaagtcctgggattccaggcatgagccaccatgcccaacgaagccttattttctaaccatctttaaaatgggtatgatgataacactcaatctgaaatgctgtcatcaagactgagacacagagctcagtgcactgtaagcattcctaagtttggttttattatgatcatgattaaatattctggtttgccaatacaaacaaaagcctttaaattaaacattagcttttgccccag

SEQ ID NO: 643754 - DNA, 397 bp, Homo sapiens
tagttaaatattctttcatttgggtgaagtttcacatatgatattcttttctattcagcataattataaacctttagttttaatgcactttcaaaataactaaaataattataaaaattaacaagataattgtatattcctcattgaaaagttttagccyattcaaatctagcaagtctgctctgaaatacctgagaaaaaggtgtaaaatgaataagaaaagaaaatacagcagaatgtaccagatgtttttatgtgttggttgtacatatatctttctctgttagcttttagttacagacagaatgcagtgtacaaaattttattcacaatagatggccatgcatcatatattcacatatggatatcatttctctgaggattgaaatagaaagat

SEQ ID NO: 643755 - DNA, 585 bp, Homo sapiens
gaagcttgagattatgttaaacgaccaaatctaagaattattggtgttcccaaggaagaagagaaatctaaaagtttagaaaacatatttgagggaatgtttagaaatatgttccccaaatatgtttagaaaacatatttgaggaaaacttcctcagacttgctagagattcagacatccaaataaaagaagctcaaagaacacctgggaaattcattgtaaaaagaccatcaccttggcaagtagtcatcagattatctaaagtcaagaggaaggaaagactcttaagagctgtgaggcaaaagtaccaggtaacctataaaagaaaacctatcagattaacagcagatttcttagcaggaaccctacaagctagaaggaattggggttctatatttagcccccttaaacaaaacaattatcagccaagaattttgtatccagcaaaactaagcttcataaatgaaggcaagatagtcttttccagacaaacaaatgcagagagaatttgccacygccgagccggcactacaagaactgctaaaaggagctctaaatcttgaaacaaatccacaaaatacacca

SEQ ID NO: 643756 - DNA, 627 bp, Homo sapiens
cttggtactcaaggccctctgtggtctgcaccatgaatcctgggcagacgtcaccctctacccaccccagacctgcatgtgtcaccccttggaagccgccctgagacccccgcagagccagcttctgttccctctgccacttcacagcctctgctcccttggtttcttggttaatcctcaaggttcctgcctctgcctccccaaccagattgcaagctccttcagtgagggtctatgccctattcaagttgtcatagcccctctcctcacttccatttcagcatgtcacacagtagggtcatgtgtgtaactacctcaaaacgtctgtgaaaacaaggaataatcctgcaatgaatgtcttcattatctacccagattgacaaattaagtccaaattaaggccccagctgtaccactatggacaggggaatatttgctatatctcttaattagaattataggtgtagggagtacttgctraggcccaaacattgactaggtgctttccattctaatcttttaaagtccttccaagagcctttgtaagttgtgcctttggcaccgactgtgcctgttttacagatgaggacgttgaggttctgagaggttaaagaccttgcccagggt

SEQ ID NO: 643757 - DNA, 627 bp, Homo sapiens
cttggtactcaaggccctctgtggtctgcaccatgaatcctgggcagacgtcaccctctacccaccccagacctgcatgtgtcaccccttggaagccgccctgagacccccgcagagccagcttctgttccctctgccacttcacagcctctgctcccttggtttcttggttaatcctcaaggttcctgcctctgcctccccaaccagattgcaagctccttcagtgagggtctatgccctattcaagttgtcatagcccctctcctcacttccatttcagcatgtcacacagtagggtcatgtgtgtaactacctcaaaacgtctgtgaaaacaaggaataatcctgcaatgaatgtcttcattatctacccagattgacaaattaagtccaaattaaggccccagctgtaccactatggacaggggaatatttgctatatctcttaattagaattataggtgtagggagtacttgctgaggcccaaacattgactaggtgctttccattctaatcttttaaagtccttccaagagcctttgkaagttgtgcctttggcaccgactgtgcctgttttacagatgaggacgttgaggttctgagaggttaaagaccttgcccagggt

SEQ ID NO: 643758 - DNA, 644 bp, Homo sapiens
ccctctctgcaatagtagtctatcgtttcccttccaaacatcattctctccttgacataaacaacaaaaagaaaaaaatcttacagctctgttctttttctcatccatcaggattgccatcctctctcagctgccggtctgttttttgagggaacaatgtgttccttgaacctgaaaagcaaacaaagactggacacactggctcacacctgtaatcccagctactttggaggctgaggtgcaagaatcgcttgaacccaggaggtggagattgcggtgagccaagacagggccattgcactccagcctgggcaacagagtgagactctgtctaaaaaagaaaaaaaaaaaaaaaaaaacaggcaaacaaagaaaaacctaaatgtattctgctatattttttttttctaattggtcttagatcatttgagaattttcctttttacttgctattcccttgccyggactactactctttacctggattttcacagggccaatgcataccgttcaggtctccgacctagagtcagtgcctcctcaaaccctgactgcggtgtccgaaacaaccatactgcatcgctccctcacccccaccctgctttatttttcccaaaagcaccattgttaactggaattaaaga

SEQ ID NO: 643759 - DNA, 341 bp, Homo sapiens
tagacatatacagcctacaaagatagagccatgaagaaatacaaaatctgaatagaccaatagcaagtaaccagattgaagcagtaataaaaagtctcccatcaaataaatggccaggacatagttgggcgtggtgtctcacaccygtaatcctagcactttgtggggccgaggcgggcagatcacttgaggtcaggagctcaagaccagccggaccaacatggtgcaccccgtcccccgtctctactaaaaatacaaatattagccaggtgtggtggcacatgctactaatctcagctactcgggaggctgaggcaggagactcacttgaacctgggagg

SEQ ID NO: 643760 - DNA, 585 bp, Homo sapiens
acctatgcatttagaaattcagttttcaaaatatcctagataggtgtaactctatttaattcttgtgtgggtttcttttctatcactttctgctttaccctctgaaaatgtctccatatcctcaaataaaaggtatgaaaaacaaaagtaacataggaaaaggcaaaaacaaatggaacttgcttaattcctgttttccatttaaatatttctcaggrataagaattttattggaaatgatagcattgactaccataaaaggaactcagcattagatcaatgcttataaaagtgagtctgttatggtttatacatttttaagtctctggccaaactgggttgtatcataggaaagtgagaaaaaaaacttatatattcaattgcaatgacgctgtcaggaacccctgaggggtcttggagcatgatccaggggccttatagtaaagacagaattttcaaatgagaaaaatcaaaaccgtgtattctgaactggtgagcctatgtatagtttaggcaatatttcagaacacatatttagaacatagttttaaacgggagtttttgagtactccaagtcaggagcag

SEQ ID NO: 643761 - DNA, 461 bp, Homo sapiens
ctcttgtaaagttaatttcatatgtggatattttttcatatagatgtgtcgtaggggtatgattactggagagatctactccactaccttgctctgcccaaatccttcccctttccaacaagagtttgccaccttctagtattcttttttcttaaccaaactaagtttagccttttaatccttcaccctcctccacttcaaatgccattgcttctttgtatgcttattgtattttccatgctatatgactttcagctggttatttacagtatgtaagttttaatatcctgtaaaagggggacaataatgrcatccatttgatagggatgttaaagatattaaatgacactgtccatgttaaataactttttgagatatattgagatgtttctgtacttccttgttctggccttcttgttgaaccagaggaatctattgccatgaaaagcaataaaactgtt

SEQ ID NO: 643762 - DNA, 623 bp, Homo sapiens
tgtgcctggctgcaagacacccatctctctaaaaatgaaagttttgaactatttartagagtacatgatccatggtaagctctatataaattttgttacataaaattaaggttctagtcccataaacttttttctgtaataaactgctcagccttagatacctctcatatttgctgtgagaagtgaacaaatgcatgtgaaaactgtaatgtgtttataatttttattatttgtcatcaagatcatgtaagagacctgatttagtagagggtgaagggatgcgaaaggggctgtcagtcatcaacttttgattatctgccttgttaaggtccccttctggtcaacatcatcagctctttggcttgttcaagtcttttattgacaatatccaggcctctcatggtccctcccacacacaacgggtgcacagcaagggctggaaggaaaaagcctttgaaagcaaaacgggtccttcccttccttagccttgaagcgggaataaccactagacagaaggctgtgagggaggactctggcacttccactgtggctgctttgcctttgggcaggaggggaaactgatcagctccctctgtaaggctgcaggaagagatattggcatt

SEQ ID NO: 643763 - DNA, 623 bp, Homo sapiens
tgtgcctggctgcaagacacccatctctctaaaaatgaaagttttgaactatttaatagagtacatgatccatggtaagctctatataaattttgttacataaaattaaggttctagtcccataaacttttttctgtaataaactgctcagccttagatacctctcatatttgctgtgagaagtgaacaaatgcatgtgaaaactgtaatgtgtttataatttttattatttgtcatcaagatcatgtaagagacctgatttagtagagggtgaagggatgcgaaaggggctgtcagtcatcaacttttgattatctgccttgttaaggtccccttctggtcaacatcatcagctctttggcttgttcaagtcttttattgacaatatccaggcctctcatggtccctcccacacacaacgggtgcacagcaagggctggaaggaaaaagcctttgaaagcaaaacgggtccttcccttccttagccttgaagygggaataaccactagacagaaggctgtgagggaggactctggcacttccactgtggctgctttgcctttgggcaggaggggaaactgatcagctccctctgtaaggctgcaggaagagatattggcatt

SEQ ID NO: 643764 - DNA, 431 bp, Homo sapiens
taagaattctgtaaatatacacaatagggtaggaatgagaaaatctttagaagaaatattcaagaatgtttgatttctagcaaatccagatagacagttttggcaacaaccaagtcataattttgagtcttgttataggagctagaattttattcaagggacaactgatttgattagattagatgctgtgcactgcatgtttgcatcaacaaatgcacatgttgaaactctaacagtagaatggcattagaaggaggacctttgggaagtaatttggttttgatgaggatggagttcccacaatggggttagcatcctaataagaagagyaggagactacagccctcttctctcagccatgtgaagatacaacaagaacacctgcaaaccagtaagagggccttcaccagacactggctctgctggcccag

SEQ ID NO: 643765 - DNA, 621 bp, Homo sapiens
aattagccacagtttctccactgctacacacctagattctgagggaatttcagtttggggccactgtacctgatggagagggccaaaagcagtaagcttgccctgtcatgcccctgccccgaccccccaccactcagcaggctgacagtctttttaccgatttgagcaagatggatgtgttgcgtagttcctccattacaaatcaagaacttccagtaaagatgacactgtgagatcacagtttcagcactaccacagccaccactatgcagcaaggggagatagagagagagagagagagagagagagagagagagagagagagaaatagagaaatagagataaagagaagatgacatttctaactccacttagaaaccagatatacaattccttgtgccagagacagaagagaaatctgaggtggtaaarcagactaaagcacagctattgggcccaggagtcagaaggacacagaagtggcccctgtgtcaacccctaagaggcaaagtttctacgtgaagcagagcaaccagaacctagatcactttttgagcccaggctccaccacccttgaaaggaagcaagaaaagctacaacacacagctgcttcagggtcat

SEQ ID NO: 643766 - DNA, 557 bp, Homo sapiens
ttttattgtgagctcagcttagtcgagaactatttttatgatgggcactgtttgtgctctgtatatttgaggtgccctcacagaaaatatttgtattaatttctgcctgatgccccaaagattttaggattttacagatataaccagttttggtgttaactttttagctttggttcgtctatctcataaattattgtctgtctgcccragggttgctcaggtttatagttttaatatttcactggattttttttttacagaggtaagcttccttattgctcacttagaaattttagaccaatcacacgaaacatgcagccatgtcagtttccaccttccaccttgcctgtcctgtgtgcatgttcaaacccctgcctctagcattaaagttcatatcttatctgatgtccttgtaagccaccacagtatcactgtgcatatttaacatattttattttattttatttttgagatggagtttcgctcttgttgcccaggctagagtgcaatggcgccatctcggctcactgcaacctctgcctcctgggttcaagaga

SEQ ID NO: 643767 - DNA, 602 bp, Homo sapiens
gttctaggcttagctggtgctcttcattgggttaagaacattcctttttattcttagtttgtcaggaattttatcaaatgacttttctgcatgtatagattttttactgttactgtttttaaattaaatttactggttttttgatgtggaataactgtagcactccttaatcaagtgacttgattatgatgttttaaaatatattgctagattaattacacatattatattgrgagtttttgcatgttcataatttcagttacacacttgttcactgtctgatctattccttctgctttgttgtgtattacaaaaaactcttttttgtttgtttgtttgtttgtttttcttttttgagacagggtctggctctgtcacccaggctgaaatgcagtggcacgatcatagctcactgcaaccttcacctcctgggctcaagttgtcctcccacatcagcctcccaactagctaggactataggcacacgccaccacacttggctaatttgtgtatttttcgtagagatggggttttgccatgttgcccaggctggccttgaactcctgatcttaagcaatccatgtccctcagcctcccaatgc

SEQ ID NO: 643768 - DNA, 602 bp, Homo sapiens
gttctaggcttagctggtgctcttcattgggttaagaacattcctttttattcttagtttgtcaggaattttatcaaatgacttttctgcatgtatagattttttactgttactgtttttaaattaaatttactggttttttgatgtggaataactgtagcactccttaatcaagtgacttgattatgatgttttaaaatatattgctagattaattacacatattatattgagagtttttgcatgttcataatttcagttacayacttgttcactgtctgatctattccttctgctttgttgtgtattacaaaaaactcttttttgtttgtttgtttgtttgtttttcttttttgagacagggtctggctctgtcacccaggctgaaatgcagtggcacgatcatagctcactgcaaccttcacctcctgggctcaagttgtcctcccacatcagcctcccaactagctaggactataggcacacgccaccacacttggctaatttgtgtatttttcgtagagatggggttttgccatgttgcccaggctggccttgaactcctgatcttaagcaatccatgtccctcagcctcccaatgc

SEQ ID NO: 643769 - DNA, 642 bp, Homo sapiens
tgcattgtcttggggaaaggttttagatatagggaggggtgatgagttgggaacaataatgtagtctgccrcaaacatattaaagtgtaactggatatggttgctgcagaattttgaacctttgttttaattgtgatttttactctttcccccctatctagtgcccttttgtaatacagtaattatcatgatttttgtctgaactgaaatcttctgagattagattgtctacgaaaatacagtcgatcctccttgttttcagcttttgtatttgtgaactcacctactattttttgtaacccccaaatcagtactcacagcactttcatagtcatgtgtttgcgcagagtgtcaaagaatttgagtttgaacaggatgatattctgccttctttttcagctctcatacaatagtcaggtatcctttttgtggtctatttaatgccatgcttttcctgtttttgtactgtttgttggttgttttgccatttaaattaacccccaagcatagtgctgaagtgctgcttagcattcacaagtccaagaagtctgtgatgtgtcttacagagaaaatacatgcattaaataaactccattcaggcgtgagtgctgtagtgccgttggctgtgagttcaatgttaat

SEQ ID NO: 643770 - DNA, 642 bp, Homo sapiens
tgcattgtcttggggaaaggttttagatatagggaggggtgatgagttgggaacaataatgtagtctgccgcaaacatattaaagtgtaactggatatggttgctgcagaattttgaacctttgttttaattgtgatttttactctttyccccctatctagtgcccttttgtaatacagtaattatcatgatttttgtctgaactgaaatcttctgagattagattgtctacgaaaatacagtcgatcctccttgttttcagcttttgtatttgtgaactcacctactattttttgtaacccccaaatcagtactcacagcactttcatagtcatgtgtttgcgcagagtgtcaaagaatttgagtttgaacaggatgatattctgccttctttttcagctctcatacaatagtcaggtatcctttttgtggtctatttaatgccatgcttttcctgtttttgtactgtttgttggttgttttgccatttaaattaacccccaagcatagtgctgaagtgctgcttagcattcacaagtccaagaagtctgtgatgtgtcttacagagaaaatacatgcattaaataaactccattcaggcgtgagtgctgtagtgccgttggctgtgagttcaatgttaat

SEQ ID NO: 643771 - DNA, 535 bp, Homo sapiens
aattaggaatagtagctttataggtaaaataattaaatgtaaccttaagcataaaaagataaagttaactaggaaaatgaaaactcaagatatacagattaaatatgacaaacaatggatctttttwtgtggatcttggtttgcagataccgatatctcatatagtgattcacttgatccaaaggcatttgatggaagctgtcttctcccaaagactatttgcttttggaagaatcctaagagtcattagttagaagtttttggtagggatactttcctgtaatatgaagatgacctaaacctctttacttgagagataggaatcaaaggatcagtcttttaaagactatgggtttgctagttgttagctgtgcctgatagtgacttttttcctatgatctttccctgccgtgtctcttagaagacaaggtatccaggtatgaaaaccaattttgcagacattgtttaggatactaatggggaaagtcttcagtaacttttgttgaaagaatggatttcctgagtccttacagca

SEQ ID NO: 643772 - DNA, 535 bp, Homo sapiens
aattaggaatagtagctttataggtaaaataattaaatgtaaccttaagcataaaaagataaagttaactaggaaaatgaaaactcaagatatacagattaaatatgacaaacaatggatctttttttgtggatcttggtttgcagataccgatatctcatatagtgattcacttgatccaaaggcatttgatggaagctgtcttctcccaaagactatttgcttttggaagaatcctaagagtcattagttagaagtttttggtagggatactttcctgtaatatgaagatgacctaaacctctttacttgagagataggaatcaaaggatcagtcttttaaagactatgggtttgctagttgttagctgtgcctgatastgacttttttcctatgatctttccctgccgtgtctcttagaagacaaggtatccaggtatgaaaaccaattttgcagacattgtttaggatactaatggggaaagtcttcagtaacttttgttgaaagaatggatttcctgagtccttacagca

SEQ ID NO: 643773 - DNA, 535 bp, Homo sapiens
aattaggaatagtagctttataggtaaaataattaaatgtaaccttaagcataaaaagataaagttaactaggaaaatgaaaactcaagatatacagattaaatatgacaaacaatggatctttttttgtggatcttggtttgcagataccgatatctcatatagtgattcacttgatccaaaggcatttgatggaagctgtcttctcccaaagactatttgcttttggaagaatcctaagagtcattagttagaagtttttggtagggatactttcctgtaatatgaagatgacctaaacctctttacttgagagataggaatcaaaggatcagtcttttaaagactatgggtttgctagttgttagctgtgcctgatagtgacttttttcctatgatctttcyctgccgtgtctcttagaagacaaggtatccaggtatgaaaaccaattttgcagacattgtttaggatactaatggggaaagtcttcagtaacttttgttgaaagaatggatttcctgagtccttacagca

SEQ ID NO: 643774 - DNA, 568 bp, Homo sapiens
gaattcaaacctgaatgcaatttgtagtagggcttccagcatgaggcagggactagtcacttccattgctgttctccagcctcagagggtatcgcagggctgagaatatctttgaaaaggaaagatcaaaggcaggctctgaatttcagatattgtttcaaccttcagcattgccctcattttattgcagtttgtgcacttgtcttcctcttaaaaggtaatttagaaactactttacttgggttagatggtttcctatttggttgtgtgtgagaatgcaacacatgtgagatgaaattagcattgcaggctcttgacagttgttttattaattagactgctttatttagcagacacttttcatatcatcmttcctcctgcatatccagagtaggcaactacttatgtgttatgaattgaggagtgttgagaggggcttccttgtccaaaaacagctcttctactagctgtcatcatacctagagtctttctgcaggtgagcctctgtgtcctggccagtggtaaagattaaatggaccacagcagggaagaaagcaaccccggaagt

SEQ ID NO: 643775 - DNA, 504 bp, Homo sapiens
gtcctgtgcccatgcttaccacagccactccacagacactggctcttctagagactcattactagatgatctgcaaaaagctgttacaactgggaccttggggaacaaagaagaggaccaacaggaactcgggagccagagaggarcatggggttctccccttgggatgaacctgtctctgagacccagctgcactcctctgctctctgcgacctcctgcctttctctctgtattctcagatgcaatctactctgacactccccaccccctgtctccaagacacttgtgcacaggaatcttccctttggtgttctgagcagcagggtgtgaggtgtggggtggagaatagaatattaaagttctaaatctgtctctcatctaatgtgattcctttgagaagactaaaagctgggctcgtttctcccatctaggattagtaagaacattgcaaatgtagggatgaaacagagtctagagaagggcccacctgtccaagggcaact

SEQ ID NO: 643776 - DNA, 454 bp, Homo sapiens
tagactttccttgaaaccacagcttcgccttcctttctcccagccctattctgcttcctcactcccatgcaggtttcttccaagagtacatctctgacctcaggcccttgttccattcaaacagctcctgaaattgtattatctcttctccaactgatcatttttatcagctttattagaaacaagtaattatttagtagcttmttatggccaagacttcatgccaagttttaggatttctgagaatcagaaaactttctactttgagaagcatacagttttatgatctgagaacccctttccccatctttactgtcagtactaatccatcatctttgtctcttgctcctcaaaatctcttgtatattaaaatgcaaatttttgttaccatattactttaaaattgagtaatctacacaacagcaggttatataccatacagtttagtttttat

SEQ ID NO: 643777 - DNA, 589 bp, Homo sapiens
ctttgtattatcttgctgaaatatttctgattctggtacaagtttaatatataaatgatctattttcctgagaaaatgctatgaaaaataggctaaaccttttggattttgaccatagattatgtaattatgtgaaatactatatatttattatatataaatataattgtatgaaataatatgtgtatatgtgttatatatatgtaaatgtaaatagtctggttttattataatatagagaaacatagatgatgaactattttattttggccactctaacaaaaagtattaattactttgtttttagttccatcatagtgagtcatattgaytgtaaagacggtcgtgataattgacaatattgtaggtcaggttggaggttgcatataaaaacagttactgtgagggaactctaagaatgtttgtttacagcaattacatgcaatatctctttctcagcataatgttgttcttagtttataattggttggtattacggatatttgttttgatggacaattatactatgtaactcagaactctttcagttggatgccaatatttatgaaaattttcagaaatgaggaca

SEQ ID NO: 643778 - DNA, 522 bp, Homo sapiens
ggggtaatgacaggtatctcatggggttattgtgaaaatcaactgagttaatataagtaatacacttagaataggtcttgcctcataataaatgttcagtaaatgtttctgtataatataaacatctgcagatacacatatttggaacatgtgcagaggagatcaggtagcttattgcctaagttggcttccatatgagctgctgagaggggcctgckgcaatcggtaataattgttacctgcaggtcttgtgatcaaattattccttccaaggcaaggctctgtgtagtttactgtaattcagttgcatgacattctctccctagccaactatcgttctcaaattattctcatattggttcagaataatccgatttgacccttatttactgttgccgggaagattaaactaaagtctttggcagccaaaaatgcaagagctcagaccagtagtcctggacaaatccttgtcattcacagccgtagggaagatctgtaccctgcccaaggaacaccttggta

SEQ ID NO: 643779 - DNA, 522 bp, Homo sapiens
ggggtaatgacaggtatctcatggggttattgtgaaaatcaactgagttaatataagtaatacacttagaataggtcttgcctcataataaatgttcagtaaatgtttctgtataatataaacatctgcagatacacatatttggaacatgtgcagaggagatcaggtagcttattgcctaagttggcttccatatgagctgctgagaggggcctgctgcaatcggtaataattgttacctgcaggtcttgtgatcaaattattccttccaaggcaaggctctgtgtagtttactgtaattcagttgcatgacattctctccctagccaactatcgttctcaaattattctcatattggttcagaataatccgatttgacccttatttactgttgccrggaagattaaactaaagtctttggcagccaaaaatgcaagagctcagaccagtagtcctggacaaatccttgtcattcacagccgtagggaagatctgtaccctgcccaaggaacaccttggta

SEQ ID NO: 643780 - DNA, 522 bp, Homo sapiens
caatttgataataactccaattttatattctttaatccagaatatgcatatcaaaattaatactctgaatatctatttggacaactcaraaccacttcaaactcagcactcccttttagaaaattaatcaacatgaaaggagaataattcactatttcagaagatagtgacttttgctatatactagattactggcaataggaaaggggacaaataggtagattcttaatatggaaatggcaggtagaaatgtcatgatttgatggctgattgtttgtggaaatgaagaaaagcatgtaaaggcagtaaagtagttatcctggcttaaaattcgaagaaggagaaaaagtaaacatgagaatagattaagctagagaggtagtcagattgtgagaagcctgcacttgggctttttcctagccacaacgaggagctgttggagagttttagacaagagaaaaatgtaatcgaatatgtcttacagggagcttactctgactgccttgtgggacttaccatgca

SEQ ID NO: 643781 - DNA, 620 bp, Homo sapiens
gcaagtcttgtcataagcaaggtgctttcttaaacattctctaattagcactctttctttataatcttttatttataatctttagaaaggccaatcctgttatttggctgcctctctaagtcttcttacagtctaaagtctctctaatttagacttcttgccagaatttgggagtcggccttgttattcatcagcgttctctttgacccagaagattcttaagcctcattctcccaaaagaggtgggcttgtgctgcagttcaatggaacatttctcaaaaagtgttctatagaacacaggttaccagggatataaagtaagtgctccaagaaagggctctgaaatcaaacacrttttggaaattctgggctgaacagagttgaataagcatcttatcctaggaagttggggtctctcttccttgcctgttagaactgggactgcggaattagaaaactggggcagaattgtcctatcctggcagttacctgaaccttccagacaggagaagaaagtgagagaaatacctttcactcctcccaggctaaaccccacctctgctacagaggacatcgtagaggaatgaacaaagtcaaggtcttggaaagtacacaagcca

SEQ ID NO: 643782 - DNA, 525 bp, Homo sapiens
ataaagcagaatgtttagatgaaagagtcttattacataagcaacaaagtaaacaaaataaacagaaattaatttttgagtcaattacttgaaatatcttgakagttcaggaaatagtcatatacaatgaaagtttctttctgtctgaagtttgagtaaagatattctaacaattaaactttgcccaattaactttgttataattcctttaacatatattgtagcattgtatcaattcagttgcagcatatttttgttgaggttatgtaattagtggacatacagaatttataaggtgctattacaaaacaattttgtctttacgatatggagggttgggacttatcttctcagccaagatcaaaatttcaggtagtctcattactttcctgatcattcttagagaactaaaaacatcctgtgatcacattaagttgccaaaatctcaaatcagacaatagaaggtctggtctcatgtaataaacatcgtcaaacaaagataagactcctttcccaccttgtttg

SEQ ID NO: 643783 - DNA, 609 bp, Homo sapiens
ttggcttaattttgcttatcctctgttctgctcgatccagtttactgtttgtcccctgtatctaatttttgacttaggttcctatatttttcacttctttgatttttgtttgataccttgaactattttctacctctttgttaaacgtctcagtttttaaatgcatggctttcctgacttctgttactatcttagtgctttttgttttgatttccctgacagggacattacatattttcattttatgagagtccarttctgtttatttcttttgttctttacctcagaacatattttcctctccactgcactccctcactgcccccgtaccccctaccaccagccccacttttcttgactatgagttggtttctgcaagtcggtgaagacaaccatctttctctgttgtccttaactcatcctatgtaggaaatttcatttccttatcagtgcaaccagagattccaggtgcttctcaattccatgaatgcccaactcactgtctttcttcttatgcccccctggattgtagggtgtgtgaaatcatactattcctttgacataggcaagacagtagccagccccatgatacacagctaaaaggttttg

SEQ ID NO: 643784 - DNA, 583 bp, Homo sapiens
caaagggacattagggaggtaagtgattcatgccactttcagtctttgatttctgaatgctgcttctgagatactgtttccataatttcccgtaatgaccatacactttttacttctcaaaagaccatactttggcatgcattatattagttatgaaacttgttcaatagcgcaaacatagtttacttcatgagcattttaaatgcccatgatatatggaaagaaatttgtgctatcaagggtcagatataacaaagacattctgaagctgttaataaaattttttaaatgtaagcttttaattttaaataactctagatatgtgtatgaatcatgaattgctatactcttagcatataggaatactacaaaaatrccttaaattgttccattgcttattttggttttgtgtcatgaaggggaatgtatctctgttaatatacatatacacgcatatgtataacatgacctttctttgtctatatattaaattcctgttagacataacatccctttttctacttaaaaaaatgagtactttagtcatttctcagtctcttggctaatatcaagtgaagagagt

SEQ ID NO: 643785 - DNA, 553 bp, Homo sapiens
ttgtgccttttacaaagtgctttaggaagttgctgtaatgggcttctttagtattstgtttttcagtgtcttctttcactccttccatcttctctgattctcctgtttacataaaagaaaagagaatatttaagtcctaatgtgtctatagtacttgaagcttcaacattgggcagatgccattttcctgttttttaactggaaaagcaggtcccagacagatagccttgggatctctatgggaatgtggaggctgcatctgagaaccagcaacagtggagcctaggctagtataccacagagtatttatccctagctttgaagcatgaatccaaaatgtttatatgccattagaatatcagaaatcttcatttggtttctccattgtgttacttgagtgtacaccattttctatgtcacttcctgttgctatgttctggacatcttattctcttcctttccaagaatgtaggagaaagatcagttacttgatttatacctgaaaaactgtcttcttttactcctactgagatattctgaccctttgctgcta

SEQ ID NO: 643786 - DNA, 643 bp, Homo sapiens
tcacatagctccttgtaaatcctcttccgcactcggggcatgtcttcttgtgaaaactggaaaggctgctctaaggcgaggcacttgcagtactgcaaaaaaaaaggtcccagaaacacttcagtggcacttggagttgtggaccagcccattctgttttactaaatgcagacctaatagtgtctaaggcagaagaccccaacctttttggcaccagggactggttacrtgtaaggcaatttttccacagacttgggggagagggggttggtttcaggatgaattatcaggcattagttagattctcataaggggtgagcaacctagatccctcgcatctgcagttcacaacagggttcacactcctaagagaacctaatgtggacagtatctgtccgtggcccaggggtttgggaccccgatctaaggcagcattttcatgtctgtttaaactactgtaaaaatacactgttttaagcatttacccaaattataggtgactgaccaagctagtgcatggcttgggatctcctctccctccctgacccatactgtgaaaagcagcaactgatgaaaaggcctcaattcctccccaaagtgcaacctgctggagtgcagctagacccatcatggcccttaatgg

SEQ ID NO: 643787 - DNA, 412 bp, Homo sapiens
ctccataaacaatgtcagatatgttgtgagccccatagctctcagcctaaaaacaaaacgcaataaaggaagtggtaacaaatagaatcataactttaggatattgcatctcaggatgatgcatggaatttaaattaggcaagagcttcacctggatgctctaattaaaagtctccttcttctgggatgtccagggcatttgaatctcaggtacygaagtcactaaaactgaccagacggtttatcatgtggagaggtttgtttctctcactaactccaccttctcaatacccagtcttcaatcctgtgtagggctcctgaacaacctacattgtgtagcttattgttgctgttttagcgacgaattatggaaatgtctgaatggatagtagattgctagaaaaatttgggg

SEQ ID NO: 643788 - DNA, 513 bp, Homo sapiens
gaattcattgcagcattctttatacacatatgtatttgttcttagccaatgaaagctcaaaaacagactgcatagaggttatccatccagatgtgtaatttagtgagctattagtttcccttctgtcatttatttttgcattctagcaagcagcattgacccataagattgggtaggtgacagtgatggacctccctaatcatgactagggaaaagtgtcaatctgcaagtgtcaatctgaaatgcaagtgtcacagcagctccagagactccaaggaaatgactgcagctcagaggttacaaatgggagcttcaaccacaggttgattgcagacctgggacaggatgaaggacattgctgcaacacargaggatcaaccagaaattgaattaagaaaaattggtagaaactgtgattaaagacacatgataggctcaaggaatttgaaaagaatggaaccacactcaaaaatgaacaatgttcagaagtatctatgccccacagatctttct

SEQ ID NO: 643789 - DNA, 636 bp, Homo sapiens
ctctcccgctaccttctactgctagttgacacccagtgatggtgctcgtttgaggacttggaattcactaagaattcctctaggttcaggcctccatccctttgcagagtgagtctttccctctgctccatccactacttactttcaacaactggcactcatctcccctaaagggcaagcctttcttgacttctcagtaagaagccaacctctccttgtgcatattccatggatctcttttttgcctttattctactccattagttgagttccccaggttctgggacttggctttattcatatacagttcttgacacacaggaggtgctcagtaaataccttgttcaatgaatgagaatggagtaagtgagagaatgtataaatgccatatacctggatttaatgttgatttttaaaaatgagcaaagtaacagcagttaagtgtgtctctctatagcaaatcgtccaaaraagatactaagagatttatttgtaattttatcttattttcaaaaagaaagaaaatcaaataaaaatttgcatctcaaggggatacagcctgttactttatgaatgttaaacttttgctgttctcttgatacaattttacactgtcattaaatattaactataatg

SEQ ID NO: 643790 - DNA, 497 bp, Homo sapiens
aataagaaaatataaacaaaactcccaagaagtctgatattatgttaaatgaccaaacctaagaataatgggtgtccctgaggaagaagagaattttaaaagcttggaaaacatatctgagggaataattgaggaaaacttccccggccttgctagaaatctagacatccaaatacaagaagcacaaaaaacacctgggtaattcatcgcaaaaagrtatttgcttaggcacactgtcatcagattatccaaagttaagatgaaggaaagaatcttaagagatatgagacagaagcaccaggaaacctacaaaggaaaacctattagattaacagcagatttctcagcagaaaccctacaagctagaagggattggagccctatctctggcctcctcaaaacaattattagccaagaattttgtatccagtgaaactaagcatcatatatgaaggaaagatacagtcattttcagacaaacaaatgctgagagaaat

SEQ ID NO: 643791 - DNA, 577 bp, Homo sapiens
caaagaggaagacttttatttttcaaatggggataataaataaggagagataacatatactcccatggtcaaacagtagagccacaggactgcaggaggcaatattgagatactatttgcttttaaagaaaatgttttcatttgcttaaaaaaaagtttgagtacctgctatataccaggtattagtacaattctccaggcaggaaacaagacctgtctgccctcatggaggttatattccagcaggagaactgtagacattttactgtgtaaaaacaatatactaatataatattatgtgaggtaaggwtaaatgttatgaaacaaaataaaccaattaaagaagtacattcagatgagaggtacagctgtggacagggtggctagggaagacctctccaaatggatcatgaataaaaactaaaagcgtaaatctccagtgtctggtacatcatcatccaaaaactgggaacttcttttttttacttttattttaagttcaggggtacatgtgcaggtttgttacacagacaaacttgtgtcatggggtttgtgatacagattatttcatcacccc

SEQ ID NO: 643792 - DNA, 497 bp, Homo sapiens
actcacttatttcagtttgatctcttttccgagatatccaggcatttggtggattttgattctccatgtttattcctaaggaaacttatctccaaatctctccaatctttcttccaacaaagcccagtttccagaagaagtaattataactgcacaattatcaagggcataatatatttcttgataaccctgacataaattaagggccatttatttgtctgggtttctgttcctgttaaaaataatctctttgctcaatgtcccacacttggttattttccttcctctttgcttggtgaaacagaaggctcttttagagattttgactgtttctcattattatttatccaacagatayttaatgagcacttcctaagtgcccggacctctgcttcatgtgagagatgtatctgagaaggggacggacatgcacctaacggtgccagcgatgtggccattatgaaagatcgtgatgttgtaggaacatacagaaggaa

SEQ ID NO: 643793 - DNA, 497 bp, Homo sapiens
actcacttatttcagtttgatctcttttccgagatatccaggcatttggtggattttgattctccatgtttattcctaaggaaacttatctccaaatctctccaatctttcttccaacaaagcccagtttccagaagaagtaattataactgcacaattatcaagggcataatatatttcttgataaccctgacataaattaagggccatttatttgtctgggtttctgttcctgttaaaaataatctctttgctcaatgtcccacacttggttattttccttcctctttgcttggtgaaacagaaggctcttttagagattttgactgtttctcattattatttatccaacagatacttaatgagcacttcctaagtgcccggacctctgcttcatgtgagagatgtatctgagaaggggacggacatgcmcctaacggtgccagcgatgtggccattatgaaagatcgtgatgttgtaggaacatacagaaggaa

SEQ ID NO: 643794 - DNA, 497 bp, Homo sapiens
actcacttatttcagtttgatctcttttccgagatatccaggcatttggtggattttgattctccatgtttattcctaaggaaacttatctccaaatctctccaatctttcttccaacaaagcccagtttccagaagaagtaattataactgcacaattatcaagggcataatatatttcttgataaccctgacataaattaagggccatttatttgtctgggtttctgttcctgttaaaaataatctctttgctcaatgtcccacacttggttattttccttcctctttgcttggtgaaacagaaggctcttttagagattttgactgtttctcattattatttatccaacagatacttaatgagcacttcctaagtgcccggacctctgcttcatgtgagagatgtatctgagaaggggacggacatgcacctaacggtgccagygatgtggccattatgaaagatcgtgatgttgtaggaacatacagaaggaa

SEQ ID NO: 643795 - DNA, 593 bp, Homo sapiens
cacctttatccacacaacgttaggtcatttgtcagcactgcaagtgcaagtatggaatgaaaaaacagtcaaaactgcaaatscaagtgtggaatgaaaaaacagtcaaatcacaactaagggctggcctaaccagtaagctgagcacatccttggaggacagcctcttacccagaagttgactgcatgaattcactattcactcaccctgaatcttctccagtttcatttagactgagggtagaggatatgggacaaaggataggggtgctatacaacaatacttcaaaacttggttaatctaaaatatatcatatggaccattagttccttaagatgctgtttcttggggggaagatgtcgaacactgttgggaaatagctcatacactgtccctcatcttggggatttatctgggtaaatattgagttgtcccatcagaaagaagttcacccacagttcatacattaacagatatttactaaggacttacagatatttattaaggttttattaaggacttgccaggcactgttctttttggtgttggagattcagtattgacagtcaatattaaatctgaatattgacag

SEQ ID NO: 643796 - DNA, 593 bp, Homo sapiens
cacctttatccacacaacgttaggtcatttgtcagcactgcaagtgcaagtatggaatgaaaaaacagtcaaaactgcaaatgcaagtgtggaatgaaaaaacagtcaaatcacaactaagggctggcctaaccagtaagctgagcacatccttggaggacagcctcttacccagaagttgactgcatgaattcactattcactcaccctgaatcttctccagtttcattwagactgagggtagaggatatgggacaaaggataggggtgctatacaacaatacttcaaaacttggttaatctaaaatatatcatatggaccattagttccttaagatgctgtttcttggggggaagatgtcgaacactgttgggaaatagctcatacactgtccctcatcttggggatttatctgggtaaatattgagttgtcccatcagaaagaagttcacccacagttcatacattaacagatatttactaaggacttacagatatttattaaggttttattaaggacttgccaggcactgttctttttggtgttggagattcagtattgacagtcaatattaaatctgaatattgacag

SEQ ID NO: 643797 - DNA, 538 bp, Homo sapiens
tccacttcattcttgccacacccataatacttaggtaattagcacagttagctggtttggagatgctgggaatagggaagagggtccatgtaccctgttaacaaccccatggcctacaagaaccctgttcatagactgcttgagccacctcacctacgtacctcccataactggccattgggcactccatacactcagtgtgcctcaccagcacccaaccaggcttgctctcccagtatgcttacacaaatagaaagtgtaagcatctcctcctayggagaactgatataattctatgggaataaaaaaagtcagaaactggagcatttcagggcaccgccctattgaaaacaaatgggaggctctcagcataggctttggctgatggagaaaagacataatatcttaagtattctcccaggaaatgaaaaaagatatgaaggaaaaaaaaaaaacagaaaacaaaagaaaaggtctcagagagtctcaaaatcctttgcctaactggtgaaggcactttcctcttgaagttagaaaa

SEQ ID NO: 643798 - DNA, 560 bp, Homo sapiens
ctgttttttcttaaagaaaagcctattaatatcagatgagtggaagagaatctataaagtcaaaatgactaagaatctgctatgacaagaccacaaacccacagaagcagaaacagaagaaagagaagagacaaaaaagaattgggaagaaagtagagacacaggcttcggcatttaagtactcctgtggcttgaatggcaaaatgcccgtggagactcagagaagcagcacatcgataaatcaatcagacactacaagcttgaagaagaatgatagagtgatgtcccccggctggaatgcctgatgggggttgggagttgcacatgcctccaggaaatatccaccttcagaagacttactctctgaggtctagttttcccctcttyattaaacctcaattgttggcaagagaccatggatgtttagaaaaaccactgggcattgctttttatatgcccgtctgattgaggccactgaggcagatccactgacgttccctggtgtccagggaggttgacaaccactgcaacatttttagggtgtcgttgaggttttgttg

SEQ ID NO: 643799 - DNA, 584 bp, Homo sapiens
tgtcttttttttttcattttagccagtctgtgtagttgtgttccattgtggttttaattttcatttccctgatgaggtgaaacaattttcatatatttattagctgtttgaatattgtcwttggtgaaaagtttattcaagccttttgcccatttttctggtgggctggctacctatttctcaaagatttttggcattccttatatattctatgtttgaattatttgataactatacatacgtatgatcaatattttcttgtactctgtcacttgcttttcagtctcttaattgcatcttttgattaatagaagtttctaattttaatgtattactatttatccattattccttttgagggtagcactttttccatcctgtttaggaaatcactgtcaacatcaagtcatgcagatattcttctatattttctataagtttttttttgcatagatatctttttaaaaacaattatctaaaaaattctgatacagacagttcacatatcacattttgcaaaaccttgcaattttctgccctaagcctcacaaatccttaaaaagctgtgcaccctttccccaagc

SEQ ID NO: 643800 - DNA, 584 bp, Homo sapiens
tgtcttttttttttcattttagccagtctgtgtagttgtgttccattgtggttttaattttcatttccctgatgaggtgaaacaattttcatatatttattagctgtttgaatattgtcattggtgaaaagtttattcaagccttttgcccatttttctggtgggctggctacctatttctcaaagatttttggcattccttatatattctatgtttgaattatttgataactatacatacrtatgatcaatattttcttgtactctgtcacttgcttttcagtctcttaattgcatcttttgattaatagaagtttctaattttaatgtattactatttatccattattccttttgagggtagcactttttccatcctgtttaggaaatcactgtcaacatcaagtcatgcagatattcttctatattttctataagtttttttttgcatagatatctttttaaaaacaattatctaaaaaattctgatacagacagttcacatatcacattttgcaaaaccttgcaattttctgccctaagcctcacaaatccttaaaaagctgtgcaccctttccccaagc

SEQ ID NO: 643801 - DNA, 591 bp, Homo sapiens
taataagtgcagagctgcatagcaacacgatttctgaaaatgaaaaacgtcaacttaacatttgcaaaaatattattcctgtaaaaataattatctagataggtctgcttttggaaagccggaagctaagaaaataagctatacaagtataactgttgcatcaagggccatagatggcaaactgcttaagatcaagtatcattgagtttacacatatttggttctcttgcagctgctacaatcatagaaacataaggaatgcaggacmtaagtgatcctgacagtgaaatttgacataatgaagagagatgatttttcctaggaaagagacaagattaacagtatcaattatctcacaacttggcccagtctagcactccagccttacttcctcctcctcacccgtgtcaacctactcttcctacaaagccagtggacccatggaccttcagatccaccaactgcattcctatatctgtgtctttgctcccacaatcccctccatgggatgcccccgggcagtagggctctaaagattagcgagcaaattcatgaggattaagtgagtatcaataagcatgcctcctgttt

SEQ ID NO: 643802 - DNA, 542 bp, Homo sapiens
ctgtctggtgaggacactcctcctggtttgcagaaggccatcttttcgtggtgtactcacatggctgagagaaaaaaataatctctctcatgtttcttcttctaagaacactaatcccattcatgagggctgcaccctaatgacatgattgcctcctatacctcacttcctaatacaattatattaggggttaggaattcaacatatgaatttttgggagacacattcagtccgtaacacaaaagataggaatcaatacctctagtttccagactatggtctcaaaatactaatttcaactaaatggacccaggacctcttggaaaaatgtaggttttcaagtctgggacagaaatttccaagatgaacctagaacaacttgtcataacagayacccacaaagctactgatgacaactagggttctatctaaaggactcaagagccatcatgattgtccaaggagggatccagggccaattacataattttcagggcaaaataaaattatggagttccttgttcaaaacacagggggatatt

SEQ ID NO: 643803 - DNA, 535 bp, Homo sapiens
ggtctatttcatcttaagacaagcattatttcttctctatcagagtttctcaaaattaggcatgtatcagactaacttggagggataattaaaccacaaattgctaagctccacccccaggatttctgatttagtttgtctacaagggagcaaaagaatttgttgacaaatttccaggagaggaccttgatgttggtctgaggaccatgcgctgagaaccactgttcgacgtaagtggcttcatctgaggctctcactgataagcagttgtaagatgcaaatgtttttagcagctgagtaagctggaaccaggtgacyggcagatataattctatttcagttgctccttgttatttgggacctcatgaccttttgtttttcctggaagagaatatagacccagtcatttacaaggctggatcagggacatgggggcttccctaaatagcattttaatgtgatcaatctaatcaattacctagaccagtataggtcacttagatttgaggatggtcataggttactgggaaatagc

SEQ ID NO: 643804 - DNA, 517 bp, Homo sapiens
agaaattaatttcaatgactagtttgctaagatttttaagtgaatgttaaattgcatcacatattttgtatccacagatataaaaatcatagattttaagttattaatgtgccsaagtatattaattaaattcctaatatcaaacttacctgtattctgaggaagaaaacctaatttggtcatggatagattcagtctgttgaaatttgtttagcatactcagctctaaattaatacatgaagtagatcactatttttactttcttttaaaatccctcctagtttggatatcacagattttagaagttgtgcagggacatggatagagctgtaggctattatcctcagcaaactaacacgggaacaaaaaaccaaataatgccaggcgcggtggctcacacctataatcccagcactttaggaggccgatgcgggcggatcagctgaggtcaggagttcaagaccagcctggccaacttggcaaaaccctgtctctactaaaagtacaaaaattagc

SEQ ID NO: 643805 - DNA, 569 bp, Homo sapiens
gtgtcttcgtccacttgcattgctagaaaggaatgcctgagactaggtcatttataaagaaaagaggttcatttggctcacagttctgtgggctgtacaagaagcatagtgtcaacatctgcttctggcaggaccttaggaagcttacaattacgcagaataggaaggaggagttggcatatcacatggcaagagcgggagcaagagaaagggggaggtgcctggctctttttaacaatcagccattgtgtgaactaatagagcaagaactcactgattacctcggggagggmagcacgccattcatgaggtatccttccccacgacacaaatgcatcccactaggcccacctccaacattgggggtcacatttcaacatgagaattgaagggaacaaatatccaaattatatgaacaggtttcagggattagtaagaggacaccttggggggaggggcttattttgtcttccacagtgaaacagagagtaaaagtgaaaaaagggacacagaaatttgtaaaattcacattaacattattcaccaaaagcacctgccaccactaccta

SEQ ID NO: 643806 - DNA, 569 bp, Homo sapiens
gtgtcttcgtccacttgcattgctagaaaggaatgcctgagactaggtcatttataaagaaaagaggttcatttggctcacagttctgtgggctgtacaagaagcatagtgtcaacatctgcttctggcaggaccttaggaagcttacaattacgcagaataggaaggaggagttggcatatcacatggcaagagcgggagcaagagaaagggggaggtgcctggctctttttaacaatcagccattgtgtgaactaatagagcaagaactcactgattacctcggggagggcagcacgccattcatgaggtatcctyccccacgacacaaatgcatcccactaggcccacctccaacattgggggtcacatttcaacatgagaattgaagggaacaaatatccaaattatatgaacaggtttcagggattagtaagaggacaccttggggggaggggcttattttgtcttccacagtgaaacagagagtaaaagtgaaaaaagggacacagaaatttgtaaaattcacattaacattattcaccaaaagcacctgccaccactaccta

SEQ ID NO: 643807 - DNA, 569 bp, Homo sapiens
gtgtcttcgtccacttgcattgctagaaaggaatgcctgagactaggtcatttataaagaaaagaggttcatttggctcacagttctgtgggctgtacaagaagcatagtgtcaacatctgcttctggcaggaccttaggaagcttacaattacgcagaataggaaggaggagttggcatatcacatggcaagagcgggagcaagagaaagggggaggtgcctggctctttttaacaatcagccattgtgtgaactaatagagcaagaactcactgattacctcggggagggcagcacgccattcatgaggtatccttccccacgacacaaatgcatcccactaggcccacctccaacattgggggtcacatttcaacatgagaattgaagggaacaaatatccaaattatatgaacaggtttcagggattagtawgaggacaccttggggggaggggcttattttgtcttccacagtgaaacagagagtaaaagtgaaaaaagggacacagaaatttgtaaaattcacattaacattattcaccaaaagcacctgccaccactaccta

SEQ ID NO: 643808 - DNA, 537 bp, Homo sapiens
cgtaaatgtaggtgagcccaggctctgtcattgcttgactcccactacacaacacttcctgtatcctgcagacttcaatcaactctacactttgagtcccagactctcctaagctttagagacataagtgcaataaaccaaatctccctgtgagccctttccattcagtatgccaaaactgaaatacatcctgttttcttagctccctcactaagcctccttccctcacaccatcttcccccacaaacagaaaacaccattcatctattcctaggtttaccaccttagttgaagccatsaccatccaccttttggttaacttcggtcttccctttcccttaccactagccccacacattccagagcagtgttgccaaatttcttttgcaacatttttctcattcatccctttctctctaccccaactttcatagtctttgtttagaacctcatcttttttttttttttcacccaatctactgcaatcattgtagttaatcttcccttcttcaacgcatcttcactccaagctatcct

SEQ ID NO: 643809 - DNA, 446 bp, Homo sapiens
cttcatagttaaagtatgtcttcccttgaggatcacacagccatttaatttctgttctggcatttgacctattgtgtttatgaggttctactgagagatggaattgatgatttcttccataaccacaaagaaaaaattgagagttactgatttcaaaccactattataacctttcaagtttttctggaaaaatgttttctttccaaaatgaaaagaaaaggaactccttattaaatgtctaacttttctgtatcatcacatctttcaatatgttaaattcacctcagacttggctggaggaaagttggagttcctcatctgtagtttggaatctaccaggagatgtcactggctggcctaatctctattggttcctgcytgttcaggcattattttcaaggagaagagtggattttccatctggggcctacccctcctgtcctcca

SEQ ID NO: 643810 - DNA, 572 bp, Homo sapiens
gtgcctatgagtttagaattgtatatactttgggcaaattatccacatccacattcaacatgtctattgtaaagctgttttttgtcattctcatattttgtctcatattagtctagttattttatttatttgtttatttatttatttatttatttatttatttattgagatggagtctcactctgtcccccaggctggagttcagtggcacaatcacagctcactgcaagctctgcctcccaagttcaagcgattctcctgtctcagcctcctgagtagctggggactacaggcacatgccaccatgcctggctaagttttgtggtttttggtggagacagggtttcaccatgttacccaggctggtttcctgacctcaagtgatccacccaccttggcatcccrgactgctgggattacaggcatgaaccactgtgttattattattgtttacatttcagactccttcagggtccataagtatttgcttttagtactcagatgagacgttttagaaatcagtatcaattcagtaatctctaaccagtcagaaagtagctatagttgcccaa

SEQ ID NO: 643811 - DNA, 596 bp, Homo sapiens
tgatcggaggtgttctgtgcctgtgtttctatgtcagtctgaacgttcggggttgtgagtacctgttgtactctacatgtctcttgagtatttgtgtcacttgactctaggtctgtgtctcttcctattcgtggcgggtatctgcctgagcatgtttgtaaatatgcttgtgtctgtgtaattctgtgtgtctgtgttactctatgcgtctgagtttcagtctytgtatttgtgaccaggtcctcctgggtgtgtccattaattcatgtgtctgttagtttgcggcggaacaggtgtgtgtgtgtgtgtgtgtgtctgtgatcctggatctgtatgccagttcctcactgggggtttctgagaacctgcatctctttgcttgtatgtctttttgtctatctgtgtgttcatttctaccctctctagtgaggacagaattccaagaccctaccaagcccttcttttttctgatgggggaactgaattgccagggaatggggccacatcacagctaaaaggagacaagaggagacagaagctcgttgatatacaaagttttatgtgacctgagcccctctggaggcaccagagtccac

SEQ ID NO: 643812 - DNA, 596 bp, Homo sapiens
tgatcggaggtgttctgtgcctgtgtttctatgtcagtctgaacgttcggggttgtgagtacctgttgtactctacatgtctcttgagtatttgtgtcacttgactctaggtctgtgtctcttcctattcgtggcgggtatctgcctgagcatgtttgtaaatatgcttgtgtctgtgtaattctgtgtgtctgtgttactctatgcgtctgagtttcagtctctgtatttgtgaccaggtcctcctgggtgtgtccattaattcatgtgtctgttagtttgcggcggaacaggtgtgtgtgtgtgtgtgtgtgtctgtgatcctggatctgtatgccagttcctcactgggggtttctgagaacctgcatctctttgcttgtatgtctttttgtctatctgtgtgttcatttctaccctctctartgaggacagaattccaagaccctaccaagcccttcttttttctgatgggggaactgaattgccagggaatggggccacatcacagctaaaaggagacaagaggagacagaagctcgttgatatacaaagttttatgtgacctgagcccctctggaggcaccagagtccac

SEQ ID NO: 643813 - DNA, 641 bp, Homo sapiens
ctcattttaccactaagagacactgtaattaatgaaccaatattttaatacccatcagttgtttatagattataagctccatcagagcagagatggtaccctgtgtttaatatatacttgtttaatgaataaataagcaaatagatgactttttggttaaacagccaaaatataatttaaatatgaaaccaatgtcaggactttgttgtgccaggtattttgagatacttaggaatcaaacaatcaattccacttgtcatgtgttgctggcacagctgaaaactaccatttggtgtgtgcaggcagatagagatctttcaaggggttcttatttttaataaatggaaagawcatttttttggttttttgctttgttgtttgagtcttctaagtagaatttatttactggcctacaaatgttgggcctgaggtataaaaatgtaaaagactctatctacataggcaaattaaattagaagtctgaattatgataggtccacagaatttattaatcaacaaaatagactcatttctaccaacttaacctctattaaatattggtcctataatcagtcctgtatatggaagtatctattttttctagagtatgaaataacagtagtctctgtctaccttcataa

SEQ ID NO: 643814 - DNA, 603 bp, Homo sapiens
ctaaattcatccagtgtggtgagtagatcttaaatgacaaatccacagttcaatctccctaagcctttgaatatgtttcactaacttaacccaatttgctcatggtggaccatyttttgctccatgttttagccaactacctgaacaaactgttgaactctttctgacttcctgggttgcaacattaaatgcagaatctctgtctagtgagcccatgtcattaaattcagcctgattcaactttaaagtctttccaaacttacttagtttactaattcaaatgctaatctcttccagaaacaccctgtcaaacacaaacggaactaatgttttgccagctatcttaaacatcctttagccagtgaagttgacacaaaagtaaccatcacaatgaaataacaacttctttcccttattgttacttctttaccaattacagccataactcagcctcatttttctcatccactagaataaaactaaaattccagattacagaattattctcattatctaatagcacctaacccagaaaaaggacaccgtgtcatcttgagtcatctctaaaatcacctaaaagaggcccagttttttaaataaaag

SEQ ID NO: 643815 - DNA, 572 bp, Homo sapiens
atattgtcacctcttgagcattttagcaggctggtaraggaaagggtgaattatttaattggataactcttgagccatatctgacaaaaaaaataaactctcatcctcctgtcctccttttgttatttttttttcattctccatccttcaccccttgtaattgtttttataggatttagtattgtacctatttttatgcagaaaggaaatttttctgtagagtaagaccttccaatttagtagcttcttattaagttataagaattcttaggatgaataactttactgagacatctgtgacaaatttaggtctacccaagaactccaacaactgcctgctgggaaaagaaaaagagggaaatgcttaatgagcaaagatctatgtaaaagtcctaaagctaaatcttaataggaaaggctttatttcaaccacttggaggcatgcatgaaaatttagcacaaaataagggattggaaaataggcttaccatattgatgacagtggtggactttagcagacagagaatatgcaaagatgcaacaggtatgcaaataactccaggcagtttcag

SEQ ID NO: 643816 - DNA, 607 bp, Homo sapiens
gttgttgttgttgctcacaggcttaatcttcagcttctatgcaccaagcgtggaaaaggagaaagtcctgcagaatcaatcccgacttccatacctgctgctggactgtaccagacgtctgtcccagtaaagtgatgtccagctgacatgcaataatttgatggaatcaaaaagaaccccggggctctcctgttctctcacatttaaaaattccattactccatttacaggagcgttcctaggaaaaggaattttaggaggagaatttgtgagcagtgaatctgacagcccaggaggtgggctcgctgataggcatgactttccttaatgtttaaagttttccgggccaagaatttttatccatgaagactttcctacttttctcrgtgttcttatattacctactgttagtatttattgtttaccactatgttaatgcagggaaaagttgcacgtgtattattaaatattaggtagaaatcataccatgctactttgtacatataagtattttattcctgctttcgtgttacttttaataaataactactgtactcaatactctaaaaatactataacatgactgtgaaaatggcaatgttattgt

SEQ ID NO: 643817 - DNA, 643 bp, Homo sapiens
ctggtagggtgatggttattatgacaggataggccaaatggaagccattagagctgtctctacctagaaaaatagtaaatcaaaaacaatattcatccctggagggattgaggagattagtaccaccatcaaagacttgaaagacacaggggtggttactcccaccacatcccctgttcaactcttccatttggcctgtgcagaagacagatggatcttggakaatgacagtggattactgtaagcttaacaaagtggtgacttcagttgcagctgctgtaccagatgtggtttattgcttaagaaaattaacccatcttctgggacctggtatgcagccattgacttggcaaaagcctttttctccattcctgtccttaaggcccaccagaagaaatttgccttcggctggcaaggccagcagtatacttttactgtcctacctcagtgatatatcaactctctggctttgcgtcgtaatatcatttggagggaacttgatcactgtttgcttctgcaaaatatcacactggtccattacattgatggcattatgctgattgcatccagtgagcatgaaatagcaaacacactggacttattggtgagacatttgcacgccagagtataggaaataaatctg

SEQ ID NO: 643818 - DNA, 643 bp, Homo sapiens
ctggtagggtgatggttattatgacaggataggccaaatggaagccattagagctgtctctacctagaaaaatagtaaatcaaaaacaatattcatccctggagggattgaggagattagtaccaccatcaaagacttgaaagacacaggggtggttactcccaccacatcccctgttcaactcttccatttggcctgtgcagaagacagatggatcttggataatgacagtggattactgtaagcttaacaaagtggtgacttcagttgcagctgctgtaccagatgtggtttattgcttaagaaaattaacccatcttctgggacctggtatgcagccattgacttggcaaaagcctttttctccattcctgtccttaaggcccaccagaagaaatttgccttcggctggcaaggccagcagtatacttttactgtcctayctcagtgatatatcaactctctggctttgcgtcgtaatatcatttggagggaacttgatcactgtttgcttctgcaaaatatcacactggtccattacattgatggcattatgctgattgcatccagtgagcatgaaatagcaaacacactggacttattggtgagacatttgcacgccagagtataggaaataaatctg

SEQ ID NO: 643819 - DNA, 244 bp, Homo sapiens
tggcagggtcccagagcaagtgagtggctggatccccagcccccaaggagcatgcagtctccagctacctcttactgctcaggaacaatgggtgccctgagtagagatagagtcagyttcaacctcctggggggaaggatttggtgtgttcccttcaaccaaggatgccctgctgagcacctaagagctggcaattcccagcccatgatctctgtagtgggcagagttctaagatggccctcag

SEQ ID NO: 643820 - DNA, 587 bp, Homo sapiens
ttttgtagttgtcagcttaaattattttaaattaattttttccaattatttatttctaacagacacacattattttctcattccgtagcttgctaaatttacttagtagttctctaataatcctttgtaggcttatttaaattttcaaagtctaggatttcccccagtttacyacatataaatatagtgttttactacttcttatcaaagctttattatttctttctttttaaaaatttattgtttattgtacaggctaagttcttcagaattatattaaataaaagtagagtaaaaattattttgttgttcatgtttatacaccctacatttgttctgatgttgcagtagatttctcgtagataccttatcgctttgataaattttcttctgtcatttgcttacagtttttattatgaagttttgttgagttatcttgcataagttgttctgcctctactgaaatgatcttatacttttttccttctgttacacctatacttttgcataaaaacaaaggaggtttttctagattgaaggtctgttaaataacattacaaccaaatataatctgcagaatttggatg

SEQ ID NO: 643821 - DNA, 599 bp, Homo sapiens
caaaaaaggaattttgttctttgactaaagcagaaagtatcttggatataaagatcaagagtttgtttttttaaagagtartgttctcatctttcccattcttcactttttattttttgagacagaatcttgctctgtcactcaggcgggagtgcagtggtacgacgtcagctcactgcaacctccaccttccaggttcaagaaattctcatgccttagcctcccaagaagctgggattaaaggcacatgccaccacacccagcgaatttttgtatttttagtagagacagggtttcgccatgtcagccaggctggtctccaactcccggcctcaagcaatctgcccacctcagcatcccaaagtactgggattacaggtgtgagccactgcacccggcccaatcttcactttctagagcaaacagttaacagagtttaaacaatgtcttatttatttgttttttaatttaaaggctatctagaaacactcggaaataaaggttaatattacttatttgaggtttgctctctaagtatttacaacaacaaataatgtctatcgccatacagttcatcagcaaatctcactttcattaca

SEQ ID NO: 643822 - DNA, 615 bp, Homo sapiens
agtttcaagacttaaaatgtgagttcagtctacctgaggagttgagataatcaatgaacatgttgtcaaaagagaatcagtccctcagtatctggaaaatttaaccatatcatgagccatgctataggaaaagcttagtgaaattattacacattaaaatagattgagatatagaaagagataaaaataataaacttataccaggatttttttttagctttagaaatcagaatactgtaaaaataatggaggctaatatttataaartgcttatgatttatctgatatttttctaagtgatttgattgcactgtctgattttatattcataataatactatgatttaggtgtcttttattattctcatgttagagataatttaacttacacctaaataacttttaaatcccagcactttgggaggcccaggcaggaggatttcttgagctcaggagtttaagatcagcctgggcaacatggctaaacgttttctctacaaaaacatacaaaaattagccaggcatgatggtgggtgcctatagtcccagctactggggagggtgaggtgggagcatcacttgagtccgggagacagaggttgcagtgagccaagg

SEQ ID NO: 643823 - DNA, 669 bp, Homo sapiens
ttgttctctggcgggcaggagtggaggtcacaaggtgctcagtaggggagcttttgagccaggatgagccaggagaaggaatttcacaagataatgtcatcagttaaggcaggaacaggccattttcacttcttttgtggtggaatgtcatcggttaaggcaggaaccggccatctggatgtgtacgtgcaggtcacaggggatatgatggcttagcttgggctcagaggcctgacattcctgtcttcttatattaataagaaaaataaaatgaaatagtggtaaagttttgggatggcgaaaatttttggtggtggtatggagagagamtgggcgatgtttctcagggctgcttcaagcgggattaggggcagtgtgggaacctagagtcggagatattaagctgaaggaagattttgtggtaaggggcgataatatggggttgttagaagaaacatttgtcatttagaattattggtgatggcctggatacggttttgtatgaattgaaaaactaaatggaataagagaaggagaaaaacaggtattaaaggtctaagaattgggaagacccaggacatctaattagagagtgcctaaggagattcagcatagtcctgccagcaaggatgatttatttactttaagagttaagagtggcagtttggg

SEQ ID NO: 643824 - DNA, 669 bp, Homo sapiens
ttgttctctggcgggcaggagtggaggtcacaaggtgctcagtaggggagcttttgagccaggatgagccaggagaaggaatttcacaagataatgtcatcagttaaggcaggaacaggccattttcacttcttttgtggtggaatgtcatcggttaaggcaggaaccggccatctggatgtgtacgtgcaggtcacaggggatatgatggcttagcttgggctcagaggcctgacattcctgtcttcttatattaataagaaaaataaaatgaaatagtggtaaagttttgggatggcgaaaatttttggtggtggtatggagagagaatgggcgatgtttctcagggctgcttcaagcgggattaggggcagtgtgggaacctagagtcggagatattaagctgaaggaagattttgtggtaaggggcgataatatggggttgttagaagaaacatttgtcatttagaattattggtgatggcctggatacggttttgtatgaattgaaaaactaaatggaataagagaaggagaaaaacaggtattaaaggtctaagaattgggaagacccaggacatctaattagagagtgcctaaggagattcagcatagtcctgcyagcaaggatgatttatttactttaagagttaagagtggcagtttggg

SEQ ID NO: 643825 - DNA, 457 bp, Homo sapiens
tgaagcaaactctcaatcattcattcatggttgcatgcattcatgaacctgcrctgtctcacatggtagctgccagccatgtgtggccaccgagcacttgaaatgtggctgctgctgggtactgaaatactatttgggacatattggcttaactaacatattaatattattaaaattaattacacctgtatcttttttgctttgtagacaatttcaaattacctatgtggctcgcattttatttctattggcaatggcattaaactaacatttgcgaatgcatgcagggttgcaagggcagtagcggctaccgttgacagagtgcggtgactcagttcatcctgacaaaccctgagaagtgcattctgtgcgtatttttatttgacaggtaagaaaaaggaggctcggagaaggggagcggcttgcccaaaggcacacagctctggattgtggcagg

SEQ ID NO: 643826 - DNA, 457 bp, Homo sapiens
tgaagcaaactctcaatcattcattcatggttgcatgcattcatgaacctgcactgtctcacatggtagctgccagccatgtgtggccaccgagcacttgaaatgtggctgctgctgggtactgaaatactatttgggacatattggcttaactaacatattaatattattaaaattaattacacctgtatctttyttgctttgtagacaatttcaaattacctatgtggctcgcattttatttctattggcaatggcattaaactaacatttgcgaatgcatgcagggttgcaagggcagtagcggctaccgttgacagagtgcggtgactcagttcatcctgacaaaccctgagaagtgcattctgtgcgtatttttatttgacaggtaagaaaaaggaggctcggagaaggggagcggcttgcccaaaggcacacagctctggattgtggcagg

SEQ ID NO: 643827 - DNA, 385 bp, Homo sapiens
catgcagctccatgcctgagacctgatctcccaggcacayggagagaaacagacgcttgggtagcacggaaacacacagacacatacacacacgagtacggcggaggcgctgcaaggcgcaaagtcacgtgactacactcaagtccctaagaagatacagtacacacacacacacacacacacacacacacacacacacacacacacaccggaaatgcaaacggacacatattagaacacccccagcctgctggaggacagctttctaggctgaggctctgggtgtagctggacccaaagcaaagtggcctcacttgaacctctctctgctgcttggccttgggagcaggatatccaggaagccccgctgggcccggctgctcat

SEQ ID NO: 643828 - DNA, 541 bp, Homo sapiens
tataatgcctaaaaatatgggcccagctaactcattggatcctgaaagcaatttaggtttggttttacaccatctgcaacctctcagacttcagaagctttgaatcagtactgcaccaccttgccatatatcgggcacaaatataaaaaggaaaagaaaaatcaagccataactctggactccatccaggaaactttatcttgaggttaaagttttataaaatgtctctcttctgaaaattaatggagtaatcatacccttgcccatgtcagacctctacagtctcttcgatgttttcgtgttctaatggaaactctttaaccccaagtcctgacccctctaacccttgtgatgttctcccctggtggcctcaaaaatatggcttccctttctycagtttaatcaaacactttcatcccttcccttttatttctatcaccaatcagtagccacagatgtgtctcatgagttcttactatccagcatataaaacaggacaaaggaaaactaccataaagggaaatagtgataaactgaactt

SEQ ID NO: 643829 - DNA, 579 bp, Homo sapiens
ggtcctgggctttttttgattggtaggctatctattactgcctcaatatcagaacttattattggtctcttcagggattcaattttttcctggttcagtcttgggtgggtgcrtatgtccaggaatttattcattttatctagattttctagtttatgtgcatagaggagtttatagtattctgtgatggttgtttatatttctgtggggtcagtggtgatatcctcatcatttctgacttgtttctttgattcttctttcttctttattagtctaactagtggtatatctattttattatttttttcaaaaaacaggctcctggatttgttgatttttgaattttggggggtttctatctccttcagttcagctctaatcttggttatttattgtcttttgcaatgttttggatttgtttgctcttggtcctcttgttcttttagttgcgatgttaggttgttaacttgagacttttctagttttttaatgtgggcatttagtgctataaatttccctcttagatttgctttagctgcatcccacagattctggtacattggctctttgtttttatta

SEQ ID NO: 643830 - DNA, 579 bp, Homo sapiens
ggtcctgggctttttttgattggtaggctatctattactgcctcaatatcagaacttattattggtctcttcagggattcaattttttcctggttcagtcttgggtgggtgcgtatgtccaggaatttattcattttatctagattttctagtttatgtgcatagaggagtttatagtattctgtgatggttgtttatatttctgtggggtcagtggtgatatcctcatcatttctgacttgtttctttgattcttctttcttctttattagtctaactagtggtatatctattttattatttttttcaaaaaacaggctcctggatttgttgatttttgaattttggggggtttctatctccttcagttcasctctaatcttggttatttattgtcttttgcaatgttttggatttgtttgctcttggtcctcttgttcttttagttgcgatgttaggttgttaacttgagacttttctagttttttaatgtgggcatttagtgctataaatttccctcttagatttgctttagctgcatcccacagattctggtacattggctctttgtttttatta

SEQ ID NO: 643831 - DNA, 579 bp, Homo sapiens
ggtcctgggctttttttgattggtaggctatctattactgcctcaatatcagaacttattattggtctcttcagggattcaattttttcctggttcagtcttgggtgggtgcgtatgtccaggaatttattcattttatctagattttctagtttatgtgcatagaggagtttatagtattctgtgatggttgtttatatttctgtggggtcagtggtgatatcctcatcatttctgacttgtttctttgattcttctttcttctttattagtctaactagtggtatatctattttattatttttttcaaaaaacaggctcctggatttgttgatttttgaattttggggggtttctatctccttcagttcagctctaatcttggttatttattgtcttttgcaatgttttggatttgtttgctcttggtcctcttgttcttttagttgygatgttaggttgttaacttgagacttttctagttttttaatgtgggcatttagtgctataaatttccctcttagatttgctttagctgcatcccacagattctggtacattggctctttgtttttatta

SEQ ID NO: 643832 - DNA, 579 bp, Homo sapiens
ggtcctgggctttttttgattggtaggctatctattactgcctcaatatcagaacttattattggtctcttcagggattcaattttttcctggttcagtcttgggtgggtgcgtatgtccaggaatttattcattttatctagattttctagtttatgtgcatagaggagtttatagtattctgtgatggttgtttatatttctgtggggtcagtggtgatatcctcatcatttctgacttgtttctttgattcttctttcttctttattagtctaactagtggtatatctattttattatttttttcaaaaaacaggctcctggatttgttgatttttgaattttggggggtttctatctccttcagttcagctctaatcttggttatttattgtcttttgcaatgttttggatttgtttgctcttggtcctcttgttcttttagttgcgatgttaggttgttaacttgagacttttctagttttttaatgtgggcatttagtgctataaatttccctcttagawttgctttagctgcatcccacagattctggtacattggctctttgtttttatta

SEQ ID NO: 643833 - DNA, 474 bp, Homo sapiens
gcaatcatctccctctaggtaaggatatatctcagccatacagaactgatggatttcgaggggtatttaatttcaggtttcactttttatttagcttctagctccctatctagtctgctgtactgctccaaatgccaaaaaataatttttttcgtattgactacactggacatatttagggtgagatttaaaagtggctcctcckccatttaacaccaatactataatagaggaaagggcaggatacagcccagaacacactcagtattcctttccttaccactcaattccccatcattctgtttccatcagtggtacataagttcctcttaccaggtgactgtgaacaatttccttctagtaaaatgattatgtcttaacattgtatcttcacccttttccccactgaaccatatattcgaaccatatattcagtaattgaggttaaatacatttccttaaacatttacaagt

SEQ ID NO: 643834 - DNA, 601 bp, Homo sapiens
aaaacgaaatgataggaaaacaacagtagagttctttctgcagcttgagtgctaacaagggcctccagtgcttcaggaatcaaggggtaaatggagcgctcaaaagtccatccatctggcgctgtgtgcttgctggcacaktctttatcgccactatgggaagctatagtagggtggccacagatggctctaataattacacccttttctccctctggatgagacagatttatgcacctggtcactgacagaggccttgctttgtagggacaagactcttgttacacagctgaagagtgcatcacagtgttatcttcttgccatgctgcagatctgaagaggggtcttagaagaggcagagtcacccacactcaagaccatttctcaaattcatctacgagataagtccattctcctccttaggggaaaaggcaggagtatgaccctaatggaaatccctctgcattaaaacttgagcagtggggaaccagttttccttctcacaagggcaaaccaggaaaataaatgccttatactggaataataactttagaagttccctagggactagttatctcccaatttaaatatgtaaagcaga

SEQ ID NO: 643835 - DNA, 508 bp, Homo sapiens
ggtaataggtgatgggcctactactatgcctggtgcactgtaggtacttgatgaatgactgttgaactgaactaaatgcaattacggtttgcacttttgttggagagggaacagcaagagctaaggccttgccaatggctctatatgtgggcccctgtgggcccaggtccccgcaccgctctgctgtctggactttgtgtgctccaagcactggtaggagagcatatggtagctgaaatgaggcccaaagggactgaagttggggccgctgtggatgctgaagaaagtgaactgcaagaaggtacaaggaaggccaggatgtgcaacagtgggcctgaggactaagtgtaggggtaaggtcagaggccaggtacccaccctgcaaggagagtcaggagccagggtgccaaggacwgcctccctggaggccacctagtgggcagggcttctgtgcatgagggaccagggctgactccatgatgggcacaattcccaggagggataggaa

SEQ ID NO: 643836 - DNA, 596 bp, Homo sapiens
gcatgaccttgtatatatataatcttaaggacagtactataaggacsaataaatgagtttattaaggttgcgagatacaagataaatatacacaaacaaattatatttcaaaacacttgcaataaagaatttgaaattgaaatgaagaaaacaatttcacttataatagtatcaaaaaaaataggccagtgtagtggctcacacctgtaatcccagcaatttgggaggctgaggtgggtggattgcttgaggccaggagtttgagaccagcctgggcaacatggagagacccaatttctactaaaaatacaaggccagactcagtggctcatgcctgtaatcctagtacattgggaggccaaggtaggtagatcacttgagttcaggagtttgagaccagcctgggcacatggaaaaaccctgactctacaaaaaatacgaaagattagccaggcatggtggtgcaggcctacagttccagctacttgggaggctgacgcaggaggattgtttcagctcaggatgtgcagtgagctgacatcgcaccactgcactccaggctgggtggcaaagtaagacactatctcaaaaaaaaa

SEQ ID NO: 643837 - DNA, 544 bp, Homo sapiens
ccttgccaacacttgagtgttgtgctgaacaatctttttgacattcttggttttccaagtttaatgatatgtgtatggtgtttacaatcctttggattttctaaatagtacataacagtacagaaaattgtctactttgaaattgtgctttctcaatgaaatattttatctgataaagttttagtgtttaaaaaaataaaatgcagtatgagagtcctttcagcaaaataaagtagactgtgtgagatatatcaactctgaatgagctctatgaatgaaaattactttgtacaggaacgtgaaacccctggcayaggaaactctcagtgttttgagaactggggctgtgtggtgaagctggagccagagcctggtggttgtttgctggtcactatgggagaatacaagggatcaacacaacctctcaaaaggcttcctcttgaaaaatgaaaaatatgattggcaggagtgaggaaaaacatcaagattgagaacaggactggctccctattctaaggctgaataatgacctttggattaggac

SEQ ID NO: 643838 - DNA, 384 bp, Homo sapiens
ctgacaagaacaaatgtgttctcctggctgggtgcagtggctcacatctgtaatcccagcactttgggaggctgaggcgggtgaatcacttgagcctaggagttcgagaccagcctgggcaacatggtgaaaccccgtctctgcaaaaaaaaatacaaaaattagctgggcawggtggcgcatgcctgtggtcccagctacttggaaggctgaggtgggtggatggcttgagcccagggggcagaggctcagtgagccgtgttcgtgccactgtatgccagggctgggttacagagccagaccctgtcttgaaaaaaaaaaaaagggaaaaaaatgtgttcccctataaatatggcttcaatgtttatggcaatattaaattat

SEQ ID NO: 643839 - DNA, 543 bp, Homo sapiens
gggttagctgaacatggaattatagtttgaaaataatttctactaaaaatttctcattgctctgttgtcttctagtgctcactgttgctattttgtcggcaagaagatgattctatttttatttttatttttatttttttttttttgagaccaggtctccctctgtcacccaggctggagtgcagtggcacaatcatggctcactgcagcctcaaccttccaggctcaagcaatcctcccacctcagcctctygagtagctgggactacaggtgtgcaccaccatcctggctgattttttaattaaaaacaatttttttttgagatggagttttgctcttattgtcaggctggagtgcaatggcacgatctcagctcactgcaacctctgcctccgaggttcaagtgattctcctgcttcagccacccaagtagctgggattacaggtgtgcaccaccacacctggctaatttttgtatttttagcagagacaggatttcaccatgttggccacgctggtcttgaactcctgatctcaggtga

SEQ ID NO: 643840 - DNA, 480 bp, Homo sapiens
acctctgggggcagggcatatatgaacaaaaggcagcagacaacttctccagacttaaacgtccctgcccgacagctctcaagagagcagtagttctcccagcacagcgtatgagctctgataatggtcagactgcctcctcaagtgggtccctgacccccgtgtagcctgactgggagacacctcccagtaggggccgacagacacctcatacagtcaggcacccttctggaatgaagcctccagagaaaggatcaggcagaaatrtttgctgttctgcagcctctgctggtgaaacccaggcaaacagggtctggagtggacctccagcaaactgcaacagacctgcagctgaggggcctgtctgttagaaggaaaactaacaaacagaaaggaatagcatcaacatcaacaaaaaggacatccacaccaaaacctcatatgtaggtcaccaacatcaaagaccaaaggtagataaaa

SEQ ID NO: 643841 - DNA, 504 bp, Homo sapiens
ttcattttcacatcacattattcagcaagtatttttactgatcatctactatgtaccagagacattgtatatgttttcccagaaattagtcaaaataaagcaaataataagacagaccttaggatagagctgctctcactttcagctgaggktgattagtttataacattccttgactgctgttagctaaaagtccttccaacttcaatactatctagaacgtatacctccatcttgtccacaagaatatcatgatatcacatttcaagcccccaattaatttgaggaacaccatttatatttcttctttagctaccaacctaaagaccctttaaaaaaaacaacactggtagtctaacttaattcctgatttatttctgcaagtgcatgctggttcctgatgagtacagcattcacaggtaaaggctcaccaattatctctttaacaatccattctcaatggtgcttcagagcaagtaaaattattactgcaaaatgtgataa

SEQ ID NO: 643842 - DNA, 468 bp, Homo sapiens
agttctttccttgatttaactctttcctctttcattttactataaatgcaaggagaaatcaggccacaccttcaacactttgcttggaaatctcctctgctaaatatgcaagttcactgcttacaagttctactttccacaaaataacasaaaacaattcagccaagtttcctggcactttataacaagaaccacatttcctccagtgtgcaataatttttttggtttcctcatttcctttttttatttttacttttttttttttggcttttttgtctcctcatttccttctgaggcctcaacagaaacacctttcattatcatatctgtacaacagactgtgacaatatatgtattctctaaaacaatagcagttttaattaccagcctcttcccttccttttgagttctcatcagtatatctcccttaatgtccatatttctaccaatagtcccttcaaggcaatc

SEQ ID NO: 643843 - DNA, 486 bp, Homo sapiens
taccttattaggataagaggagattatataagataggctatgttcatcctggttctgagaaaactctcaaaaatacattagtctgtgctctttatttgatgattaaaatcttgaaaaagtatttgtaaatcagtgcatatttcacatacactaggaggggctatttaaaggaaattatcagggtaatgcaattattgttgtaaatttagattccaataaagtatttttttctgtaaggcacacctataataaaggaatatgaataattattaagtgtgaattatctatggaaatgatttatcttcaagtatctacctgcctggacatctccaaaccccctccattgccytcagtcgctatgtgcttagagaacaaaaactctttttataacactgcctcaggcctttttgaaaaaaggaagaattaaaattaaaatggacatagtggcaactcattctatatcatgaaccacatctatatctctat

SEQ ID NO: 643844 - DNA, 627 bp, Homo sapiens
aattttgggggttacaatagcttagatttattgaaagctaagtgccagtcactgcattttacatacactattttgattgaatcatcacacgaagatgcattttatatctgtaaatgtgttttttggttttgttttgagacagtcttgctctgtcacccaggctggagtgcagtagcatgaatacggctcactgaagcttcaacctcctgggctcaagcaattctcctgtctcagcctcccaaagtgttgggattacaggtgtcagccactatacccaacttctgtgtttttaatttacttgtcctaggccccacagctttcctcattccatttgataatattggtactcagaattgtctatcttatcaataatggattagaaaaatatgtatctatacaaactcctgacacataagctttttttaattgctaggttttaataatccttaaaacctctgcamtaactgctatcttgctgcctggactcttacccctgtgtatggccggcttcctcatatttatgtcttggcttcatggagaccttctcgggcttccaaggaacaatccatggaggctctgtttctgatcaagttcctccaaagcacttactgagatttccttgtttgg

SEQ ID NO: 643845 - DNA, 556 bp, Homo sapiens
tgtgtttttttttttctcatttgtaaagtgaggacaataggagagttgtggggtgtttagagaattaaacgactattgtattagagggaaggggagaaagggacagaaagtgaagaaaagaagggagagaggaacaagtcaggaaggaaaaccagatcagctgatgaagacaactcagcacaaaaggcagacgtgataatattggaatttctggctttaataagaagctactagtatagaggaccttgctgaacagtgtagttgtgtctaagaggggctctacctttatattgctctttttccttttcctctgcttaacattcagcaagggtaactttaatgatttaaacaacaatggaaaatggaggagagaaaatgaagaaaatgtccactatgcaatgaggaatttttttaaagggatggttccaactggaatggagtgaayggtgttgttggaatagtgccctcagcaggcagagagtatacatatctacagtgtataaatatctcaaaattatttcaccatgtgatatcgtttattcccttttatcgcata

SEQ ID NO: 643846 - DNA, 556 bp, Homo sapiens
tgtgtttttttttttctcatttgtaaagtgaggacaataggagagttgtggggtgtttagagaattaaacgactattgtattagagggaaggggagaaagggacagaaagtgaagaaaagaagggagagaggaacaagtcaggaaggaaaaccagatcagctgatgaagacaactcagcacaaaaggcagacgtgataatattggaatttctggctttaataagaagctactagtatagaggaccttgctgaacagtgtagttgtgtctaagaggggctctacctttatattgctctttttccttttcctctgcttaacattcagcaagggtaactttaatgatttaaacaacaatggaaaatggaggagagaaaatgaagaaaatgtccactatgcaatgaggaatttttttaaagggatggttccaactggaatggagtgaacggtgttgttggaatagtgccctcagcaggcagagagtatacatatctayagtgtataaatatctcaaaattatttcaccatgtgatatcgtttattcccttttatcgcata

SEQ ID NO: 643847 - DNA, 569 bp, Homo sapiens
cacatccctaggtattctgccagggatatgttcttgttccctcctgaaagcatgacacatgcagcagagtcacctcacctgggttctgggtccagcgatatgtcacaattttccctgtgagcaaggcacaggcaggagaaacacatcacctgtttgctgggcccagaaatatgctacagtttttcttgtgagcagggctcaggcagaaatgggggaatcacattttctaggtgataaatgcagagctatgtcacaaggtccccagtagtcagggccttggcagaagattcctattgtctaggcgattggcccagtgatacaacacaatagctaaattatgcagggcccaaggcaaagaggagagttgcatcacctaagtgatgaacaaaaagatatgtcataatacccaggtggaaatgggccatgcaggtaagtcacaytacctaggtgttggacccagtgatatgtcacaatacacaatatatgcagggcccagccaagaggggagagtcaaatcacccaggtgctgggcccgatgatacattgtaatctgtctttggtcagagccc

SEQ ID NO: 643848 - DNA, 574 bp, Homo sapiens
cttcaaggtcctaggggataaagtagcagaatctgaaggcyccaagtacaatgagtgaccttggaatccccctttgccttctatttgcctctaccttttgggttgtgctatttatccatgagatatcctccccttatccagtgaaattagtttctaccactttcaaatgaggaccttaagaacccaacaggagctgggattttccgtggacttcagcctcagagtccaatgctctggaacatttagctccgtctcatcttcatctacccaagatgcctctgaagtggccatgcctccctctgatttgaaggacctacagagagtggatgcatttctgcacagtctcagagcaagaatcagggctggaagacacttatgagtatgtgaaatcgtcgaggtcacccagttcaaacagccctatttatgaggaagaaaacaggctttcctgcaggcattctctacattaggctgaggtggagcatagctcattttacttccaggtgccctcagagctggatgcaaaaccccagtcctgtcatcttgaaattgacatggagaggtccccatgtgaaca

SEQ ID NO: 643849 - DNA, 574 bp, Homo sapiens
cttcaaggtcctaggggataaagtagcagaatctgaaggccccaagtacaatgagtgaccttggaatccccctttgccttctatttgcctctaccttttgggttgtgctatttatccatgagatatcctccccttatccagtgaaattagtttctaccactttcaaatgaggaccttaagaacccaacaggagctgggattttccgtggacttcagcctcagagtccaatgctctggaacatttagctccgtctcatcttcatctacccaagatgcctctgaagtsgccatgcctccctctgatttgaaggacctacagagagtggatgcatttctgcacagtctcagagcaagaatcagggctggaagacacttatgagtatgtgaaatcgtcgaggtcacccagttcaaacagccctatttatgaggaagaaaacaggctttcctgcaggcattctctacattaggctgaggtggagcatagctcattttacttccaggtgccctcagagctggatgcaaaaccccagtcctgtcatcttgaaattgacatggagaggtccccatgtgaaca

SEQ ID NO: 643850 - DNA, 554 bp, Homo sapiens
acaatgagtgaccttggaatccccctttgccttctatttgcctctaccttttgggttgtgctatttatccatgagatatcctccccttatccagtgaaattagtttctaccactttcaaatgaggaccttaagaacccaacaggagctgggattttccgtggacttcagcctcagagtccaatgctctggaacatttagctccgtctcatcttcatctacccaagatgcctctgaagtggccatgcctccctctgatttgaaggacctacagagagtggatgcatttctgcacagtctcagagcaagaatcagggctggaagacacttatgagtatgtgaaatcgtcgaggtcacccagttcaaacagccctatttatgaggaagaaaacaggctttcctgcaggcattctctacattasgctgaggtggagcatagctcattttacttccaggtgccctcagagctggatgcaaaaccccagtcctgtcatcttgaaattgacatggagaggtccccatgtgaacagaaccctggatctgctcattctctgtg

SEQ ID NO: 643851 - DNA, 534 bp, Homo sapiens
ctgatatttctacaagaatgtaaaaagggactttacacttaaccaagttgccactgggaccagttaaggctagatttttggggggtagatctgagggtcactcatggaaatcccctaggagaaagcgcagagaaattccatatttgggtctggatcctgggcccatcctggttttgtcaggtccctctctgtagagaaccccatgtgcctgctctcaccataactcattgtatgccatgcttggggggtgtggtgaacctgccagttgtccaaggagatgggggacttgaacccatcaaatatctgctcactgatttttaatgcagctctacaaagagtgttcccagcagcgaaaaaaagtaattggcattctttgtttttaccaccaggtgacatctccattagaaattctgtttcctagatcaggaacataggagtatctgcatagacccccagccaatgaggaaacccgaggacagcttaaggccttgggattcacatytgagtagacacacttggtccacaatgctcaac

SEQ ID NO: 643852 - DNA, 557 bp, Homo sapiens
ctatgaataaaacctggcccataatttcactgagtcttgcagtatactatgatcagtttattcgacctaccatataaaaatctacttagttatacacgagtacattttaccaattattgatttatgagtgctgaaggtatgcttctgtcgccatttatgcactagagttttatcatctccaagggagtgacaatctactctagtgacacagtctctactatttaaaattycacacctttcatctgattaccccattaaccattatgttttccaggctgtagagattttaaagtaattaaatgtctcccaacagtcttaggcttttggccatggactttcactctcttttatggtggcgaactctgtgagaagcagctgtgacggctcagaactgaagtgagagcagaagacaaccaccaaactaatacaaccctgccaggaaggaggtcgctttcaaaatcagaggagctgttcaaaccttttgctccacgcatcctccactgacctaaaatttttcatgtaattaatctctcttttccttttgtgatacattctcc

SEQ ID NO: 643853 - DNA, 511 bp, Homo sapiens
acacccagctaaattttgtatttttagtagagacagggtttcactatgctggccaggctggcctcgaactcctgacctcaggtgatctgccctctttggcctcccagattgctgggactacaggtgtragccaccgtgcccagcctgaaacatgtatttctttaaataggaataagaacttttataataataataataataaattgatgttttagttgctttgagtgttaaagaatcagtgaattgaaaatttggttaagctgggcatgatggttcatgcctgtaatcccaacactttgagaggctgaggtgggagaatcccttgagcccaggtgttcgagaccagactgggcaacacagggagacccacatctctataaaaaataaataaataaaataaataaagagaattgccatactgggcacataaaaatgcaggacacccggaataaagaaaataacaaaaaagaaaatttgtttttaaagttctcattttctatttattatgcat

SEQ ID NO: 643854 - DNA, 609 bp, Homo sapiens
ttcattgtgacccccaccacctcccttccaacctcccctgctctattccctcctcccaggcattcctcacggggtttggacttctctgaaaaatggtttcatggccccaattacctgcaagccaaagagtaagtcaccgctatttggcttggctatttgcttgacaccaacctactgctggtgggcgcctgtgcttttaaaaagaaagatctttccaaatgataacaaacttccaattacacatttggttccttgaatttattaggtctactgcaatgaacaaactgtccttgttacttgtttccaagagcaactctggttttaaacaaatcaaatttctgtccatttttaatattggtttttcattttggatttaagagaaaaatgtatgagctcttctttcctaaggaagctgtttctccaattattatcctgagttttttttttttttttttttttttttgctttaccttcagtttagcttaagtggtatcaaaggggttgatctttgactcctttgctctgtcttcaraaaaattaataacatatccaatcaaacaatggtctgttatgtcatcttggcacaggtacatatttatttgtaaaaca

SEQ ID NO: 643855 - DNA, 518 bp, Homo sapiens
tgctgaatggataaagaaacaagacccatattatatgctatctaccagaaagccacttcacctccagagacacagactgaaagtgaaggggtttccatggagctggaaaccaaaaaagagcaggaataactatacttatatcaagaaatggactacaaattaaatactaaaagacaaagaagatcactatataatgataaatgcttcaatttagcaagaatatgtaacagttcataaatatctatgcacccaacactagagatcccaggtatataaagcaaatattaatagatctaacaagagagataaacttcaatacaataatagatttcaacaccccactctcagtatggatagaccatccagacagaaaatcaacaaagaaacatcagygttaaacaacacactagaccatagatacgacatttatagaacatttaatccacctgctgcagaatatgcattcttttcatcagcacatataaaattctccagaacagacaatatattgagccaca

SEQ ID NO: 643856 - DNA, 559 bp, Homo sapiens
tcttgagatgtttttctcttttctcacaagtacctaggtgagaacaaagacaccataggacctctcacagactcccaatttaagcttttgtctctggcctcttagaaaaataaatttttctctttgttgaagatttttaattcatctgcagaagatcagaacagagtttgagggattctaagacttctcctgaaagattgacattcaatcatccatattcacccattcattgttttatgtcttcattgcactaatagggaaaaattaataaatgccttacatatgctcaatgaggtgatgaaccataaaatagtcctttacatcaggaagttttaacttctagtaggagagatggacattaaacaaatacktacgcaatgtttagctatactcactggaaagaaagaagagcccacaaatgtgaaaacagcatatgtggaaaccttaagctactatggatatttggaatcggcataattgggaaggatagctaggctttgcttaggtaaaggagagcttcactaggggtgaagaaaaacataaatatctggatataatg

SEQ ID NO: 643857 - DNA, 410 bp, Homo sapiens
cttgtgcaaaaaaagcaagttaacacagcaggcctgggatcactgtcttaaaaaagataactgattgcatcaaacaaaagtagtggcaatgcattggaggtcttataatttaaataaagtaaatgtatgacaaaaaatcacataaaatgctgggggggtgaaagtatttaagattcttttactatctataaagtgctgtaatattaaggtagactgtggtatgtatatagtaaaccacagagcaatcatttaataataacacwaagaggtacagataatacattgaaaaatggagataaaatggaatcctaaaaatacacaatccaaaggatatggaaggtggcaggggatggtaggaaatgaataacacatgagtcaaactgaaaacaaacaacaaagggagtgattta

SEQ ID NO: 643858 - DNA, 613 bp, Homo sapiens
gatgagaatccagtttcattctcctacatgtggcttgccaattatcccaacaccatttgttgaatatggtgtcctttcctcactgtatgtttttgtttgctttgttgaagatcagttggctgtaaatatttgggtttacttctgggttctctattctgttccattggtctatgtgcctatttttataccrgtaccatgctgttttggtgattatggccttctaatacagtttgaaatcaggtaatgtgctgtctctagatttgttctttttgcttagtcttgctttggctatgtaggctcttttttggttccatatgaattttaggattgtttttactaattctgtggtgaattatggtgatattttgatgagaatagcatcgaatttgtagattgcttttggcagtatggtcattttcacaatattgattctactcatccaagagcatgggatgtgtttccacttgtttgtgttgtctgtgatttctttcagcagtgttttgtagttttccttgtagaggtctttcatctctttggttgggtatattccaaagttttgttttttgggggtattttgtttgtttgttttgtttttgcagctattgtaaaacgt

SEQ ID NO: 643859 - DNA, 584 bp, Homo sapiens
ttttttgagagacaataacccatttaatattttgaaatggcttgcccagacagcactcgttggaacatcttttgcttttcctgacctccgtctcaaaggtcttctagctttgaaaaaaatccacaattctctggacttcgtgaggaaagcagctaagatgtctcattgttgcaaatgggattttttcagaatttcagattgctggtgtcaaaaacataaccaaacaaaaaatgtcttaaacttgttcttcactcatcatgttctcttatcccatgcttcccttacacattaagagcatgaatgtagatccaattagactgggctatttcttaacctatattcttgtccttggaaataggaacatgtaccatgactactactgataatggcctgctttaacaaatacttcacagttatctgatgcatactcagaaattacttgagcaamataaattaaatcaagtaggaatgtgtgattacgtagaatatagttttaattagaaggcctgggtcaaacccctggaattagtagttccttagtcattgaaggtggtgccatagattatctaatcatgatctcttta

SEQ ID NO: 643860 - DNA, 560 bp, Homo sapiens
ggctggcctccactgaagaattcaatagtaagccagagagacagatggagactggaagattttgattccttatcctggccaagtttaatatttccaagaacttgtatcccctcaaaagatatattaaagtcctaattcctgtaccggagaatgtgaccttatttggagataaggtttttacagaggtaaacaagttaaaacaagcttattaggttcgaccctaaccttatatgacaggttatataaaaaggggatgtttcttataaaaaggggatgttgggggcacagacacgtgttcagggagaatgctatgtgaggatgaaggcagagatcagggtaakgcttgttcgtaacaaagaatgccaaagattgccagcaaaccactaaaagtaagggataggcatgggacagattccccacccagccctcagaaggaaccaaccctactgacaccttggcctcagacttccagcctccagaactaagagaaaaaatttctgttgtttaagactgtcactaagtttttggtatgtgctttattgtggcagccctaacaagct

SEQ ID NO: 643861 - DNA, 622 bp, Homo sapiens
tgtaatatgtacaatttaagctcttgtgggtggatataacagataatatcatcttgatggtcatgtgtcttgttttttttaaaagtttgaaatcactatccaatgtcctgcctgtatactgtatattagtacttcacaagcacagacttctcaatgtttgtgaaataaataagcatatggatggatgaatggatgggctactggaatgatgaacagatggataaaattgaattcctgattctcttcccacgaatatctcttgtacttggtgcttaaagctgtgggctttgaggtggacattttttgttgatatgtagaaccattatcacttttctgagttcttctctgtccagtataggcataaagactggaarcagaattcctcagttgtccttgctagcttgagtctagctaaattctaccagagaggcactttaatgagatttaaaaacaaagaaaaggagaagctattatcttctggtggcagctgtaggcaggtgagtgggcattggcaggaagccagtaaggggttttgcctgtgacttcatatatcataccataagttgcccatgctggtccataagtaactgagatacttggagaatgattttgttgaaattcc

SEQ ID NO: 643862 - DNA, 527 bp, Homo sapiens
tctctttgtgtggttttggtcttaagacaataatgacctcctaaagggcattgggaagtgttattctctcttctgttttatggaggaaactgtataaaattgtttttaactctattttaaatattttgtggaattctcctgttaaactgcctgggcctggagatctattttatgggagttgtatattgatttttagtttgaggatttgatataaatgtggtaataaatatggagtgtaacacataagtagcaatttttctcaatagggtggtgtagcaggtgtgttagcaaatcacctcatttcttttggacctttataccatttctctgcacagctgcctgtcttcgaatggccagaacctgcatctttgctagcaggctgtattgaaacccacatagctcacatgtaaggttgacaggaaagactgagaattaaatctcccgktgcccccaagcctttaaccaaaaactgacaagtacaggaatataaataccccagtttccctgcccttcactagataacgctg

SEQ ID NO: 643863 - DNA, 584 bp, Homo sapiens
gtattagattaagcaaattgaacatctttggggacatttaaagatggagagatggagatgaaagcttaagtaaagttaggccaacttccagccacttgaactaactgaagttggttcaatatagaatgggaggaaagtagaggcacaggtacagatgattctgaacagtttcgcagtaaaatagagcagataatttattacttctttaaagtaaatctaaattagtccccartttgctttcactaatcccataatcatttactgcatgtcagttacataaaaggcatgacaccaggtgcgatagatacaaagataactatgacatgctgcaagcttgctgcactcatgattagggagaaagaggtgcaaacaagagattacaggtcagtgtggaatgtgttaatgaaggtccaattagagtgctatggtagtgtgctgaaaaatggcagtgactcagccttggctggtcagggaacaattgtttaaaagatacctttaaaagataattgggcttcagcagatggttaaagacctaaggatgttcctagtgagagatatggcatatgcaaagtctggagagcatc

SEQ ID NO: 643864 - DNA, 509 bp, Homo sapiens
ctatctctgtaagtcctcaatggccactttctgtctttctgcgcctccaattcttgtttactcagttccctacgttaaaatctctctgttcaaacaacttgtgtgagctctgttttcctgactgacagtcgttgggggcataaatgagagcctttcacagtcagagccccccagttactgttagtcactcatttattcattcaacaaacatttgtactataatccctatgtatagaagaaggtggctttggttgtatatatacacacacctgtgtaaatactgtttatatattttggtatacgtatagaacacaaatgggagaatacacgaaaaatakatgacagtgattcactctgggaactggaggtattagatgaggaaaagtatgtttcatatagccttttgagtttttaacactccacatattactgttatattttgaaaaactgatgaaaattcatgtattcaatgccatctgagtgccagcaaaggggaagtcctgcagatg

SEQ ID NO: 643865 - DNA, 533 bp, Homo sapiens
ttgtttgatccagaagaaactcaatggtggataagtgagaaggcagtagtagaaatgtcaggcaaaaatgggaagttttcttggaaatccacttcctaaaacctgtgctattgttttaaaggcctgaaatatcagagtatgtttaaagcaaacgattactgacccttctccctccacttccagaaaaatgtgtggattgctgtcctgaaaatgaataaaccaggttaaatagtagaaatgggaaaagttgtgattttgaagtatagtccacaggctggctgtcacagcaggaagctactaatttaatttatatcgttcttaaagtaatctacagagataactagtaaagataaagaaaatgattctatataggaagtcatcattccaggatttgaggaatccttccaagtaattttggcagaagcagcaagyatcatactttcaaagctaataaagaatgcaaggaaacaggacacattttgcaataagtagcaggaaaaataacagaaaaaagtcacaaaaattgctgttct

SEQ ID NO: 643866 - DNA, 503 bp, Homo sapiens
taaatatgtgaatacttaatggtttaaactttccaaaatgatgaaagatacatgtgtccattcaagaaacacagtaaatttcaaggaaaaaataaccactgaattaacacttaacaataaatctgatgtgagagaaagagagaaaacaagagccggaaagacagagagagacagagaaaaagaaatccttaaaacaaccataggggaaaaaaaaagacactttaaaatgtggcagctggactacttattaagagcaacatagtaacctaaatacrttttataatttacttcctttcatcacactaaagatatcttgatttacaatcttgatttttaaacccaacatataaatccttaatttatgaacacctgatactcaccaaggaaaccctaaaagacagaagagccaaaatggccagcaagacagagccaggaagatcctccactgaaagagctgactctcaagaaaaccagcacactctgagcagatcttcaaaaagaaa

SEQ ID NO: 643867 - DNA, 442 bp, Homo sapiens
taagaatccatattcagcatttttgaaaaaataaaattwtgaactaagaattttatgtcccaccaaactaagcttcataaacaagggagaaataaaatccatttcagataagcaaaagctaggggaatttattaccaccaggcctttagagaccggaagagatccttaagaaagtgctaaacatgaaaatgaaggactgttacctagcaccagaaaaacacactcaagtatatagaccatcaacactataaagtaattacacaatcaagtttacataacaaccagctaacaacatgctgggaggatcgaatgtgcacatgtcaatattgaagataaacaagctaaacacccacttaaaaggcatggagtggcaaagtggataaagaatcaagacccaactgtatgctgtcttcaagagacccatctcacatgtgagaacacc

SEQ ID NO: 643868 - DNA, 389 bp, Homo sapiens
atcttttaacttaaataactttgtggaaaaatgtcatgaccacaactaacgaatctttggtgggcaggtgctttgatgcaccaggctcctttaattacaaagatgtgtgttcatgatgatgaagagaacaagtatcggagagtgctagccctctgcgtagaggctttaggattgtatggggtaaactgtatgaggaaaactcaggcaactactgccatcaatgagacttagctagtgagtgccaataccttcatcctcataaataatactagcacagggggtctgtgtgtgccagagggctacatctttatctgtgggcaatctggggtgactsaaatacggggtgggcaaagtcatgcctggaaaacttacaggtcctgccccattga

SEQ ID NO: 643869 - DNA, 389 bp, Homo sapiens
atcttttaacttaaataactttgtggaaaaatgtcatgaccacaactaacgaatctttggtgggcaggtgctttgatgcaccaggctcctttaattacaaagatgtgtgttcatgatgatgaagagaacaagtatcggagagtgctagccctctgcgtagaggctttaggattgtatggggtaaactgtatgaggaaaactcaggcaactactgccatcaatgagacttagctagtgagtgccaataccttcatcctcataaataatactagcacagggggtctgtgtgtgccagagggctacatctttatctgtgggcaatctggggtgactcaaatacrgggtgggcaaagtcatgcctggaaaacttacaggtcctgccccattga

SEQ ID NO: 643870 - DNA, 532 bp, Homo sapiens
ctactaactttttaatacaatgctaaagccaaataacaaggcaaggtgcttctgtaagtgttctcgggaccaacccatttaccagtctgagtgcaggcaaccaccatctcatttaaatcacagaagtttagggaaaatcttatccagtattatggggctgtactagtaaactgcacacaaaggaggccacacgaatttgacaragatttagagatgggattctgacagtcacattttatattaaccagaaaaagagccaccaaattcaaccagagatgcattttttttgttcttttcaacaaagttgaataaaagttgttgatcaaagagtgaagaaatttgaagatagaatttgccttaatttacagatgagccaccagaggctcagagggatgaagtgttttgttgaaattacacagtgggtgccattccaatgacttgtgactccacacattgccttctgatattcattaggaagtcatttgaaggaggaattctaaactttttggaaacatcactgctctctactctt

SEQ ID NO: 643871 - DNA, 513 bp, Homo sapiens
caaaactgtcatatgttgaccttaaactgcatctcttcaacttcaaatcgttgcacaaattggtcctgccctactccttcctgaaaaatgaagaactacacaagaggaatcaaatatccagtctgaacagcaaaaggacacctcatcaaatagcaaaaagcaacttcaccaataattttttttgaagtctcagggtagacagaaacctcaaaattttacccactgcgtgaatccctacacagttcacaaatatcctggctctttctccttccacccaccatgtaggatttacttccacaagtacttgaacrtaattctatccaggtaaactttctttagtccatggatgttaggggaagcatgtgccattttccaatgaaagctttagaagctagtgcatgtttggccacattgtttgcctcagccacaaatactggcatattccagatagtggccgcttcatcagtcttgcagagaggatggtggagagaaaccggtgcttccaagtaaccc

SEQ ID NO: 643872 - DNA, 476 bp, Homo sapiens
tgctgtcttcctcgatatattctgaatgggctcacttgttttcactaggctttgcttggtattagaatttgtggttgatgcggctcatttatcagccacgtatggagagattctgaaagatgttttgtcattttccactgtcaaaatgatacattcgcttctgtcctggtttctttgaaagagcttgagttgcacttattttgcagggtaaagcatggaaataaatgatacaaaactaagtaaacagaggggaaaaaacaggactcagaaaaccaaaaaatagggggcttcatttttaagcacgcatttttagactaagrggagataaaataaaatgtccatagctacatttttttaggattgatccggttacctacttgcatcctgactattacagtgagtcttcaattcttgtggatacagatatgaaaagagaagtaactttcccaagttatggtgggagaatagtttatttg

SEQ ID NO: 643873 - DNA, 590 bp, Homo sapiens
attttccaaacttttatgctctgcttcccttataaaactgaatggctttaacagcacccaaattacatcctgagtgctttgctgtttagaaatttcttctgccaaataccctaaattatccctctcaagttcaaagttccacaaatctctagggcaggggcataatgccgccagtctctttgctaaaacataacaagagtcacctttgctccagttcccaacaagttcctcatttctmtctgattccacctcagcctggactttattgtccatattgctatcagtattttgggcaaagccattcaacaagtctctaggaaattccaaactttcccatatttttctttcttcctctgagccctccaaactgttccaacctctgcctgttacccagttccaaagttgcttccacattttagggtatcttttcagcaatgccccactctactggaaccaatttactgtattagttcattttcacactgctgatacagacatacccaagactgggcaatttacaaaagaaaaaggtttaattggacttacagttccaggtggctggggaaggtcacacaatcatggtggagggc

SEQ ID NO: 643874 - DNA, 517 bp, Homo sapiens
tcctaatatatttgatcatttccattattttaagttgttatgaaaaatatttgggtaatatcttaaatatatcattctgaagtggaatagctacaggaggttgcaactgtaagaaataagcccaaagcattctccaaggtgacttctgtgctaccttatttaacattaacataaaagttaaaactttactatggtaagaacaattktttttaaatttgttgttaaaaaaaggaaatcaaaacaatctagagaacataagtcaagggttatttaatcttttactaagtcagttgggggtgatttggagagcagttgatagtgctagagtgagcaggaatctagcaaaaaagagctaattgctgtctaatcacgcttgcaatggaatgaatacactagtaagtattacagttaagccaggcataatggttggcttaaatacattctgttatatcagtgttataaccagtatatattcagcctcaggatgggaaagagttgtagttatgtctatagttcc

SEQ ID NO: 643875 - DNA, 570 bp, Homo sapiens
ttctccacatcctctccagcatctgttgtttcctgactttttaatgattgctattctaactggcatgagatggtgtctcactgtggttttgatttgcatttccctaatgaccaatgatgatgagctttttttcaaaaagacagcaattttcagtgaaacaaaattagatctccaagaggtattttattgcaaaaatttcaaaataatttaattgtcatgtcttttagttgacaaatttccgactgaaaataaaaataaaaamctatatacagaaaggattgagaggtagaggcggaggggcatagagggagggaggtggagacacacagggaaggaaggaggaaagaattaaattaaaaaatataaagaattactaccctgattgccccacttaatatattcctcttcaggggcagtggtagagaagatataatgctagaaggtaaattgaatcaagaaaacatttttttaactttacagctttacagaactagcacctgggcaattcctacctttatcttattcattgaagaaaaactatttgtcatcaagacttttaaattatctcct

SEQ ID NO: 643876 - DNA, 570 bp, Homo sapiens
ttctccacatcctctccagcatctgttgtttcctgactttttaatgattgctattctaactggcatgagatggtgtctcactgtggttttgatttgcatttccctaatgaccaatgatgatgagctttttttcaaaaagacagcaattttcagtgaaacaaaattagatctccaagaggtattttattgcaaaaatttcaaaataatttaattgtcatgtcttttagttgacaaatttccgactgaaaataaaaataaaaacctatatacagaaaggattgagaggtagaggcggaggggcatagagggagggaggtggagacacacagggaaggaaggaggaaagaattaaattaaaaaatataaagaattactaccctgattgccccacttaatatattcckcttcaggggcagtggtagagaagatataatgctagaaggtaaattgaatcaagaaaacatttttttaactttacagctttacagaactagcacctgggcaattcctacctttatcttattcattgaagaaaaactatttgtcatcaagacttttaaattatctcct

SEQ ID NO: 643877 - DNA, 434 bp, Homo sapiens
gcttctttacacattataaatgtaacctggcattatatttaagctaagaacatgcatgtttttaatactcgaatttcaactcaagagaaaaaaaagttctatgttacactagtgtgatggattttttaattactaaatgctaatattaagggtaatttgaggtaaaacaaaaaataaaaagttcatgtagtaatcaaagcatctactctaggttgttaaaaataaaaatatcttggkaattattttattattctttaacactaaagaggtttacctcaggtttttaaataaaaccttcaacagaaatattagcaatgtgagtatcagagcactggcaaagaaaaaagcaaaagccgatggcatttttcagaccatattaccagtagctatgttactgtataaattatatgataacatattttgctattaatgtc

SEQ ID NO: 643878 - DNA, 604 bp, Homo sapiens
cacattaggaatgaaagcctcattgaagttaaatgactcatcttccaaaacacacacttagggaagattcacttcttggtctaagagatccccccaaaccacaccgagtctgccacacaggatttctgctgtgaatttctaaatgtagtcagaaaagttgaggatatatagactataatggagaaagtaggctatgaagttgaaggcagattatcttgaaagcatttcttgtatacagtggtacttacagatatgtcatcactaaagtcaatttcatccaaatcaaggtattcaggggcttccattattcttccttgcacattttgagtacggtcaaatacttataaattcctgaacgagacagaagcagaaaagaaaggcaaaaaaatttagccgttttacaaccaaaaataatgtctayatttaaacaaataagatgagaagggttattgggtgctagtgttgccttggagcacatttccttccttcaactgtccacagcctggctttccagaagcagcaaacacagcgtctccatggtccccagtgtggctccccagtgggcactcaaagtcctttgctttatttgatatgtgcctgtttg

SEQ ID NO: 643879 - DNA, 587 bp, Homo sapiens
gaactgtcctcccccaaataacagaatatacattcttctcatttgcacatggtacatactggaaaactgaccacacaatcagccataaaacaattctcagcaaattaaaaaatcccaaaatcatactgaccatactctcagaccacagtgcaataaagagaaatgaatactaggacggccactgaaaaccatatacatagtacatgtgctgctgaagcaagcayagaaaaccatataatcacaaggaaatgaaacaacctgcttctgaacaacttctggctaaacaatgaaaataaggcagaaatgaaattctttgaaactaatgagaacaaagatacaacataccagaatctgtgcaacacagttaaagcagtgtaagagggaagtttatagcgttaacctaccaccacaccagaatgaactagaaaaacaagagcaaatcaacccaaaagctaggagaaaacaagaaataacaaaatcagagctgaactgaatgaaattgaaatctgaaaaaccatacacaagatcagtaaattcagaagtgggttctttaaaagaaaaaatacaattgctagatcactagctag

SEQ ID NO: 643880 - DNA, 470 bp, Homo sapiens
taaaacattaatgaaggaaatagaagaaaatgcaaataaatgaatatcccatgctcatgaattaraagaatgttgttaaaatgttcatactacctaaagcaatgagtagattcaatgcagtccttataaaaaccccaatgacagtatttacagaaatcagaaaaaaatcataaaatttgtatggaaccacagaatatcccaaatagtcaaaggaattctgagaaaaaaaaagacatcatactacctgatttaaagttatattacaaagatatagtaatcgaaagagtataatggcataaaaccagacacctagaccagtggatgagaatagcaatctcggaaataaatccaaacatatacgttcaattaatttttgacaagggcaccaaaaagacacactggggaaaggatagtctcttcaataaatagtgctgggaaaactggatatccacatgcaaaattatgaaatc

SEQ ID NO: 643881 - DNA, 470 bp, Homo sapiens
taaaacattaatgaaggaaatagaagaaaatgcaaataaatgaatatcccatgctcatgaattagaaraatgttgttaaaatgttcatactacctaaagcaatgagtagattcaatgcagtccttataaaaaccccaatgacagtatttacagaaatcagaaaaaaatcataaaatttgtatggaaccacagaatatcccaaatagtcaaaggaattctgagaaaaaaaaagacatcatactacctgatttaaagttatattacaaagatatagtaatcgaaagagtataatggcataaaaccagacacctagaccagtggatgagaatagcaatctcggaaataaatccaaacatatacgttcaattaatttttgacaagggcaccaaaaagacacactggggaaaggatagtctcttcaataaatagtgctgggaaaactggatatccacatgcaaaattatgaaatc

SEQ ID NO: 643882 - DNA, 641 bp, Homo sapiens
aactatgtaaataacttacagtagagggcaccaaaggaacacagagggaagagatctgtaacttggaggggaggggaaagcttagaggatcagtacttttcttcagcagaatactgaagttcaaatagtatggggtaatggaaatgaagcagaattattctccaagcaaaggaaataacgtgtgaaaaactgcggtttcttcatgtggctagaggatcatgtgtgaagagtgcacgagttagggaaggatcagatcttgwaagccttcagtgtctaacaagtttctggacattatcctgaaggttatagggagttactgagggtctctcaaacatcaacttttatatttgtaattatgtatataaatttgaaaaaattcaaacctatccaaaagttgtaagaaaaaacaatatttgtataccttgcatctagattgatcttttgtgactatgtcacatttgctatatttctttatatatgtgtatgtgtgtaaatatacatataattttgctgaaccatttgaaagttgaggacatcctgatccttcactcctaaatacttcagcacagatttcagaagtacattctcttatataactataatataattcttaaaatcaggacatttaacatagacatagt

SEQ ID NO: 643883 - DNA, 527 bp, Homo sapiens
gaatttgccagtgaatgatggaaatatcgtcttccctgaaaagaaaggatgataagtactactcaggtgagactccgcygccaagtgccaaagggtcattccctccttctccctgcagcctttttcaagaagtcaaggctaaagaaggaaaggaggatgggggaaatcagaactcctgcatgaattacaatggactacccagacagccaggagtgatcctgtcctaaagaaaaatctctcagtgatcagaaaagggccagggatactctgcagctggagctctgaccccatcctgggttcacagaagctttcagggaactgagtccttctcagaaaattaaaaagtgctaataacaagagacccatcttctaccacctgtcaggctctgttccaagtctttttatttaactctcaaaagaactccattagatagatactagtaccattttaaagaaaaagaaacataggcagagagattaagatactcgcctgttattatactgctaggaagtggcagagctggttg

SEQ ID NO: 643884 - DNA, 608 bp, Homo sapiens
cagcaactcctgcaattgcctcagtkcctggcaccaaatttaaatgggcttttgatgcttcgaaaatttgttcttttaatttggaaatgtctaaagtgagattatcttctcttccctgtagatggcgtctaaccatgtcccagtgatgctcagactcattataaatttggggtgtaatacaaaaatctgacgtattccagtcacactgtaactggaaacgatgttctaagctcatgagtctgtctcccatccaaatgacagtttgtctaagatcattaatttgatttgccaatttttgatcaatactagattgtgaattccacaatcttgtagaatttttttgccaatcattaacaaagtttactgactgaacagaagagtgcaatgcaactcctgctacagcagccgtagctgtgactgcaattaatcccataatcactgcaattaaagtaaaaatgaatcttttggatctatttaaaacaccttttaatacttcagtcaaaatatggacggatggcaaggcctcccacggtcggtccatggacacagggatccacacgccctctcttgctctcaccagcagaatacggtgttgccaattaaaagtt

SEQ ID NO: 643885 - DNA, 608 bp, Homo sapiens
cagcaactcctgcaattgcctcagtgcctggcaccaaatttaaatgggcttttgatgcttcgaaaatttgttcttttaatttggaaatgtctaaagtgagattatcttctcttccctgtagatggcgtctaaccatgtcccagtgatgctcagactcattataaatttggggtgtaatacaaaaatctgacgtattccagtcacaytgtaactggaaacgatgttctaagctcatgagtctgtctcccatccaaatgacagtttgtctaagatcattaatttgatttgccaatttttgatcaatactagattgtgaattccacaatcttgtagaatttttttgccaatcattaacaaagtttactgactgaacagaagagtgcaatgcaactcctgctacagcagccgtagctgtgactgcaattaatcccataatcactgcaattaaagtaaaaatgaatcttttggatctatttaaaacaccttttaatacttcagtcaaaatatggacggatggcaaggcctcccacggtcggtccatggacacagggatccacacgccctctcttgctctcaccagcagaatacggtgttgccaattaaaagtt

SEQ ID NO: 643886 - DNA, 402 bp, Homo sapiens
gaattccacaatcttgtagaatttttttgccaatcattaacaaagtttactgactgaacagaagagtgcaatgcaactcctgctacagcagccgtagctgtgactgcaattaatcccataatcactgcaattaaagtaaaaatgaatcttttggatctatttaaaacaccttttaatacttcagtcaaaatatggacggatggcraggcctcccacggtcggtccatggacacagggatccacacgccctctcttgctctcaccagcagaatacggtgttgccaattaaaagttgaatcaatgcaagtaaacaatctacaattttcacaggttatagtctgggagtatggtttaataactatatttcctacaactagcatataagggggctttacgcaactt

SEQ ID NO: 643887 - DNA, 402 bp, Homo sapiens
gaattccacaatcttgtagaatttttttgccaatcattaacaaagtttactgactgaacagaagagtgcaatgcaactcctgctacagcagccgtagctgtgactgcaattaatcccataatcactgcaattaaagtaaaaatgaatcttttggatctatttaaaacaccttttaatacttcagtcaaaatatggacggatggcaaggcctcccacggtcggtccatggacacagggatccacacgccctctcttgctctcaccagcagaatacggtgttgccaattaaaagttgaatcaatgcaagtaarcaatctacaattttcacaggttatagtctgggagtatggtttaataactatatttcctacaactagcatataagggggctttacgcaactt

SEQ ID NO: 643888 - DNA, 402 bp, Homo sapiens
gaattccacaatcttgtagaatttttttgccaatcattaacaaagtttactgactgaacagaagagtgcaatgcaactcctgctacagcagccgtagctgtgactgcaattaatcccataatcactgcaattaaagtaaaaatgaatcttttggatctatttaaaacaccttttaatacttcagtcaaaatatggacggatggcaaggcctcccacggtcggtccatggacacagggatccacacgccctctcttgctctcaccagcagaatacggtgttgccaattaaaagttgaatcaatgcaagtaaacaatctacaattttcacaggttatagtctgggagtmtggtttaataactatatttcctacaactagcatataagggggctttacgcaactt

SEQ ID NO: 643889 - DNA, 603 bp, Homo sapiens
acattgttcagggctggtaccacaatggcactgtgtcaaacaaaacagatcttaaattataaacatgtaattattgatttctttcccattggctttgtactttgtttttggctttggacatattctctactaattcaacagaccattccagaatgagcagctgaggtatacacttggcttcatcaaggaggcttcagagttggttaaaaataaggagcattgagccacgtgtggtggctcatgattatagtctcagctacttgggaggctgaggcaggaggatagtttgagcccaggagtttgaggccagcctaggcaacacagcaagactctgtctcaaaaaaacaaacaaacaacaacaacaaaaaccaaggagaactgaataactagtatgaatcacagtccattgtcatacaagcagaatatggattsgacagtggcttgaattcctggggatggataactaggttgtccataactaggttatccatccccaggtttctgcacaatcaactattggtctgagaaggagtctactagactctctaatgtgcagcatgagcattcattttctcaaaaagaaactctggaaagatgacaaaa

SEQ ID NO: 643890 - DNA, 585 bp, Homo sapiens
gagtttaaggatagaagcaatcagagctgaatatcagaagatgcctgcatttctccatgaagaaaaacaacaacatttggagaggctgtgaaaggagggcgaggacatttttcagcaactcaatgaaagcaaagccagaatggaacattccagggagcttttaagaggaatgtatgaggatctgaagaaaatgtgccataaagcagatgtggagctactctagtacgaactgaccatggggtatcatgatgatgaagattcacgtgcatgggtgtttttcctctctcctgaaatccgtctccccctttacttccatgatttgtttccaaaaacacgatttgataactaatgctacttggttgggagggtatagcctctcctagtgattctaccagaacgaaggtccctcctaytttatccaccagcaacaaaactttgtggaatgaccaaggtaacagacagccccaagaaatatttcccatcaaaagtcagtgatttatttaggatttttgaaagtggataaaatgagaagtgattcattggcatttaggctaatttggagacatgtcatgatggagaagttgg

SEQ ID NO: 643891 - DNA, 593 bp, Homo sapiens
cctggctgttgttgtaacctggttgagtgtacatgaactcggggctgtgctgacatgccagccccactgctgtctcagtcccctctgaaacttttggcattgacgagggagggaggccagggggctctgagagcaccttggtgacagcctgcagacgccccttgggatgaacagcttgggctctgtggatggcatgttgatgttgccaggaagccatcaagctcttgggtgaaaatgggtgggtccctggtgaaacaggaccttcaagcgagggacggcctaaagcctgggggctggcctgccatttctgggtggagtcagtgatccaaggtaagaacttatggtgctttttttcayacctgccaatggccagccataaatcagtcagcatgcacttcctcccttctgagaccataaaaaccccagactcagatgtcaggacaaccagctgtggaaaggagctaccagcagtaggtctcttctctgctgagaggtggacactcatcaggatagcctgcctgtggtacagagctacccactacaggtctcctttctgctgagagctggacactcattaggacaacctgcctgca

SEQ ID NO: 643892 - DNA, 611 bp, Homo sapiens
cccttcccagtacttctatataaatattactctaagatttacaatacaaattaatatccaattgtttgagagaattgcaataactaaagaatgcttatgatcccacatattttaatctgaaaatacacacgtgtgcacasaggcacacgcacacgtacatgacttcaaaataaattctcaggtatactatatgactatcaaaattgaaatctctgtaaaacttaaaaattgtgctgtaaaaatagtattaaatactcaagaaaaaataaaactgctaagaattgctgagggtagtttggcaaaaatgagaatacaaaccatgagaatacagagtgatttttcttttttatttaccctgaggagccattaatttatttttctgtaactgaacaacacattttaactttcgtgcagcctctccaccagtatattgagaattttgaaagaacacccttgagctgttccttgagattgacttttctaattagcttttggataacaaatttgttcttggttttatacttcatcttccacattttccaacttcatcactgaccctgaatgtatcttatcttccttgttatgatctaggcctttgacttaattattca

SEQ ID NO: 643893 - DNA, 611 bp, Homo sapiens
cccttcccagtacttctatataaatattactctaagatttacaatacaaattaatatccaattgtttgagagaattgcaataactaaagaatgcttatgatcccacatattttaatctgaaaatacacacgtgtgcacagaggcacacgcacaygtacatgacttcaaaataaattctcaggtatactatatgactatcaaaattgaaatctctgtaaaacttaaaaattgtgctgtaaaaatagtattaaatactcaagaaaaaataaaactgctaagaattgctgagggtagtttggcaaaaatgagaatacaaaccatgagaatacagagtgatttttcttttttatttaccctgaggagccattaatttatttttctgtaactgaacaacacattttaactttcgtgcagcctctccaccagtatattgagaattttgaaagaacacccttgagctgttccttgagattgacttttctaattagcttttggataacaaatttgttcttggttttatacttcatcttccacattttccaacttcatcactgaccctgaatgtatcttatcttccttgttatgatctaggcctttgacttaattattca

SEQ ID NO: 643894 - DNA, 611 bp, Homo sapiens
cccttcccagtacttctatataaatattactctaagatttacaatacaaattaatatccaattgtttgagagaattgcaataactaaagaatgcttatgatcccacatattttaatctgaaaatacacacgtgtgcacagaggcacacgcacacgtacatgacttcaaaataaattctcaggtatactatatgactatcaaaattgaaatctctgtaaaacttaaaaattgtgctgtaaaaatagtattaaatactcaagaaaaaataaaactgctaagaattgctgagggtagtttggcaaaaatgagaatacaaaccatgagaatacagagtgatttttcttttttatttaccctgaggagccrttaatttatttttctgtaactgaacaacacattttaactttcgtgcagcctctccaccagtatattgagaattttgaaagaacacccttgagctgttccttgagattgacttttctaattagcttttggataacaaatttgttcttggttttatacttcatcttccacattttccaacttcatcactgaccctgaatgtatcttatcttccttgttatgatctaggcctttgacttaattattca

SEQ ID NO: 643895 - DNA, 619 bp, Homo sapiens
gtaatagcgttatgtcaaaaaaaaacaatgtwcattaattaaaatactttattgcttaaaaatcatcatctgagacttcagcaatttgtggggaagggtcttgcttcaatgctgagtgtcactaactgatcagactgctcaagattgtggtagctatgacaatttctacaaatacgacaacaatgaagttcgccacatagattgattcttccattcataaaagagttctttgcaggatgcaatgctatttgataatattttattcatggtaaaacttctttcaaaattagaatagaaaaaacatagtcaatgctctcaaactcagctgctgctttattaactacattgatataatattataaattcttatttatttatttattctatattttttagagatggggtcttgcgtattccccaggctggccacaaattcctggcatcaagtgatcgtctcgcctcagccttccaaatagctgggattacaggtataagccaccacccttgtctatgtaatgttctaaactctttgttgtcatttcaacagtgttcatagaatcttcaccaggagtagactccatttcaaaaaacctttctttgcttattcataagaagcagc

SEQ ID NO: 643896 - DNA, 619 bp, Homo sapiens
gtaatagcgttatgtcaaaaaaaaacaatgtacattaattaaaatactttattgcttaaaaatcatcatctgagacttcagcaatttgtggggaagggtcttgcttcaatgctgagtgtcactaactgatcagactgctcaagattgtggtagctatgacaatttctacaaatacgacaacaatgaagttcgccacatagattgaytcttccattcataaaagagttctttgcaggatgcaatgctatttgataatattttattcatggtaaaacttctttcaaaattagaatagaaaaaacatagtcaatgctctcaaactcagctgctgctttattaactacattgatataatattataaattcttatttatttatttattctatattttttagagatggggtcttgcgtattccccaggctggccacaaattcctggcatcaagtgatcgtctcgcctcagccttccaaatagctgggattacaggtataagccaccacccttgtctatgtaatgttctaaactctttgttgtcatttcaacagtgttcatagaatcttcaccaggagtagactccatttcaaaaaacctttctttgcttattcataagaagcagc

SEQ ID NO: 643897 - DNA, 619 bp, Homo sapiens
gtaatagcgttatgtcaaaaaaaaacaatgtacattaattaaaatactttattgcttaaaaatcatcatctgagacttcagcaatttgtggggaagggtcttgcttcaatgctgagtgtcactaactgatcagactgctcaagattgtggtagctatgacaatttctacaaatacgacaacaatgaagttcgccacatagattgattcttccattcataaaagagttctttgcrggatgcaatgctatttgataatattttattcatggtaaaacttctttcaaaattagaatagaaaaaacatagtcaatgctctcaaactcagctgctgctttattaactacattgatataatattataaattcttatttatttatttattctatattttttagagatggggtcttgcgtattccccaggctggccacaaattcctggcatcaagtgatcgtctcgcctcagccttccaaatagctgggattacaggtataagccaccacccttgtctatgtaatgttctaaactctttgttgtcatttcaacagtgttcatagaatcttcaccaggagtagactccatttcaaaaaacctttctttgcttattcataagaagcagc

SEQ ID NO: 643898 - DNA, 619 bp, Homo sapiens
gtaatagcgttatgtcaaaaaaaaacaatgtacattaattaaaatactttattgcttaaaaatcatcatctgagacttcagcaatttgtggggaagggtcttgcttcaatgctgagtgtcactaactgatcagactgctcaagattgtggtagctatgacaatttctacaaatacgacaacaatgaagttcgccacatagattgattcttccattcataaaagagttctttgcaggatgcaatgctatttgataatattttattcatggtaaaacttctttcaaaattagaatagaaaaaacakagtcaatgctctcaaactcagctgctgctttattaactacattgatataatattataaattcttatttatttatttattctatattttttagagatggggtcttgcgtattccccaggctggccacaaattcctggcatcaagtgatcgtctcgcctcagccttccaaatagctgggattacaggtataagccaccacccttgtctatgtaatgttctaaactctttgttgtcatttcaacagtgttcatagaatcttcaccaggagtagactccatttcaaaaaacctttctttgcttattcataagaagcagc

SEQ ID NO: 643899 - DNA, 195 bp, Homo sapiens
actagtttttttagtaagaagacaacattctattgaacttgttttaatgtttaatgctttacagctttaaaatctatgctaattgaaaaaaacagaatgagcaatggtagtgtaacactggaaaaagggagaaattgttaccttactcatgaggcacttagtagccttatatgktatttaggtgtcttgaattga

SEQ ID NO: 643900 - DNA, 492 bp, Homo sapiens
tactttgctttcattcatctctaatattttggatggggaatcatccaaagcttctgagtgcatgaaggtcaagtgtgccagtgtgcagctgggcttcttttccagaattaaaagtattttgggtggtgctgaaggtcagcggaagaagtaaagattgcaagaaaggagaaacatgggcttggggagatcccagaattggggacagaagacctggcactaggctacagcacttagcacctctgatcttgtttttcctcacctgtaaaaggagattaacaatgcttttctgcccgcctcttggggagaagggaagaatataattggtaaaaaaaaaaaaacaagaaaagaaaaaaaaaaagttstgaaaaataagcaacactgtctttatagaggtagccaagcattattaattatccaccccatatcactggtagatacctgtattcaagcagtcacattttagaagtcatgaagttggtgctaataaaccta

SEQ ID NO: 643901 - DNA, 561 bp, Homo sapiens
tttcaacttttccttattcagtataaagttagcattgctttttcataaatggcctttattgagttaaggcacataccttctattcctaacttgttgagagttttcatcataatcaaggctgaatttcatccaattcttcttctgcatatgcaaaagctacaaaaatkaaaatacttaatgtgatggctaatacagggtgtcaaattgattggattggaggatagaaagcattgatcctgggtgtgtctgtgagggtgttgccaaaggacattaacatttgagtcagtgggctgggaaagggagatccactcttaattgggtgagcaccatctaatgagctgacagtgaatataaagcaggcagaaaaacgtgaaaaagagagactggcctaagctcccagactacatctttctcctgtgctggacacttgcagccctcaaacatcagactccaagttcttcagctttgggacatggaccacctctccttgctcctcaaacttgcagacaacctattgtgggatctcatgatctctctagggaagcccaactaatacaccta

SEQ ID NO: 643902 - DNA, 579 bp, Homo sapiens
gaaagctttcaacttttccttattcagtataaagttagcattgctttttcataaatggcctttattgagttaaggcacataccttctattcctaacttgttgagagttttcatcataatcaaggctgaatttcatccaattcttcttctgcatatgcaaaagctacaaaaatgaaaatacttaatgtgatggytaatacagggtgtcaaattgattggattggaggatagaaagcattgatcctgggtgtgtctgtgagggtgttgccaaaggacattaacatttgagtcagtgggctgggaaagggagatccactcttaattgggtgagcaccatctaatgagctgacagtgaatataaagcaggcagaaaaacgtgaaaaagagagactggcctaagctcccagactacatctttctcctgtgctggacacttgcagccctcaaacatcagactccaagttcttcagctttgggacatggaccacctctccttgctcctcaaacttgcagacaacctattgtgggatctcatgatctctctagggaagcccaactaatacacctagcaacaaactta

SEQ ID NO: 643903 - DNA, 544 bp, Homo sapiens
cacctctgccacactctcatgagcttggtaagtagcaggggtgtaaaccccaacagatttcctgtgactctaccctcttaccacmcactcaagtgacattataagcatacttttacatttgatcttatttatgcataatttttttataacatttctgacaacagcccacacaacgaaatgagtctggcttacagaacacacgggcgaggctggggtagcatgtttcaattactttattccaatgtgaaatgaagactgatgatttaaaaacaagacaaagttgtttatcagctgtggggtggctacacttgctagctcatgctcacttcctttgaaacaaggtatctggacagaccatattcataagtagctcttcgcaaaaccccagacagaagccccagtcagacacagctccctcaggctcacagggcagcaacctcctcctccatgttaggctctgacagcaggcaagggaagaagcacaggccacaggggacagggagatgtcccggactgtagggatccccaaatgccccagaggtat

SEQ ID NO: 643904 - DNA, 571 bp, Homo sapiens
gaaactcctccagttctccctcttggcaattgaatggtcggggggaactgaccttagtgaaaattgggtatctaaattagtggaatttgaacctttgactgtgcatgaagtgctgcaggggatttcagtcagcaaaggagatgccagggggatctcttagcatagatggtgcttgcttactgcttataagttaatgtgttgagatagaaatcaattgctacaagataaatgtaagctggaaaaagaaaacactactctgacttccagactggccctggctcaatttcaggcctatgtcttgactgatcaggctcaaagctaacagattattgatgaraaaaacagctgtgcaagtggtgtggtcagggtaaaactgaagaacgagtcagctggggcttggtgtgggtaaaaacccagttcctatctgaagaatgggaaattagcctttacaaatttcaagaacctgcacaaactataaaattgctttgcatcccatggaacgcaaggaaaaagtccattttaccaaaggctatggttaaaatactagaatttgcaacccctaccactaaaa

SEQ ID NO: 643905 - DNA, 610 bp, Homo sapiens
atagaaactcctccagttctccctcttggcaattgaatggtcggggggaactgaccttagtgaaaattgggtatctaaattagtggaatttgaacctttgactgtgcatgaagtgctgcaggggatttcagtcagcaaaggagatgccagggggatctcttagcatagatggtgcttgcttactgcttataagttaatgtgttgagatagaaatcaattgctacaagataaatgtaagctggaaaaagaaaacactactctgacttccagactggccctggctcaatttcaggcctatgtcttgactgatcaggctcaaagctaacagattattgatgagaaaaacagctgtgcaagtggtgtggtcagggtaaaactgaagaacgagtcagctggggcttggwgtgggtaaaaacccagttcctatctgaagaatgggaaattagcctttacaaatttcaagaacctgcacaaactataaaattgctttgcatcccatggaacgcaaggaaaaagtccattttaccaaaggctatggttaaaatactagaatttgcaacccctaccactaaaaaggaggcccagaaatgtattggcttgtttgaattct

SEQ ID NO: 643906 - DNA, 571 bp, Homo sapiens
gaaactcctccagttctccctcttggcaattgaatggtcggggggaactgaccttagtgaaaattgggtatctaaattagtggaatttgaacctttgactgtgcatgaagtgctgcaggggatttcagtcagcaaaggagatgccagggggatctcttagcatagatggtgcttgcttactgcttataagttaatgtgttgagatagaaatcaattgctacaagataaatgtaagctggaaaaagaaaacactactctgacttccagactggccctggctcaatttcaggcctatgtcttgactgatcaggctcaaagctaacagattattgatgagaaaaacagctgtgcaagtggtgtggtcagggtaaaactgaagaacgagtcagctggggcttggtgtgggtaaaaacccagttcctatctgaagaatgggaaattagcctttacaaatttcaagaacctgcacaaactataaaattgctttgcatcccatggaamgcaaggaaaaagtccattttaccaaaggctatggttaaaatactagaatttgcaacccctaccactaaaa

SEQ ID NO: 643907 - DNA, 617 bp, Homo sapiens
gagttaactggcaccaaggtggcaacaggcacatatctggaggaggtgaaaagtagaatgacatttgctctaatcaaacataaaggaggaaagagctttctaagagaggctatggtgtcccttaggtgttgcttgtacctaagtcctgctgttgaagcctttgcttatgtagatgcaaacacacaggcacttccctggatctagactttgccctctaaagcccagaacaaaggtgtccatccatgaagaaccaagttttcttatctctcaccctcactgtggggatggagtggaggcgaaggaaaggggggagaaaaggaaagcccttgagcgcaataatctagagagaaatgtactttctaccagcaatgtaartatgatttatgtgactcctcccagctaggctccttttatttcctcgagttggaaatgcagaccagaggtttgtacttattttctgtcccagaaggcaactgtcttggtagaggaaggtttgatattggtccaggatctgaggtagagatcacagccttgagacaatgccaaggcagccaattaagaaggtgttgacaacactttccaggaacaattttctagatgcttaactttgaccgaag

SEQ ID NO: 643908 - DNA, 555 bp, Homo sapiens
taattcgctgtaactatttcaatctcttttttgagtttagctgataaaatttggaatttctttactttgttaycttaaatttctttcagttttttttaaatacagctattttgaattctctgtctgaaatgtcacatatctctttttctccaggatttgtccctggtaccttatttagttcacttggtgaggtcatgttttcctggacagtgttgatgctagtagatgttcttcagtgtctggacattaaaatcttgggcatgtagcaccatatgagaggtttaaaaaaataaaatttaaaaagagtataggtgagtatttattgtagtcttcactgtctgtgcttatttgtagctgtctttcttgggaaggcttttcacatatttgaaaaaaacttgggtgttgtgatctaagccatatctgctttatggggcaccttatacccaataatgcggtaattcttccagactcagagaagtaccaccttgacagccttcaacaagatccaggagaattttctggattactagccagagactttttccttacccttat

SEQ ID NO: 643909 - DNA, 497 bp, Homo sapiens
cagaaagaggtccagagttgtctggggtacctttaatatgggcacaaatcccatttagtaagcctccatcttcctaacctaattacctcccgaaggcccccacctcttagtaccataatactaatgatgaggattttaacagataaattttgggggacaaaaacakttaatgcattgcagaccatctcatttatccttgtaacaatattttgaagtagatactatttttattcatattttacaaatgacaaaactgaaggtccaaaagttgctttgcccaaggcacattgaaccagtaaaggaagatctagtcactgaagccaggaagtttggctccagtactcttaacctggatgttgtagtaccttcccaataaaaacaagtacttggaatcctggagtgaagaacagtgaaattcaaatcagggctgctctttttaaaaggacagcctttgaaataaaaaaatatgggcttgagttccagcttcattactttgt

SEQ ID NO: 643910 - DNA, 589 bp, Homo sapiens
tctttaagggatggttaaatctgatgtgttaaatgaagcatctattcttgttaacattttaaaaaataacatttcgagaaaagcatatgcttgagtgatccaaacctcagcactctaacatgactagtcttatctttgcatatctacttcaatctgtggaccatatgtctacctatttatatcagtataaatactatacctaaattttttttattaaagacatgtatgacttaaagtcaggattyctaaaactgcctcgaatgttgtatgaatattttcttaaagcaggaaaaaaatccataaagaaggccatattgaagaagcagaaaggagatgcaagaatcattttattttggcagacagggtgcctgcagtttcccaaacagcaacttacagagagggctcattgagaaaatttctcattgttcactataataaaatttccatctaaaatgtctgcctatagttttttagcctacatatggtacgtcagctggtgaaaaatacctaaaatctcaagtaagaaactcctgggaaacctaatagtaattaaataaacaaaactagaatattagtttacttagaacaa

SEQ ID NO: 643911 - DNA, 578 bp, Homo sapiens
ggcctggctgtattcacttgtgtgaagtttatctgcaaaaaggcatatttctataattcagctcagaaatagaaatgcttgtatttctactaattaacaattgatttcttaattaagaagcatgacattgttgattacttctggagacccaagaataaaacacctcattggtaatgaaatttcagaacacaaagaactctttcttccatcttcagatgttttcccctgaagaatatgcaacattgctaccttgattgaaatattcatggtacatacttgtagaatttccaaaacattttcaaatactcctttggttgatcttggatgaagaaccagatagaaaattttaaaacaaagtttatgaatatatgactgactaagttttgttgaatgtagcagtcaattcgaatagcaaacaaatagttaaaaggtgaatcaaactttcaatcaarttgaacctttttcttaagcacccaagagaaaaaaacaaaacaaaataaaaacccccaaacgagaagaagcacattctctaaaactgcttatgatctttatctttatatttatctttattagactgc

SEQ ID NO: 643912 - DNA, 578 bp, Homo sapiens
ggcctggctgtattcacttgtgtgaagtttatctgcaaaaaggcatatttctataattcagctcagaaatagaaatgcttgtatttctactaattaacaattgatttcttaattaagaagcatgacattgttgattacttctggagacccaagaataaaacacctcattggtaatgaaatttcagaacacaaagaactctttcttccatcttcagatgttttcccctgaagaatatgcaacattgctaccttgattgaaatattcatggtacatacttgtagaatttccaaaacattttcaaatactcctttggttgatcttggatgaagaaccagatagaaaattttaaaacaaagtttatgaatatatgactgactaagttttgttgaatgtagcagtcaattcgaatagcaaacaaatagttaaaaggtgaatcaaactttcaatcaaattgaacctttttyttaagcacccaagagaaaaaaacaaaacaaaataaaaacccccaaacgagaagaagcacattctctaaaactgcttatgatctttatctttatatttatctttattagactgc

SEQ ID NO: 643913 - DNA, 578 bp, Homo sapiens
ggcctggctgtattcacttgtgtgaagtttatctgcaaaaaggcatatttctataattcagctcagaaatagaaatgcttgtatttctactaattaacaattgatttcttaattaagaagcatgacattgttgattacttctggagacccaagaataaaacacctcattggtaatgaaatttcagaacacaaagaactctttcttccatcttcagatgttttcccctgaagaatatgcaacattgctaccttgattgaaatattcatggtacatacttgtagaatttccaaaacattttcaaatactcctttggttgatcttggatgaagaaccagatagaaaattttaaaacaaagtttatgaatatatgactgactaagttttgttgaatgtagcagtcaattcgaatagcaaacaaatagttaaaaggtgaatcaaactttcaatcaaattgaacctttttcttaagcacccaagagaaaaaaamaaaacaaaataaaaacccccaaacgagaagaagcacattctctaaaactgcttatgatctttatctttatatttatctttattagactgc

SEQ ID NO: 643914 - DNA, 396 bp, Homo sapiens
cttaaaataaaagtgaaaaaaaaaagtgtcygttcatgatctttgcctttttttttttttttttttttttgacagagttttgctcttgttgcccagcctggaatgcaatggcatgatcttggctaactgcaacctccacctcctggattcaagcaattctcctgcctcagcctcccaaatacctgggattacaggtgcccaccacctcaaagtaaatttctttgagtttcctcaacacagctattgtgaattatctgtcagaaaagtcacatatctctgtctctctggaatggcccctcctgccttatttagtccatttggtgaggtcatattttcctggatggtgttgatgctagtagatgttcttcagtgtctgggcattgaagagtagggtat

SEQ ID NO: 643915 - DNA, 582 bp, Homo sapiens
catgctcaccaacagctattattttttattttttaataatagccatcttaactakggttagggtaagatatatctcattgtagtttgattttcattttcctggtatttagtgatgttgggtgtttttcacacacctgctggccacttgtatgcctcctcttggggaatgtctattcagatcctttgtccactttttaattggattatttgtattttttactgccaagtttttgagttccttgtatattctagatattagtctagaatatactaattggatgaatatactggttggttgaatacttagtaaatattttcacgattcaacaggttattgcttcattctgttggatgtttcctttgctgtgcagaagctttttagcttaatatagtctcatttgtctatttttactttttttgcctgtgctttagaggtcttagccataaaatctttgcctagactaatgtttcccataagttttcttctagtagttttacagtattgggtcttacgtttaagtctacaatcccttttgagttgattttttgtatatggtgagagacaggggtctagttacattc

SEQ ID NO: 643916 - DNA, 607 bp, Homo sapiens
gcataatacaaaccaaatagcatgaaacacagaaggggcaactgtttgaaatggctgttttgacatgttctctttcctaggcgatagagcagttttcatacaaatatcaaacattagtgagctactggtagaaaaaaaagtaatcaattcacttatttccccaattaaaatctgagtacctctactcaatgctaacttttaaaatatgtttcttcattattcctaatgagataaaatagctattaataatagctaacattttgaggacttactatgtgccacacactgcactaagtgcyttacatatatttcttctgtgtattcttagtaccttgtgacagaactcaactctatcattataagaatttctttagggcagctagactattctatttctttgacacccagtaaatgctaaatatgtttttcttgtataaactcattgaaattcttcaaggcaaaaaaaaaaaaacaaccactttattctgggaagaaatgcagagacaggaataggtagtgaatatacttcttggagcaagaggaagaataaatgcaggtaattaatgtataaccagaagaaatgcaatctcagagatgggagaatact

SEQ ID NO: 643917 - DNA, 603 bp, Homo sapiens
taaaacaatagtacccagagctccactatttgatgagcttaatatacaatcttatgtgtcccagtccctactttacctacaaccaaaagttggcaaaatgagtttggttaaacaaggacaagttggaagtagagtggatgtatgatgagtgctgccgtcatttggtggtgggaacawgattatgaaaaaacagaagggtagcctacagccctgcaccttaggaagattaggtagccccacatgctcctgtagtggcttctgaagctgggtaggcagctgcagaattgattagactctgagaacaggctgtggctctgtttcaccagctctaacatcaggtctaaggtctctctcctatcatcagcccttcagctcttgcaacagctttcctgcccatggctctggagagggccagattagcctctcgctgctcatggttctcatgcaagttattgtcttgcttccatgggaatggactctccacacaaataagtgaaagacatcacaattagctgacaaagtccatagtttctcctggaggagattggagtggtctctttttcaatgacttcctgctatctcactgcgtttttgcatagattt

SEQ ID NO: 643918 - DNA, 610 bp, Homo sapiens
tcttcttcacatgacagcagcaaggagaagtgccaagcaaaaggaagaaaagtcacttataaacccgtcagattttgtgagaactcacttactatcacaagaataagacggggaaaactgcccctatgatttaattatctccgcctggtcccycccatgacacgtggggattatgggaactacaattcaagatgagattgggtggggacacagtcaaaccatatcaggaagggttcagagaagccagggcaacaaagagtcatttagaggatgtggaacagtgactatcaaccagtaaagaggtactttaattttaacatttagtacaggctttcctgtgagtaccacctgaatgtcagccttgcacaagcctactgctaaggtagtacctatcctccttgtagtgcaactgtatatttgctatttgaggaccggttatgtgctcaacgaatgcctgataaatggataagtgaatgaattttacctaatgcagacaccccttttattttttcttacaatttgtcaaaaggttttctcttttataacatagtcaacttcttagtgtcttgataattgcaaagactgtaaagagtttcattgttacattttt

SEQ ID NO: 643919 - DNA, 452 bp, Homo sapiens
gacatggggacttttaaattttacaaggtttttgtaatgttcctttgaggttaagtacacttatttaaagtgaagtgcaacyttcttttcccaattattttgcagtatttagtataataattctcacgtgctatttgcttaataattatttcttgaaggaaagactgtgttgctgcaagttggtaattcacagatgtgcctgaaagaaggaaaaataaagcctaaaataaagcaactactaggtagccatgaggaaaaagtgcatacagagttgttgctcactttagaaaagcttatttagggccagcaagcaaaactataaaataaacaaggtttatttagctctaatttcaaagattttcaaagcaaagataaaaagtataaagtttatctggtgggaaatttttgtttagtttatagggactttcttctattttttgtttttgtttttt

SEQ ID NO: 643920 - DNA, 607 bp, Homo sapiens
tatttgtgttaggaacattttaatttcaatcttttagtcatttcaaaacataaactaaatcattctaactatagtcatcttattgtactactataacacagcagactttcgagattaaaaaaaaaaggtcttcacttgtattctccctgagaattctcacactgctctaattttatacagtgcataatacctcaraggataatagcatatgtttatccatgtggaagattaataatgattggctgaaaagcagcatatattaaaacgtcatagcccaccacttaaaatatctaatcagaagaaacgttagcattgccatttaacttcctaattaactgctgagcatttgagtccaaaatcaatgtatagcgaagtgacaattaaatcaaaattttctggtgttctacagtgttaatatatctcatcttgtgctttaaagccaacttggctttattttttttctcttctttgttaataaactgtgattgtgtcttgtaatgaataaacccgtaaaccatctggcagttgtctcacggctcattacttgctatgggccactctgagaagctgcctcaggtaacatttaaactggtgcatggagagaaaa

SEQ ID NO: 643921 - DNA, 592 bp, Homo sapiens
ggccattcacttaattcagcaggtggagcaaatgggctaataaaacatactttttaaagtctttcttttctttaatctcctccggtagctgttcttcacactcagaatttgaagttagttttttacactcatcctcctcttcctcatctgaatctgcctcatcatctatttgaaatggctcaaagtctgcctttattagtgcccacactgaccatacagaaactggaatttttgctccatctttatatgccttttaaaaatctcttccaattctctcccrttcatctaacttcatactcctttgttctggaaaccatgggcaaaactgttttactgtactaaagagtgataacaaattctaagtactaactttcactccccatctttgtatgtcctcgggtgtcttttgatgatgtgtcctctgctttcacatgctctagccttccttcatcagggtctttgtcatcccatgttgggcgccaagaatgctggggtgatcagacccaaaacaaggtcatgggggtgacaaagtccggtggagttaaaggaatgagaaaaagacagtttgagagagaaagtgggaccaggggac

SEQ ID NO: 643922 - DNA, 555 bp, Homo sapiens
agatctcatgagaactcactatcactaggtcagcatcaagaagatggtgcttaaccattggtgaaggatctgcccccccaacacagctccacctcctactgttccagacagaagcctgctgcagaggcagaggctcttgggaatcctgtactatggcagtgcagaaggaaaataagggctttgactgactatgcaggaggccaccatcctcgagaccccagattcatagacctaccaacagttcacaccctcagtatggaaaagtgataggcactcaacaccagcccagcccatgagagcaamcatgggggctaaagcctgcaaagccacaggcacactgccctggtagaggttttccatgagcctctgcctctgcagcaggctactcccccttcctactacccaccaccctcccaccgccctacagccagcctattcttccccaccctacccaccccttttttcttccacccctacccctcccatccatgattaaataatctcccaccaggccccacctccaagatttgggattacaattccacatgagttttt

SEQ ID NO: 643923 - DNA, 438 bp, Homo sapiens
gtaatcctatgtgagggacaaacattcagaccccaagagcagtgttctgaaatcctatgttaagggaaacattgagaccccagcatgaatgttctggaatcctatgtgagggacaaacattcagaccacggcaggagtgttctggaatcytatgtgaggaacaaacattcagaccacagcaggagtattctggaatcccatatgagggataagcattcagaccctcgtagcagtgttctggaatcctatgtgagggagaagcattcagagcacagcaggagtgctctggaatcctatgttagggacaaacattcagaacctcgtaacattgtgctggaaacctatgtgagggacagacatttagaccctcgcagcagtgttctggaatcccatatgagggtcaaatattcagatcctcgcagcagtgttctggaattc

SEQ ID NO: 643924 - DNA, 356 bp, Homo sapiens
tatgttaagggaaacattgagaccccagcatgaatgttctggaatcctatgtgagggacaaacattcagaccacggcaggagtgttctggaatcctatgtgaggaacaaacattcagaccacagcaggagtattctggaatcccatatgagggataagcattcagaccctcgtagcagtgttctggaatcctatgtgagggagaagcattcagagcacagcaggagtgctctggaatcctatgttagggacaaacattcagaacctcrtaacattgtgctggaaacctatgtgagggacagacatttagaccctcgcagcagtgttctggaatcccatatgagggtcaaatattca

SEQ ID NO: 643925 - DNA, 438 bp, Homo sapiens
gtaatcctatgtgagggacaaacattcagaccccaagagcagtgttctgaaatcctatgttaagggaaacattgagaccccagcatgaatgttctggaatcctatgtgagggacaaacattcagaccacggcaggagtgttctggaatcctatgtgaggaacaaacattcagaccacagcaggagtattctggaatcccatatgagggataagcattcagaccctcgtagcagtgttctggaatcctatgtgagggagaagcattcagagcacagcaggagtgctctggaatcctatgttagggacaaacattcagaacctcgtaacattgtgctgraaacctatgtgagggacagacatttagaccctcgcagcagtgttctggaatcccatatgagggtcaaatattcagatcctcgcagcagtgttctggaattc

SEQ ID NO: 643926 - DNA, 240 bp, Homo sapiens
tttgatactgttatcattctgctgtagaaagtacccacgaactggaaaaagtccacaatcraatagctagtcattcaacactatcaaattttaggtgactttttgaaaaaatagtatctcttgttgcaagaaatgctccatctgtgatgtcaagtctctcacttgagttaattggatggaagtggtgaatttcagccaaagtggccaaagaaatcctgttcctgtgataatgacgccatc

SEQ ID NO: 643927 - DNA, 240 bp, Homo sapiens
tttgatactgttatcattctgctgtagaaagtacccacgaactggaaaaagtccacaatcaaatagctagtcattcaacactatcaaattttaggtgactttttgaaaaaatagtatctcttgttgcaagaaatgctccatctgtgatktcaagtctctcacttgagttaattggatggaagtggtgaatttcagccaaagtggccaaagaaatcctgttcctgtgataatgacgccatc

SEQ ID NO: 643928 - DNA, 549 bp, Homo sapiens
cagaatagtcaactaattgaagaaaaaaacaaggagcaacttttaccaaatcggacaacaaatagatggtatcaatgcttagttaattcaacatgatccacttctttatgattctcttatctttctacctatgttttcaagatggctacggcattcccagccttacaacttcatgtgacaaaatccaatggcaggaaataataagtgacggcattttggaacgttaaggaaaaactttaaggattggaaaacagggatgccatatgtccagtaacatgggatagccgytcctaattaaggattgctgtatgtcctgaatgactttctaatgtaatgaaggtgaataacctgctttgtttaattatacaatcccaaatgtaactgcctaagtgccaagtacttttgcatggttttaatatgccatgaattttgcaagaatgaaactactatgtatatgagaaaagacggtagattttttcatttagatactcatttcagagtctcaataggaaaaatagaacacacacaaactaagataatttaacatgg

SEQ ID NO: 643929 - DNA, 387 bp, Homo sapiens
cgagaaccctctcttcaaggccttctctgaatctatttttccaggtttyttcttttctttttaaacattagtgacagttttgattctgataactttcatatcatgatccctaatttcaaaaaaaattaaacgtgtaacttatttatgatgtatttgataggcttggatttgtgaatcacctctactatctatagtggtagatatatctgagcctgcttacacaggacttccatcagattctctcttcagtggaattggaagaggggggttttggagaagggtatgaaggaattgtgctgcatcagaggtccccacctaacagcacagggactttttctgtgctcttgccaggccgttgtattggctaatgcaaaagtaattttggtt

SEQ ID NO: 643930 - DNA, 679 bp, Homo sapiens
tcttttgctttacccctttggaagttttattttaattttcacaggcttagaaaaatagaaaggacagctcttagaaaatcaggggatgttatctgaggccactaagagaaatggcatggcatagcatagtgaaaacagcaatggaaacattgcttcagacaagtaatatttggtggattgactttttttagtaggrctgtgaagagaacttctaatatttatgtgataatatttaagcatcctgagtgaacacagtcatcagtggaagagttatacgatactttgttttaaactttgtagtacagttgtatatttacattttgactggagaggggtcgatgcttggttcatgtcatttgtagaagactgggatatgaggtgtttgttttttcaaaacagaaagtttataaaaaatgtttttctaatctattgaggatttgaactgtgaaaggaccaagcacatttttagccctaaattatcattcagcttcctaatatatagactgtaaatcacaaacaacctgcatttaaagtcagaacttaacagaatttttcaaaaaatattcaacggaataatcattggtggcatgtattactttcttactataaaccacatactagtctaaagacatgaaatgtgtaaactgatttaatttgcagatcattctcggagttaatt

SEQ ID NO: 643931 - DNA, 414 bp, Homo sapiens
cattagaattcatgggaagaaatgagattgtttttaagacacaggcacctggatttctttgtttaattagcatcagtgaattattaattcagcgcaaaaaagcatagctctttgtcatataaaaaatcatcaataccacaagagaccctcacaaaccaggatgatgataacttacttatatttgcacagtgctttgcaatttacaaggccctgttctgtacttcacggatttaactctgttaactgtgtggaatggagtttttgcccgggctggagccagcaggacagtacagagattttacttcctcaccatcatgccccaaattatggagaaacactccagatttaatcagaagtgcctgggacaagaagtcattaatattcaacaawttttaaaattgcattcccaaacta

SEQ ID NO: 643932 - DNA, 418 bp, Homo sapiens
taggttcggccttaaacagtttttttctatctacataaattattcatcaagatattctaggccaggcgcagtggctcatgcttgtaatcccagcactttgggaggccgtggatggatcccctgaggtcaggagttcgagaacagcctggtcaacatggtaaaactccgcctctactaaaaatacaaaaattagccgagcgtggtggcacatctcttaattccagctacttgggaggctgaggcaggacaatcgcttgaacccgggttgcagtgagctgggatcacaccactacactctgtcctgggtgacagagtaagatttggtctcagaaaaaaaaaaaaaagatawtctaaagctgtgcagatcataggaaaagttctattttacagaactgtcaccacactaagccttgaattc

SEQ ID NO: 643933 - DNA, 628 bp, Homo sapiens
tacgataccaatggaaatagtgatagagatgcaacacattagtaaatagtattctgtcttgataagtggaggtcatttgcaatgagaaacatggtgccattttactccgtatcatgaatgatttgcaaagactatccaagaataaagaacagcctctgtctctgcaaggacatgggcatatatgtgtctgagtgctgcacgttcagtatgatgagtgtgtgaagtcacttgtgaaaaatcatttccaagcacaaaatcctggtgaayacaactgcctgctttctcctcaactcaaaaaagcaaatctatgttctgagaaaagtaggaaaggcagaagactggatttcaaatgtgcttggagagagagtccacccattcatttataaaatccttgacattcacgctatacattaaaatgaaattcaacatttataaaatgttatgcaaaaaaatgcacagaacattgggctagtctcagtaaaacatgaatagttgccataaactttctaagtggttaataaaaaagattttttttgtggactaagtattctgcgaataggcccttcagtaaattgttatattggccatttgttataatataattggggttgggacaattagtcattcc

SEQ ID NO: 643934 - DNA, 628 bp, Homo sapiens
tacgataccaatggaaatagtgatagagatgcaacacattagtaaatagtattctgtcttgataagtggaggtcatttgcaatgagaaacatggtgccattttactccgtatcatgaatgatttgcaaagactatccaagaataaagaacagcctctgtctctgcaaggacatgggcatatatgtgtctgagtgctgcacgttcagtatgatgagtgtgtgaagtcacttgtgaaaaatcatttccaagcacaaaatcctggtgaacacaactgcctgctttctcctcractcaaaaaagcaaatctatgttctgagaaaagtaggaaaggcagaagactggatttcaaatgtgcttggagagagagtccacccattcatttataaaatccttgacattcacgctatacattaaaatgaaattcaacatttataaaatgttatgcaaaaaaatgcacagaacattgggctagtctcagtaaaacatgaatagttgccataaactttctaagtggttaataaaaaagattttttttgtggactaagtattctgcgaataggcccttcagtaaattgttatattggccatttgttataatataattggggttgggacaattagtcattcc

SEQ ID NO: 643935 - DNA, 628 bp, Homo sapiens
tacgataccaatggaaatagtgatagagatgcaacacattagtaaatagtattctgtcttgataagtggaggtcatttgcaatgagaaacatggtgccattttactccgtatcatgaatgatttgcaaagactatccaagaataaagaacagcctctgtctctgcaaggacatgggcatatatgtgtctgagtgctgcacgttcagtatgatgagtgtgtgaagtcacttgtgaaaaatcatttccaagcacaaaatcctggtgaacacaactgcctgctttctcctcaactcaaaaaagcaaatctatgttctgagaaaagtaggaaaggcagaagaytggatttcaaatgtgcttggagagagagtccacccattcatttataaaatccttgacattcacgctatacattaaaatgaaattcaacatttataaaatgttatgcaaaaaaatgcacagaacattgggctagtctcagtaaaacatgaatagttgccataaactttctaagtggttaataaaaaagattttttttgtggactaagtattctgcgaataggcccttcagtaaattgttatattggccatttgttataatataattggggttgggacaattagtcattcc

SEQ ID NO: 643936 - DNA, 608 bp, Homo sapiens
ctagtttccactttttccgtaaaaaggaaaaatcctacacatggctaacctaatcgctctccttgaagctttgcacccatcttttcccaagtacccaattgttgcaaagtttcacctcaaatgataagttcacctcaatcatgacagtgatctttaaacatattttgtagaacggtagttgtttaatttttataccatgtcagaattcttcctagagcaaaacatggctgtatttccttaaacaagataatttgtaactgtcaaatgatagacataatctgtcctccaatatcaaaggaatagaggccgggcatagtagttcatgcctgtaatctcagcactttgggaggccgaggcaggctgataacttgaggccaagagttcgagaccagcctggccaatatggtgaaaccctgtctctactaaaaatacaaaaattagctgggcatggtggcatgcacctgcagtcctaactacttgggaggctgaggcatgagaatcgctcgaacccaggaggtggaggttgcagtgagccgaratcacgccgctgcactccagcctcctcggcaacagagtgagactgtctaaaaaaacaaaacacagaaaac

SEQ ID NO: 643937 - DNA, 555 bp, Homo sapiens
tatgcttagctatgccatgcaacataacacaatcacaagagtggtatctcattatatttcaggttttggagatgacagctgacatctttgagggaaggggccgttctgtagtgtggagtggaaacaaatggagaatagaaagagaaagcagtaaaagaataggtagagaggacaacataggttatgggctctgaaatgcataatataccagataaattcatcttcctctattacagtgtgatggatcacattgatgtatgagaagcagatgcaacagtgttgtattttagtaaggccttactctgtcctacrtgggcattctcagttctaatatatacagataaaacataaatatatttgcaaatataaatcgcttattggaactctcttcttgtttttcctggcttgaatcctcaaaacatggtatgttttgctgtatacactgagttgacaaaactagttcttgtataatttgaccacatggattgtatatcttttcaagcccctatagatttcacggtgtttggaaaccactcatttatgcctttgtagaat

SEQ ID NO: 643938 - DNA, 620 bp, Homo sapiens
tcacttgtgaacttttgagaaatgttcaacttcaacagtttaaatctcttctctgcagcctctcttccccacccgtcttgtctttctcaaaccaaatcaactaatcacattatttgttgcacatcgtttacttctctgtattacctcttagatagaaagttggtccaagaatatctcatggattcattttattcataaatattacagcagaatagatctctcatacaaattccaggagggagaaagaaaaaataagcagggagagaagtaaagtgagagagagcagtcaatgaaaaactactcataacaaaggacaaggaacatcatcttaayaagtgaaagaaagcacaggcctcttaaaatgacttactcaaaaatccagaataaaaacaagaagagtttaactctgtaaagtttttaataggatgctttaaaaaaagaagaaaagcctctatcaccaggagtaaaaacccataagtagaataaactgggggagaagactacaaaaatatgagtcacaagataggtcaggggaaagggtgagacaagaaaatcttacaggaatacataaaaatgtaaagctaaatgtaatcgaatgcagaaaataaaattagagatgt

SEQ ID NO: 643939 - DNA, 666 bp, Homo sapiens
aatcttttcttcctcttaaaatagactgaracctcatgttccatcttggaaagcattacatttacttgttatttggtatgtgaactatgtattttgaatgctactgaaaagcaattctctaaaagacatatagctgtcctccaggttttttcctggcttcaattctacgtaagcttgcaagtttgtgtttgtaatgttatcagtttctatgtgtaaagaaatatgacttgttattggaacaaaagaaaggatagacaagatatagttagtaaatatccttaggagaaaattcccaagggaatttcaggacatctcttctctttcacataaaattcctaaaggtaggaatttaaactggaaaatttagataatccttggggcttcaaagtaaatgaagacagatagatttcatagataaagaaaaatgcaaaagtatttgctattgtactatcaagtgataagttaaacagctgtcaaagcctctaataaaaaagatacaaatcatataggctttcattataaaaatattatacctgggaggcagagcttgcagtgagccaaaatcacgccactgcactccagcctgggcagcagagtgagactccgtctcaaaaaaaaaaaaattataaagttaacattttaaactctgtaaaatatatgtatcca

SEQ ID NO: 643940 - DNA, 666 bp, Homo sapiens
aatcttttcttcctcttaaaatagactgagacctcatgttccatcttggaaagcattacatttacttgttatttggtatgtgaactatgtattttgaatgctactgaaaagcaattctctaaaagacatatagctgtcctccaggttttttcctggcttcaattctacgtaagcttgcaagtttgtgtttgtaatgttatcagtttctatgtgtraagaaatatgacttgttattggaacaaaagaaaggatagacaagatatagttagtaaatatccttaggagaaaattcccaagggaatttcaggacatctcttctctttcacataaaattcctaaaggtaggaatttaaactggaaaatttagataatccttggggcttcaaagtaaatgaagacagatagatttcatagataaagaaaaatgcaaaagtatttgctattgtactatcaagtgataagttaaacagctgtcaaagcctctaataaaaaagatacaaatcatataggctttcattataaaaatattatacctgggaggcagagcttgcagtgagccaaaatcacgccactgcactccagcctgggcagcagagtgagactccgtctcaaaaaaaaaaaaattataaagttaacattttaaactctgtaaaatatatgtatcca

SEQ ID NO: 643941 - DNA, 521 bp, Homo sapiens
gcaaaaacaactccaccaatatcaaggtactcactagaatggctaacaaaaaaaaagtgacaagtgttgacaagaatgtgggacaacagtaactcttatatgttggtgaatttctaatgaaatatattatacttcattagagaagtttaccaacaatccttcccaaacctgaagaggaaaaagctgttattttcttttgctagatattattgtgtctgcctgtgacacctagaatctggctgtaacctggctaaggatggcaaggcagaaagaagtaagaaaactgtgttttatgacacagctgagcactaaatataaaaacctaaaatggccttatcttgggaataaccatatcagataatgctgtttctgtactatttaagccaaattgagttattttctgttaattatagctgaaactatttcagctgataattgtctattaacattaaaagccaggactgaccatgtagattastttcttccataacacagaaaagatagcccttccatcattaata

SEQ ID NO: 643942 - DNA, 602 bp, Homo sapiens
agtttcaactctttacaatgaacatatttatcttttttaaaaaataaagccattttaaaagatcttgccataaaacaatcattccttaagtcaccacttaggatagacctagaatatttgtcctttctcaagagcaccagagagttttctggtaatccacgcaataaacagttataaaaggtaattgttgagatcaggggaagatggcagataggaggcagtgctaatgtgtagctcccacatggatggacaaaacaccatgtggagactcacactgtgaccctgttgtgctccaagaactatcataggaacrtactgggaaaaccaaaagaattcacggatcctttgaaagaagacgcacaccactgtaaattctgtggaacaggagaaaaactgtgagttcccaaagtgtaagaagggggaaacctacctttgaacacacatccccactggggaatctaaaaatccagatcataggagaaggatttaatcttaaccagagatgaaatgagtttagggagatgtaagaaaaataaaagtatgagagtagtagtgggaagtgccttgaatggactcccagtctccagcttgagccctaggaa

SEQ ID NO: 643943 - DNA, 602 bp, Homo sapiens
agtttcaactctttacaatgaacatatttatcttttttaaaaaataaagccattttaaaagatcttgccataaaacaatcattccttaagtcaccacttaggatagacctagaatatttgtcctttctcaagagcaccagagagttttctggtaatccacgcaataaacagttataaaaggtaattgttgagatcaggggaagatggcagataggaggcagtgctaatgtgtagctcccacatggatggacaaaacaccatgtggagactcacactgtgaccctgttgtgctccaagaactatcataggaacatactgggaaaaccaaaagaattcacggatcctttgaaagaagacgcacaccactgtaaattctgtggaacaggagaaaaactgtgagttcccaaagtgtaagaagggggaaacctacctttgaacacacatccccactggggaatctaaaaatccagatcataggagaaggatttaaycttaaccagagatgaaatgagtttagggagatgtaagaaaaataaaagtatgagagtagtagtgggaagtgccttgaatggactcccagtctccagcttgagccctaggaa

SEQ ID NO: 643944 - DNA, 620 bp, Homo sapiens
attccattgtagagatacagtacactttgtttatccactcacctgtctgtggacattttggtttctagttttgggctgttaagctgggatgaacgtatgtgtatgtgtgcagctttgggatgaggtgtctmacatgagccacatacttggggtggatgtactagtctttgtgtggacatatgctgtctttccttttggaaaacacttcaaagtagcatggctgggtcatactttttaacgttttaagaaactaccaaactgtcttccaaagtaaatgtgccattttctattccaaccagcaacgtatgagagttccagttgctccacatctttggcaaaacttgcaaatataaaaggaattttgtgttttgtgtttatatgtatataaatatattaggtagtgtaaatacacatagtatataattttgtgttacagatttgtttgtatgtatatgtatatatacagtaatgcgtcacttaacaacagggatatattctgagaaatggatcactaggggatttcatcattgtgcaaatatcatacaatgtacttacacaaacttaaatggcataacttactagacacctaggctgtagactatttttctaggctacaaacc

SEQ ID NO: 643945 - DNA, 468 bp, Homo sapiens
tttctgcttctctcgctgaggttttttttaaccacccattaggaacctatagatttcaggatcaaacactgggattccctcagcactaaaggaggaaaattgcaaacagagctgaaagtgcaatgtggaaaggtcaggctgaggaaggttcttagccagtagaccaatggcaggaaggacactgcctcctcagtctcccactagggaacttgtggttcttgtcccctgacctcagaattcctggtcatgtttgttttgtctccaagggaagggtttgcattacagaatttaaggctagagtgggcctcgtgcagttaacattaaccctctctctcctttgctggcygaggtgaagtctgggaccatatagttctgacgtccactctctcgggggatcaccagttcacccacctcacctggcaagctgggccctagtttggtgacaggcatcttccacccacctgggag

SEQ ID NO: 643946 - DNA, 604 bp, Homo sapiens
gctgatgcaggaggatcgcttcagcctgcttgaaggcagaggttgcagtgagtcaagatcctgccactgcaccctggcctgggtgtcagagagagaatgtattgctaaaaacagtttccaagtgccaaggaacttcagggttccgaattgtctatgtcccagcatttctgttgattcacattcatttccatcttcattaagatttaagaatcaagtacaattgacccttgaacaatacaggtttgaactgcacaggttcctttatatgaggattcttttcaaccaaacacaaatggaaaatatagtattcctgggatgtgaaactcatgtatacagatgggctgacttttcatatatgtgggttccacagggccaattgcaagamttgagtatgcatgaattttggtacatgtggtagacccgaaaccaatcccctacatataccaaggaatgactatgtaagcaatgtcatgcttactatttacaaatttatccaatattatgaagaaaataatttttctttttgaaagatggaacaagggtttcatttcaaaagaaacaatagacaataatggccaatcaacaagaaccaaactaagtagat

SEQ ID NO: 643947 - DNA, 594 bp, Homo sapiens
gaacaagtaatattcaaaataaaaaaaacataataacatttacattagcacccccccaaaatgaaacacatagatgtaaatcaaacaaaatatctaaaaaataagtagttttcttctatataaggagaactacaaaaccttgaggaatgaaatctagtaagtaaataatggatagaactaaataaatggatattccatgttcattattattgtcaaaatgtcagttcttcccaacttgatttatagcttcaatgcaatcccaatcaaaatcctggcaagttattttgtggatgttgacaaactgattctaaagtttatatggagaggcaaaagaactggaatggctaacaaaatattgaaggagaagaacaaagttgaaggactgacatcatctaacgtcaagccttactataaagttataacattcaagacagtgtggtattaatgaaggaataggcaaatagattaatggaagagaagaacccagaaacagacctagataaatataatcaactgatctttgatatagagcaaaggttacataataaagcaaagatagtcttttcaacaaayggtgctagaacaactagacat

SEQ ID NO: 643948 - DNA, 419 bp, Homo sapiens
ttttttttttttttttttttagggacaagagtgtctctctgtcacccaggctggagtacagtggcacaaacayggctcactgcagcctcaacctcctgggctccagtgatcctctcacctcagctcctcaagtagctgggattacaggcgcatgccaccatgtccagctaattttggtattttttgtagaaccagggtttcactatgttgccaaggctggtctcaaactcctgagctcaagcaatctgcccgccttgggctcccaaagggctgagattacacacatgagccaccgagcttggccctgttttgctttttgaggcaaggtcgtgctcagttgcccaggctggagtgcagtggctcgatcacagttcacagcagccttgacttctctagctcaaattattctcctgcctctg

SEQ ID NO: 643949 - DNA, 419 bp, Homo sapiens
ttttttttttttttttttttagggacaagagtgtctctctgtcacccaggctggagtacagtggcacaaacacggctcactgcagcctcaacctcctgggctccagtgatcctctcacctcagctcctcaagtagctgggattacaggcgcatgccaccatgtccagctaattttggtattttttgtagaaccagggtttcactatgttgccaaggctggtctcaaactcctgagctcaagcaatctgccygccttgggctcccaaagggctgagattacacacatgagccaccgagcttggccctgttttgctttttgaggcaaggtcgtgctcagttgcccaggctggagtgcagtggctcgatcacagttcacagcagccttgacttctctagctcaaattattctcctgcctctg

SEQ ID NO: 643950 - DNA, 517 bp, Homo sapiens
agctgatgattttataaggggtttccccttttgcttgactctcattctttcttgcctgccacaatgtaagacatgcctttagccttctgccatgattgtgaggcctccccagccacgtggaactgtgagtccaytaaacctcattttctttataaattactcaatctcaggcatgtctttatcagcagcatgaaaacagactaatacacttggtgtgataattttgagaaaaaatgtgtaaattactcagtacaatgtctaacattaaataggttttcaaggcttattacttagatcacttaagaatattaagagaaacttatataatgcaaacaaaatatacttagtaaatgatcagttccttaaaagcaatagtccttcatctattctgtaagacgatgatgataatttaatgaaaatctgaaatagtctcagcattttaaacaaacctatagttacatgcagctgtgcatttgagtatgttcatattagccctggctctacttttgaaagatgc

SEQ ID NO: 643951 - DNA, 636 bp, Homo sapiens
gttacatgtacaagttatcatgatatatatcagattgtttaatgtattatagactaagaaaaataagaaacttagcatctaatcagtagtagaatttaattacaaaatcagattaacawcacattcatgaatcacatttaatcactgaattttgatatcagattataagtattgattaatatgcattttaataacttgggaatcattttaagacacagattttcattcagtagttctgggatccacaacctagcagaaacctaggtaatgcctaagttgttggcctgagtacacactttaaatctgatgattctaacctactgctatcaatagcactctctgtcatgatgaaactattctatatctgtactgttcaataggatgccagtagccacatatggctattaagcttttgaaaatgtctagtgtaaatgaatgactgaattttaatttaattcattttaaatttaaatttaaatagcctagccatgtgagactagtggttactggttattggaaaagacaggtctggaggatataaacaatttatcttgatgatatgggaagatacttaaggcaaaaaaaaaacttcccaaaaagaaactcatagtaataaatattgacttatttcatgtt

SEQ ID NO: 643952 - DNA, 609 bp, Homo sapiens
aactgcagcatgctttttacctttggatccccacaaccccaattactacttcgagtaatatgttttcatgactgatgtggagcctcaggcaatggatgtcagcttctatcctgccttgtctccaccgcgagcttttgactcatccccttcatgacatggctacaaggtacatccccagaaaacagttattagatagttactatgctcttgttagaaggaatgtctgtcccaagagggmccgtgcctctggcctgatattcccattttggggtggctcaactcagacttactgactatcaaaatgggaagggcccatcgaaatgcacttgtatactgaaaatggcatatttgagagcatagctggccagattttcctaaatgcctagtcctgttttactgatagtttatctaaactgaaatgcaatggtatccactaggctgttgcatctgttcaaacccagcaccagctatgcagaattgaaaataatggacattgttgctctgctcattgggcagaactcttaagttgtccttatggcactggccaacactccccttgatgaattttactatatttttactgaatattggagtactgccaattgccta

SEQ ID NO: 643953 - DNA, 609 bp, Homo sapiens
aactgcagcatgctttttacctttggatccccacaaccccaattactacttcgagtaatatgttttcatgactgatgtggagcctcaggcaatggatgtcagcttctatcctgccttgtctccaccgcgagcttttgactcatccccttcatgacatggctacaaggtacatccccagaaaacagttattagatagttactatgctcttgttagaaggaatgtctgtcccaagagggcccgtgcctctggcctgatattcccattttggggtggctcaactcagacttaytgactatcaaaatgggaagggcccatcgaaatgcacttgtatactgaaaatggcatatttgagagcatagctggccagattttcctaaatgcctagtcctgttttactgatagtttatctaaactgaaatgcaatggtatccactaggctgttgcatctgttcaaacccagcaccagctatgcagaattgaaaataatggacattgttgctctgctcattgggcagaactcttaagttgtccttatggcactggccaacactccccttgatgaattttactatatttttactgaatattggagtactgccaattgccta

SEQ ID NO: 643954 - DNA, 621 bp, Homo sapiens
aaacggtcaccaaaagcaagcagtagtagctattcttatgtcagacaaaacaaactttaaagcaatagcagttaaaagagacaaagagggacatataaataatgtccctctttatataaaaaaatttatttatttaatctccctctttatatataaaaggccttgtccaacaggaaaatatcacaatcctaaacatatatgcacctaacactggtgctcccaaatttataaaataattactaatagacctaagaaatgagacagacagcaacacaataatagtcggggacatcaatactccactgacagcrctagacaactcatcaagacagaaagtcgaaaagacaatgaatttaaactataccttcaaacaaatggacttaatagatatatagagaacatctcattcaacaactgcagaatacacattctattcaacagtgcatggaactttctccaagatagaccatatgataggccatcaagcaagcaaatcacataagagtacataaatatttttaaagcagatccaagaaatatatgtgtgtggtaaaaatacattaaccagtaagagaatgataaataaatgaggaactcatgttaccacttggtggaggaagg

SEQ ID NO: 643955 - DNA, 556 bp, Homo sapiens
tggaacaggagggccttgactgcagcttagcaggagattctgtgcttcgcttagcaccagtgtgcaggcttccaccactggctataactgtctacagacacagttactttagcaactggttttaacaattgattttgtaaactatgaacacctaagctcagattgcctagtkctcaagcagtctttttgatatcaggccactctcacagtcactcataaaaagtgaaagccgtggagatggggctcatgaagagatgctggtgagtccactctactatagcagggttcttctaagttaattcgctcctacccaatatcatatctgtgcagcatgtctagaaatcaggaaatttagagacattagcagtattcattacaaatacaacatcctttttccccactggtgttcactctcttctcataattgaggtttttatatattcttgactctattttagccttcctcgttttcttttcctcgtgtgatgtgcctacctatacaaatactacactcttttgaattttagagttacaatatgattttatatgacaagtt

SEQ ID NO: 643956 - DNA, 556 bp, Homo sapiens
tggaacaggagggccttgactgcagcttagcaggagattctgtgcttcgcttagcaccagtgtgcaggcttccaccactggctataactgtctacagacacagttactttagcaactggttttaacaattgattttgtaaactatgaacacctaagctcagattgcctagttctcaagcagtctttttgatatcaggccactctcacagtcactcataaaaagtgaaagccgtggagatggggctcatgaagagatgctggtgagtccactctactatagcagggttcttctaagttmattcgctcctacccaatatcatatctgtgcagcatgtctagaaatcaggaaatttagagacattagcagtattcattacaaatacaacatcctttttccccactggtgttcactctcttctcataattgaggtttttatatattcttgactctattttagccttcctcgttttcttttcctcgtgtgatgtgcctacctatacaaatactacactcttttgaattttagagttacaatatgattttatatgacaagtt

SEQ ID NO: 643957 - DNA, 556 bp, Homo sapiens
tggaacaggagggccttgactgcagcttagcaggagattctgtgcttcgcttagcaccagtgtgcaggcttccaccactggctataactgtctacagacacagttactttagcaactggttttaacaattgattttgtaaactatgaacacctaagctcagattgcctagttctcaagcagtctttttgatatcaggccactctcacagtcactcataaaaagtgaaagccgtggagatggggctcatgaagagatgctggtgagtccactctactatagcagggttcttctaagttaattcgctcctacccaatatcatatctgtgcagcatgtcyagaaatcaggaaatttagagacattagcagtattcattacaaatacaacatcctttttccccactggtgttcactctcttctcataattgaggtttttatatattcttgactctattttagccttcctcgttttcttttcctcgtgtgatgtgcctacctatacaaatactacactcttttgaattttagagttacaatatgattttatatgacaagtt

SEQ ID NO: 643958 - DNA, 592 bp, Homo sapiens
taacttattaggccttgtgtgttacgatattgctctccatagatattgtacaaacttatgctcctactaacaaaatatgaaatgaactttccctcaaagcttcttwaaaaaattgccactttaaaaaagttttacaaaataatttaactgtgttttagtttgtttttaaatttgtattctctatgtcaccgttatttcctttgatgaattatatcttgtatcacttccaatttcatcttcatacttttgagggcattattttttcttcaatttttacctaagttttaccagtttatgtttcctgtactcataaactttttataatttcttccttgactttttgcacttctgctttgtgatctccctttgtaggagtgagcacaaacttgtgtgtgtgtgtgtgtgtgtgtgtgcattattttataaaagaatatatgcttacaaattgccctgatgaactttttttcgtttaagtaattctttagcagtttgaaagttttgtttctcttttctaaattcctctaatagcaatattataataatgttctaacatatactatattgttactcattattgaacatattggttttt

SEQ ID NO: 643959 - DNA, 309 bp, Homo sapiens
ctcagctcactgcaacctctgcctcccgggttcaagtgattctcctgcctcagcctcccgagtagctgggattacaggcgtgcaccaccatgctcagctaattcttgtatttttggtagagatggggtttcatcatgttggccaggctggtctcaaactcctgacatcaagtgatccacccacctcagcctcccaatgtgcttgggattacaggcatgagccacsttgcccggcctgtagttgcattgtttctaagggcctttgttaaggcactatgctaatgtttttgctaaaagtcattgttacaaa

SEQ ID NO: 643960 - DNA, 616 bp, Homo sapiens
tattccaatgatttgacaagcatatctggtgtaactaaactgggtgaagtttaggcacaggtctaaacacttgttctcaatattactatcaattatgcttgttacaaatttcagattttcatgcattgcatcccacattgatatttttattcaggaagtctggggcgacaagcaggtatctgcattcttaacgagtactccaggtgatgatcctgctaccggtaattgacgaaccacagtttgagcaactgattaaagtgtgtatcagccatttataaaccagtgtcagaagagaaggcacatctctcttcagtaactctgaygtaatagcacaaaacacctggtagctgaatactaagactgctgaagttcaagaatatttgtatttaaggtaataaaaagctggtgttttcccccagattcaatgaaaatcatagctgcctcatccaaaagcaagtgattcgtttctcagtacttttttacatccttgctgatgtgcttgcatttccagatcaagaaaattaagccaagcttctttgactggtttctaagaagactctctgttttatacaactttctatggtactgaggaagaaacgatgactgattcattcca

SEQ ID NO: 643961 - DNA, 616 bp, Homo sapiens
tattccaatgatttgacaagcatatctggtgtaactaaactgggtgaagtttaggcacaggtctaaacacttgttctcaatattactatcaattatgcttgttacaaatttcagattttcatgcattgcatcccacattgatatttttattcaggaagtctggggcgacaagcaggtatctgcattcttaacgagtactccaggtgatgatcctgctaccggtaattgacgaaccacagtttgagcaactgattaaagtgtgtatcagccatttataaaccagtgtcagaagagaaggcacatctctcttcagtaactctgatgtaatagcacaaaacacctggtagctgaatactaagactgctgaagttcaagaatatttgtatttaaggtaataaaaagctggtgttttcycccagattcaatgaaaatcatagctgcctcatccaaaagcaagtgattcgtttctcagtacttttttacatccttgctgatgtgcttgcatttccagatcaagaaaattaagccaagcttctttgactggtttctaagaagactctctgttttatacaactttctatggtactgaggaagaaacgatgactgattcattcca

SEQ ID NO: 643962 - DNA, 626 bp, Homo sapiens
tgacagcttggctgttgtaataaatttaacaactgtttctccctcttgctgtattcattttcaccttggggttaagtgatactggctaaagtaatcctggaacaagaggcatttgcagaaggctaaagtgtgaaattaattttccttgccttggctttatctttgttgacataaaggatccacataaaatatttcgcactagaaaatactctatcttctttgtactgattttaagttttactttwaagttctgagatacacgtgcaaaacgtggagggttgttacataggtatatgtgtgccatggtggtttgctgcacctattgacccatcctctaagttccctcccttcaacccctaagaggccctggtgtgtgttgtttccctccctgtgtccatgtgttctcaatgttcaactctcacttacgagtgagaacatgtggtgtttcattttctgttcctgtgctagtttgctgaggatgatggtttccagcttcatccatgtccctgaaaaggacatgatctcattcctttgtatggctgtgtaatattccatggtctatatgtaccgcattttctttatccagtctatcattgatgggcatttgggttggttccatgactttg

SEQ ID NO: 643963 - DNA, 626 bp, Homo sapiens
tgacagcttggctgttgtaataaatttaacaactgtttctccctcttgctgtattcattttcaccttggggttaagtgatactggctaaagtaatcctggaacaagaggcatttgcagaaggctaaagtgtgaaattaattttccttgccttggctttatctttgttgacataaaggatccacataaaatatttcgcactagaaaatactctatcttctttgtactgattttaagttttacttttaagttctgagatacacgtgcaaaacgtggagggttgttacataggtatatgtgtgccatggtggtttgctgcacctattgacccatcctctaagttccctcccttcaacccctaagaggccctggtgtrtgttgtttccctccctgtgtccatgtgttctcaatgttcaactctcacttacgagtgagaacatgtggtgtttcattttctgttcctgtgctagtttgctgaggatgatggtttccagcttcatccatgtccctgaaaaggacatgatctcattcctttgtatggctgtgtaatattccatggtctatatgtaccgcattttctttatccagtctatcattgatgggcatttgggttggttccatgactttg

SEQ ID NO: 643964 - DNA, 566 bp, Homo sapiens
ccccttcctctttgcactgtttcaggcttccaactacagggacaccttattggagtaacaggtctaatgcagagagctctccagtcttaatctcacctcttgggagaaaaagcttgtctgattttggggactgcgcatggggccacaaccccttcccttttctgatgagtatcttctccctacaaagaggagcaatgagcagcaaaacttctgcctmtgcagagcaaagtctgcaatatttccaggctgctatgactgagctggaatgcctaatcttgctataaagattaggggacttggtattaaaaaaaaaaaaaactattgttgctgcacactgaaatcaccatcagtaagaattctatcattattcaagtgtactttataatcttcatctgcctggcttctcagcctcagtgggctcaaacacatcatctgggcagagaagagaggtaccacttattaaatgagattcccaaagttccaacgaagagcagaaagcatggtggaaccctgtgatcctaaaagtcaattgcctcaaattaccatcattagcttttgtttttacc

SEQ ID NO: 643965 - DNA, 566 bp, Homo sapiens
ccccttcctctttgcactgtttcaggcttccaactacagggacaccttattggagtaacaggtctaatgcagagagctctccagtcttaatctcacctcttgggagaaaaagcttgtctgattttggggactgcgcatggggccacaaccccttcccttttctgatgagtatcttctccctacaaagaggagcaatgagcagcaaaacttctgcctctgcagagcaaagtctgcaatatttccaggctkctatgactgagctggaatgcctaatcttgctataaagattaggggacttggtattaaaaaaaaaaaaaactattgttgctgcacactgaaatcaccatcagtaagaattctatcattattcaagtgtactttataatcttcatctgcctggcttctcagcctcagtgggctcaaacacatcatctgggcagagaagagaggtaccacttattaaatgagattcccaaagttccaacgaagagcagaaagcatggtggaaccctgtgatcctaaaagtcaattgcctcaaattaccatcattagcttttgtttttacc

SEQ ID NO: 643966 - DNA, 598 bp, Homo sapiens
gatagaactgacctgcacacacctcaaattcccagcctctggtccactatgctcaggtcaacaggacaatcatatctatttgactcacggtatgatcactcatttctccaaagatgagacaattggctgccatgatcctggcaatacactgaatgtttgtgtaccccccaaattcatatgttgaaacagccccaaggtaatggtgttaggacgtgaggcctttgggaagttactaggttatgagggcaatgcattcatatggaagagatgccagagagatctsttaacccttctgccatatggagaagacacagcaagcagatggccatctataaatgaggaagcagacctttaccagacaattaatttgtttgcaccttgatcttggaattcccatcctccagaaccatgagaaataaacttcagttttttgtaacctatcccatctgcggtatttgttataacagctgaaaaggaatatgacatcccttgacctccaaaacattgtcccacactctccttataatgtctatccaaactcctctttcctttgatgtcccaaaaatagattttttgtttttttgtttttttggttttt

SEQ ID NO: 643967 - DNA, 598 bp, Homo sapiens
gatagaactgacctgcacacacctcaaattcccagcctctggtccactatgctcaggtcaacaggacaatcatatctatttgactcacggtatgatcactcatttctccaaagatgagacaattggctgccatgatcctggcaatacactgaatgtttgtgtaccccccaaattcatatgttgaaacagccccaaggtaatggtgttaggacgtgaggcctttgggaagttactaggttatgagggcaatgcattcatatggaagagatgccagagagatctgttaacccttctgccatatggagaagacacagcaagcagatggccatctataaatgaggaagcagacctttaccagacaattaatttgtttgcaccttgatcttggaattcccatcctccagaaccatgagaaataaacttcagttttttgtaacctatcccatctgcggtatttgttataacagctgaaaaggaatatgacatcccttgacctccaaaacattgtcccacactctccttataatgtctatccaaactcctctttcctttgatgtcccaaaaatagattttttktttttttgtttttttggttttt

SEQ ID NO: 643968 - DNA, 577 bp, Homo sapiens
gtcttttggtgggtatgtggcaatgattgtgatattaatttactgggccttttcttctctataacaggcyctgtcaagatatatgtgtggtgtggcaggggtaggagcccctagaggtagcatgggctctggaatccttaatcatcctatgtgaaaaagttggtggggccgtgatttttttttttttttttttttttttttgagacaaaatttcgctcttgttgcccaggctggagtgcaatgacactattttcagctcactgcaacctccacctcccaagttcaagcgattctcctgcctcagcctcccaagtagctgggattagaagcatgtgccaccacacccagctaattttttgtatttagtaaagatggggtttcaccacgtttgtcaggctggtcttgaactcctgacctcaggtgatccacctgcctcagcctcctaaaatgctgggattacaggcatgcacccctgcaccctaatatttcctatgtgcaatggtgtagccagggtgcaaagccagttcttaatgattctgtcatccaaatattataccttctcaattccccttgagat

SEQ ID NO: 643969 - DNA, 577 bp, Homo sapiens
gtcttttggtgggtatgtggcaatgattgtgatattaatttactgggccttttcttctctataacaggccctgtcaagatatatgtgtggtgtggcaggggtaggagcccctagaggtagcatgggctctggaatccttaatcatyctatgtgaaaaagttggtggggccgtgatttttttttttttttttttttttttttgagacaaaatttcgctcttgttgcccaggctggagtgcaatgacactattttcagctcactgcaacctccacctcccaagttcaagcgattctcctgcctcagcctcccaagtagctgggattagaagcatgtgccaccacacccagctaattttttgtatttagtaaagatggggtttcaccacgtttgtcaggctggtcttgaactcctgacctcaggtgatccacctgcctcagcctcctaaaatgctgggattacaggcatgcacccctgcaccctaatatttcctatgtgcaatggtgtagccagggtgcaaagccagttcttaatgattctgtcatccaaatattataccttctcaattccccttgagat

SEQ ID NO: 643970 - DNA, 577 bp, Homo sapiens
gtcttttggtgggtatgtggcaatgattgtgatattaatttactgggccttttcttctctataacaggccctgtcaagatatatgtgtggtgtggcaggggtaggagcccctagaggtagcatgggctctggaatccttaatcatcctatgtgaaaaagttggtggggccgtgatttttttttttttttttttttttttttgagacaaaatttcgctcttgttgcccaggctggagtgcaatgacactattttcagctcactgcaacctccacctcccaagttcaagcgattctcctgcctcagcctcccaagtagctgggattagaagcatgtgccaccacacccagctaattttttgtatttagtaaagatggggtttcaccacgtttgtcaggctggtcttgaactcctgacctcaggtgatccacctgcctcagcctcctaaaatgctgggattacaggcatgcacccctgcaccctaatatttcctatgtgcaatggtgtagccagggtgcaaagccrgttcttaatgattctgtcatccaaatattataccttctcaattccccttgagat

SEQ ID NO: 643971 - DNA, 577 bp, Homo sapiens
gtcttttggtgggtatgtggcaatgattgtgatattaatttactgggccttttcttctctataacaggccctgtcaagatatatgtgtggtgtggcaggggtaggagcccctagaggtagcatgggctctggaatccttaatcatcctatgtgaaaaagttggtggggccgtgatttttttttttttttttttttttttttgagacaaaatttcgctcttgttgcccaggctggagtgcaatgacactattttcagctcactgcaacctccacctcccaagttcaagcgattctcctgcctcagcctcccaagtagctgggattagaagcatgtgccaccacacccagctaattttttgtatttagtaaagatggggtttcaccacgtttgtcaggctggtcttgaactcctgacctcaggtgatccacctgcctcagcctcctaaaatgctgggattacaggcatgcacccctgcaccctaatatttcctatgtgcaatggtgtagccagggtgcaaagccagttcttaatgattctgtcatccaaatattataycttctcaattccccttgagat

SEQ ID NO: 643972 - DNA, 525 bp, Homo sapiens
  misc_feature 425, 435: n = A,T,C or G
ttgcattatgtctaaataattatgagttataaatgaagctaacaaatagttaaatatgttctattctcctatttcgataaatatactgccataataacccacaaggtcaaagttgagtgtagaattctctgatttcttggtgctctgcacaggaatgtggtagtaaagggagagctgatcatcagccccaggctaaacttttttctttcatcgtaggtagccctgtcctcacttgagaagctttgcawacccttgtgtggggaactccctaggccccatgcaagctccatccacaattctcaccccttcagaaagcagatccttgggcacccatttgggcgagcacagtttgcactttgaaatggacccagggaagaggccatgcaggctcaggcacatttcgccaggtccctgagtgcccagcntgtgccctanaagaaagggtgaagctctgagtgggccacggtacagtcagtggaaggccagagaggcaccttctctagtgcaggattcagggcaggggtc

SEQ ID NO: 643973 - DNA, 527 bp, Homo sapiens
atcttgatttttaagggtttcttaactttattggttatgtattaaataaaacctcagcatttcaatcataatgtataagaagtatgtttatgtcattatttttaaaacataatttgaataaatgtataatattccatgtatgctgttatcataacatatttaaaaattttagcaacattcaatatctcttattttattatcatattttaaaaattaaagcctawtgatcacactttttacataagctttcgtttgattttactttcaaagattatggtcaagttctctcactatgtagactctttttcaatcatatatttctagtttcataaatgacacagcatgtttcttacttcaaaaatagcataaactttaaattagattcctatttagctacatttgaataatttaaagtaaatgtcttacattgcagagctagaaaaatgtttattttttatattttggtttgcttttggttcttttagttctttagttagcttttttttaaaaaaataaaacacttcaca

SEQ ID NO: 643974 - DNA, 527 bp, Homo sapiens
atcttgatttttaagggtttcttaactttattggttatgtattaaataaaacctcagcatttcaatcataatgtataagaagtatgtttatgtcattatttttaaaacataatttgaataaatgtataatattccatgtatgctgttatcataacatatttaaaaattttagcaacattcaatatctcttattttattatcatattttaaaaattaaagcctattgatcacactttttacataagctttcgtttgattttactttcaaagattatggtcaagttctctcactatgtagactctttttcaatcatatatttctagtttcataaatgacacagcatgtttcttacttcaaaaatagcataaactttaaattagattcctatttagstacatttgaataatttaaagtaaatgtcttacattgcagagctagaaaaatgtttattttttatattttggtttgcttttggttcttttagttctttagttagcttttttttaaaaaaataaaacacttcaca

SEQ ID NO: 643975 - DNA, 593 bp, Homo sapiens
gtctgctcattgctgctcctccatgctcctgcaccccaggggaccttgtcactttggatcccttccccaggcccttgctctgaatgtcactctaaaagttggtaataagcatgtctcatgcctgaaggaagagtctgggtccttactggtctgttcctctggggttgggatcatgagagagctcaatgagtctctgccatctggaccctgcctactgccttcctctctcctgaaacccaaaaccagggatcttctatgagccaaaggacatgctggtactggtgtggactcagcactagtgagtgaagattagagggccctggtacgtagatgtagcaggcctaataaatgcttttatggtttttaatttgatttttttcatggaaaaaatgtgaaattattttaatggaattatctttattgtttctgccaattataaaagtagcaatgcttgttaacattcaaataatatggaaaggtaaaatgttaagttctcttataatccttcctccgagatataactacgtttaacagtttggtgcatggtttttcagagacttttaatttagtgytcattgaatgagtgagtgaat

SEQ ID NO: 643976 - DNA, 569 bp, Homo sapiens
ttatggcagaccttgaataatctgtggtcacagagtgctctcttcaacagggaggcttgggctctgcactttggtactgagayttgactaagaaagtccttccaaatagctgttttcaagtcatttattacttccttgggatacacacacccacacacacacacacacacatatatatatatatatgttttcctccctccattcaatttatacagtggcaaaattccaggcctcaagatggagtaagaccagaatctaatagtccagcctcctactcagatactggaggaatgatgggggtattaggtacaaaggaaaggggcaagagataggaagattctgagggaaaccagcaactgtgggagggtgggagggcagggatattaattgggtacctactatgtgtccagcactgtggaaggcccttgatgtaaattatcttaatcaaccctcatgccccttgaaagtgtgaagacttctccagctgacagatacagacttggaggctcaaacagaggcggcttaaggtcacccagccggtgggtaccagtctgggtgctgaatcttgg

SEQ ID NO: 643977 - DNA, 593 bp, Homo sapiens
tctgtccacaagggacatggaagcaccatgagacacacgtaaaagctgcacagctatggtaacatccaaactgacagagaagcaggatcctacaggcacatggcctcccatgtggaatcctgatcgcccctcctgcctcacttgctctcctctccctgcccacaggatgaactccatctacctgagtcacttgctgcttctaggacttccatggactttccaatcttcatgcctttgattacttggttgtctcctactggagcgttttccattcctcagtgttgtcccatctacttggaaaactctccatcctttaaaactcacataagtaacgatttcttgtaggaaaacctctgtaacacctctcagaaacccactcattaacccataagagttgtatgagatattcatccttactcctaatactttgtgcatagtttgtcatggtatttaccaggcccttctaaaatcttctatttgtacaytcatctcctgtattgtgttgagagttagaaggtagcagattctatattaattgtctttgtatctatggcacctaatttcattcctatgttacaatgctgggaaaatga

SEQ ID NO: 643978 - DNA, 572 bp, Homo sapiens
atgagccaagctgagggccacttagagcagctgtggaaagcctggtcatatgacaggtatacaggcagcaagaaatgtccattgaaactgagtcctctgaaacctttgtgaggtcttctgtagtcccgttatttttactttgctcaaaactcatcagggtttctagatgcatcaagatatgtgtgttatctgtacataaaaaatgtatcacttctgtctgcaaaatttcagtattatatctcagagaggatggcaaaataggcttgcctgctaactgcgttcaaagatccacatacacatgctcaaatttttggtgagatgagtctgattcagttgtattactcagcattctgttaagtggycttcaatactgtcatacagtctaaagcaattgatagttttagtgcctctattacatcagaaaatacacaagaatgacaatatgagcaatctactctttttcaagaaagataagcaattcactagagatgtggaatgctgtttcctaaagcaatatcaatcctggatgtggttatgatgaaaagctagtagtcatagcacagtatgaacaa

SEQ ID NO: 643979 - DNA, 456 bp, Homo sapiens
aatacgtttttctaaaaaatctaaagaaaaatatttctccttgttggcttgttccatttgaaaatggctgggatggtcatttaacactttgtggcactgttggactaagtgagtatcataaatctagtaatatgtcactgtctatttggcccacagataggaggcagaccataacactattttggaaatatatcatctattttccaactaatttaaccataaggaagatgaatagctgcgtactttagccgcaatgcctttggtgagactgctactgaacagccaacatacgtttgccacctttgtcactcaaacttytaaagcacatttgactcatcagctggttgactcttacctcaagataaaaaaaacagaatgtgtgcctataacccctgcactttgagaggctgaggtggtaggatgacaggagcccaggagtttgaggttacagtgagc

SEQ ID NO: 643980 - DNA, 546 bp, Homo sapiens
taaaaccaggccttaattcctgagagggagccaaaggttggcaaagaaaagtgatgagctcctagggatgatgataaaaacctctcaggtggaataatgatatacttttatgaggaaatggacagacttaactgtcctacactgccttccatctgcaagcctgccactagcatttcccaattttccagggctgatttctcaagctttgattggaagccgatggcgtcctagagagacaggcaacatttctttgccccaagaaattcagaactgtattctgacatcatggtaaatctctgctggtctctccttctacttgtgtgaaygtgggaaagttacttaacacttccctttcctcagctattcaataaggtgatgacaataacctcctcatagataaggtgaccacacaatttactgtccaagagaggtacttttgagaatgaagggggcactactaatcattatattgtgacaggtataaatggagactgttctggcaaatcaagatgtatgattaccttacatgtagagctgttgtgaata

SEQ ID NO: 643981 - DNA, 600 bp, Homo sapiens
tcctaggtattgtgctaagtttttgtagtggacaaaacctaccctcagaaagctcaaaataaagacctttttttgatactttatgattttgagagtctatgataaaaggaaagagaatgtgaagaagtaaaacaacatgctttttaacgtttgctggatttttcctttttgaggtagaataaaatttattacaattatcgtgccgtattttttttctggaaatgttacttctttagaagaagtacctttgtaaagatactaaaaatattaattagtaatacattgttaatatacatgaaatcatgctcacttagttttagtgctaatttgaattaaattgaatttgtgaagtgattttcatttgagagtcaattcttttaactttctttaattttctcctacataacctggaaaattatgttactcttggtgtagtctaaaaactatttgacattcataatttgagctagtaaatgctgcttatagattcataaatggcaaaaagtctcactgattcaaaatctacccttatttrtattaacattttatagcatttaaatgccatatttgaattttttaaatgtgagattaatttggtga

SEQ ID NO: 643982 - DNA, 594 bp, Homo sapiens
aatctcctttgattctatgtctcagatccaggtcatgctgatgcaagaggtgagctcctatggtcttgggtggctccactcctgtggctttgcagggtacaacacccctcccagctgctttcacaggctggcattgagtgtcttcatcctttccaggcacacagtgcaagctgtcagtggatctatcattctggggtctggaggacggtggccctcttttcacagctttactacacagtggtccagtggggattttgtatggggcctccaactccacatttctcttccatactgccttgagggctccacccctgtagcatacttctgcctaggcatccaggtgtttccatacatcctttgaaatctaggcagaggttcccaaacctcagttcttgacttctgtgcacctgcaggctcaacaccatgtggaaacttccaaggcttggagcttacaccctctgaagcaatggcctgwgctgaatgttggccccttttagccatggctaggttgtagagtaccaagtcccaaggctgcacagagcagtagcagggccctgggcttggcccatgaaagcattttttctacctaggcct

SEQ ID NO: 643983 - DNA, 574 bp, Homo sapiens
aatgactttaagttgaagccagtgctcatttttcatcccctaggctcttaagaattatgctaaatctactctgcctgcactgtgtaaatggaataacaaagcctgatgacagcacatatttttacagcrtggtttactgaatattttaagcccactattgagacctactgctcaggaaaaaagattcctttcaaaatattactgctcattgacaatgcacctggtcacccaagaactctaatgagatgtataagtagattaatgttgttttcatgcctgctacacaacatctattctgtagctcgttgttctatgtataattttgactttcaagtcttattatttaagaaatatactttgtaagcctataactgccataaatagtgattcctttgataagtctgggtaaactaaattgaaaaccttctagaaaggattcaccattctaaatgccattaagaacatttgcgattttttttgaggaggtcaacagattattagcaggagtttagaagaagatgattccaatcctgatggatgacgttgaggggttcaagacttcagtggagaaagt

SEQ ID NO: 643984 - DNA, 575 bp, Homo sapiens
tgaatcataaaatgacaacattggtgattaacaaggaaaaaaaaggatgaatacattgtaaaacagccaagaaattatataagtatactaagaaaaattaagtaggcactactgataagcttactaaaaccaaagagaatttaaaataaggcctacattcaaatatgctgctaggatatttgttcatgtgttcggttttttatatatttaacattttttcattctctaatatgtggctggtattcaactaagtgctgaggatacaaagatgaaatagaaatattattaagtgctgagaaattcatggtttggtgggagaaagacaaaatggtcatttgaactgtgtgggaaccatttcaatagatatgtgtccagaaacttcagagcgtacagaaatgaatgataggaagggcttcctgaaagaagtgatgcttgacttaaactttaaagcacaagaggaaagctggtctaagggtgcagaggaaggagatgctagcagagaagttgacataaacaaggcagggaaatgggaaacacagtggttytcaagaggaattctgaattctgagctgctt

SEQ ID NO: 643985 - DNA, 553 bp, Homo sapiens
aaaaaaatttagagttggtcttacattgtcatttgcattagtgaggttgagagtttttgtttgatctccattcaagcttttaagaagcttggaaattgcaggctgaagcaattcaaatttatgcagagtttgacagtgagttaattaccagaactatgcaaaattgaattttcagaaaacaattctggcatttttgaatagttgtatgttatgaatgtacttatacataagcatatgcaagctatctgtcaagtagctggcgcaatttgaagacatgtccccttaacagaaaaatattatatttcagagagtcttacgaagcatagaggaaagactacaagtactttgccctttacccttgaaatrtatgcagaaccccaaactggagttgaactcataataactgaattcccaggcaccatacttgttaaaatagatacagacactaatccaaacatgcagggtggtctcttcttaaatattcacattccacacactgtcacagacatacctcaaatcagagcaagccttaacatggaaacagagaagacaa

SEQ ID NO: 643986 - DNA, 593 bp, Homo sapiens
agcatgggccagaagccagttttgtcatgcatttttcttatgtactgacagtatttgcaagtgcttcctaatgaaaaataggacaggagaagccattaaaagatattggtattgtcaagctccataatggttaaggaaaatgtggaggcctcagtgaaattcaagtttaaacaaagaggaaagatgatttatagtttaatgaaccattataatttttgactttagaattcctttttgaactagaaatctggagtgcagtagccaggtagtggtagtaaaaagtttaaagaggaaaagatgttttcagtttcagtatctcttttaaatcatgcctcaaaataaggaatggaggtttgagtctgcagctgggaggtcaaaaggccaagggagaagaggttccttttgattgtaaacatatgaattaatcatgactcaaaaatggagtcaagagattgtctgcgctggaaagggaaataaaatamagaaaaattatttatttgtataaacacacacatatgtatctatatacacacatggtacaaatatgtgctcatacccaccatctagctcctgaaaatctttgaccacatgta

SEQ ID NO: 643987 - DNA, 614 bp, Homo sapiens
catacaacatacctccacctctgggatacagcaaaagcagtcctaagatggaaatttatagcattaactgcctacaccaaaaagatagaaagatctaaaattagcaaactaatattgtacttcaatgaactagaaaaccaagaacaaacygaaaccaaagctagcagaatataagaaataacaatgatcagagcagaactaaatgaaactgagataataaaagacaaaaaattaaaaaaattagagagttttctttgaaaagataaacaaaattaataggccactagctagattaaccaagaaaaaaacagaagaatcaaataagcaaagtcagagatgatagatgtgacgttacaactgataccatagaaatacgaaagattatcagactactatgggcatctctaggtacacaaattagaaaatctggaggaaatgaataaattcctggatacatatcaactcccaaaattgaaccacaagaagcaaaaatcttggacagaccaataacaaatagtgaaactgaatcagtaataaatatctcccaataaaataaagctcaggaccagacgtattcacagccgaattctaccagacatgcaaagaactggtac

SEQ ID NO: 643988 - DNA, 651 bp, Homo sapiens
acttcccatagctgaatgtagcatacaatgagtgccaaagttcaggrcagtagcctggtaactaaaatttactattaattactgtaattaatttattattacaataatttaataataatttaatttatattaataattaatttattactgtaaggtaataaaatttcttgaataagtactgacattgaaatcatgagcaaaattattgtcaaatacttagaaggcatcataagtcatttgtttcttcgaaataaatattatatgataattaagaaggtttattctgtaaaactgtctgtccaatttaatgtattttgttcctcattttaaattgtctttagtacaaattgtatcagaaagaagagatgtatgttgtcttctggattcatattaaatacggaatttgagcaactgtgtgaattaactgcacctgcaaaaattgcaaagcaatgagatttaatttttctgatccatctggccttcctctacataccatctaacactgaagtaatgaaacacattctataattagggatggatattatcaagtataggcttaggaaaaagacttgtatttgtctttatgtgttatttcatttttttgtcaggagataataggcgtatcatacagatgctgagcattttgtctgt

SEQ ID NO: 643989 - DNA, 471 bp, Homo sapiens
acatgatatttggttttccatgctgagttatttcacttagaataatagtcttacttccatccaggttgctgggaatgccatgaattyattccttattatggctgaggtggtattcctcatatatatatatatatgtatgtatatcacggtttctttatccactcattgattgacgggcatttgagctggttccatatttttgtaattgtaatttgtttgagttcctcatagattctggataatagccctttgtcagatgtatagactgtgaagatttcctcccactctgtggttgtctgtatactctgctgattgttccttttcctgtgcagaagctctttagttaagtctcacctatttgtttctgttgcatttgcttttgtgttcttggtcatgaagtctttgcctaagccagcgtctagacgggtttttccaatgttatcttctagaacttttatggtttcaggtcat

SEQ ID NO: 643990 - DNA, 617 bp, Homo sapiens
ctgagtgaaaatagggaaagtctggaaggttaggccaaaaaagtacattgagttcaaggttaagtggacctcagaagccaggctaagggtttgtggctgtaacccaaatgcgaggaggaggccctaaaggtttttcaacatggagttgacatgataaaggcacattgttcctataaaaccggtcgtaacttctaaaataaaatgaacttgaactaaactcacggtggtgggtaatcatgcccagaatgtgacagtggaagagaacaccttgctgaaaagaaaggtatttccaatagagagagaggagaggagaagaggtgaagagggaaaatcctttttggaaaccaggaaaatcaggcagamgtgcatttagtgaacatattcaaaaagtagcaacataatatacattatatagcagaacaaatgccaacatgatcaaacttaaaaaataaaaagattggtggtatggaagatatgagacccctaggagaaagtgaccgtgcctaattggagataactttgcatattttggaacacaaatatatgaatactcttgattggatttgctttatttttaagagactatagcatttcagtatagtatagtatagcatagc

SEQ ID NO: 643991 - DNA, 575 bp, Homo sapiens
caagctcataattctattatgttcatttttctactcttcattcctttctctcttcatcctaccttgtgtacccggatacccaaacagtgttagagcccaggcatccctgactgccccatgacaaaaaaataatggaagcagatgtcargaaagaagtgttaggagcctcagattttcccttccattttccaagggcatgggatgcaattgagatgctcctgattccaaaaactttttctcaaaacacaaatcttatcctgttcttgtccatccgaaataactcagtggttcccctactacaaacaggccaaatctaagcacttctgcaacagactcaaaattcttcatactctagtccctgtatacctcttagcccagtggtaaccccaacctccttgcaaatgttgctcaagcaatactgcacaccactaattttctgctatatcctgtcccttcaagtctctgtacctttgcactggctctactccctgcctgaataaatgccattatttgtccaccatcaaaatatcaagtatgggttgacgcaagttagtgctttcaagctaaataatgaa

SEQ ID NO: 643992 - DNA, 483 bp, Homo sapiens
tctgacagcggaatcctatagtgggtgaagggaatttccttatataattatatttgtaagatatcaaatggaaaatgagtccttttgcgtttcatttgttatcctgaaagccaacagcattgacttcaaaattctataggctttgaaaacttccaaaccctaaatgatcagcattcctacctgacatataaacaataataacactgaagaatcagatatattgtatactcagtgaaaaatgaaaaataaaagctgtaagtaaaatcaacgatactatgccacattgaaagtaaaatcttacaggtgaacttaatgagaaacagcgacaaaaaaccctcaaatcaacattgcatttttatacttaaagctctgcatgtttttctaaataagactaattcrtcaatggtgaattttttgaggcataaaatgagtacaatggccatgcctagcctagcatttttaaattattcaaagtattgccaa

SEQ ID NO: 643993 - DNA, 615 bp, Homo sapiens
ccaatcagcagggtccagggacctttgtgggttcttgggctgggggtagaaacaaacaaaaccacgggtggttttgtctttcagatgggaaaccctcaggtatcaacaggctcacccttgaaatgcatcctaagccattgggaccaatttgacccrcaaaccctgagaaggaggaggttcatttttttctgcactatggcctggccccaatattctctctctgatggggaaaaatggccacctgagggaagtataaattacaatactatcctgtagcttgaccttttctgtaagagggaaggcaaatggagtgaataccttatatccaagctttcttttcattgaaggagaatacacagctatgcaaagcttgcaatttacatcccacaagaggacctctcagcttactcccatatcctagcctccctatagttctccttcctattaatgataagcctcctctaatctcccctgcccagaaagaaacaagcaaataaatctccaaaggaccacaaaaccccctgggctatcagttatgtccccttcaagctgtagggggaggggaatttgggccaacctgggtacatgtcctttctccctatctgatttaaagca

SEQ ID NO: 643994 - DNA, 577 bp, Homo sapiens
tatcttcacgtgtgcaagtatagctataaatgaaacaacatttttacaagggaaaagtaaaagtgctgaatcaaagcctttccttctttaaaatgttgatgctcttcttgaaaaatcttttttttttaaatttagatagcctgtatttcatgatccatgttcttgaaaaatctctacgaacttatattcctgccaaaggtatatgtagatgtgcccgtttgcccatccttttgccaataacgggtttcatatttttcagttttgctagatttagagaggaaaaaagtgctatctcattattctttcaattttgcagtgatttgctaatgactttttagatgttgattctgtaacccagtgtttttactaacttccagatttgtgtccccagcaatgaggacaagcattttgattagagtcctctagctcctcattcaaaccaggaatgaagactyggaggacagaacctagctgggctctgttttagttgccctaaattaacaccttatttaggatggatctgctacctaggaaatgagggtgagagggcacatgggggagtcatagcctagggcca

SEQ ID NO: 643995 - DNA, 617 bp, Homo sapiens
agtcaattgatgcagcaaacttcattgttgtcttattttaagaagttgccacagccactccagccttcagcatgacatgagtacatcagagaaaaactgcttgaaaaattaaagcctataagaactataaagcagctggagggagaaagtttaccttaagagtgcaacagttagattcacagctgactckcaacagaagtcaccaaacaattctccaagcccaaagctctagacccaggaagagagccttcaaaaataaatgtaaaataactaattatcttgcaaataaaaaaactaagataatttgttactttagaagaagccctactctaaagaaaataccagaatgttctctggggaaaaaagtgattttaaatgaaaggtcagaggtacaggagacatgaagatcaacgaagattaaatatgtggtaggtctcaatcaatattgactgtagaaacaaaaataatgatgttttataggttctaatataattaaaatacatgaaaatactaatacataagttgagaggggattaagtattcttactaaacaccttgcagtttgggaagagagtaagatgttctgtgttgggggtactcaagaccaccccaagctt

SEQ ID NO: 643996 - DNA, 592 bp, Homo sapiens
ttgcatgtcccttgaaaggccaagcacagagtttgtgccastgctgggggtggagtcatttcttaaaatgccaaacagagagctttcaggctctggaacgcatgcattccagttttctctgggccagggactgcatttttggtgtgctgcactgcccttcccccagggaggaaaactgtctctaggctagattactggggaccctgaagcacctttcggttcagccagtgcagtgtcactgcagctctctaggtggacattggggaatgtcagcagtagcttttagaatgtagagatggggtgctgtagttcccagggcaggatgcagtcccatgatagctacacttcacaatggtgccctgccacagcctctcaggtccgaggggaggggtgagtgatttagcatgagttcccagtctggagcaatgctctcaagaggtctccaaattaccactcatactaatgccaaggtttgtggcagtagaggaactctcctgtggtttggatcccaacagtctatggcaagaatgtgaacatcaaaactctcccactcaccctctccccagaacaccaagcctctacaggcgcctga

SEQ ID NO: 643997 - DNA, 592 bp, Homo sapiens
ttgcatgtcccttgaaaggccaagcacagagtttgtgccactgctgggggtggagtcatttcttaaaatgccaaacagagagctttcaggctctggaacgcatgcattccagttttctctgggccagggactgcatttttggtgtgctgcactgcccttyccccagggaggaaaactgtctctaggctagattactggggaccctgaagcacctttcggttcagccagtgcagtgtcactgcagctctctaggtggacattggggaatgtcagcagtagcttttagaatgtagagatggggtgctgtagttcccagggcaggatgcagtcccatgatagctacacttcacaatggtgccctgccacagcctctcaggtccgaggggaggggtgagtgatttagcatgagttcccagtctggagcaatgctctcaagaggtctccaaattaccactcatactaatgccaaggtttgtggcagtagaggaactctcctgtggtttggatcccaacagtctatggcaagaatgtgaacatcaaaactctcccactcaccctctccccagaacaccaagcctctacaggcgcctga

SEQ ID NO: 643998 - DNA, 481 bp, Homo sapiens
aactgtaaacaaccccatcattccctccctataaaccacccataacttctatatccttatctctatgaatttgcttattttagatacctcataaacgtggaattatgcagtattcattctttcacgtctggcttatttcacttagcataacatttctaagatttgtacctgttgttgcatgtctcagatattcagaccttttaaaggctgaatgacattccattgtatgcatatgctacattttgctctccctttatctgttgatgaacagttggatggttcccatctttwggctattgtgaataaagttgcaatgaacattggtggaaagtatctctttgagtctgagggcatttttaatttttttttcctgctacgtctatagggcttggaataatgtctggaatgtagtaaataggtagctgtatttttgttctcttttctgtccccctttttttctgttctattgtgtgtgtgtaga

SEQ ID NO: 643999 - DNA, 609 bp, Homo sapiens
tgtcattttccttcagagagcattcactctgtcctttttggcgggtagagagttggggaagtttatcttaatctaatcaggaactgaatcaactggtggcagaaatacctccagagataggaatggaaatcttgggatttttactagggatgttacttcctggcaggctctgaatttcaattgctatcttctcagaatcatgaaactgctccacatcccccttttccattcagcatttttctgcttagcttcttagatctttgccttatgaagtttaagaattcagcaaatgattagaaatggagagaaagttgcttgtctctagatgtatatttttgcatagttttgactcttagaaccatagtaatgttttacatattccccaaataaatgagtaagtgaacatataaaattaatcggaatatagggggaactcaaaatagaatacaaatagtaacatatgaacccaactgtactgtaaatgagtaagtaaacaacactgaaattaatggtgaagaaaataactaacaytaataactttggaaattactatttttcctttattatataaagctaaagataaaaaactttacaaaaataccattgtta

SEQ ID NO: 644000 - DNA, 597 bp, Homo sapiens
ctagactcttccaattttgttggrtcagtatacttcatttatttatttattttatttatttattgaaacagggtctcactctattgcccaggcaggagttcagttgcaggatctcagctcactgcaacctctgtctcccaggctcaagtgatcccctaacctcagcctcccaagtagctgggaccacaggtgggtgagcaaccacacctagctaatttattttggtagagatgaggtttcactatgttgccaggctggtctcaacctcctgagctcaagcgacccactcgccttggcctcccaaaatgttgggattacaggcgtgagccaccatgcccagccacaactttttaacatgttttatatatataggattccatattgtgtgtgtgtgtgtgtgtgtatgtgaaagcaggattttgctgcaaaaaagatttaaatggaaaacactcaacctagatcatgtagcagttgtacctgagtcggcatctgatgactgatggctgagcagaggattggccaagcaggcagctgtcccaggtcctagatgaccaggggccaaggacatggtacttggtgtcagagagctgggatgag

SEQ ID NO: 644001 - DNA, 597 bp, Homo sapiens
ctagactcttccaattttgttggatcagtatacttcatttatttatttattttatttattwattgaaacagggtctcactctattgcccaggcaggagttcagttgcaggatctcagctcactgcaacctctgtctcccaggctcaagtgatcccctaacctcagcctcccaagtagctgggaccacaggtgggtgagcaaccacacctagctaatttattttggtagagatgaggtttcactatgttgccaggctggtctcaacctcctgagctcaagcgacccactcgccttggcctcccaaaatgttgggattacaggcgtgagccaccatgcccagccacaactttttaacatgttttatatatataggattccatattgtgtgtgtgtgtgtgtgtgtatgtgaaagcaggattttgctgcaaaaaagatttaaatggaaaacactcaacctagatcatgtagcagttgtacctgagtcggcatctgatgactgatggctgagcagaggattggccaagcaggcagctgtcccaggtcctagatgaccaggggccaaggacatggtacttggtgtcagagagctgggatgag

SEQ ID NO: 644002 - DNA, 597 bp, Homo sapiens
ctagactcttccaattttgttggatcagtatacttcatttatttatttattttatttatttattgaaacagggtctcactctattgcccaggcaggagttcagttgcaggatctcagctcactgcaacctctgtctcccaggctcaagtgatcccctaacctcagcctcccaagtagctgggaccacaggtgggtgwgcaaccacacctagctaatttattttggtagagatgaggtttcactatgttgccaggctggtctcaacctcctgagctcaagcgacccactcgccttggcctcccaaaatgttgggattacaggcgtgagccaccatgcccagccacaactttttaacatgttttatatatataggattccatattgtgtgtgtgtgtgtgtgtgtatgtgaaagcaggattttgctgcaaaaaagatttaaatggaaaacactcaacctagatcatgtagcagttgtacctgagtcggcatctgatgactgatggctgagcagaggattggccaagcaggcagctgtcccaggtcctagatgaccaggggccaaggacatggtacttggtgtcagagagctgggatgag

SEQ ID NO: 644003 - DNA, 597 bp, Homo sapiens
ctagactcttccaattttgttggatcagtatacttcatttatttatttattttatttatttattgaaacagggtctcactctattgcccaggcaggagttcagttgcaggatctcagctcactgcaacctctgtctcccaggctcaagtgatcccctaacctcagcctcccaagtagctgggaccacaggtgggtgagcaaccacacctagctaatttattttggtagagatgaggtttcactatgttgccaggctggtctcaacctcctgagctcaagcgacccactcgccttggcctcccaaaatgttgggattacaggcgtgagccaccatgcccagccacaactttttaacaygttttatatatataggattccatattgtgtgtgtgtgtgtgtgtgtatgtgaaagcaggattttgctgcaaaaaagatttaaatggaaaacactcaacctagatcatgtagcagttgtacctgagtcggcatctgatgactgatggctgagcagaggattggccaagcaggcagctgtcccaggtcctagatgaccaggggccaaggacatggtacttggtgtcagagagctgggatgag

SEQ ID NO: 644004 - DNA, 601 bp, Homo sapiens
gacttattgttcatgcagagagtattgcataatsgagaaagtgcaaatttaaaatcagtctgacttggtttcattcctggctccaactcttgaacacatcacctaatttctcagtatatttaaaaataggtataataatacacaaaattatggcattattgtgtaggttaattattatgaataccagaatgcttcttatatggtagagtctcaaagaacattgtttctatcgtatttctccctaacctgtaataacaatgacaataacaaaagtaaagagtcatatttccaccttagtttgtaagtggtattggtgataacagacccaagaatattttcatggaggttttgaaataagatgtttctgaggccagtggtcgctgagaaagacagcagattcctttttttttttttttttgagacaggttctcgctctgttgtccagtgcggaatgcagtggcatgatcacagctcactgcaaccccagccttccaggttcaagcgatactcccaccatagcctccaagtagctggaaccacagggatgcaccaccatacccagctaatgagtgtattttttggagagagggggtttcacaaa

SEQ ID NO: 644005 - DNA, 576 bp, Homo sapiens
ggctaaaccaaattggatctggcattgcctgctgtgcatccgaggtagaacaacggccatatagagaacaatggttaagaatgtattctattctcactgggctgagcactctacattcattattgcatttcatatgcattataatccttccatgtagatacgatgatcatctctattttacaaatgaggaaatgaggttttaaggatgttaaattaatttaaccaaggcttcacagtcagcaggtgacctgaaaatgaaaatgccggtcatcctgatgccagagtccattcaatatgcattttctgagccctrcgaagtgaagtttaaggtacaggagattcatcacggctaagtttggataagccccaagtatgtggaacataattttagcagaagagacagatccttgtccttgctccaaatgaatgaatgaacaaagaaacaattgaatgaatgaacaaagaatgaataaacaaataaatgtattattgtttagaacaaagaaactcagtctactgatataaatgtgaatctcatccaaaactccctcatggaagcatgcagaataatacttg

SEQ ID NO: 644006 - DNA, 576 bp, Homo sapiens
ggctaaaccaaattggatctggcattgcctgctgtgcatccgaggtagaacaacggccatatagagaacaatggttaagaatgtattctattctcactgggctgagcactctacattcattattgcatttcatatgcattataatccttccatgtagatacgatgatcatctctattttacaaatgaggaaatgaggttttaaggatgttaaattaatttaaccaaggcttcacagtcagcaggtgacctgaaaatgaaaatgccggtcatcctgatgccagagtccattcaatatgcattttctgagccctacgaagtgaagtttaaggtacaggagattcatcayggctaagtttggataagccccaagtatgtggaacataattttagcagaagagacagatccttgtccttgctccaaatgaatgaatgaacaaagaaacaattgaatgaatgaacaaagaatgaataaacaaataaatgtattattgtttagaacaaagaaactcagtctactgatataaatgtgaatctcatccaaaactccctcatggaagcatgcagaataatacttg

SEQ ID NO: 644007 - DNA, 629 bp, Homo sapiens
actactatttgacccagcgatcccattactggatatacccaaaggaatataaattgttctaccataaagacacatgcacacatacgctcattgcagcactattcataatagcaaagacatggaatcaacctaaatgcccgtcactggtggactggataaagaaaatgtacatatacaccatgggatactatgcagccataaaaaagaataagatcatatcctttgcaagaacatggatggaactgaaggctattatccttagcaaactaacacaggaacagataatcaaataccacatgttctcacccacaagtgggagctaaatgatgagaacacatggacacwaagaggaaaacaagagacactggggcctaccttagggtggagggtgggaggagggagaggaagagaaaaaaataattattatgtactacacttagtacttaggtgatgaaataatctgtacaatcaatccccatgacaagagtttccctatgtaacaaacctgcacatgtacctatgaacctaaaataaaagtttgaaaaagagaaagaaagcactttccctcatatttataggtgttgctaaagagagttctctatctcagtggactgcttggtaatggctat

SEQ ID NO: 644008 - DNA, 613 bp, Homo sapiens
aactaggattacaggtgcatgccaccacacctggctaattttatttttagatatgggatcttgctccgttgcccaggttggtctcgaaatcctggcctcaaggcgacctcagcctccagtgtagctgacattacaggcatgagacactgtacctggctgaatgagtgcctctatcctgacacttgtgtccccacgggatcctgcagaattcaggaccccgtccacacaggggaaaactctctgttgcggtcctgatgactgaggagggagcttacccatggctctcctggtcatttttatttaatagtgagcgcagaacctcacattttctggaatgttcccatatgattttgtgagagaaaagagaatagagacccaaccccaagctcactgtgtcaaagggaaaattaagcttgggaactgagttacgcaatactccttccttgttctcaaacacatagctataacttcacaaccctgtgtcatagcctcatccataagccaggttcccacagtgacagaaggcygcatgtctcctcacatgtcctccctcacaatttgctgtgagcccctaaatctttcagaatgcacatcccacctataaactagccct

SEQ ID NO: 644009 - DNA, 613 bp, Homo sapiens
aactaggattacaggtgcatgccaccacacctggctaattttatttttagatatgggatcttgctccgttgcccaggttggtctcgaaatcctggcctcaaggcgacctcagcctccagtgtagctgacattacaggcatgagacactgtacctggctgaatgagtgcctctatcctgacacttgtgtccccacgggatcctgcagaattcaggaccccgtccacacaggggaaaactctctgttgcggtcctgatgactgaggagggagcttacccatggctctcctggtcatttttatttaatagtgagcgcagaacctcacattttctggaatgttcccatatgattttgtgagagaaaagagaatagagacccaaccccaagctcactgtgtcaaagggaaaattaagcttgggaactgagttacgcaatactccttccttgttctcaaacacatagctataacttcacaaccctgtgtcatagcctcatccataagccaggttcccacagtgacagaaggctgcatgtctcctcacatgtcctccctcacaatttgcygtgagcccctaaatctttcagaatgcacatcccacctataaactagccct

SEQ ID NO: 644010 - DNA, 601 bp, Homo sapiens
tgactaatgcacacatggctcctaaggaccatctgaggcctggtattaatttagagactggtatccacctggggtccaggtatccacttgggacctgatgttcacctggagtgtaggaattcacgtggggcctggtgtccaccttgagtgtgtgtatccaactgagtgctggtgtccacctggagtccagtgtatacctggggcctgatgtacatatggggcctgggcatccatctaggacctgatgttcagataagggctggcgttctcctggcctggtgtccatgtggagcctgggtgtacatttggagcctgatgtcccaggtggatacctgggccccagtggtcatcagatcctaggaaactctcaggccccaggtgcacataaagctccaagtggccacctaggccacaggttgatacacagggtccaggtggacactgggtgcaagatgaacaccaggcccctggtgaacgccaagccccaggtgtctgcctagtcctcaagtggacaccaggcactagattgacacacagktaccaggtggatatcaggccgcagatgaacaccaggccccaggtggggtgggttacttatagc

SEQ ID NO: 644011 - DNA, 408 bp, Homo sapiens
tttaagagtggtattattttatgatgcgtttgtcgtggcataagtctagcataatgttaattgacatcaacccttatttatatatagtttatgtttgaggactcaaatctaaccagtggcaaatccaagtttatgtaaaaattaaatatcttctaatgagtgtaatttcatgtgcatttttatagtttctcttttatttaaaaaaaccttatgtgccagactctaatttactgttatatcttagaattatatatacaagaatttaaaaatgaattctaatagctattttgactatacacaytgccatgcttggggattttaatgggcaagttatatagataagcattaatttttattccaaaagtaacatagtagtgcttcattagtacatatacatatatatgagct

SEQ ID NO: 644012 - DNA, 408 bp, Homo sapiens
tttaagagtggtattattttatgatgcgtttgtcgtggcataagtctagcataatgttaattgacatcaacccttatttatatatagtttatgtttgaggactcaaatctaaccagtggcaaatccaagtttatgtaaaaattaaatatcttctaatgagtgtaatttcatgtgcatttttatagtttctcttttatttaaaaaaaccttatgtgccagactctaatttactgttatatcttagaattatatatacaagaatttaaaaatgaattctaatagctattttgactatacacactgccatgcttggggattttaatgggcaagttatatagataagcattaatttttattccaaaagtaacatagtagtgcttcatyagtacatatacatatatatgagct

SEQ ID NO: 644013 - DNA, 275 bp, Homo sapiens
gactattactataacaaatactttaaaatgtgaatatggcttttgactgggtaatggttagaggctgaattaatttggaggagcagacttagaaaagcctagattgccgcgaatggagcattaagtgaaattatagtgaaggctcagaagaagacaagagctgtggaaagcctaaatctttgtagtgattacttcagtggttgtgacctgaatgtcgttagaaatatgcacagtaaaggccattatggtgakgtctcagatagaagtgaggaata

SEQ ID NO: 644014 - DNA, 579 bp, Homo sapiens
gcccctgtttacaagaaattccctgaagacagagagtcttctattttccttctaattccagcacttattgataatgacaatgataatgatgatgatgtccctggctctgaaccaatattttatcacttaatgaatacatttgaatactgtctgggacacactggggattttcctctgctgtatttcccttccagtagagaaagaaccaggattagaccacagagcccagtcagaaatttacttggtggctggtggtggggtcacttagatgctgatatttccctgggatgaaggtaagaaggaaggggtgaaaggaagcttggtggactctggctcatgaagactggctgatgggttcaggttattgcccttttcccagcctgtttcggggaggtcagggaacaaaagcaccatgatgactttggaaagaaggagaggtcttacagggtcagaggggtacattagctgcaaatttttccactatgtggcctcctagaaataactggagtaygggaattaaaaaactcagtcctcagccttcttctgaaccagctgagtgacactgggcaagccacttaa

SEQ ID NO: 644015 - DNA, 576 bp, Homo sapiens
ttttaaaatttcttgaaataaatgatgatggaaacacagcataccaaactctatgggataaaaccagtgtatcattctttagtctttctactcaagctatgagtagtttatacttcacaggtatgatgttataatattctgtatttttatgtgtacttgctatttctagtaagctttgcaacttcagacgatttcttattgctcattaacatccttttctttcagctcctacagcaaaagaagtactaagaggaaagtttatagtgataagcacctacataacaaaaaacttcaaataaacaacctaatgaggcatcttaaggaatgagaaaagagcaaactgaatacaaaattagtagaagaaaagaaataataaagttcacagcaaaaataaatgaagaaaacaatacaaaagatcaatamaataaaaatttgtttttttgaacagatgaacaacattgacaaaccttcaggcagactaagaaaaaaaagagcaaaaaacccaaataaataaaattagagatgaaagaggagacattgcagctgatttcacagaaattcaaagtatcattacag

SEQ ID NO: 644016 - DNA, 429 bp, Homo sapiens
aatgtattattggatgctgatatggtttggctgtgtccccacccaaatcttatcctgaattgtggtttctgtaatctccatgtgtcatggaagggagctggtgggaggtaattgaatcatgggggcagttacctccatgctgttctcatgataacgagtgagttctcacaagattttatggttttataatgggcttttcccccttttgctccacacttcttcttcttgccaccatgtgaagaaggacatgtttgttttcccttctgccatgattgtaagtttcctgaggcttctccagacatgctgaactgccagtcaattaaacttctttcctttataatttacccagactcagataagtctttaattagcaatgtgataatsaactaatacagatatggtttctctgaggaagagttatagccaatt

SEQ ID NO: 644017 - DNA, 543 bp, Homo sapiens
gattacaattcatccctcataataggctccataacagattgtactacaaagactgattacacaaaagtcatctttaaattctcttgctaaggttgtgctggataataaaattactctagattgtctactggataaacagaaaaaaatctgtaccattactgactctatttgttacatgtaaataaatgcattgacyattacagagatttggttgtagggtattaataaacagactgcttgattaaaacaagtagactccttttctggctcattctttgatctatttcattttagttggtttggttcatggagatgctgactaaggagcatactccaaactcttgatttgatcttcttgatcattataattgtctctctggcacactatgttccctcaaaagttttcaatggttacatacagccatttgtaaaatgtcaaatggtctctctttaattgagatgacaaaaactcaaaaaagagtgttctcataaagacatcataaccaataaatgatgtactgagaccaaaaccctaaaataatg

SEQ ID NO: 644018 - DNA, 525 bp, Homo sapiens
gaaaatagttcatgtcctataagcttyagtctcattttacgaattttctacataccctgtcctctgaaatatatctaaatgtagctaaaaatatctttaagctttagaaaatctttctgcaagtatctcattttcttaagtgatctaaattcatttttaaaatcgtactgagacttgaatagtgtactacaaagataacagttctacaagtttataatctggtagaaagagctagacaaaaataactatactacaagaggaaataagctttataatccataccatccaagaaagtgcacactataaaagatagagactaattctctttggtgtggtttttaaggtatgtgtggagtggttagaagtgtggggagagatataaatgttatagtggaaaagatggcattgaaatgaggcgttgaaggatagttatgattttatagctcatgaggtctttggtagctctaatactgaagatttcaacagatggagaggcaggaagaggtcattctatgccaagggaat

SEQ ID NO: 644019 - DNA, 525 bp, Homo sapiens
gaaaatagttcatgtcctataagcttcagtctcattttacgaattttctacataccctgtcctctgaaatatatctaaatgtagctaaaaatatctttaagctttagaaaatctttctgcaagtatctcattttcttaagtgatctaaattcatttttaaaatcgtactgagacttgaatagtgtactacaaagataacagttctacaagtttataatctggtagaaagagctagacaaaartaactatactacaagaggaaataagctttataatccataccatccaagaaagtgcacactataaaagatagagactaattctctttggtgtggtttttaaggtatgtgtggagtggttagaagtgtggggagagatataaatgttatagtggaaaagatggcattgaaatgaggcgttgaaggatagttatgattttatagctcatgaggtctttggtagctctaatactgaagatttcaacagatggagaggcaggaagaggtcattctatgccaagggaat

SEQ ID NO: 644020 - DNA, 564 bp, Homo sapiens
tgtaactcaaaggattatcttttgacaagctttcagttgtgtttccttaattaaaggacgcctaacacaatacaggttaactcttccaatctagatgctggtagatatatcctgggatttgccaccrgcaaaggagactatatgccttcttcatttgcatgcagcctggtagaagaaactaaaaaagcctgtgcatgaagaagtagagggactcctagtactgtatactgatggctatggagaaatgtgtgtgcctaaactttcctagggagcagaacagaaagacttgacaattctgaagcacactctttattattgagtgacatatttaatttccagtgaaagcactgacacagtttttccaacttgtgatttgctgaatggtttacaattgttttgcccatctgaagaaatctgtaacataatatttatttactttttaaattaatttactttttatttatttaatttttagaaacagagtgtcactttgtcacccaggctggagggcagtagcactatcatagctcactgtagcctcaaactcatgggcagaaggaattc

SEQ ID NO: 644021 - DNA, 564 bp, Homo sapiens
tgtaactcaaaggattatcttttgacaagctttcagttgtgtttccttaattaaaggacgcctaacacaatacaggttaactcttccaatctagatgctggtagatatatcctgggatttgccaccagcaaaggagaytatatgccttcttcatttgcatgcagcctggtagaagaaactaaaaaagcctgtgcatgaagaagtagagggactcctagtactgtatactgatggctatggagaaatgtgtgtgcctaaactttcctagggagcagaacagaaagacttgacaattctgaagcacactctttattattgagtgacatatttaatttccagtgaaagcactgacacagtttttccaacttgtgatttgctgaatggtttacaattgttttgcccatctgaagaaatctgtaacataatatttatttactttttaaattaatttactttttatttatttaatttttagaaacagagtgtcactttgtcacccaggctggagggcagtagcactatcatagctcactgtagcctcaaactcatgggcagaaggaattc

SEQ ID NO: 644022 - DNA, 563 bp, Homo sapiens
acttctgtcttacttgcacatattacacagttttcagtttcatgagtcagctatgagccttgtgttagtcttccaactttagagaacacatttcaaacacttcaagcagctttctggaactctctctctctcacttttctagaggggaagaaggttacattctttgtctcaattctccttgactggggacatgttatggactgaattgtgccactccgaaattcatatgttgaaaccctaacctccactacctctgaatgtgacctgtcacctctttttcacccctttaaaatgtacttgaagataggyctttgaaagaggtggttaagttaaaataagaccattagagtgggtcttaatttaatatgactggtgatctcataagaagaggaaatttcgacacacagagataccatagttcctcttgtgggtgcaccataggaaacaccatgtgagaacacagcaagaaggcaaccatctgcaagccaaggagaaaggcctcaggaggaaccaaacctgctgacaccttagtcttggacttctagcctccagagctgtaagaa

SEQ ID NO: 644023 - DNA, 571 bp, Homo sapiens
ctactaactagttatgaagttcatagcaattcctattctgccaaggccacttattttttagtgtcagttgaaatatttcacttttttaagaaaccttgaattttaggtatggaatacagtatttacgtcaaagaatagtaacgctaaacagagtgagtatcttacaaaacattttgaattaagtttattgaattttataatttgtgaatgtagatatcttgactggggaactgtacgtctgcatatkatattcagatagtcatgagaacttaaactcatttatatgttatataaacagaattaaaacaattgacgacaaaaaatagtttacaaccctcagacacacaggctttctgtgacataggaatttatattgtatatgtactgttatttctactagaactgtccgctttatatgtatttgccaaaaaaagaacaagtgagctacatcagctagcagctattttagctgactacagagaggaaagaaaaaggactgtacatttcaaattcttaagtactcctcaaatgcctagtgttttatgtacagatagggtagatttttccctta

SEQ ID NO: 644024 - DNA, 571 bp, Homo sapiens
ctactaactagttatgaagttcatagcaattcctattctgccaaggccacttattttttagtgtcagttgaaatatttcacttttttaagaaaccttgaattttaggtatggaatacagtatttacgtcaaagaatagtaacgctaaacagagtgagtatcttacaaaacattttgaattaagtttattgaattttataatttgtgaatgtagatatcttgactggggaactgtacgtctgcatattatattcagatagtcatgagaacttaaactcatttatatgttatataaayagaattaaaacaattgacgacaaaaaatagtttacaaccctcagacacacaggctttctgtgacataggaatttatattgtatatgtactgttatttctactagaactgtccgctttatatgtatttgccaaaaaaagaacaagtgagctacatcagctagcagctattttagctgactacagagaggaaagaaaaaggactgtacatttcaaattcttaagtactcctcaaatgcctagtgttttatgtacagatagggtagatttttccctta

SEQ ID NO: 644025 - DNA, 623 bp, Homo sapiens
gtgagggtattacagcatggaaatcagcacacataaaattcagaattgtttgttttgggtttgtctccccagagaactagcttaccaacacaccactacatgagaaggtaaaagtacttcagactgaagccagaaagccttgggttcacatcctggttcttcctcagtaagcctgtgaccttggcaagatatttaaccctgtgggcctcagtttctttatctgtaaagtggggctgatactagtgactgtgtcaaagggcatgtgaggactaaataggatgtgtgacatggttagcatgggcctcgctggtacygaatccatgttagccatcactgcaattaaaatagtaatcatctgttcatcaatttccttctcacagacatttctttttactgtccagaatgtaggcaaattttctctttggaatcccacttccctgcctatatgatattaaggcagaacaagagaacctaaaaaaatgtgaacattaggcccaaaagtcccagaatgaggtcccagcatctccgtcacttactagtggcagaatcttgagcaagtcaagagtcctctgaaccctctacctgtaaggctgccagaaggattcaatgagatacaggtttgc

SEQ ID NO: 644026 - DNA, 612 bp, Homo sapiens
attgtagcttcatggatgtctctcttccccaggaccctgtggtccatccaagctgaattaaaagcaattcctgaatcccactttgctttctcctgtttccttgcctttgcatacttgtatacctttgaattatgactctccatccccttctccttcatcagctaagttcctatattttttagcmtaatttttatctcttctacttaagtcttccctcaaactgcctgggttttcacaacattgtcttcatgactgtgttatatgacataattctctctagtaccttattcagctgtccttataattaaaattacattgaactcccatagggctaggaattgaggattatatagcaaaatccccggcaacttttatattacctgcatagaatggatgctatgaggtaatcgccatgagtatattttagttcatagctaggatgatgaattctgttactaacttccaaaatggctgccactgtttctgatactgaccaaagacaggcttttccttaagtgaccctacaaaatgaaatgtagtacatataatctccatccaatctcattcttttaatataaaattgatgtttaacataatactaaggagcatatc

SEQ ID NO: 644027 - DNA, 555 bp, Homo sapiens
atttttgttttgtctacataatggtgaatttttgataaaatcatattacataaagttaaatccattgtaattagtattcctgtagatgatctacttatctttggcaaatatgacctcttcagtttgactactgaattctttagttttgatatgactatgctagtctttgagtacttccttaatattttgtataaataaatgttttaggtcaatcctttatatttcctgcataggcctagaatcaggcatttctccaaaaggctcttgttccttttattaaaatctgttactacttaactggtaataattatatttgatttccttaaattactayggaaaattatttatactgcttagatggtattaagggaaaaaatatttatttttgcaagtcttattatagcagtacctatggactgtaaagatattgaagacacaatccttgtaccagcagcagctagtagagaatagctggtgtctcagaaatggttgctatgcaaaggaataaatggtttctagtggagtaatattagcgacattaacatctgtgctgag

SEQ ID NO: 644028 - DNA, 506 bp, Homo sapiens
tctgaaaaaactaataaagtaaacattaattcccttctaattatggctaaggcaaaaaaaagaactattaatatggctttaaatttatcaaaaagaatgcaaatgttataaattattaagaaaagctgtacaatagaaaaagcaataagtattataaatttggtcagtagttttagaacataatagtaaaaatcagaaggaacaagattgtcctgtgttcgtaatttttcactctgggagactaaattttgttgccaaaaatcctctcatacaacattggtagtagtgaaaattkgttaaatcctgtgagaggacaatttggcaatatccataaactgttaaaatatatacgaaaattgattgcaaaaattattctagtttttcacactgacgctaaatgccctaccacacataccttggattcaagtttgctggggccaatggaatagtagcaaaagacacaagagacttgaagaaacatttacatgttccacctcctttccgtg

SEQ ID NO: 644029 - DNA, 411 bp, Homo sapiens
agactaaaatatttaggtaaggacatggatgcaggatagtaggggagaaaaatcgctttgattgtaaacttgggcacattgaggatatttgaaggtcataaaagtttaacctgtaatataccataaaaaggagagatgggaataacttctggaaatattcctttaatttttcagttctttatttcagtaaattttttgtgtactgctcttggtactcaaaatggtactcacagtagatgctcacaactgtttattaaattgaaaattactgcaaatattttaacagaaayacatgattttgcatttacctatataatttgaaaaaatttgctacttattttccctcaaggtttaacttagacattttcaatatctctcttaataaaagattgtatttttctagcaataatg

SEQ ID NO: 644030 - DNA, 558 bp, Homo sapiens
gtgtgggactggagttgagaaaagggagctagaaggcaggaggatagatctgtagtaatctaaatcactgtagacatggrcagaatattcaagagatgtttagaagctaataattgacatgaattgtaaataattaaatttggaatttaagggaggtggaattcaaagatgagtaatatcatatggtagagggttaataaatatgtgttaaatgaacgaatgaagaaagaaagattcctgaccaaggcactgggtgattggtggtgcaattactgaaacttttcagttaaagaaccatagaaaattttaatttccaaggagcaggaaagagaaatttcattttcaagacatgattacactttttgatggtgtagagctaataaataaatctgagaaaactacagaacagaatgaaaaatagagaaaactgaattcaacttctttgccaaaccactggagcattatgtaattaagctttctaattacactcagttcagatcataattaaaatttgcattactagctttcaaaggttcctctggtcacctaatgctatga

SEQ ID NO: 644031 - DNA, 556 bp, Homo sapiens
cagtctgtgggtgactgttggaaccctaaaataacttaaagtagaatttggtcatttattgtttttttattaaaaggtccaactgagaacatccctgaacatctgaaccagaaatttgacatagagctctaaatattcactcattcattcatgcaacaaatatttatttatcaagcacgtcaaccatccaaggactgttctaggtacacatagttgatgtgatgaagtcagcaaatctgccttcacatggtctgcattctagtggagaagtcasatagaggtaagtacgaagaccacaaagcaggttaaaaagtaaggtgggaaagggatgctattttagacaaggtggtcagggcaagcctctcagaagaggggataagtgctcagagacctgactgaagtgagagtgagctattgacacggagaagggcatttcagactctgaagagaaagcaggggcaggctttggagggagagcttgtttatgtagacaaggaggggcaaagagtcttgtggataaagcagaatgaacaagagtaaatgggattgtaaatga

SEQ ID NO: 644032 - DNA, 567 bp, Homo sapiens
tgaaatgaagttcatgttcttaatgtatttaaaagggcagacagggaggacaggtgtaccccttactcagaaattggaggagcctggactgggaagaagagtcaatgaggaggcaagtgaattagagcctcagagggggggttctaaaaacctggagggagagggcaagtgataaaagcctcagataatccttctagggatctgggcagtagtgcagatgtggacagaatatatatatatwttttttggctggaagaccaggggttggcaatgtctcagaagatccccatggaatgggaatgtcaatgaaatggatgtctagggtttatgtgcctccagggaagaatcagaaagcccaagacaatcccaacacattttctgagcctgtgtcaacatgagagaacaccacatttttcctgtcatagagtgtgtggaagtaaggtaagagagacttccatcctgaagtagggagaaggaggctgcagagtggaagaacatatgaactgggggaccaggaaagatgagggtgatgtccagatgctggaaaacataaagagatatcagtca

SEQ ID NO: 644033 - DNA, 639 bp, Homo sapiens
aaagcacatacatagaacattatgatcattgcagacttctattggacagtcctagtctccaaatagggatacagcagtgaccatatcatagtttctttctccacagagcttacactatcattgaggaaacaaaataaacaagaaagtttaatatttgatggtggtaaatcctgtggtcaaggagtatatgatatgccatggaggatggttrggggtcagggagagatgtgttactttacaaagaaaaatcagggaaggcctctctgatacagtgacacttgagccaatccttcaagaagtggggtcaccccacagaatatcttggggaggaataggcaggaacaataagtacaagggccatgataaaataatgcagtactgggagcaccagctttagctttcccaaatgcttgaaactctttaatctttgtacagtgataactcttaagacaagaggcacaggactttctcaaaggtaggaaagatctgcttgcatatatctcaaaatatttagcaatgtggaatagaaatagggatgatacgaaaggttttgcttgcatgtaactgcaataataacttagtcaacttttattgctctcagataagtagattttacaaggaaggtgtggtaacaaccac

SEQ ID NO: 644034 - DNA, 639 bp, Homo sapiens
aaagcacatacatagaacattatgatcattgcagacttctattggacagtcctagtctccaaatagggatacagcagtgaccatatcatagtttctttctccacagagcttacactatcattgaggaaacaaaataaacaagaaagtttaatatttgatggtggtaaatcctgtggtcaaggagtatatgatatgccatggaggatggttgggggtcagggagagatgtgttactttacaaagaaaaatcagggaaggcctctctgatacagtgacacttgagccaawccttcaagaagtggggtcaccccacagaatatcttggggaggaataggcaggaacaataagtacaagggccatgataaaataatgcagtactgggagcaccagctttagctttcccaaatgcttgaaactctttaatctttgtacagtgataactcttaagacaagaggcacaggactttctcaaaggtaggaaagatctgcttgcatatatctcaaaatatttagcaatgtggaatagaaatagggatgatacgaaaggttttgcttgcatgtaactgcaataataacttagtcaacttttattgctctcagataagtagattttacaaggaaggtgtggtaacaaccac

SEQ ID NO: 644035 - DNA, 565 bp, Homo sapiens
taagaaatcttttacagacaagcaagtgataagggaaactgttaccactagaccaagcttacaagaaatccttaagggarttttaaacatggaaacaaaaaaaccataactcctaccacagaaacacatttatgaacacagtccgcagacccagtgaagcaaccagacaatagaaaatacaaagcaacggctaacgactttatgggagaatcaaaatttcatatataaatattaaccttgaaagcaaatggcctaaaggccccacttaaaaggcacagagttgcaagttggattaaaaaaacaagatccatccatctgctgtcttcaagggacccatctcacaggtaatggcacacataggcttaaagtaaagggtgaaagaaagatctatcatgcaaatgcaacacacaacaaaagtaggggccattattcttatatcagataaaacagactgtaaaccaacaacagtaaaaaaggacaaagaagggcattacacaataataaagagtttgatcaaacaagaagacttaactctcctaaatatataaacacctgaaattagagc

SEQ ID NO: 644036 - DNA, 565 bp, Homo sapiens
taagaaatcttttacagacaagcaagtgataagggaaactgttaccactagaccaagcttacaagaaatccttaagggaattttaaacatggaaacaaaaaaaccataactcctaccacagaaacacatttatgaacacagtccgcagacccagtgaagcaaccagacaatagaaaatacaaagcaacggctaacgactttatgrgagaatcaaaatttcatatataaatattaaccttgaaagcaaatggcctaaaggccccacttaaaaggcacagagttgcaagttggattaaaaaaacaagatccatccatctgctgtcttcaagggacccatctcacaggtaatggcacacataggcttaaagtaaagggtgaaagaaagatctatcatgcaaatgcaacacacaacaaaagtaggggccattattcttatatcagataaaacagactgtaaaccaacaacagtaaaaaaggacaaagaagggcattacacaataataaagagtttgatcaaacaagaagacttaactctcctaaatatataaacacctgaaattagagc

SEQ ID NO: 644037 - DNA, 539 bp, Homo sapiens
atatgagaatccaagatgtgatgtgggtggggacacagccaaaccatatcacttctacyatcaccataaagactctgtcccttgagaatcaagcagccagttggctgaatctaagccatatattcttgccttggctgctgaggagcaggaagatgtattatctgttccatttcagccacaataattggagttgggaacctgtccaaactctttggtacttctcaaatctattcagttctgcagtgacaagagcaacaaacatccagtatggattcctgtctctgattaaaactctccaacacccctcaatccttattttagattaatccagcaacttatatatggtcttcaagggtacaaatagcctgggatatgatgtattttccacacttattgcttactttacaattttccctaattttctatctcatggtttagtacgattaattattttcagctttgccaaatctccaagatttttaatgtcagtctctatacatagaatgtctgttgaactcatctcttccccttttgttttc

SEQ ID NO: 644038 - DNA, 539 bp, Homo sapiens
atatgagaatccaagatgtgatgtgggtggggacacagccaaaccatatcacttctaccatcaccataaagactctgtcccttgagaatcaagcagccagttggctgaatctaagccatatattcttgccttggctgctgaggagcaggaagatrtattatctgttccatttcagccacaataattggagttgggaacctgtccaaactctttggtacttctcaaatctattcagttctgcagtgacaagagcaacaaacatccagtatggattcctgtctctgattaaaactctccaacacccctcaatccttattttagattaatccagcaacttatatatggtcttcaagggtacaaatagcctgggatatgatgtattttccacacttattgcttactttacaattttccctaattttctatctcatggtttagtacgattaattattttcagctttgccaaatctccaagatttttaatgtcagtctctatacatagaatgtctgttgaactcatctcttccccttttgttttc

SEQ ID NO: 644039 - DNA, 539 bp, Homo sapiens
atatgagaatccaagatgtgatgtgggtggggacacagccaaaccatatcacttctaccatcaccataaagactctgtcccttgagaatcaagcagccagttggctgaatctaagccatatattcttgccttggctgctgaggagcaggaagatgtattatctgttccatttcagccacaataattggagttgggaacctgtccaaactctttggtacttctcaaatctattcagttctgcagtgacaagagcaacaaacatccagtatggattcctgtctctgattaaaactctccaacacccctcaatccttattttagattaatccagcaacttatatatggtcttcaagggtacaaatagcctgggatatgatgtattttccacmcttattgcttactttacaattttccctaattttctatctcatggtttagtacgattaattattttcagctttgccaaatctccaagatttttaatgtcagtctctatacatagaatgtctgttgaactcatctcttccccttttgttttc

SEQ ID NO: 644040 - DNA, 444 bp, Homo sapiens
ctctctatctcctgtcacccatcaattgcattttttcactttttagcattatctatcggctagtttagggaaaggtaaaactatattcagcttgctttgccatttactaaaatccctgtgatgtgaggsaggagattaaaattattggcttatttgaatttccactacaataacatgactttataccaacaatgcaatcgcatctctaacagaggagctggagaagaaaaacgagaaatcatagtgcagctgatggagatggagatttgtggagggagactggagaactggacatattttttaaacctaagtgttttgagatgccgtttcaaaactcctgcttactttggcttccttttatcaaaaacaggtggttctttgtactttgaaagagacacacaggctgcaaagagtcatctgaactgctgagaaatgtctttaatc

SEQ ID NO: 644041 - DNA, 624 bp, Homo sapiens
ctggcctcacttagggactgacttatcaaatccagcctctttagcattgtactccaaactcctcatcaagtagccacaacatcctatgaattcatgtagaacataggaaattgatgaaccttgactttgtaatatttgtgattgcaattacggacactgtataaggcttagcagcactgattcatttgacagatatttattgagtacctactatatcctatttattgttctaggtactggaaataggtaaacaagackgatgtagaccctatgtacaggtaatttggtctgtaatgttagataaatgtttggtctagcatgaggactaatgaagctgaaaaataatttggaagtcaagggtcctcaatttacaatttccctttaagcattttttaatgagtcaggactgatagcctcatatcagttaagtattttcttagtcatcataacaaacacttcccaaatctcaacccccaccatcttccctctccaaacctccctacctccctcctgagcaatttaaggaacaaccaacccttgacacagcaggaagccactgtgaccctatggcaaggctggcacttacaaataggattccttttttacaactttattgaggtatac

SEQ ID NO: 644042 - DNA, 588 bp, Homo sapiens
aaacatatttttcacagaactgtccataattggaatgactctcttagaatttcaattcacttaaggtattcaaacagaacccagattacaatttgaagggaaatttccaaagagaattcaaacattctacaatagttaaactaccagttacaagattctgtgagtgttgaattgttggccattatataacatcataatcataccagctccattatttgactatttactattttcaaatactgcaccaaagtctatatatttaattaatccacacaacaccaataaggtctayataattagtacacaaatttcataaataatgatatcaagggctaagaaattaagtaactcgccctaaattatgtaactagtaaatgaaagattccaggtttgaattcagacctacctgacaccagggtccagactcttaaaactatgctgcttctttgtaatggtgatatgtaatgagctttaaggaccccatttgtgttccatgatagcttttaatctaagataggcaaaagtcagagacaaagaatatatgcatagaacaccttaagctgtaaaatgaatgtatcaacgtgtcat

SEQ ID NO: 644043 - DNA, 607 bp, Homo sapiens
cactgggggtttgagaaaccagaaaggaagtygtaactcctttaagaggcataaaggatgaaagcttgaatagcacaatgtggttaagttggagaaggcataacacataaaatagcattgataactagtgataatttagaatgagaggaaaggctgggcacagtggctcacatctgtaatcccagtactttgggaggccaaggcaggaggatggcttgaggcctggagttttaagaccagctggggcaacaaaacaagaccctgtctctataaaaacttaaaaaattagctgggcatggtggtgcacatctgcagtcccagctatttgggaggctgcagtgggaggatcacttcagcccaggagtttgagttatgatcaaaccactgcacaacagcctggatgacagaggaagacccatctctaaataaataaataaaaataaaataaaataaattgagagaatagatgagtgaaagaatcctaaaaataactcaaaatttctagctttggcaacttgattaatgggtccagatcttcaaggtcaaatgccttttcatacaagtcattgttgaggtaatgtgggaaacttttaagaaccaatcatta

SEQ ID NO: 644044 - DNA, 555 bp, Homo sapiens
aaataaacatgcaatgcaacaataagacctctaaatttaacattctaggcacagataaagtgtaaaaaaaagaagggaggtaaaaacagcagctgggtgcagtgtcttctatcagtaatccyggcactttgggaggctgacacaggaggatcacttaaacccaagagctcgagaccagcctgagaaacatggtcaaacttcatctctacaaaaaagtaaaaaatcagctgggcatggtggtgcatgcctgtagtcccagctacttaggaggctaaggtaagatgatttctggagcccagaaggtcaaggctgcagtgagccgtgttcgtgccactgcattagagcctaggcgacagagcaggaccctgtctgacaacaaacaaaccaacaaaaacagcatgctgtttgcagaaacttgaggacttttttttatcattgaagatgataagttgagtgagacatggccagagacatagaaagagaagcagacaggtcatagaattcttttatggcaggcctaacaacttggactttttttatccaaagagaatttga

SEQ ID NO: 644045 - DNA, 495 bp, Homo sapiens
agatggagtaccttaactctcgctgtgtccttttcacttatttccagggagacattgggtcagtagtggatgaacacttctcaagagctttgggccaagccatcaccctccatccagaatctgccatttcaaaaagcaagatggggctaacccccctatggcgaggtaagaattcaaaagcagatgttctccagggcactgtctttgtttcgcaactgcctgtaccaggttccagctggagacttgcccctgaggatggatatccacttgctttttaatayttaaggacagtgaggaatttctttcagacaaacagctggatcggttttgtcacatgtggaatgtagggttggaaaggatgcagtcacaccccttaaattcctcatggaaagtagtgatacaaccggcttgagtttatagtggctgcactgagctgcgaagtaccattcctaaagccccagtggcccaatttggatctctaaataataggcgtgt

SEQ ID NO: 644046 - DNA, 614 bp, Homo sapiens
acttgccattttccactagataatttatcctcttgctcttatacattaattgtgcmaatccttctccatgaaatgtatgattttctcctcagtgaaataaaatagtatttatatttcaaaattcagctaaaataacactttctccctgaccactttctttatcctgatagtcaccacattcgtttaatgtaatatttatgcactactttaatttaaataaccacattttcctttaatacatttattgcattctgttttatctcacttgcacttattttctcataaaataaaaatatgtcttatttaattttatatttacagagataaactagataatgtcttacaggtggtgcaaactcaataaaagaaaattactgaattagtcaatgaatgacaaagtgaatgtagtaagtacggaatgatgggttcacataaatgccaaattaggaagtcatagatggtgaagaaataaacaaacatgcaaagatcaaactaggagtgtgatgtagtaaagcaatgaactcaccagtatgtgctattgcatcttttggatataagtcattttaattgaggtgagatgatatctcactgtggtcttgatttgcatttatctg

SEQ ID NO: 644047 - DNA, 527 bp, Homo sapiens
atggttttaaaaatgggagtttctctgcacaagctctctctttgcctgctgccatccatgtaacatgtaacttgctcctcctcaactttcaccatgatagtgaggcctccctagccatgtggaaatgtaagcccaataaacctctttctttcgtccagtctcaggtatgtctcaggtatgwcttgccagtctcaggtatgtctttatcagcagtatgaaaacagactaatacaaggcttataggcagaaagggacttgccttgtctcagatgagactttggactttggactgtggatgttgagttaatgctgaaatgagttaagactttgggggactgtttgaaggcatgattggttttgaaatctgatgacatgggatttgggaggagccagggagggaatgatatggtttgtctctgtccccacccaaatctcgaattgtagctgccttgtgttgtgggagggacctcgtgggaggcaatcaaatcatggggttggtctttcctcttctgttctcatgatagtga

SEQ ID NO: 644048 - DNA, 368 bp, Homo sapiens
gaattcttttgaagaaagaggaaggaggctaaaaaatattgccatgaaaaatgtttaagactactggttatatgaattgccagggctggccaggcacagtggctcacacctataatcccagcactttgggaggccgaggcaggtggattgctggagcccagaagtttgagaccagcctgggcaacatagtgagccctcatctctacaaaaaataaattaaaaaattagctgggcatggtgatatgtacttgtggtcccagctactggggaggctcaggtgggaggatcrattgagcccagaaggttgaggtgactgtgagccatggtcataccactgcactccagcctgggcaatagagtgagaccct

SEQ ID NO: 644049 - DNA, 637 bp, Homo sapiens
tagtataaaatgttgcatgtgtgagatgaaaactatatgtatttacaaatgggggaaatatgtgtttgtttatgtatacacacacacacacacacctataagacaaatatttctagaaggatataagaagctgagcacactacttttcctctgagactgcagaacaggcttggtactttacttcctttttttctatcttttaaattttgattcatgagaacataatacgtggtcaaaagtgaacaatttttaagaaaaatcacactttgatacgtgccacttcacttgttgttacgaaacctaatgtttttgtaaagtttttagttcaggatacgagttgacatgaagaatagggttcccatgagggtgtcttacagacacagcccaatttctcctgcaaaatagtgacccagctgcaggcacttttatgttgaaactacacttgctttgaactagctgaatttccctatcttataaattctaaccaccccctctttagcagccatcacaggaaaggatgaaatacagttgttcattatgtcaaggaaataaccwattagccattagacaattcaataagctttgtataaatctagtgaacagatgatatcttaaataagtttgatgaattaatgtt

SEQ ID NO: 644050 - DNA, 493 bp, Homo sapiens
agaaacccagccccattttttttcctttagaacagccttccccattcctcaaaatggaattgaggaaatcagcattccttagyagattcctggcttcagtttttatccacggctgggaaaggagtgacctgcaaggctgctttaaacaccctttggcgtggcctgaaatcaaagccgcacccacactggagtgcagttgtctcaaatgagaactcactccctcaggcaggcacatccaggaagtgctaagacacttaaaagttcctagtgctggccaggtgcggtggctcaagcctgtaatcccagcaccttgggaggctgaggtgggcggatcatgaggtcaggagatcgagaccattctggctaacatggtgaaaccctgtctctactaaaaatacaaaaaaaaaaaaaaaaaaaaattagccaggcatggtggcaggtgcctgtagtcccagctactcgggaggctgaggcaggagaacggtgtgaaccc

SEQ ID NO: 644051 - DNA, 591 bp, Homo sapiens
ttttcttaatttttctgtatatcttaaaactagtctagaaaaaaaattatttaaaataataaaaacagctatattagtctgctatgaagaactatctgagactgggtaatttataaacaagggagatttaattgactcacagttctgcatggctggggaggcctcagcacacttacaatcatggtggaaggtgaagggaaagcaagacacttcttaaatggtggcaggagcaggagagaggaagagagcgaagtgccacgcttttaaaccatcaaatctcatgagaactcattatcatgagaacagtctgggggaaatccaactccatgatataatcacctcccaccaggtccctcctccaacacatggggattacattttgggatgagatttaggtggggacacagagcaaaaccacatcgacaactaatgatcatagctaaaacaatttgagcaasaaaataagtaatgatagtattgggttataaccctaagaataaaataaatatccttgaattcatgcttgtataaataaatgaataaatgtagaggcaatgaggaaaatagaaaggtatcgttagaacacaacgg

SEQ ID NO: 644052 - DNA, 406 bp, Homo sapiens
tttgagaataatgaaagcaacaaagagtattttttaagtaagtctagagcttagctttctcacctttaaagtgacagactggcccaggcgatacttccttaaatacacgagcctagcttcatcactctgtgcttctgctagtctyagagatgactgagtcagaaaagaagattaagggctaactaccatttaacaggatgagagtttcaccataactttggttgttctgttcaaaaagcactatagccaggcatggtgacatgtgcctgtaattacatcctctcaggaggctgaggcaggaggattgcgtgagcccaggacaatagtgagaccctatctcaaaaaaaaaaaaaaaatggaaaagcattattgcattaatcccagtgcaaatattatgtgttaagtg

SEQ ID NO: 644053 - DNA, 526 bp, Homo sapiens
tcccttagtcaaatgatattaggtggaaatttagatttacatgaagagatgaagaagagtagaaatggcaaatacattggtgaacataaaaggacttctatttttaaaatccctttaaaagmtaatataatttttagtgcaaaaataataatgtattatggagtttataacatgtagaactaaaagttacggcaacaatggcacaaaggtagggaaaaggagatacaaggatacataaaatggtaaattatttgaggatagactaataatttaaagtcatatattataaaacctagagcaacctctaattaaaagaactatagctaataagccaataaagaagataaacacaaccatcttaataatcacaataaatgtaaatggactaaatacactaactaaaagcagaggtggtcagattagatttttaaaaaccaagatccaactatgatttctaaaaaaaaaaccttgtaaatataaagacacaaatacattaaaaataaaaggatagaaaaacatatacgat

SEQ ID NO: 644054 - DNA, 582 bp, Homo sapiens
ggaatttgctgggtggtgggcgggggtcctttgtgtaataattttgtgtcttgataaagtaggaatatggctgggaccatccctgactctcttttttccttgaatgtgaacacatgagtgaagcatacatccattgtccatggggcaagaaacatgaggatgaaaagccaatatgttaaggacatgaagtgaaaagcgggaagagcttcttattcatgttatcactgagcaggtaagttaacagtaacagctgcttatatttggatttttttggtaaggcaaaacaaactcttatttgtttaggtcactaagcaagttttctatactttagccttttactttttcaccacaaatttcatttatttatttatatattttttaactgtaggaatggggtctcwtcatgttgcccaggctagtttcaaactcccggcttaaggaatcctcctgctgcatactcccaaaatgctgggattacaggctattcaccacaaattgcattgagtgtccatgtgatagttaatgtgagtttactgagggtccatctaacagatagttgtataagatcccatatgttcagat

SEQ ID NO: 644055 - DNA, 581 bp, Homo sapiens
ggctttgcagggaacagcacccctcctggctgctttcttgggctggcattgagtgtctgtggcttttccaggcacaaagtgcaagctgtcagtggatctaccattctagggatgatggccctcttctcacagctccactagtcaataccccagtggggactctgtgtgggagctccaaccacacatttcccatctgcactgccctggtagtggttctccatgagggctctgcctctacagcaaacttctgcctggacatccaggcatttccatacatcctctgaaatctaggaggaggttctcaaacctcagtttttgacttctttgcacccacgtgtaaaccaccaaggcttgaggtttgtactctctsaagcaatggcctgagctgtatgctggccccttttatccagagctggagctgaagcagctggaatgcagggcaccacgttctaaggctgcacacagcaggagggtcctgagcctggcccatgaaaccatttttccctcctcggcctctaggcatgtgatgagaggggctgcattgaggttctctgatatgcccaggagatattttccccatg

SEQ ID NO: 644056 - DNA, 613 bp, Homo sapiens
gctcaccattactgaaatgatgtttatggtgtgggactagaaactgatggcaaagggaagctctggtaaaaaacaagcagatggatcaagtcttcaaggacaggcctctgtcactgtgacacattctgtagactacagacctcctgatgtagtgaattctctgtctccaagcaagactacatgcagacagatagtgattatatgtttttaaaacattgttcttcacctagtaaggcaaggcaggtagacagcaaactcaatgtggttcatggttcgttacttcccatcttcatttctcagataaaaatctgygacaaatttgccataataagacactagtttggtaaactggcaagtgccttgcagcatttcttgtgaggagcatatgctaatggatgcttgtatttgaaaggatgactcacagttaatcattataagaaataggcttaccacttcataaactctaggaaagactgttttctaaacatttaaattgctcagccattttatgcattaaaacccaattataacttagtatgttggagaatttcaaaagctattccctgcaggatctgtgcctaagactacattttatcattccgtagttcacact

SEQ ID NO: 644057 - DNA, 547 bp, Homo sapiens
aaatcacttgtccaacatcttgtagaaactgtaagtgtgcacagaaaataattgagagggagatataatttaattcaaatcacttatcaaaagaattctccttttgctttgataatatttttctaacctctcctttttacacagccaaattctcagcaataaccagaaagtcaacccaaatgtmattatcttaagtttataataattttaaagtttgggcagaaatttctcttcatatattcatgaagaaagtttcctgtaagtaaatgaatagtgaaacaaatttgcgtaggggatatttaactacttaagataatatatctttgtgggtccctgttaatttgaaagcaactatttcactgcagaaaaattgataagcaatcattcttaaatttgtaagaaaaaagactctaaacatctttattagcatgctttgtaagtccaagtccaattctgtttatttgagacatttattttatcaaccatcatctctccccgacctcttctccactatactgtaattccatggtgctaaggttattttttc

SEQ ID NO: 644058 - DNA, 547 bp, Homo sapiens
aaatcacttgtccaacatcttgtagaaactgtaagtgtgcacagaaaataattgagagggagatataatttaattcaaatcacttatcaaaagaattctccttttgctttgataatatttttctaacctctcctttttacacagccaaattctcagcaataaccagaaagtcaacccaaatgtaattatcttaagtttataataattttaaagtttgggcagaaatttctcttcatatattcatgaagaaagtttcctgtaagtaaatgaatagtgaaacaaatttgcgtaggggatatttaactacttaagataayatatctttgtgggtccctgttaatttgaaagcaactatttcactgcagaaaaattgataagcaatcattcttaaatttgtaagaaaaaagactctaaacatctttattagcatgctttgtaagtccaagtccaattctgtttatttgagacatttattttatcaaccatcatctctccccgacctcttctccactatactgtaattccatggtgctaaggttattttttc

SEQ ID NO: 644059 - DNA, 399 bp, Homo sapiens
tgaattccaatcaagggaacaaaacaggattttcagctactgatttgtggttggcaattttgattcatcaccttggaactgccagataatacccctttgctctcctttgctgtcagaccaaagactcctgaacactcaaggatttctgagaaccctgctgctcttgttccataagaacctgctatctgtgccccagagggtgatacacattggtttcatggactgtagaaaacagtgaaatcctatttaataacyccagtgacaaactgctatttgaatttcacctgctagttcaagtccacttttcaacttcttttttgctctgatccaatgtgggatataaactgaagataaatagaatttgcctattggataaaagtaaagaaatttgtgggactt

SEQ ID NO: 644060 - DNA, 399 bp, Homo sapiens
tgaattccaatcaagggaacaaaacaggattttcagctactgatttgtggttggcaattttgattcatcaccttggaactgccagataatacccctttgctctcctttgctgtcagaccaaagactcctgaacactcaaggatttctgagaaccctgctgctcttgttccataagaacctgctatctgtgccccagagggtgatacacattggtttcatggactgtagaaaacagtgaaatcctatttaataaccccagtgacaaactgctatttgaatttcacctgctagttcaagtccacttttcaacttcttttttgctctgatccaatgtgggatataaactgaagataaatagaatttgcctattggmtaaaagtaaagaaatttgtgggactt

SEQ ID NO: 644061 - DNA, 407 bp, Homo sapiens
cattagaattcatgggaagaaatgagattgtttttaagacacaggcacctggatttctttgtttaattagcatcagtgaattattaattcagcgcaaaaaagcatagctctttgtcatataaaaaatcatcaataccacaagagaccctcacaaaccaggatgatgataacttacttatatttgcacagtgctttgcaatttacaaggccctgttctgtacttcacggatttaactctgttaactgtgtggaatggagtttttgcccgggctggagccagcaggacagtacagagattttacttcctcaccatcaygccccaaattatggagaaacactccagatttaatcagaagtgcctgggacaagaagtcattaatattcaacaaattttaaaattgcattcc

SEQ ID NO: 644062 - DNA, 547 bp, Homo sapiens
ttttcaaaccctgatgcagaaaatcttgacaaaaatgtccttctttccacttctaggaaagacagtagagcataatggaaaattttggaagcagaaggtggtggtgtcatggcaaaaatgttggagtttaggggtgmagtcctggtgtcagtcaccactttgcctctcactcaagcttgggcaaaaccctctggtccttgatttcccctaaaaggaagaaggagcaaaccgatactctcgattttctcaacttgatgcccagcattggtgttcattctttttcattccagttggctatagaagtttgtagagcgtttgggttgcatctactttcacagcaaaatcctatccttccctatgtaaatatttccttagtgtctactcagtgttcaagtgtgcttggggatggtaaagcaataaacagcatctattcccatagacgtgtcatcctttctcctggctctttctcctcgaggtggaatggagcagggcagggggatgattttggggtttaaattttcatcagttaatgtcctgctgtgtgtag

SEQ ID NO: 644063 - DNA, 459 bp, Homo sapiens
atacaccagttctttttccatactttttagaaaatactgatttcacatattcaggcttcccaaagttcagttaatacaataactataaattttatattctaaaatgctcctgaaacacttattcattcattcactcatttatttattcagaaagtatattttatttatatgatagttttcttaattttacgcyaactgagagaaatagcctactgacttattgacatactttttctaagttagaaagaacacataagaggtaaggccacaacacatgtcagcaactggtaagatgcaagatgtaaaagatcaatttcgagcaatattaaacaggtacatcttcaaggaaagccaagttagaatttatgacttatagaaacaaacagatttctgaagagaaagtgggtttcaagaaagataaataaagtacgatgttcagtaggtagcctatgtgaaatt

SEQ ID NO: 644064 - DNA, 504 bp, Homo sapiens
catcacacaccagggcctgttgaggggtggggagcaaggagagggagagcattaggacaaattcctaatgcatgtggggcttcaaacctagatgacgggttgataggtgcagcaaaccaccatggtacatgtatagcctatgcaacaaacctttacgttctgcacatgtatcccagaacttaaagtaacattacataaaataaataaataaataaataaataaataaataaataaataaaaataaaaccatgtgagagagaaaaaaacaaaagagagacagccagtcagatttttaatgctcatctatgtacttatatccagcagtgggcgtacagaaatactgattatgcaaatatgctacaaaatcaggtaggataaaccagacaagtaatctttggggcccaagactagtttttctgaggttgcatagttgttgtacaggaaggacagactgtgaagagcagagaagcaaaatcagcaragccagaagtaacaatatgtat

SEQ ID NO: 644065 - DNA, 558 bp, Homo sapiens
actagtgccacttaccaatcagctaaccactttcttctgttccatctgtatacaagaaaattgaaataaaatatataactgcatcagaacaattattttttatgcagtgtatatgaatccttgttaagttgctacattaaagtactgaaaaagaaaatattaacaagtaaaaacaaattgtaagatagaaatgtgctatgaaaatatgaacagcaataaaactggcttgggatcatggtctatatgaaggtatgtctttgtggccttacccctttccttgactttttcatgtgtattttcttcaggtaaaaartacaaaatgaacgtatcaatcctctcacctggaaattagcctttaaagtatacagagctagttcgaaaaatgtgtggttcactcgaaatagttagttcttcagaattctattctacataatattacctttattgaacaataattcactttgtaaaatttaagccaaatttcatattccgttctgagatctttaacaaagaatgaaagagatagaaaatgtgctatgtaagaaacttttctctagg

SEQ ID NO: 644066 - DNA, 584 bp, Homo sapiens
tactggtccggggtccacgggttagagacccctggctaaaataatctccttatctttctttttgcatggttttctcatttctttcttgtttcctttgattttacattctgtttcaattcttgttactcattctgtctatataactgattctaattcttcacagcagattttcttcattttcatttcactttggagcaatgtaatttagatgctatgaacttgtctttacttcaatacagagtgtcctataaataagaccaaattagagcattaacatcaaataaatatacatatattgtaaataactgaaaattttaagcagtcagtaagacatgggaggcagctycatcctttaatagaaagtaatttttctccttacctctaatgtcgccatctgtgcttctattttcaatacctgttttaaggcagtattatgctgttctttggctaaaagacaggaatgacctggaacaagtggttagcactagccctgcagtggttacatcgaaggtaacagacctggacagcactaccctttatatggtgaaatttaagttttgtttcctctaaattttagatagaaa

SEQ ID NO: 644067 - DNA, 545 bp, Homo sapiens
taacagggcaaaaaattctcaataataggaaacatcagagaataaaattactttagataggcagagattgatttgtgttgaggccagataagaccattaagcaatttttagcctttctatgctgaatgttttccatttgcctgtcgagacgtattttctagccttttctactctgatctctgcccagaggggttgacccttttttactgtatcaaccaggcttctttggtttctcacttctatttgggtttggtgaatgagagargagcaaaattctgggtattacttagcttattctgtacatgaagaacatgagttgtcaatggctgtgttcttctatgaggtaatagctattgtagggttatgcctacctgctgggtacagctgcaactactgcaaaagctgttgctacagttctctgagtcctgctcatgcttcccttcccttgtctttactaggctacgcctctgagtgctttgccaaccctcattgctttctctacttatgcctttgtgaatagtccattaatttttcctcaatggctc

SEQ ID NO: 644068 - DNA, 649 bp, Homo sapiens
atggtaataaactcaggttgaatcaatgataagtgtttataatctgcttataatttatatacatgtgtactttccatattatgtttctgaatcaatgtctgaattctgctcaaaataacaagatacaacttacaacattaaagattttcaaaccagtagggtctgagatttaaaaaaatagaaagcatatattagtttatttatttttttattttatttctttaatttttgttatagcaaactaccacaaatatcattgcttagaacaacacaagttgattatcttgtagttttatagttcaaagtctgacacaggtctcactgtgctaaactcaagatgtccacagggctgccttctttctagtctctaaaggataatacagttccttatcttttgtagcttctaaagcccgccctcactcattttttggctcttaggcctcttcttccatcgtaaaagccacaaacttcacatctttctgacccttcttcaattgttgaatctctatytctgacccagcagggaaaggtcctctgcttttaagaactcagatttggccgaacagaataatttgagatgaggttctcacctttgggtctttaccttagatgcatcagcaaattcctttttgctttataaggtagaata

SEQ ID NO: 644069 - DNA, 586 bp, Homo sapiens
aaacagaacagagaacccagaaataaagctacacacctacagccatctgatctttgacaaagttgacaaaaataaggaatgggaaaagaatcccctattctattactagtgctgggataactggctagctatgtgcagaagaatgaaattggacccataccttacaccatatacaaatattaactcgaaatggattaaagatttaaacataagacctcaaactgtaagagtcytgaagaaaacccaggaaatactcttcctgacattagctttgggaaataatttatgattaagttttcaaaaggaattgcaacaaaacaaaaattgacaagtggaacctaattaaactaatgagcttctgcactgcaaaagaagccatcaacagagtaaacagacaacctaccaaaggagagaaaatatctcaaactattcatccaacaaaggtctaatatccagaaacgataagaaacttaaacaattaaacaagaaaaaaacaaataaccccattaaaaatgggcataggacatgaaaagatacttttccaaagcagacatacatgctaccaaaacaatgtgtgaaaaatgat

SEQ ID NO: 644070 - DNA, 582 bp, Homo sapiens
aagacaagaacacacatgaagatataagactggccatattctagttcttggtttgggtaggggttcgggtctctggtagttaaaattaggtgactgactgattaaacraaatatatttaaaattaggaaaataaaacaagacctttaatttaatgaatcaaagatgtttgggtgtgtggttggttggcagtctgcattaaataaaggaaacagcctgtaagataactgggaaatgaaaaggcaaattatttgtatatactgcacacagtcttttaaaccattaaaacaaaggttaagaacaatgtttatgatatacgactaagtgagggaataaaacactaggacacaaaatcgcacaattttccctataaaattccctataagaattttcaaaatgcatagaaaagaggactggaagaaagtcatcactatgttaacagttactgttttgagatggtggtgtttcatatttctttaccttttctgttttctaaagtttctgcaaagtaattcatattacttctctaatttttaagttttaaagctgtacacacatacacacaaaatcttcaagatattttt

SEQ ID NO: 644071 - DNA, 569 bp, Homo sapiens
cctgttaagaaccgggctacacagcatgaggtgagtggtaggtgagctctgcctcctgtcaaatcagaggcagcattaaattctcataggagcccaaaccctattgtcaactgtgcatgtgagagattggatggcctgctccttatgacaatctaatgcctgatgatttaaggtggaacagtttcattctgaaacacctccctcccctatcccatgaaaaattgtctttcatgaaactggtccctggtgcccaaaatgttgggtactggtgatttaaaatactttgggagattacacactaatctcaaaaagccagtcaattgctagaatattttgtatatattaattagaaataaagtagaaatcagtctctattttatcattctgctattctgcaacctctttccmctgttttttaaatgggtattccttgcattggtcatttttatatttatcaaaccaaatctcaggacatttatatttataaaattaaatcatttttaaagatgaccactggctgtcattgtctatatacaaaattctatatgaagacctttggtgaccatgca

SEQ ID NO: 644072 - DNA, 586 bp, Homo sapiens
catatggttcctcctctctattctactaatgtggtatattatattgattgtatttcctatgttgaactacctgtgcattcctgggatgaatctgctttatcatcatgtataattattctaatgagcttctggatttggtatactagtattttgtcgaggatttttgcttctgtgttcataagggatattggtctgcagtttcttttcttgcattgtctttgtctggcttggtgtcaaggtaatgctggcttcwtggaatgagtcaggatgtatttcctcctcttctatttttttgaagtatttgaaaaagattagtgttaattcttcttcagatgttcagtagaattcaccaatgaagtcatttaatcctcagcttgttttttgttgggtgatttgtggtgacttttggttattgattcaatctgtttgtatgttataggtctattgagattttctatttcttcttgagtcagttgtggtagtttgtgtttctaggactttgtccatttcatcctggctgtctaatattttggtttatagtagtttattgtattcccttataatccttttatttatgtaaacttaa

SEQ ID NO: 644073 - DNA, 597 bp, Homo sapiens
tcttccatgaaatgctaaaataacagcaccttctttaaaagatgactataaagatcacatgatgacatttgcacactgcctagcatataatatatgctcaataaatattcatttgccttaattgaaagaaactaattcacaaatcaaattctagtactttcgataccctcagttcagtatttaattatgtcctctggtgataattagtgatctagagcaatgacctcaggcaaagcactggaaatacagttgcatgtgacaccacagaggatacagagccccgtcctttgaattaacctggaatcaccrtcaatgaatcccatatgctaaaactgggctgggttcaaagtgacactcatcttagactcagtgtagctggaaaaaaaaaatcctcctttcccccaactctcaagggaattcttggagccatctaagtaagtcaatggaagaaacagtaaagagaagaccttctttaggaatgcaacactgtattcatagaagaaacaggacaaaactgagaagactgagatatgcagagagaggaacagagagacgacaaacagcttctccttctctcttttctcattccttagttgc

SEQ ID NO: 644074 - DNA, 504 bp, Homo sapiens
tgttgcaatgtaacaaaatattttttaaaagtttaattttaaacaatgattctagcatcatgaaggtatttcttcaagcactgagtgaaatcctagagctagccctctgagccaaatcagcaatttgctatttctttactcaaaggatcattttgtaatctttgttctacagaacctgattaattattttatagtatttctctttccctcatttcccattgatagtgggaccaccactttctcagcccatagtccttcacctctagtgcatatcaaacccaattattaatctcttttgtcatcccacctattcttccagggcagtatcttctaaccatgtgacctgcatatgaatcacacatgatttctgtaattctctttaaaacactgtctcagattcaggcctcatcagcccttgtgctaaaytatcattttcattcctctttttggagatatttgataacaactctttggttttagaagaacacttttcctataattaga

SEQ ID NO: 644075 - DNA, 650 bp, Homo sapiens
tattctctcagcacgattataatttattttaaaagtagggaataattggccaggcgcagtggctcacacctgtaatcccagcactttgggaggcygaggcaggcagatcacaaggtcaggagatcgagaccatcctggctaatatggtgtgaaaccccgtctctactaaaaaatacaaaaaattagccgggtgtggtggtgggcacctgtagtcccagctgcttgagaggctgaggcaggagaatgacgtgaacctgggagggggagcttgcagtgagcccagattgtgccattgcactccagcctgggcgacagagtgagacttcatctcaaaaaaagaaaagcagggaataattagtaagtgcctaactaatcaaaaattgtttccaggtgatgttgctgttgatgtatgaaaacctctttcacctagcttccctcttcattcttttctgtcatatttctattgaccagtgctttcttggcccttggaaatgtgattaacttttgccatgacctctatgttagtgccacacctgacacctttatgccactctctgcctccagaactctgtgtccatcttatatgtttttaccttctgctgggcctcaggtctggatgcaaagctgtagaggaattgagctgtttttca

SEQ ID NO: 644076 - DNA, 535 bp, Homo sapiens
cagtgaacaaaagtggacaagctgatgactagaaggataccagagatctcaacaaccagagatctcacaaagtgggtgggaagkctaggaaaaaaaaagggtgaagatgagctggactgcaggagactaggagcagaggatctctcaagaccatgttgcagggagactgtggtgaggacaccagctcagccagccacggccaggacactgccggctttcaagtgcatggctctcagacatcatctccagctcttgctgcctcttagggtcactctcttctgaaggtatgtggtctgtttggctgagagtgggccatttgtttgtggaagctggaggaccacgctgagttgtggaagtaggaatacaaaggcatgactaacttccagtaaatttgcacaaactctccttacttcaagaggaagaaaacaaggaacgccaggtctgagaatgggtcccagagatgggccaacagaggaagagtaaagacagggtctcgtcctatagttaacatatatgtctattttttttctctctc

SEQ ID NO: 644077 - DNA, 609 bp, Homo sapiens
gagtcccattctagctccatttctgggtgttttgctcaaattgacctgttttccctattgaaagagaaaattccggccaggagtggtggcttatgagccaagatcgtgccacactgcactgcagcctgggagacagagcgagacgctctgtctcaaaaataaaaaaaaagaaaaaagaaagaagkaaaagaaaagaaagagaaaattcataaaggagggaccccgtcttcactgtgccttggttttgattcttggttatgagtggttccatggtggtggaggctgctgatggaaagaggaacagaggggtgagggatttttgctgaaaatctagagaatacttagaagcccctatatttcctgggccccagaaatgattggagccaaatgggcttgtgaggaattttgaaattttgaatttcacctgaattttggatgtgatttttctctatcccgtgcatagaaactgagagaggctctttccctcaggattttgtgaatcttgtctttaactcatcgcccaaagtaacaaactcatcttactaacttcagaaaaagacatcaccagcctggcctgggaataacacataggaaattgaagacagtagt

SEQ ID NO: 644078 - DNA, 616 bp, Homo sapiens
gtgtctatttttgtttgtcttgcctgtgcttttgatgtccttgtcatgcattctttgcacaaacctgtgtccagaagagttgttcccaggttttatcctaggatttcagtatgttacaggtcttatatttaagtggtataagtccatctagcattgattttkgtctatggtgatagcaatgggctcagaattaatttttctgcatctggtggcccaattttcctggcaccatttattgaaaggttgtcctttcccaagtgtatgctcttgtttatttcatcaaagatcagttggctatagatatgtggggttttttttctgtgttatctattgtggtccattaatgtatgtgcctatttttataccagtaccaatatgttttgattacaacagccttttagtagaatatgtcagaaaatgtgatatcttcagctttttttctttttgctaaggactttttttgctatttgggctgttttgtggttctatatgaattttaggatttttttttctaattctctaaaaaatgacattagtattttgaaagatttatttgcactgaatctgtagattgctttgggcaatatggtcactttgacgatattaattcttctaa

SEQ ID NO: 644079 - DNA, 580 bp, Homo sapiens
tgtgggccccagaactttctaacagaaacatggaaatctcaaaaggaatattttttcttaagaaatctgaagctagttaaaatttcattccttacttattccctccctattcctaattacacagaagtatgtttctggcagacttttgataacttgctatttcttttaactgtataaatttaagatatacagtaacataatgttttatttatccatagtgaaataattactgcaggtaagcaattttacatatccatcactttctatagttacttcttatttttcgttttgtatcagagcacataatcttcactcatagcaaattttcaacatacaatacaatattgctaattgtagtcctacttctgtacattacatctttagacttattctatgtaactrcatgtttgtgccctttgacttacatctccccattttctccttctccctgccactggtaaccaacattctgttctctgtatgtatttggcttttttcttttttccttttatatataaatgagattattcagtatttttatttctctctggcttatttcacttaacatgtcattctccag

SEQ ID NO: 644080 - DNA, 631 bp, Homo sapiens
gaatttccctgcacaagctctcttcttttgtctgctgccatgcaagatgtgccttttaccttccaccgtgattgtgaggcttccccagccatgtggaactttaagtccaacaaacctctttcttttgtaaattgcccagtctcagatatgtctttatgagcagcatgaaaatggackaacacacaagggattttcatgattaagggcttgggaatcactaacaacttcctaaggccacatgtcaacaagtggaagtattttccacttacaagccaggaatatattcatctatcaatttacttgttcaacacttattcatacctgctttgtgatcatattaagtggcccaaggaccaaatataataataatgaaaaactcgatgaactcaaggtactcaaaatgaagtgaaaaacacattatagttctgggccaaaaagacacagaaaagaagatgctaagagctgaatcacgtatcaccctcaagaaactatttgccaattgtggtgtgtagcacatactctttatctatgcccaaaaaaattacataaaaggtaatatcagtattgcagagaatgtcttctgtgcagttatattagttacatgtttttgaaaactaattttcttctttgt

SEQ ID NO: 644081 - DNA, 631 bp, Homo sapiens
gaatttccctgcacaagctctcttcttttgtctgctgccatgcaagatgtgccttttaccttccaccgtgattgtgaggcttccccagccatgtggaactttaagtccaacaaacctctttcttttgtaaattgcccagtctcagatatgtctttatgagcagcatgaaaatggacgaacacacaarggattttcatgattaagggcttgggaatcactaacaacttcctaaggccacatgtcaacaagtggaagtattttccacttacaagccaggaatatattcatctatcaatttacttgttcaacacttattcatacctgctttgtgatcatattaagtggcccaaggaccaaatataataataatgaaaaactcgatgaactcaaggtactcaaaatgaagtgaaaaacacattatagttctgggccaaaaagacacagaaaagaagatgctaagagctgaatcacgtatcaccctcaagaaactatttgccaattgtggtgtgtagcacatactctttatctatgcccaaaaaaattacataaaaggtaatatcagtattgcagagaatgtcttctgtgcagttatattagttacatgtttttgaaaactaattttcttctttgt

SEQ ID NO: 644082 - DNA, 655 bp, Homo sapiens
aacttaactttctttccattactgctcaccatttctagtatttgaattagcatgtttatatatgcatatatacatatatatatgtgtgtgcgtgtatatataatatatggtactttctgaaaagtgctttattgccttcgcacatattgttttcactccaggcaatgccccaaagctagatatcttctacagttcccccaggatacaggtcagattacttcctctatgaagatttctgtgtaaatggaaacccaaggattgcaagtgacaggatatccaaaccttactagatttggcaaaggcaaattctctgactttgtgagtgagagctgaccaccccattctctacaccctactttaccctgaactctgtctcaaatttaatcctttccttggaagaaaaatattagaaacatatcttatttcttgatatattgaaatttcacagtatgatttttagtccatggctcttaaataattgcatcaatccacataaacctttaacaaattgaattttaaatttgaggaatggaaagaaaaagagataggggagaaagaaagcgagatagaaagaaaatgaaagcaagagagacttttgaccaactccaaaaagaagaaacttctgtgcwctgaacttgtaagatgaagggagtgc

SEQ ID NO: 644083 - DNA, 569 bp, Homo sapiens
gggatactctgcctacacatacaaaattcattcatttcccagtcctgcaaactgttaccccttggatacccctcaggcctagtgttgtagaccaaaaggatggacccagggaagagtcctgtacaggtcttgcaggcacgcttgaatttctagattcctgaggagcggaatgtggtctagaggaagggaagttggtaagtgatgagtgggcaccctgctccctgcccccctgatcccatggactccccacacaatgggaagggatgagatggagtcagagtggggccagagtagagctctctaatatgaggcacagaactggggcccatcttgctgtacgttagactctccactctgctgcttgtcagcagtggggacttatgccagcatttacctatatgagcctcagtttcctaatctgtatgaggggtcttaaatctgctgcttctgctactacacatggttgttgagagatccatataaatgtaacagcatatgtgagtactytgtaaagattctatataccagtaatgtattgttactatgccatttttttttgtttgccattt

SEQ ID NO: 644084 - DNA, 569 bp, Homo sapiens
gggatactctgcctacacatacaaaattcattcatttcccagtcctgcaaactgttaccccttggatacccctcaggcctagtgttgtagaccaaaaggatggacccagggaagagtcctgtacaggtcttgcaggcacgcttgaatttctagattcctgaggagcggaatgtggtctagaggaagggaagttggtaagtgatgagtgggcaccctgctccctgcccccctgatcccatggactccccacacaatgggaagggatgagatggagtcagagtggggccagagtagagctctctaatatgaggcacagaactggggcccatcttgctgtaygttagactctccactctgctgcttgtcagcagtggggacttatgccagcatttacctatatgagcctcagtttcctaatctgtatgaggggtcttaaatctgctgcttctgctactacacatggttgttgagagatccatataaatgtaacagcatatgtgagtactctgtaaagattctatataccagtaatgtattgttactatgccatttttttttgtttgccattt

SEQ ID NO: 644085 - DNA, 583 bp, Homo sapiens
tggttgcgtaacaggctgtgaagggcctctgcctgaaatgcttgtatttttcagaaagccttgttacaacctgccataacaaaattccrcagactgggtggcttacttcttcgtggttctggaggccggaagtccaagaccaaggtgtgagtagggctggttcctccggaggctcctctcctgggcttctggatgctgccctctgcctgtgtcctcgcccggccgtccctgtgtgtgtctgtcctaacctcctcttcctataaggacactggtcctactggatgagggccaacccctatggcttcattttacccaacgatctctttaagaccccactgccaaatgcggtcccattgggaggtcctgggggtgagggctgcagtgtatgaaagtgggggagacgcagtgcagctggtgacgcagccccgcagagctgagcgcgttgcctggcacacactcgtgccgactcagtgtgcggctgggttggtggcccctcgaaggcgtctgttaaatttgtttatttctagcatcgcagagtcaccaagaaaggaggctggagctccactctctctgtgggtttgtc

SEQ ID NO: 644086 - DNA, 583 bp, Homo sapiens
tggttgcgtaacaggctgtgaagggcctctgcctgaaatgcttgtatttttcagaaagccttgttacaacctgccataacaaaattccacagactgggtggcttacttcttcgtggttctggaggccggaagtccaagaccaaggtgtgagtagggctggttcctccggaggctcctctcctgggcttctggatgctgccctctgcctgtgtcctcgcccggccgtccctgtgtgtgtctgtcctaacctcctcttcctataaggacactggtcctactggatgagggccaacccctatggcttcattttacccaacgatctctttaagaccccactgccaaatgcggtcccattgggaggtcctgggggtgagggctgcagtgtatgaaagtgggggagacgcagtgcagctggtgacgcagccccgcagagctgagcgcgttgccyggcacacactcgtgccgactcagtgtgcggctgggttggtggcccctcgaaggcgtctgttaaatttgtttatttctagcatcgcagagtcaccaagaaaggaggctggagctccactctctctgtgggtttgtc

SEQ ID NO: 644087 - DNA, 531 bp, Homo sapiens
taggtacctattattcttccttgccccactattaaagtgcattcttccaagaagaatgagaaaaaatacaaagcaagtgtctaccaggcatgatttaataaccacattaattatcacttctgatgggggtgagctctgctgagaggccggctttcccagctgtcagaatcaggttggcaaatataacgtgtggaagtttatactccttacacagcagcctccatgccaggcttgtatcttcaagaacagttttgctaatccattgcctggcaaaaattcttgaaaactcaaccctaggaaaggtttctaacttctaaggaacatttgcttttaggatacgattgytataaaaccaattatgtgacctttccattttggctgctcagaagggaagtgctgtttaatcctcactcatagtacctcttacagaagtggctaggcatgcttgctctcttcaaccctgccttgtttgccttgttttgtttcccacttaaacagtctcattgagtacatgtattttattgtaagttt

SEQ ID NO: 644088 - DNA, 614 bp, Homo sapiens
ctcagtggctctgagaccctggagtggaggactcaaggcagagggtgatgccraaatcacacacatctgagctccaatccaaactccactacgcagctgtgtgaccccactttatgaggctcagcattctctagtacaaaatgaaactacagaaggtaccaaaaagctcaggatgaggggagaactgcaccctgaatgcaggactgccaggcaggtggtaagcactcattagcttgtttcaagcacacaaatcatatgttgtttttcatcatgtctccccatggtgtctggtctatggctccagaaccaggaggcttctgatcaatccttatgctaaatgatagacagatagatgggtgggtggttagacaaataaatggatggatgcatggattgatagattgatgctgggatgaatggatggatgaatagatggatgaatggataaatgaatggataggtgctcagaagacagaataaaacagggagtcaaaatgaaaataacaagatgattgaaggatggggctgatacatggaagagaggtacaagatccagcccttctggctccattcagccccacaaccacataccttggggtagcactggcacatgc

SEQ ID NO: 644089 - DNA, 521 bp, Homo sapiens
agttgatagttgaacttgtaatctatgataatcagcttggatgctatactgacaggaagatggtgaactcacaacgtctaattaagataaaatttaaaaatatattgattcatgtccaaagatttaaaaaacctaagcggcagtgtcacaatttcttctttttagtttacatggtttcttaaacgcctacaattattttaaaggaagccttgtgtctaggaaaaattgagacatatggaataaattactaatccatttctccttgaaatccattagatgcttgatgatttttcacatatatttctgaattgaaaagctagttgggaattatttttataagcatatccttatgtaatattttgtttttaacagtgaattgaaggtttaaagattaaattattccatccagagaataaaaagcaattattycacaaggaaaacatgtgtatgttgacacgacattttaaaatctagattttaaaataggtcccatatacttttaagtcaattagaatatgttt

SEQ ID NO: 644090 - DNA, 529 bp, Homo sapiens
agctggggcagaaaacccaccttttaatacccacactctagatggttctgttataggaggcccatgcgcctgtctttgagaacactgatctagcagccccccaccccactgtcccgagaacatcattcttcctcctccagctactaaagcctagcaaagtatttggcacagtagatgccaaacaattatttgtcaataacaatagctaatatgaatacacttactctgtgtcaggcattgtttttgttctcagcactaagttcatctaatccttacaacagccctaggagataggttggaatattagccccattttataaatgaggaaaccaaggtacaaagaagatacttaattaacttgtctatgattatataaccagtaagtagcagttacagaattctawcccagagaatctggcttcagagtccattttctcaactactatactctatgaatgaataaatggatgaataatgaataatggatggctggatcataaataatggataatagatggctggctggatg

SEQ ID NO: 644091 - DNA, 578 bp, Homo sapiens
caaaccctatatcacagttctttcacatcatttcacctaccccttacaacaacctttgaggtgggtattcctaacaggagtggttgtcaatttatttaactatcaataagccacagatacttgccaatcagaaagaacactgagttaaacactagaacagggtcctggagacccctgactgtgccaggtatttgttgctagatgaggaaagaggtggggaggagccagggtgcctggcacaatgaaggggagattgggaagctatttgacaactggcctgggaaatgctctaatttttaaactgctggtatggattttgtactattggacatggctgaacatcagccgtgactttcaatctccccattctgcaaaggacaaagctgaggccctgggaggtcatgaaagcttctcaagataaacccatcaaaaagcaacargcttgagttgaaggctactttaagtctttgagactccaaagttggtgttcttaaccgttatgctgactgtacacatgtctctaagttgacctcagtctgtgccaggctggcctggcatttctctacaaagaactggag

SEQ ID NO: 644092 - DNA, 625 bp, Homo sapiens
tggctgacacctcaacagaaataatgaaagtcaaaaggcagtggtataacatattcaaagtactgggggaaaaattacccaccaagaatcttatatccagcaaaagtytctttcaaaaatgaaagcaaaaggaaggcaaactgaaacagagaatttgttgcttagcatactacctcacaagaaatattaatggaaattcttcaagatgaaaacaagtgactcctgagagtaatctgaatccacatgaaataaagtgacagtaaaggtgacaaagtaggtaatttttaaaagacagtataaatgcctatttcttttcctttcttctcttcattgattataaatacaattgtataaataaaaggtacataatagttttatttggcctactacatatagaaatgtaatatttttgaaaataacagcaaaaaggacgtgagtggggacaaaattatattgaagtaagtaaacgataccagatagtaactcaaatccacaggaagagctgaagagaaccagaaatgaagaagagtggaaaactaagaaaaatcaatgaaaccaacaacattaatgatcaacaaaattaacaaaactttagttagactgaccaagaaagaaaaaacagaga

SEQ ID NO: 644093 - DNA, 560 bp, Homo sapiens
gtgaatccaacagagctcttctcaatgaatgtccttgatgtggtttcagaccatgattttaaatttgtctgtctcaaaggggctgtattgtgaaggttgcaagccactgttcacatactatgtttattgtagtgctacaacaagtagttttcttaatattgctgttcacctcatctttgttgttattgttcatgcacctggaggctacttggcaatgggtgtacacatagaaaataagaaaccagcaaatttcattgcataataataatctaggaaaggcaagcastgtgacagaaattattctcatcatattactctgctttctatgaaatacacatgctcacattcacaaattgggttgcctcaagctttgaggataagcattgccctgttctgtctccaaggagaaacacagtaaaaacctgagatagtgcaagcattatgcatgctcaattcactcagctgcaatttgggggaaattataattgtattccagtcatagagcatattaactcacttttacaaattattatatttgctgtgtttctgtgtgtgtgtgt

SEQ ID NO: 644094 - DNA, 560 bp, Homo sapiens
gtgaatccaacagagctcttctcaatgaatgtccttgatgtggtttcagaccatgattttaaatttgtctgtctcaaaggggctgtattgtgaaggttgcaagccactgttcacatactatgtttattgtagtgctacaacaagtagttttcttaatattgctgttcacctcatctttgttgttattgttcatgcacctggaggctacttggcaatgggtgtacacatagaaaataagaaaccagcaaatttcattgcataataataatctaggaaaggcaagcactgtgacagaaattattctcatcatattactctgctttctatgaaatacacatgctcacattcacaaattgggttgcctcaagctttgaggataarcattgccctgttctgtctccaaggagaaacacagtaaaaacctgagatagtgcaagcattatgcatgctcaattcactcagctgcaatttgggggaaattataattgtattccagtcatagagcatattaactcacttttacaaattattatatttgctgtgtttctgtgtgtgtgtgt

SEQ ID NO: 644095 - DNA, 582 bp, Homo sapiens
agaatgggtagtagaagaaggtagtcatcaataccagctattatcatgtgaccagttgcagaaaggaggattgtaactgtcatgagtatttactctttcttttgttaaaaacatgtttgtgcatgtatacacttgtactaagaaaatatcttcattttatttctttttcctttatcatgtgacataagatttattgacctcatatcagcatttaagtattgttaactttatgtaatagtacttgggttggggattgatgtgtttccagttgtacaaaggatagttgtattatgttaggtgtaattaggaccttattattgcctttatttgaagattatgtatgatctcaggagatgtatgtgggttcaagttgacaagaggtggaattgtgatggttactattgagtgtcaacttgattggattgaaggatacaaartattgatccttgatgtgtctgtgagggtgttgccaaaagagattaacatttgagtcagtcggctggggaaagcagactcacccttaatctgttgggcaccatctaatcagctgctagcgaatgtaaagcaggcataaaaatgtga

SEQ ID NO: 644096 - DNA, 582 bp, Homo sapiens
agaatgggtagtagaagaaggtagtcatcaataccagctattatcatgtgaccagttgcagaaaggaggattgtaactgtcatgagtatttactctttcttttgttaaaaacatgtttgtgcatgtatacacttgtactaagaaaatatcttcattttatttctttttcctttatcatgtgacataagatttattgacctcatatcagcatttaagtattgttaactttatgtaatagtacttgggttggggattgatgtgtttccagttgtacaaaggatagttgtattatgttaggtgtaattaggaccttattattgcctttatttgaagattatgtatgatctcaggagatgtatgtgggttcaagttgacaagaggtggaattgtgatggttactattgagtgtcaacttgattggattgaaggatacaaaatattgatccttgatgtgtctgtgagggtgttgccaaaagagattaacatttgagtcagtcggctggggaaagcagactcacccttaatctgytgggcaccatctaatcagctgctagcgaatgtaaagcaggcataaaaatgtga

SEQ ID NO: 644097 - DNA, 322 bp, Homo sapiens
tgctgaatctcttcctaatacacccagctctattcctaacataactacaactactgcttgtatytcattatttttctcatctcaaaatttatttatttagtgttatctctttatgattttacctagtcaaggaatattgtgttatttgaaactttcagcagcatattaagtaatataaattctccagcatccctaagaaaatatttcatttttcatattgaaataatgtgataaatttgattaaatattatattattatatagcagataatgttgatattccctcaggattagatttggtactaaaatgaaaaacattcaat

SEQ ID NO: 644098 - DNA, 588 bp, Homo sapiens
tggcttctggtacttaatcaactttctgttttctgggktttttttattgcactttttatttagagataattgctgattcacatgtggttgtatgaaataatacaaagagatcccatgtgtaatttatcaagttttccttaatggcaaactcttacaaactatatcacaaccaggatattagccttgatatagtcaagatacagaaaatttcctttactacagagctttctcatgttgttttcttgtttttagccaaacctgtttcccgttcactctcaactcctctaaccccaagcaagcactgatacattctccattgctctaattttgtcatttcatgcatgttaaatataaatggaatcatatcatatgtaaccttttgggattgggtacacaacataatctctagagagccaggttgttggaggtatcaaaagtttgttcctttgtattgtttgaacagtattccatggtatgaatattacagttcgttttacctttcaactgtgagagatttatttccatgggtttttccactattaggaataaagctcatataaatattgtgtactgctttttgtgtgaaca

SEQ ID NO: 644099 - DNA, 582 bp, Homo sapiens
atcccaaggtttctgacccactgtcatataaatcatttttccccaaaggtaaagtgtcatttttctctggtttctttcaagatgtataytatgttgtagtttttagaactttgattatgatgtgtttagacattgatttattaggttttagtctatttgaaatttgttcagctccttgaatctgtaggtttacatcttctgacacatttagaaaattttcagccattacctctgtttttggcatttaaaattttatagctgtttatttcttttcaacttttattttagatttgatgagtacatgtacaggtttacatgggtaagttatatatcactggggtttggtttacagattattttatcatccaggtgataagcctagtatctgaaaagttagtttgttaatcctccccctcctccctcactccacccttaagtaggccatgttgtctattgttcccttctttctgtttatgtgttctcagtgtctagctcccatttataaataagagcatatggtatttggttttctgttcctacctacattaattttcttaggactaatgacttccagctgcatcc

SEQ ID NO: 644100 - DNA, 582 bp, Homo sapiens
atcccaaggtttctgacccactgtcatataaatcatttttccccaaaggtaaagtgtcatttttctctggtttctttcaagatgtatattatgttgtagtttttagaactttgattatgatgtgtttagacattgatttattaggttttagtctatttgaaatttgttcagctccttgaatctgtaggtttacatcttctgacacatttagaaaattttcagccattacctctgtttttggcatttaaaattttatagctgtttatttcttttcaacttttattttagatttgatgagtacatgtacaggtttacatgggtaagttatatatcactggggtttggtttacagattattttatcatccaggtgataagcctagtatctgaaaagttagtttgttaatcctccccctcctccctcactccacccttaagtaggccatgttgtctattgttcccttctttctgtttatgtgttctcartgtctagctcccatttataaataagagcatatggtatttggttttctgttcctacctacattaattttcttaggactaatgacttccagctgcatcc

SEQ ID NO: 644101 - DNA, 555 bp, Homo sapiens
ttctgttctgctagatttatatcacccatttaaataattcttatctttcaaggatcaattcaagtcccacattttcaaggaaacatctaagtgagagttccaaagtttaatattttcaaaaataaaaagtattttagaaaaacaaactccaattcaagctggttggtgatattgttggtaacattgtcagtgttacaaataaaatgttactggcaaacaatggaggggraaaccaggtaaaaggatccagaaaggcttcaatcgtgggttggtctttgagatgctatcctagaatgataggtagaatgaagatttgtggtaaatattaagaatgtgggatgaggagaagaaaagagcaaaggcaaaagagagcgacagaaaccaaacaacaacaacaaaaacccatcaagatatttggtccaaaaacgtcagagagaaaaccatcctttttttttttttttttttttttttaaagacagagtctcgctctgtcacccaggctggagtgcattggcacaatctcagctcactgcaaccttggcctcctggtttcag

SEQ ID NO: 644102 - DNA, 545 bp, Homo sapiens
ggtttattatgttttgttagtggtgttgaacacatccgggctaaagaaactttccacattcctggtgggtattgctgctggtgatcctgatattcctttgtttactgctgtgaatagcccaggatttcttcatttgaactctgtctgatatttagagattttttttttttgcctcacagaactattttaatttctaaataacccactgaaaaatgtaaccaataacaatgtcattgaagtatgtgcctctgcagcaactctttttctataagaagttaaaacacctcaagtggtgtacatattgatttcattttagcagtcgtgtaaagcgaaaacttgaaagcagtgtggagatgccacctcaccattgtttagaacttccatgagaccttgttttcttggrtaagtcttaacacttcagcctaatagctaagccctccttcagctaagcccactcatcagatttgacctgaaattgtatttacttcctactggtccagtggtgtcttttcaacagtgcctcgtgtaagacagtcttttgatca

SEQ ID NO: 644103 - DNA, 599 bp, Homo sapiens
tgggcaacatagcaaaatcccatccttacatgaaaaataatttaaagattacctggatgaggtggctctcacctgtggtcctagtcattcaggaagctgaggccagaggattgcttaggcccaggagtttgaggttacagtgagcaactattgctccactgcactgcagcccgagtgaagagtgagactctgtctctaaaaaaaaaaataataataaattaaaatggatgtcatacattcagcaagaaaacataggaaatgaagagatataataaatcattgtagaaggagaaaagtgtrttctgtgaaactttactctccctctgtgtgtctctgtctctctgtatgtctgcatgtgtttgtattataagttgagatatgtgcatgaatttgtatttatatatacacatgtacttatatacatgtgtatacatatataatacatacacctatacaacatataatatatatcatctacattatatatacacaaatatatacatattctatatagaacattaaatgactagaggactttctatttctatatcggcacagctaactcgactattcaaaggctggatattttattttagggc

SEQ ID NO: 644104 - DNA, 579 bp, Homo sapiens
gttgtttttgaaattgttgcatatttcaggtataattatggtttatataatcaattgcttcctgttggatatttaaggttttttttttgctattaacaaataatgcttatatctatatttttgaacatttgtacaagtataaatgcatggtaaattcctagaggtaaaattactgagtcaagagttttacatgttttgtgaattttgatagatattgtaaagttgttcttcaaagaastttcatttattgttttcccacatttagccaacattaggtattatgaaacttttttatattggccaaaactcacaggcaaaagaaaaagaaaaaagtctcattgttttagcttggtatttatttgcttatggttgaggttaaatatagtaaaaatgaaaaacccagtactatagaagatagagttgaagaaatattccagaaagtacaataaaaggagtaaaataaagaggttcaaataggagagtaaagataagaatactggtggaattatccagaaggtccaatgagaatgatacgagaaaaaaagaaaaaaagtaggatagaaaatcatcaaagacata

SEQ ID NO: 644105 - DNA, 578 bp, Homo sapiens
ttgtttttgaaattgttgcatatttcaggtataattatggtttatataatcaattgcttcctgttggatatttaaggttttttttttgctattaacaaataatgcttatatctatatttttgaacatttgtacaagtataaatgcatggtaaattcctagaggtaaaattactgagtcaagagttttacatgttttgtgaattttgatagatattgtaaagttgttcttcaaagaactttcatttattgttttcccacatttagccaacattaggtattatgaaacttttttatattggccaaaactcacaggcaaaagaaaaagaaaaaagtctcattgttttagcttggtatttatttgcttatggttgaggttaaatrtagtaaaaatgaaaaacccagtactatagaagatagagttgaagaaatattccagaaagtacaataaaaggagtaaaataaagaggttcaaataggagagtaaagataagaatactggtggaattatccagaaggtccaatgagaatgatacgagaaaaaaagaaaaaaagtaggatagaaaatcatcaaagacata

SEQ ID NO: 644106 - DNA, 611 bp, Homo sapiens
acctttaaatacctaatatgtccaagaattgctaccagatatctgggaagaaagggagtgtcagacattttccttttcctttacctctaaataggttcacggcctgataatagttgtgagtctaagggcagtcacataaactaaacttcttgcattgcatacctgaagatcactgttaggtgaataagagtgcttttataaggtacagagaagaaataaatgggtttggcataaaatcgaatatcttaatgcatcttgaggatagtctaagtgtattccctctggcttccatttagattttcctgagagaactgatttcaaatgcttctgatgctttagataagataaggctaatatcactgactgatgaaaatgctctttctggaaatgaggaactaacagtcaaaattaaggtaagtgtaaggcagtttttctttcttttaaaggaaaaggaatccttaaaggtagaggatccctatcagtcaagataggmtagattattttgcagtggcaaaaaaaccccaagtctcagtggcttgaaagtcatcaaactatggccaaatctaacttgacttgtttttctaagtagttttattggaatgcagccatgc

SEQ ID NO: 644107 - DNA, 576 bp, Homo sapiens
tggcaagcttaatttggggagctactacttttttttcccttttctcttctccctattcaagcgggctccaacgattcttgcctccattgaggttggtggcagcacctcctgacttttgtctaaaagtctaaatccatagagaaggacaaggtttgaaaggaaaggaggaaattaagtcccatgtgaagaataaggcctgaggagagaagaattttccccaaattaaagagaaatttccctaggttggggaaagagagagagagatgatcaggtcccataagtagcctagactagcaccccaaggaagtgcatcagagggcaagagggaatggcatgggggacaccaggaagctgggtcctgggcagagccctccagcctcgcgaaagatgttggacctcaggcacatcccaaagaaagcagagaagctsgcctgaagaaagcatctgggccaggagaagggacctctctctcaaggaggtaaggagcataggaggtgatggaggctcaagaggctcctttacaccatggccctgggcaaggccccagaacccagatagaactcctgggggaaagag

SEQ ID NO: 644108 - DNA, 608 bp, Homo sapiens
tattttaattcgctttactcctttttcaaaatctaagtgctattgttctcatccttcgatctgattggtggttagcaattatttgaaataaaaaaatacacagctaataatgtcagatttatacagatatttaytgtagtgctgttaatgataatatgagatattaaaatgacatgaacaatgtgaaatgtgtttaataaagtttcttacatggagtaaatgaaataatggattcaagagtaaatttattgatgtgataatatataatatatactagtaaatgaaaaaactttataaaagtttccacagtataattctgaatgtatgagaaataataaataaccaaacatgtaaaaaatggaatatatacattaatatgttaacagtaataatttaagtattggagaaaagttaattttaatcttatttgagcttatttgtttaaatatattctataataatgtgtatcacttgggaaattaagaaaatgtatatctataaaatattgaggattatatttacaagaagattttgaaaacacagccagttgattgagccctcatctccctttactgtgaaatgcatgggactacctcttcaaataaata

SEQ ID NO: 644109 - DNA, 557 bp, Homo sapiens
gtgaaggaaataatgtataatgttataaattactataactaaaaaaaaaagagagaggcatgtaggaaacaaaatatgagttacacaaggaatggagggaaatacacagtctgacaaagtaaggataaatgaaattagataggagacagaagatagaaagatggtaggtaggtcagtacttagatrgatggatggatagatgatggatggatggatggatggatagacagacagacagacagacagacagataaggtttgaagtttcaggaatgagccttcttcagggaaagtagcccttggcattgcattaggttcaatagactagtttatctttgcgctttgaagttattcttactgtagctcagaggtaccagagttcatccaaaaccagtaagggaatggctactatgtgccagttacagaactcaatactggatactcaagtataaagaaagggcagggtgtggtggcacatgcctgcaatcccagcactttggaaagccgaggtgggcggatcacctgaggtcaggagttggagaccagcctggccaacat

SEQ ID NO: 644110 - DNA, 653 bp, Homo sapiens
  misc_feature 20: n = A,T,C or G
tatagcctgtagaactatgntatgagtcaattaaacttcttttcttcgtaaattacccagtttcaggtagttctttatagcagtgtgagaacagactaatacaagcatcagcaaaatttttctgtaaaggaccagatagtaaatattttaaactttacaggccatatggtctctgtcacaactatgactcgattctgtcattatagaatttcacacaatgaggtgtgaaagcagccacagacagtatgtaccacataaatgtggctgtgttccaataaaactttatttacaaaaacaagctgcaggcctgatttgactcataggccatggttttccaattcctggcctacatggctgattgtacccctaagtaagccatggactgagccggcaaaagtctccattacagtgatatgagggaagattggctacgtttatgactgatacaaagctagaagaaatatccagtatgatggatgacaaagtcaagttttaaaatcatgctgaggagccaaaactattagtctaaattaacttatattgttatttgattaacaaaacattatcacaaccaagctaagctacattctaccaamaaagtaaagagtaagttggatttagcaataattgctcaaaaacaacctggtgttggc

SEQ ID NO: 644111 - DNA, 518 bp, Homo sapiens
tttcctggaggaatagcaacagtggtcagcagagtttcaggtggcctgatactttttgctcagaactaatctcttactcttccttaaacttaccagaaggggcacaggatttcacctggctttcagcctttgtctcacatatattatcagatagagaagctgagccacacaagaaaacatacattcacaggctaaaatgtctatatacttaagcaacacagctactataaatgaaatgaaacagcatatgccacatggatcatatctaatataagaattataaaagataaccaagaggaaatgtttaatctgaaaattataataaagaacaayttaattgaataaagaacaggcgagagaaagttttagaattaactgttgtgatggaagtggacactgagagactctcaagtaagtagtagaaaaggataaagagatggtaaatttttttttaagctaagaggtaggaaaaacaaaataagaaacaaaaaagtcaaaatcatgtaattgagtccaat

SEQ ID NO: 644112 - DNA, 564 bp, Homo sapiens
ctctcagtatacaatagcaaacaycatttctgtatagtaagcttgtccaacccgcaggtggcaggctgtatgcagctcaggacagctttgaatgcagcccaacacaaattcataaactttcttaaaacattatgagatttttttgcattttttttgttttagctcatcagacattgtaaaatcaaaggttagcatgttttcatatcctaggatttaaaaaagaagagggtcaaaaacataaatctgattagatgttggcacatgataccaatgagaaaaaaaaaagagtggatatggtatcttagaaatcatcaataaggcaactcctacaggcctaaattcaataacagtaggtaggaaaaaaatgatggagaaaaagatgcataatttaggatgaatataggagaggcacagatgtctcagaatagtgtctggaaatagaaatcctagaataaccagaggtttgtgaaaaaaggtaaaggcaagaaaatggtatgctttttcttatgtttggagaaagaagaaagagacatagccattgcttggcatagatgatgtgtaata

SEQ ID NO: 644113 - DNA, 642 bp, Homo sapiens
aaaatagaaagaaaagcagaaggagcagcagtaagaatrgatacagaaaaaaatctttacctcatgttagcatacttacatcccaaaatagataaaacagaattttattcctgggcttttggtaatgtaagccaatacattcctattaatttgagttgggtttctgcaagttgcaacttaaaaaaatctaaacattatgaaaaccataaccaaaagtgtcatacatacacgaatgtgctatattctaaattttaaccatctggaaaccaccaaagagttaacttgtactaccacattgaaatatttattatgtatacagtcatgagctgcataaagacaaactccacatacaatggtagtcttgcataagagtataatgtcatatatttactgtaacttttctatgtttagatccacaattatttatcattgtattacaactgcctacagtgtttagtacagtaacatgctgcacaggtttgtagcctaagatcaataggttatactatatagcctaggtgtgtactaggccataccatgtaggtttgtgtaagtaccctctatgatgtttgcatgacaatgaaattgcctaaggatgcatttctctgaatgtatcctcattgtgaagcgacatgtgactgt

SEQ ID NO: 644114 - DNA, 580 bp, Homo sapiens
tgaagcacctgtaatacattcagggaaagcaagtgtgaacccaaaaactaaatgttctacagccagtgaagacgtctttcaggtttaaaggatatattcaaacagttttgaatatataaaaactcagggaattttttttttcctaagaaactactggayagtaaggaccaatcacccgtttataaggggggttaactcatgaaatcattttgttaattttgttctgctgcgattaaaacaattttgtttttatggattacatttagaattagacaaaatgaataaaatgtcttatgaagtcagtatatggaactttctgtttttgcagcattctaaggcaattttcaaagaatggaaatttttcttattttcctttttaatttatactagatactaatttacaacatctttttctttctaaattgtactgtaatgaaaatattcttatgtacatacttttattttatgtcatcttttatcattctttctttaggctttttgctatgaatttccatctacgttacaattttgtatcttatgagtcttcatatatattttaactatttttagtgtatgatta

SEQ ID NO: 644115 - DNA, 482 bp, Homo sapiens
tgaatgaaaagacagaatggttatcatcttcatggggaagaaattccagaagcaaacaacatggcagaacagttgtgtttttccaactattctgtattttcctgagctgtctaatagagcaaggtataatacaaaatttttcttcgaataacttaggtttccttagaatgtttccagatttgacctaattcaagcaacacgaggatgtaatatccgtttccatcctctgccaccctgattccttagccatgtgcttttcttttcaactattatcaccactagacacattacatattattattacttgttaattattttctttttttttttgaaattgaaaagtagtaattttatttgatatttttgttagataacaaaagaaactaaaatactaatagtctgtttaatagtctgttttttaatattattattatactttaagttwtagggtacatgtgcacaatgtgcaggttagttacata

SEQ ID NO: 644116 - DNA, 576 bp, Homo sapiens
tctgtgtgtacatggacattgacacagaagaaaaacagtagttgcttagaaagcatgtttctttgtagagaactctgaaatcccatcttattataacagggattccttaaaaacaaggagactttgaaatgcaaagggataaatttaaatagtgtaattcaggtaccccataaggcaatgaaggttttttcatgtattactgattaatcttctgttgtctgcctttggaaggtccatagaataggcaaagctccycttccttagattctggagcccagttggtcagcctctactttttaggtgctatagtcattctcagcatggcagaagccaggccaaggagctggggcagacatgaaaatcaccagaggttgggctgtgggtggtctggctagaactttacataggttgcttttggcttttgcagagaagaagaggagtgtagaatacctttacgtaaacaattcagacccaacccaagccaaaatgagtaacaagagtctgcaggatgaaatggtattatttggttccatcagtctcacttgataacagcttagcttcccacacaatgtagag

SEQ ID NO: 644117 - DNA, 450 bp, Homo sapiens
gaggagtgacagggctttattcttaataaatgttggaggagaaagtggagagatggcctgaggtcagaaggcaaagttgtggacaaaatagtcaccacattaatccctacttttcttcagaatgttatatayaataaggatcaaaataataaaagaatagaaattgtccttcaggctagaggataggcatagggtgggagacaagaagggaaataagtaggataaattgctggaaataatcagacttttcatggaagttagtacaaggtgcaaattcacatcaatatcccttttagttgggtgccagtgtcagaatagagagtatacaaaatgttgtggggataccatgagaagaactcactaggagagattaagaaaggcttcagtgagaaaatgacatttcagtttcatcttgaagatttatgatacaggcagttggtgagaatgttt

SEQ ID NO: 644118 - DNA, 597 bp, Homo sapiens
atgatgcaggaaaggaggaaattggggatccctgccctaaaattcctggcatgcatgctgaggttcagtctccctcctggcacacagatgaaccaggcccaacatacaccattgccaagagtcctctcagccagagaattcttgaagagccccagatgcaagtaagtgttccttgagctgaagaaaccagaactagaagatgcagtaaccttgggacccagggctgtgagtcatcaaagcataaggcttactcgagtttgggagaggatatatttcctttctttgaaaatatttcttgttgtgttcttaattttttaaaaagtcagctcatggcagccactcaataaaaatgtaaaacagactgagtacagtggctcatgcctgtacttccagcactttgggatgctgagatggaagcattgcttggagccaggagatcaagaccagcctgggcaacataacaagaacccatctttacaaaaaatgtttaaaaattttccaggcatgatggtgtatgcmtgtagtcccagctactcgggaggctgaggcgagaggattgcttgagcttaaaaaatctatagagagagacagagacag

SEQ ID NO: 644119 - DNA, 616 bp, Homo sapiens
acagtgcactcctagagtgcaaacaaaggtaatgatttagaaaatctctcggtgatgtggatgagaatgagtgttagagcaatccctaggcagcagaaaaagactccagtgcttacatagtcctagtgtgcacacatggcttctgctgtaattcttttttgttaaaacttacctggctttgcgcacgacctcaaatgtggtgaattctagataacacctaatatttattcatgccattgtcaagagcatctttgcagttcttgccaaggtctgtcgtcgaatatgtttatccagctgcatggcaaaaacgtaatacacagtcatcattttactcagtcacctactcaatattttcttctataattaagttaactcataaatatcacacttttaatgcgagagagccatggttcatccagccagttgaatagttgtttgtccattatctaatgttgcygggcactcagtcatttcattatggagtttgaaataatgaaaatcattgcatttacttaacatgcacagtaaacagaccaggatccttccaagagctcctttattatgcagtgcaaggccatagaggaaattttgtaagaagcacaaagaactgtggggg

SEQ ID NO: 644120 - DNA, 598 bp, Homo sapiens
ccgctggcttcccatcaccagcagggcaccccttgatggtgagctcctcaaccaccacataccaatccctatagctccttctgctccygcgtgcctcatggacactgccctcttgcctcatggcactctgcacctcggtcccttcacctgcctctgctcaggctgtgcttgcagctcctctcatgactccctctttcctaccattcagagctctgctcacttcccagggacaactcctcagaccatttcctccttagtccagcctcatattgtgccttgtttttaaaatgacacttatcactgtcacttttttgttttatcttattactctagtcctggaataatgcctgacacctagtatgtgctaaataaatatataaacaaataacagaattattaccaagttaggggtgggcaaattaatacacacagaggtggaggccctcctgaagtttccacgatgtggggaacttactatgtacttacctcttgtctcaaagggcttcatctaagccatctaagcctcagtggctgagggcctggatgctctgggaaatgcccctgaagctgccctccacagctcttgggaccattcaag

SEQ ID NO: 644121 - DNA, 598 bp, Homo sapiens
ccgctggcttcccatcaccagcagggcaccccttgatggtgagctcctcaaccaccacataccaatccctatagctccttctgctcctgygtgcctcatggacactgccctcttgcctcatggcactctgcacctcggtcccttcacctgcctctgctcaggctgtgcttgcagctcctctcatgactccctctttcctaccattcagagctctgctcacttcccagggacaactcctcagaccatttcctccttagtccagcctcatattgtgccttgtttttaaaatgacacttatcactgtcacttttttgttttatcttattactctagtcctggaataatgcctgacacctagtatgtgctaaataaatatataaacaaataacagaattattaccaagttaggggtgggcaaattaatacacacagaggtggaggccctcctgaagtttccacgatgtggggaacttactatgtacttacctcttgtctcaaagggcttcatctaagccatctaagcctcagtggctgagggcctggatgctctgggaaatgcccctgaagctgccctccacagctcttgggaccattcaag

SEQ ID NO: 644122 - DNA, 598 bp, Homo sapiens
ccgctggcttcccatcaccagcagggcaccccttgatggtgagctcctcaaccaccacataccaatccctatagctccttctgctcctgcgtgcctcatggacactgccctcttgcctcatggcactctgcacctcggtcccttcacctgcctctgctcaggctgtgcttgcagctcctctcatgactccctctttcctaccattcagagctctgctcacttcccagggacaactcctcagaccatttcctccttagtccagcctcatattgtgccttgtttttaaaatgacacttatcactgtcacttttttgttttatcttattactctagtcctggaataatgcctgacacctagtatgtgctaaataaatatataaacaaataacagaattattaccaagttaggggtgggcaaattaatacacacagaggtggaggccctcctgaagtttccaygatgtggggaacttactatgtacttacctcttgtctcaaagggcttcatctaagccatctaagcctcagtggctgagggcctggatgctctgggaaatgcccctgaagctgccctccacagctcttgggaccattcaag

SEQ ID NO: 644123 - DNA, 583 bp, Homo sapiens
tttcacatgttggccaggctaatactatcattctttattcatcaatttgaatattttatccaattaaaactgccagagattctatggaagttgtactgaatttatatactattttcaggagaacagctctatttatgagaaaaagtgtcacttttcaagaacgtggtgtaaatttctaattgttcagatcccatttttgtcctccagtacgattttattttttacatgggtcctattcctttgtcatataatttattcctattttatgatttttgttactattatgaatggaatagtttcctcattttcgtttgtatgtgggtatggcttatatagaaaaagctaatcatactatatctttatgttgtatctacccaatccatcaaattctttcttttacttctatttactttttttactagagtttcttgatgatatcaggtataaaattatattgtcagcaaaaagtttcacctctttctttccatatttatgctgtgcatattaggtttattgcatttactaaaatatctaaacaatattaaataataatagtaawagtaggtgtgatttgtaaactata

SEQ ID NO: 644124 - DNA, 581 bp, Homo sapiens
agaaggcaaactagcaacttaaaaaactgtttttgtctctgtagagctgttcatcatgttcccctttcccycacaagaccttcactattgcaagaggccttaatgtgtgagctgaggactggcacctgccaagtcaggtgggggtggggtggaaaatcctcatatgtcctagaatcagacaagtgtttcaaacgattttggaagagggatttgtgtcgctctcccagacaagcatcccaagtcccctcctggtagggtgggaggacaggctggcggggagggaggcccagcgcaccccaggctgtgagtggatgaagaaggaaagcagggggtgggggtgctcctccaaccctcccccaagtgccatctgatttttgcaaagagggtgaaggcagcaggaggctcagagccagggccagggaggcaggtggagagggtgtccgtggaggggctgcaccgtcagcctgggcccccagtggaaagcaaaatagaaaggccctgtgtcagcagccaggcccctgggcagccgggctctcggctccattctgttcagtgggattctggttggcaccagctgcagt

SEQ ID NO: 644125 - DNA, 581 bp, Homo sapiens
agaaggcaaactagcaacttaaaaaactgtttttgtctctgtagagctgttcatcatgttcccctttcccccacaagaccttcactattgcaagaggccttaatgtgtgagctgaggactggcacctgccaagtcaggtgggggtggggtggaaaatcctcatatgtcctagaatcagacmagtgtttcaaacgattttggaagagggatttgtgtcgctctcccagacaagcatcccaagtcccctcctggtagggtgggaggacaggctggcggggagggaggcccagcgcaccccaggctgtgagtggatgaagaaggaaagcagggggtgggggtgctcctccaaccctcccccaagtgccatctgatttttgcaaagagggtgaaggcagcaggaggctcagagccagggccagggaggcaggtggagagggtgtccgtggaggggctgcaccgtcagcctgggcccccagtggaaagcaaaatagaaaggccctgtgtcagcagccaggcccctgggcagccgggctctcggctccattctgttcagtgggattctggttggcaccagctgcagt

SEQ ID NO: 644126 - DNA, 585 bp, Homo sapiens
tcactacagcctcagcctcccaggatcaagtgatcctccgacctcagcttcccaaatagctgggactacaggtatgtgccaccatgcctggttaatttttgtattttttgtagaggcaaggtcttgctatgttgcccaggctggtctcgaactcctgagctcaagtgatctaccctgccttggcctcctaaagtgcacagattacaggcatgagccaccatgctcagccagctatgagatcttgagcaggtcacttaacctctctgagcctcttcccttagcagggaatgacacctggcttgtggagagaatacaacgaatgtttccaaagtgcgtggcatacagtaagtactcaatgaatgagattttcttcccacctctctagtctcrattttagatgttccctggctcccttaagttccagaagtgagaggtggagagtggggacagagaaggcagctcctggacaggtgggaatccccactgtgtacccgcccccatcccagcccagcctaggaggccatactcgccgcaccctacacaagtcctttgcttccctcagggacctcaagcctcccaccccca

SEQ ID NO: 644127 - DNA, 541 bp, Homo sapiens
ggctgctgccatgattcctattaagtttccctcagatcaaccagaaggaaaccaggcagaggactatggtggtcagcaacagtgtgaccccaaagactctatcttgggaccagcatgacctcccatggggccctacaccatatggagcaggatgctctgtcttgacacagagatgtgaagaagggaattcataatcagaaacttacctggatgctgcctccagctgttctttcctagaaagagaagagggagaaaaaataaagcataaattacgtgaaacagctgtatccttcctcgaaagattgctgcaaagcttctctctgaagatgatggagcagagttgagctctaggacaggatggtcagtgtggagggaaccaatgaaggaggcgggtttacccatccagaccccagcccatgctactcccgttggctctgaggttttcagggctcttttcagccastcattcattcatttattcatccagaaaatggttgctgagcacttactctgccccagctctcatgttgagctcaggaaa

SEQ ID NO: 644128 - DNA, 560 bp, Homo sapiens
cccttccgaacctgctcctcctcaggaatggagaactcttatcattttgttgttcaggtcaaaacccttggaatcatcctggaaccctaccttgttcacccggcacacattcaattttgactccctttattttatattcacccaaaagccagagggattcctttgaaatgcaagccactgagtttgtgccacaactgagctcagaatcttcttttcctattttactcagaataaaaggacaattcctttcaaagggctgcaggactccaaaggacctgagcccattcctcttccttcattgactcagcttcagcygcagtaatctctatacgtttacagaacccatcagaaaactctcacctaagacatgtgtacgcggcgttccatctgcctggaatgcttttcccagaccacaggctgactttctcacaaccatacaacaattaggtctttgaccaagtgtcacgtaggtgatttttgattacttgttttaaaattcagtcacattcctcctaccgcatacaccccaattctcttccctgacttattttgccctagaa

SEQ ID NO: 644129 - DNA, 560 bp, Homo sapiens
cccttccgaacctgctcctcctcaggaatggagaactcttatcattttgttgttcaggtcaaaacccttggaatcatcctggaaccctaccttgttcacccggcacacattcaattttgactccctttattttatattcacccaaaagccagagggattcctttgaaatgcaagccactgagtttgtgccacaactgagctcagaatcttcttttcctattttactcagaataaaaggacaattcctttcaaagggctgcaggactccaaaggacctgagcccattcctcttccttcattgactcagcttcagccgcagtaatctctatacgtttacagaacccatcagaaaactctcacctaagacatgtgtacgcggcgttccatctgcctggaatgcttttcccagaccacaggctgactttctcacaaccatacaacaattaggtctttgaccaagtgtcacgtargtgatttttgattacttgttttaaaattcagtcacattcctcctaccgcatacaccccaattctcttccctgacttattttgccctagaa

SEQ ID NO: 644130 - DNA, 577 bp, Homo sapiens
actgcctccaatcttgtttgatggggtgcttggaggggagagggagaagagaattgctgggctctggcaggcctgggactctgaatatgaggggagaggagagaccaagaaggccagaaggagagaaaacctgcatgtgwtcatcaactcttttgagtagggtgcgcaagcatgcatgtgggcatgaaatcacccagggtaaaacatgaaatgaaggagtagggacataaataatagaagccaatagaacaatatagaaaaaattgttttcaaaagaatgcctttcagaagaactcagcaattttttttctccagaaaaagataaaatgccttcaaatcccacttagggtagaaggcaagatccttaaggcatctcaaataacaaatgcacaataaagaagtaaagagtttgaaagagatctgaattggaaaaaaagaaaacttggatgaagatttttcacaaacatgtaatgtgctttgtgctgttcagcagaagatatacaattatgatatggtcagaataagatgttttcattaaaaccactgaagaaattgtgttctgtatgcaaatcaaaag

SEQ ID NO: 644131 - DNA, 550 bp, Homo sapiens
gatgattatcaaatagaggaacagataaatggatgaggggatacatgaatgaatgaatacatcaggaaacaattattcatattacataaggtgttatttttaagctttccagcattggaagtaaaattagattcatcttttccttttatttttcagcatctaataygcctcaaatgaggtaaatcaatatatagctccttaatttagggaatttccatctacacaagataaacagttaaccaactgtgcgatgtgggtagtaggaaaaaacttgagatatgcataagagtccctaatgagcttatagaatagttgttaactaagaaacccatacatgaaatcattttgttcgtatgtaaccatgccagggtagtctatgaataagttaggagaacattagaatggagtttctcatagttcatgtccaagaatattcttatttaaaacacagattcctggcctctactctcagatatttggatttactaggtctcaagtagacctaggaatctagacttttagcaagagtcctcagtgtcttcctgcaaat

SEQ ID NO: 644132 - DNA, 551 bp, Homo sapiens
cgctgtttccccagctcatctcagcagagagccagcctttattttgaatacccaatattgtttcaggtcaggaggttctgtggctaccatccaaaagatgttgccctttagtaagtgtgcagcttgagcaaatacttggggcattctagatcattaaccaggtatatcagttatttcctggtctaagaaacaaatgaatttgaacagagcaaaatcacgatgatatcagtccttgaactttgaccttacttttattcacttgtggctaaaaaactgtcttttgtttttttagaacttggcttattaatgctttgtgaaatggagagaaaataggctgtgacaggaaatatagttttggaatgaggaaatagttaagaaagaagtggaacaggcctgctggaaaaaaacatacactttcwttactgagatctctgctatatggtaaccttttagctatattgtccttattgattttgtctgcacggcgagcacagcatggcgatgaagagaaattgccaggtgtggggtgaaaggaaaatggtctggccagg

SEQ ID NO: 644133 - DNA, 556 bp, Homo sapiens
ggctaggccagaaacatattacgtctggaaaatcatttcaataacacacaggctcattggtggtatactaactagggtactttctgaaataatcacttagaacatagcaattaaacaaaattatcccagactgaaaatgcactctgaacagagagttatcgtcatcatcataatattaataataatcaaataataactcatacttcacatggaaatgcatgtatgttttccatgatttacacaggctggctgaatttaggtaaacccattaacttggaagattaaaaacatcatgggtagtgaactatgaaatgtggttctcatgaaggcaatcgtgtcagaaaactttatcataatgaaactgcttcttcttggaaatgctctatcagacttttggacagactatgttaattgcaaagaacagttattgwctgtgtttctagagctcatatagcacagtaattattaaaacaaacaagatgaaattagttatttatctgttttgtcttatattctgagttcaaactctggaatcataggtgcattatataggaat

SEQ ID NO: 644134 - DNA, 604 bp, Homo sapiens
cgcctataatcccagcacttggtgaggccaaggcaggtggatcacaaggtcaggagtttgagactagcctggccaatatggtgaaaccccatctcaactaaaaaaaaaaaaaaaaaaaaaattagccaggcatggtggcaggcgcctgtagtcccagctactcaggaggctgaggcaggagaatcacttgaacctgggaggcaggggttccaatgagccatgattgtaccactgcackccagcctggacgagcgagcaagactctgtctcaaaaaaaaaaaaaaaacagtcaactaaaattgtctctgagtgggcccagatattatattttccacaaagagactttgaagaagttattatgcataagttcaaagagttaaattgcatgcaaagaattgaaggacaatatggtacctttgacttaagagcaatctcaacagggagatggaaactataaaaaatggaaattctggctgggttcatggttcatgcatgtatgcccaatgctttgggaggctgaggcaggaggatcacttgaggccaggagttcaagaccagcctgggaaacatcacgagaccccaagtctacaaaaaaattagccag

SEQ ID NO: 644135 - DNA, 604 bp, Homo sapiens
cgcctataatcccagcacttggtgaggccaaggcaggtggatcacaaggtcaggagtttgagactagcctggccaatatggtgaaaccccatctcaactaaaaaaaaaaaaaaaaaaaaaattagccaggcatggtggcaggcgcctgtagtcccagctactcaggaggctgaggcaggagaatcacttgaacctgggaggcaggggttccaatgagccatgattgtaccactgcacgccagcctggacgagcgagcaagactctgtctcaaaaaaaaaaaaaaaacagtcaactaaaattgtctctgagtgggcccaratattatattttccacaaagagactttgaagaagttattatgcataagttcaaagagttaaattgcatgcaaagaattgaaggacaatatggtacctttgacttaagagcaatctcaacagggagatggaaactataaaaaatggaaattctggctgggttcatggttcatgcatgtatgcccaatgctttgggaggctgaggcaggaggatcacttgaggccaggagttcaagaccagcctgggaaacatcacgagaccccaagtctacaaaaaaattagccag

SEQ ID NO: 644136 - DNA, 604 bp, Homo sapiens
cgcctataatcccagcacttggtgaggccaaggcaggtggatcacaaggtcaggagtttgagactagcctggccaatatggtgaaaccccatctcaactaaaaaaaaaaaaaaaaaaaaaattagccaggcatggtggcaggcgcctgtagtcccagctactcaggaggctgaggcaggagaatcacttgaacctgggaggcaggggttccaatgagccatgattgtaccactgcacgccagcctggacgagcgagcaagactctgtctcaaaaaaaaaaaaaaaacagtcaactaaaattgtctctgagtgggcccagatattatattttccacaaagagactttgaaraagttattatgcataagttcaaagagttaaattgcatgcaaagaattgaaggacaatatggtacctttgacttaagagcaatctcaacagggagatggaaactataaaaaatggaaattctggctgggttcatggttcatgcatgtatgcccaatgctttgggaggctgaggcaggaggatcacttgaggccaggagttcaagaccagcctgggaaacatcacgagaccccaagtctacaaaaaaattagccag

SEQ ID NO: 644137 - DNA, 604 bp, Homo sapiens
cgcctataatcccagcacttggtgaggccaaggcaggtggatcacaaggtcaggagtttgagactagcctggccaatatggtgaaaccccatctcaactaaaaaaaaaaaaaaaaaaaaaattagccaggcatggtggcaggcgcctgtagtcccagctactcaggaggctgaggcaggagaatcacttgaacctgggaggcaggggttccaatgagccatgattgtaccactgcacgccagcctggacgagcgagcaagactctgtctcaaaaaaaaaaaaaaaacagtcaactaaaattgtctctgagtgggcccagatattatattttccacaaagagactttgaagaagttattatgcataagttcaaagagttaaattgcatgcaaagaattgaaggacaatatggtacctttgacttaaragcaatctcaacagggagatggaaactataaaaaatggaaattctggctgggttcatggttcatgcatgtatgcccaatgctttgggaggctgaggcaggaggatcacttgaggccaggagttcaagaccagcctgggaaacatcacgagaccccaagtctacaaaaaaattagccag

SEQ ID NO: 644138 - DNA, 567 bp, Homo sapiens
cattctcagactcttctgctattggctttacactgcagcgtattaggtcttaatgccaactttttaacactttttaaatttaaaaaggcataccttctgagaagcaccatgcaaatgcagcaaatscagagcacagaaatggtctacttttggttaaaacttgaagagacaattctacaacaactaatcaaagtaactctgttgaaatgctgagaacttggaggtaagcattgataacctaatcagatggttttgtgatctgtaatagtgttcaattttaatgacatacctaaccagaaattaaaatgttatgtataatcaccactggacattttattttgagatgcatgaggttactgttgatttcatgatatttgttttattttccttttttagcttgtaaagggtcccagaactttattccttctaattatcatctgcttttagtagctacttagtgttgagaactatgttagcttatcatattttttattagtcaagcaaaagacatgagactcctcggtcaaggacaaaatcctttattactcatggcacagaagccagcat

SEQ ID NO: 644139 - DNA, 567 bp, Homo sapiens
cattctcagactcttctgctattggctttacactgcagcgtattaggtcttaatgccaactttttaacactttttaaatttaaaaaggcataccttctgagaagcaccatgcaaatgcagcaaatgyagagcacagaaatggtctacttttggttaaaacttgaagagacaattctacaacaactaatcaaagtaactctgttgaaatgctgagaacttggaggtaagcattgataacctaatcagatggttttgtgatctgtaatagtgttcaattttaatgacatacctaaccagaaattaaaatgttatgtataatcaccactggacattttattttgagatgcatgaggttactgttgatttcatgatatttgttttattttccttttttagcttgtaaagggtcccagaactttattccttctaattatcatctgcttttagtagctacttagtgttgagaactatgttagcttatcatattttttattagtcaagcaaaagacatgagactcctcggtcaaggacaaaatcctttattactcatggcacagaagccagcat

SEQ ID NO: 644140 - DNA, 567 bp, Homo sapiens
cattctcagactcttctgctattggctttacactgcagcgtattaggtcttaatgccaactttttaacactttttaaatttaaaaaggcataccttctgagaagcaccatgcaaatgcagcaaatgcagagcacagaaatggtctacttttggttaaaacttgaagagacaattctacaacaactaatcaaagtaactctgttgaaatgctgagaacttggaggtaagcattgataacctaatcagatggttttgtgatctgtaatagtgttcaattttaatgacatacctaaccagaaattaaaatgttatgtataatcaccactggacattttattttgagatgcatraggttactgttgatttcatgatatttgttttattttccttttttagcttgtaaagggtcccagaactttattccttctaattatcatctgcttttagtagctacttagtgttgagaactatgttagcttatcatattttttattagtcaagcaaaagacatgagactcctcggtcaaggacaaaatcctttattactcatggcacagaagccagcat

SEQ ID NO: 644141 - DNA, 567 bp, Homo sapiens
cattctcagactcttctgctattggctttacactgcagcgtattaggtcttaatgccaactttttaacactttttaaatttaaaaaggcataccttctgagaagcaccatgcaaatgcagcaaatgcagagcacagaaatggtctacttttggttaaaacttgaagagacaattctacaacaactaatcaaagtaactctgttgaaatgctgagaacttggaggtaagcattgataacctaatcagatggttttgtgatctgtaatagtgttcaattttaatgacatacctaaccagaaattaaaatgttatgtataatcaccactggacattttattttgagatgcatgaggttactgttgatttcatgrtatttgttttattttccttttttagcttgtaaagggtcccagaactttattccttctaattatcatctgcttttagtagctacttagtgttgagaactatgttagcttatcatattttttattagtcaagcaaaagacatgagactcctcggtcaaggacaaaatcctttattactcatggcacagaagccagcat

SEQ ID NO: 644142 - DNA, 540 bp, Homo sapiens
tgttactttgttgatttttggttttgataatctgttcattaatgtatgagtagtgttgaagctccctaatgttattgtattacacttattttttccttttatatctattaatatttgctctatatatttaggtcttccaatgttagtmctatatatttaagaccattatatcccctttctaaatcatcccgttatcattgtgtaatgacccttgtctctttttatccttttattatgcaaagtttattttaactgatgagagtatagctactcttgctcattttttgtttccattggtatggggagtctttttctatccctttatgttcagtctatgtgtgcccttaatattgacgtaggtgttttgttggcagcacatagttggttcttgttttttttttttaatccattcaactatcctatgtcttttaattggagaatttaatccatttacattaaaggtgtttatttatacataaaaactttttactgccattttgttaattgttttctgttgttttgttaatccttttttttttt

SEQ ID NO: 644143 - DNA, 639 bp, Homo sapiens
ccttattttgttttacatttaatattcatttgggtttacctatctatttgtagtttttattgatctttatttctttgtatgtctctgaggttctttttaagtgaattttccttttgatattgagttcctatttgtcctgctctgttggtgataaagtcttagcttttttctgacaatatttttatttcttctaaatttctgataaccattttttactgaatatagatttctatgttagcagttattaattaattagtttttatattgagagggcagctgtggattttctctattttcttttgtttctccttccttctttccaacaaaatacctattttgagataaaactgacaatcaataaattgtacatatttaaaacatttaacttgatatcattttcacaatcaagatwatgaacatactcaacagcctcaaaagtttcttagtgtctccctaaaaatctttctcctcttattcttgactgatttcctccgtacctaggcaaaaactgatctgctttctttcactatagattagttcacattttttgaattttatataaatggaattatatagtaggcattctcttttttcttgtttcttttgttcagcataattattttggagtccatccatatt

SEQ ID NO: 644144 - DNA, 639 bp, Homo sapiens
ccttattttgttttacatttaatattcatttgggtttacctatctatttgtagtttttattgatctttatttctttgtatgtctctgaggttctttttaagtgaattttccttttgatattgagttcctatttgtcctgctctgttggtgataaagtcttagcttttttctgacaatatttttatttcttctaaatttctgataaccattttttactgaatatagatttctatgttagcagttattaattaattagtttttatattgagagggcagctgtggattttctctattttcttttgtttctccttccttctttccaacaaaatacctattttgagataaaactgacaatcaataaattgtacatatttaaaacatttaacttgatatcattttcacaatcaagataatgaacatactcaacagcctcaaaagtttcttagtgtctccctaaaaatctttmtcctcttattcttgactgatttcctccgtacctaggcaaaaactgatctgctttctttcactatagattagttcacattttttgaattttatataaatggaattatatagtaggcattctcttttttcttgtttcttttgttcagcataattattttggagtccatccatatt

SEQ ID NO: 644145 - DNA, 361 bp, Homo sapiens
agccacaacttgatcaggaaggcagtactagaatgtttgaaccagcaagacagagcgttgtcccctccaaaacaaccctaaaaacaaaatcagtactgaattgccagcatgacgataatactattttgttttatcttagctttgccttgaaaggactttagaaatgcawcatttttcatcttcctctcactagctatgtcttcctctaaataattctctacgccataatcaaaatgattttttaagatcatgaaatgtttcatgctcatctccatttacaattctttacctgctccctttgctgtcaatattgctaaggctcatcacactacacatgatctgagtcctgctcacctcctca

SEQ ID NO: 644146 - DNA, 361 bp, Homo sapiens
agccacaacttgatcaggaaggcagtactagaatgtttgaaccagcaagacagagcgttgtcccctccaaaacaaccctaaaaacaaaatcagtactgaattgccagcatgacgataatactattttgttttatcttagctttgccttgaaaggactttagaaatgcaacatttttcatcttcctctcactagctatgtcttcctctaaataattctctacgccataatcaaaatgattttttargatcatgaaatgtttcatgctcatctccatttacaattctttacctgctccctttgctgtcaatattgctaaggctcatcacactacacatgatctgagtcctgctcacctcctca

SEQ ID NO: 644147 - DNA, 537 bp, Homo sapiens
ctccttctcccttaccttcaggaagtcagattggcttcttcatcctcatctaaggatatatcccatggaagatggtatctaggaagaggtctaccatcctccccaaataaaagcgcaactctgtatctgtacccatggcttatgaaggaggaagggaatacgagctgatgttatgccagtctgtggtcagcaagactgccactaagagtgactgtcaattctcccaacatagcccaarcttttccattccagaatgttgtcatggcagacaaaatgattatttgtggtgggatgcattcatttattccatatacttttattgagtaccaattatatatagaatactgaaaagaataaaagctagataagacatgatcacacacttcaaggcacatatgtttcagcagaggtaaacatacagacttacaattaatgacaatgtagggcaaacaggaacaaaaaagctttgggattagaaatttttatagaggagattacatttacattgtgctttgaatgatgggaacattttgagtg

SEQ ID NO: 644148 - DNA, 574 bp, Homo sapiens
gttacataaacaagaggtgttcactatgaactgaaataagcaattcatgggtaaagagactggggccagaaattctagggtatatgagcattttctaggtaatggtaactgtggctcattggggtaggagtagtgccagtgagagtggtgccttttactgaatcttcccatctgggggtaaatggccattcatgckgcaacgcagttattctagctccttctcaagaggacgacgatgtgccagaggtagatgagaagtgagaatatgggcatatgtaagatgttctctctttgtgtgttaattatactgtgacataatgaagtaggatttagatgggactagtgtatggtgtgtccttctttttaatagctgcagttactgaaaaacaatgggtgaagcaacactgtggagatcagaatttgatgatggtgaaggaggcataactcaacatttgctgttctaaattcctgtcctttgctatttctccccaatccatggtgatttctcagtaataaatatactaccacaaataataatagtattattgctatgattttacgaatacttattaac

SEQ ID NO: 644149 - DNA, 574 bp, Homo sapiens
gttacataaacaagaggtgttcactatgaactgaaataagcaattcatgggtaaagagactggggccagaaattctagggtatatgagcattttctaggtaatggtaactgtggctcattggggtaggagtagtgccagtgagagtggtgccttttactgaatcttcccatctgggggtaaatggccattcatgctgcaacgcagttattctagctccttctcaagaggaygacgatgtgccagaggtagatgagaagtgagaatatgggcatatgtaagatgttctctctttgtgtgttaattatactgtgacataatgaagtaggatttagatgggactagtgtatggtgtgtccttctttttaatagctgcagttactgaaaaacaatgggtgaagcaacactgtggagatcagaatttgatgatggtgaaggaggcataactcaacatttgctgttctaaattcctgtcctttgctatttctccccaatccatggtgatttctcagtaataaatatactaccacaaataataatagtattattgctatgattttacgaatacttattaac

SEQ ID NO: 644150 - DNA, 574 bp, Homo sapiens
aactcactaaatcacagcaaaattcactctgctttagcttttcactttcaaccaaacctgctcctcctctgggatttcagcttataggaaagaagtcaaaatactttgaccatttgcacaaaacaccttcttttgggggttctcttttctgtacttcatcagggcagaagaaatgctttcttaatttatctcctgcrtacctttcatccatggtctataacagacccaatgttcaagtctacagcccttgatcatgtatatcaggtagagcttcagggatttaagaaataatttttggtgtgaacaaagtctggctttcagaaatattgtcttaaaggggctcaaaatttccatttaggttttcaaaactggcccacacccatgcttctggtcatacacatcaaaatggaagatagacaaatacattatcactatatatgatgaaactttcttattcatttcattgggtgcataatgagtacagcataccacaatatccacattctgcctgatccggccctcgtgtacctgtacccttcatctcaaaaccctgacctttggctcattccccact

SEQ ID NO: 644151 - DNA, 570 bp, Homo sapiens
aaagctccagaagagattctgattcaaatctccagttgggaactamtacatcaaacatttcaaaaatcaatcaaccaaccaatcaacccagcctttattgtatggtggtatttaaaaatctaaactctattttctgcaagttgctagccaattgaaccaaacttcttcactggataatatttttaaacatagatttagaatgcctttttttcaaatatgaaaataaaagatataatagcttatttctgtgatatatgcatacataattgcttcccacctaatttttttttcacttttgtagccttatatgtgtgactgtcttaatatctcaaagggctagtgctatcctcacccttattcttagattttatctctttaattattttctttgctttgttattcccaccagtttgtcttctagaaggtcttcatatcatgttatcacttaataaacattctcttttttattctgagtgaaaatgcaccaaagtataaatctgagaaaaagtgaatgttttataacttttgtttctcagaaaattatagcagttatgttaatattggtgatat

SEQ ID NO: 644152 - DNA, 570 bp, Homo sapiens
aaagctccagaagagattctgattcaaatctccagttgggaactaatacatcaaacatttcaaaaatcaatcaaccaaccaatcaacccagcctttattgtatggtggtakttaaaaatctaaactctattttctgcaagttgctagccaattgaaccaaacttcttcactggataatatttttaaacatagatttagaatgcctttttttcaaatatgaaaataaaagatataatagcttatttctgtgatatatgcatacataattgcttcccacctaatttttttttcacttttgtagccttatatgtgtgactgtcttaatatctcaaagggctagtgctatcctcacccttattcttagattttatctctttaattattttctttgctttgttattcccaccagtttgtcttctagaaggtcttcatatcatgttatcacttaataaacattctcttttttattctgagtgaaaatgcaccaaagtataaatctgagaaaaagtgaatgttttataacttttgtttctcagaaaattatagcagttatgttaatattggtgatat

SEQ ID NO: 644153 - DNA, 570 bp, Homo sapiens
aaagctccagaagagattctgattcaaatctccagttgggaactaatacatcaaacatttcaaaaatcaatcaaccaaccaatcaacccagcctttattgtatggtggtatttaaaaatctaaactctattttctgcaagttgctagccaattgaaccaaacttcttcactggataatatttttaaacatagatttagaatgcctttttttcaaatatgaaaataaaagatataatagcttatttctgtgatatatgcatacataattgcttcccacctaatttttttttcacttttgtagccttatatgtgtgactgtcttaatatctcaaagggctagtgctatcctcacccttattcttagattttatctctttaattattttctttgctttgttattcccaccagtttgtcttctagaaggtcttcrtatcatgttatcacttaataaacattctcttttttattctgagtgaaaatgcaccaaagtataaatctgagaaaaagtgaatgttttataacttttgtttctcagaaaattatagcagttatgttaatattggtgatat

SEQ ID NO: 644154 - DNA, 561 bp, Homo sapiens
gttaggatactttcgttactcattgaataatccctgacccaatattctttgctattttgcctagaactgtggtctccaacattttcaaatactcaattaatgaattttgagcacacacctgcaatataagtgtattacttatttataaactatagacatgcattgcttatcaacatattatataaattataaaatatatacatatatataatgaaatataatataaagatgaaagttctaatattttctttttgattaccaggagactattttgctaaccatytggggtgcatacaccctattttaataccatttgtttagagatgttattttactatgagaaaaaacacaaaaagtatattaagaaatttactctcaatccttaattacatttactaaaatattttacaaaattcaatcattgccattgctttttgcttcctacctcttccctctcagttgccttcactcagtaatttagtttctagattatccagtaggcatatttcaagactttcagtctattttcttttcttgtcttatttgcctctgtgctacaga

SEQ ID NO: 644155 - DNA, 587 bp, Homo sapiens
ccctctgttccctccctccctccctcgacacaagcaactgggtctccagccgccactccgggtttatttgtttacaagcggattacgtcagctcctccctctcttccctatctctggacccgcctcctgaactcttttcccgcccctttcggctccgaaccggcttgcgtcacaatggtgcgatattcggattggctggagtcggccatcacgctccagctacgccacttccttttcgtggcactataaagggtgctgcacggcgcttgcatctcttcgcctctcggagctggaaatgcagctattgagrtcttcgaatgctgcggagctggaggcggaggcagctggggaggtccgagcgatgtgaccaggccgccatcgctcgtctcttcctctctcctgccgcctcctgtctcgaaaataacttttttagtctaaagaaagaaagacaaaagtagtcgtccgcccctcacgccctctcttcctctcagccttccgcccggtgaggaagcccggggtggctgctccgccgtcggggccgcgccgccgagccccggccgccccgggccgcccccgcacgccgcccc

SEQ ID NO: 644156 - DNA, 625 bp, Homo sapiens
cctgctgctgggtgtgttggcagctggcagctctcagctgagtccctcagtgggatttgccttcctccgaagagtcacttcattcaaggtcactctcctcaaggacacactacatgcactaacagttcaatgatggcaaatgagaataaaagyctggccccctctttccaattctagctaagtctgaagagccaccagcttcagagctcctataagttcaggtgaggcctctttcaatacatcgcagtttaatttccccttctgcccaatcctgctttccttgcttcctacagttgttgaacctagtagcacattcaacaatcctcctgcatgcaaatccctgtctcagagttggcctcctggagctgacctgcgacagcctcctgattgaatctctctttcctatcaaactcatgccctctggaaacacatagaaacataactaagcatggctttgccatctcagatgaatctcatttcaacacccatttcccatagagattattagggtcttaaatttctttaagtctttttttctcacataggtcatgaggtctgtcctgtttttgctatcctagatttcttcagtgaggtttagagaccaagttttacacagaataaaata

SEQ ID NO: 644157 - DNA, 610 bp, Homo sapiens
agtgaatcccacatgcctaatcttaacaattattaacacaaagccaattttattgcatctctaattcatctaattttcctgtcctctctaccctgctcttcaaagtataattttaaaggaagcccagctatcatatttcacgcacattcaaggggaggtttctgaagtgaatagagcactgttctttccatgacttatgtccattttggaaaagttcagattacccaagtggccactgtcagagagccatttccccagccatgactttgttctctcaagtattataccttccatgtgtagacttcctacgtcactcactgatccgtgacaacactttcagtctatctatgagtattaatgttaacttggtaacatgatttaaaaggtatccaaaggaatcattattctttattattcatccattccttcatttcttgctctagatgatagaggtacagtgttgagcaaattagacaaagggcctgccttccaatgtgtgtgctagagttgagatcaagaggcaggggsttactacttggaagactccccctttgtatgtgggcagtgttgttcctgattctaccttagtttccctctgggaaaccccaac

SEQ ID NO: 644158 - DNA, 605 bp, Homo sapiens
accaaaatcagagctgaactgaatgaaattgaactgctaaaatccatataagagatcaataaaaccaaaagttgatgatttgaaggattaaataagattgatagactgtgagatagattaattttaagaagacccaaataaagacacttagaaatgacaaagstgacattacaacctatccaacagaaatacaaaaaatcctgagagtattatgagcacctctgtatacacaaactagaaaacctaggagactagataaattcctagaaatacacaacatctcatattaagccaggaagaaattaaaatcctgaacagaccaataagttccaaaattgaatcggtaataaaaagcctaccaaccaaaagtcctggaccaaatgtattcaaagccgaattttaccagatgtacaaaaaagagctagtacctatcttactaaaatgattcccaaaaatttgagaaagagggacttctctctaagtcactttatgaaaccagcatcattctgatattaaaaccctggtagagacacaacagaaaaatgaatcttctggcaaatattcctgatgaacgtagaaaataccagcaaactgaatccagcagc

SEQ ID NO: 644159 - DNA, 597 bp, Homo sapiens
agatatacttcttattttcattgtttgctacattgtaggaaaataaaaacccataaagaactacacaacatttacttcataaagcttttgtttaaaacttgttcctatctcaataaaatgattataattgttgtctttactcactacttatctttagtataaatcccctgaaactattttactggattaaaatctgtactgttgtgataaatctagatgaaataattttaytggaaatatattaatgtaatgaattaatgattaaaataaacataatattttaatagaatggtatttttcagtgaacaaattatttgtgttccaaatataaacacccatagtggatctagattttcatcattcattatctatgaatggagaattttctgtttaaatttggtaacctacttcttggaaataatgtcattaaatatgatgtctacgtggttgaatgacaaagtaaccaactcttggaaacattgtttaattaaactaaaaaaagcgtgtgtgtgtgtgtgtgtgtgtgtgtgtgtgtgtgtgtatgtgtacacacatataggtcccactcaaatatacattcatttgaagagatcattg

SEQ ID NO: 644160 - DNA, 563 bp, Homo sapiens
agatggaagggtgattgaaaccagtccacctggtcaactctttccctcaagaaggaatttccaacctcccagagagccccgattattcttcccattggttatacctacggtcatttgtaaagctaaagttattataactcgtggaaaaatttgcatctgaatttggttttttggtaaagctccttcgggccgtcccttcttcggcccaaatttggggcagtcacgtggtgccatcactcctacaggttttagctgtggatcttcccacatccactgcctggaagaccctgcaaggttcagagctgagtgtgaaatgtggagctggcagggacatcgtgagtatcatcatgaagggtgggcagggaggggttaacacattcacagcaagctattccccaacaactgccccttcaaggagatgttcattttttcccctccattcatagcrggctcattttttttctcactaccttcagaggtatttttcctgagactgcgtcattggatatgaaaaacctgataaatcctggccaacccaagccctcctagcaggtggcaggaag

SEQ ID NO: 644161 - DNA, 563 bp, Homo sapiens
agatggaagggtgattgaaaccagtccacctggtcaactctttccctcaagaaggaatttccaacctcccagagagccccgattattcttcccattggttatacctacggtcatttgtaaagctaaagttattataactcgtggaaaaatttgcatctgaatttggttttttggtaaagctccttcgggccgtcccttcttcggcccaaatttggggcagtcacgtggtgccatcactcctacaggttttagctgtggatcttcccacatccactgcctggaagaccctgcaaggttcagagctgagtgtgaaatgtggagctggcagggacatcgtgagtatcatcatgaagggtgggcagggaggggttaacacattcacagcaagctattccccaacaactgccccttcaaggagatgttcattttttcccctccattcatagcgggctcattttttttctcactaccttcagaggtatttttcctgagactgcgtmattggatatgaaaaacctgataaatcctggccaacccaagccctcctagcaggtggcaggaag

SEQ ID NO: 644162 - DNA, 429 bp, Homo sapiens
agggacctgagttggaatcccagttctgctatcttcttggcttgtggacaattgagactctctgagtctcaattttcttaccaatcaagtggttataatatagtctacctatagggtaattgtgaagatttaatgatataatatayacagaacagccaatagagtacaaaattaaatgttaggttccctccccatccagggcaaaggtttgaggtgggaagaggttcagtgacatctctccaatttaaattcacccattctggtctttcctttttcctgggttgggagaactgactgggttgacccaactggtaccagctccaagaaaaatggaataaactgggggtggggatgaggcaagaatgtcctttccctggcttgcttgccgcctgagtcagattgcatccaagaaagttctgaggtcaaagc

SEQ ID NO: 644163 - DNA, 429 bp, Homo sapiens
agggacctgagttggaatcccagttctgctatcttcttggcttgtggacaattgagactctctgagtctcaattttcttaccaatcaagtggttataatatagtctacctatagggtaattgtgaagatttaatgatataatatacrcagaacagccaatagagtacaaaattaaatgttaggttccctccccatccagggcaaaggtttgaggtgggaagaggttcagtgacatctctccaatttaaattcacccattctggtctttcctttttcctgggttgggagaactgactgggttgacccaactggtaccagctccaagaaaaatggaataaactgggggtggggatgaggcaagaatgtcctttccctggcttgcttgccgcctgagtcagattgcatccaagaaagttctgaggtcaaagc

SEQ ID NO: 644164 - DNA, 429 bp, Homo sapiens
agggacctgagttggaatcccagttctgctatcttcttggcttgtggacaattgagactctctgagtctcaattttcttaccaatcaagtggttataatatagtctacctatagggtaattgtgaagatttaatgatataatatacacagaacagccartagagtacaaaattaaatgttaggttccctccccatccagggcaaaggtttgaggtgggaagaggttcagtgacatctctccaatttaaattcacccattctggtctttcctttttcctgggttgggagaactgactgggttgacccaactggtaccagctccaagaaaaatggaataaactgggggtggggatgaggcaagaatgtcctttccctggcttgcttgccgcctgagtcagattgcatccaagaaagttctgaggtcaaagc

SEQ ID NO: 644165 - DNA, 384 bp, Homo sapiens
gaattcctttgtacatagtggatgatgacagcaagactatacaatcagtacaaaraaatggagagacagctctgttgctgtggccacagcttgagcaaaactcagttccaatgcaagccactctgagctgggagctgtgcaccctccagcacacagtgtggcaagctggaaagcccctggcacttccagttttcagcagcttccagcttttcgtctgcttatcccacagagcactgggaaatgtggtgaacaacctataggaaaaactggtaagctttctgttttggttctggttttttgtgttttttattgtggcaaaatatacattacataaagtttaccatgttaaccattgctaagagtgcaattcagtggtattaagca

SEQ ID NO: 644166 - DNA, 601 bp, Homo sapiens
gtctccctaatatataattaagcaaaattcaatattacctacaatatcctcagctttcccttctacttatgaggattttgtggtttttgtttttttcagatatttaagtagatcaggatcctttactttttgagagggcaggcatggcaggttttgcacaaaaccactggggaaggaaggatgctgtcactttttttcatcttggatcagaactgattggcagtgtgcttattcatttatgcctrcagtgcttcatttgagatgggctaatggacaggtacctggatattctttgctagccagcttagatagtaaatatgcaactgtttttcaagaaagtttccaagcataccacgttcatgttgttgcagcatatcctgtgtgaatcgtgtgaacaaatcatggtgtaacccaccttaaattcaataacacaatttgctaatcccctttgtttcccctgaaaagaggaggaaaaatcaaagttgcatagtgagtgttatgagggatattttgcatgaacaaacacaaattaggccatggactttcagagcagttgttttctggatctagatgtgtccattatgcttgaaggatgtcaagt

SEQ ID NO: 644167 - DNA, 601 bp, Homo sapiens
gtctccctaatatataattaagcaaaattcaatattacctacaatatcctcagctttcccttctacttatgaggattttgtggtttttgtttttttcagatatttaagtagatcaggatcctttactttttgagagggcaggcatggcaggttttgcacaaaaccactggggaaggaaggatgctgtcactttttttcatcttggatcagaactgattggcagtgtgcttattcatttatgcctacagtgcttcatttgagatgggctaatggacaggtacctggatattctttgctagccagcttagatagtaaatatgcaactgtttttcargaaagtttccaagcataccacgttcatgttgttgcagcatatcctgtgtgaatcgtgtgaacaaatcatggtgtaacccaccttaaattcaataacacaatttgctaatcccctttgtttcccctgaaaagaggaggaaaaatcaaagttgcatagtgagtgttatgagggatattttgcatgaacaaacacaaattaggccatggactttcagagcagttgttttctggatctagatgtgtccattatgcttgaaggatgtcaagt

SEQ ID NO: 644168 - DNA, 601 bp, Homo sapiens
gtctccctaatatataattaagcaaaattcaatattacctacaatatcctcagctttcccttctacttatgaggattttgtggtttttgtttttttcagatatttaagtagatcaggatcctttactttttgagagggcaggcatggcaggttttgcacaaaaccactggggaaggaaggatgctgtcactttttttcatcttggatcagaactgattggcagtgtgcttattcatttatgcctacagtgcttcatttgagatgggctaatggacaggtacctggatattctttgctagccagcttagatagtaaatatgcaactgtttttcaagaaagtttccaagcataccacgttcatgttgttgcagcatatcctgtgtgaatcgtgtgaacaaatcatggtgtaacycaccttaaattcaataacacaatttgctaatcccctttgtttcccctgaaaagaggaggaaaaatcaaagttgcatagtgagtgttatgagggatattttgcatgaacaaacacaaattaggccatggactttcagagcagttgttttctggatctagatgtgtccattatgcttgaaggatgtcaagt

SEQ ID NO: 644169 - DNA, 601 bp, Homo sapiens
gtctccctaatatataattaagcaaaattcaatattacctacaatatcctcagctttcccttctacttatgaggattttgtggtttttgtttttttcagatatttaagtagatcaggatcctttactttttgagagggcaggcatggcaggttttgcacaaaaccactggggaaggaaggatgctgtcactttttttcatcttggatcagaactgattggcagtgtgcttattcatttatgcctacagtgcttcatttgagatgggctaatggacaggtacctggatattctttgctagccagcttagatagtaaatatgcaactgtttttcaagaaagtttccaagcataccacgttcatgttgttgcagcatatcctgtgtgaatcgtgtgaacaaatcatggtgtaacccaccttaaattcaataacacaatttgctaatcccctttgtttcccctgaraagaggaggaaaaatcaaagttgcatagtgagtgttatgagggatattttgcatgaacaaacacaaattaggccatggactttcagagcagttgttttctggatctagatgtgtccattatgcttgaaggatgtcaagt

SEQ ID NO: 644170 - DNA, 582 bp, Homo sapiens
catattcgttatatctctaacacagtagtatctcttgagaaacaagcactttgttttacacggtaaatatgtccacagattttttgaaaatagattttttgttttagttttttaagccaacattattgaggagtaaaattaagtgcactcatcataagcataggatttgatgagttttgaaaatgcatgtacctatgtagccacgacaacaatcaagatataaaacatttctatcatccgcagagattttttaaaatataatcatattctaagaagtccacaatttaaaatcatcctacttaagaaaacaaagagacggcataataccatcacaagagtagcacrgaattttgagtccattgtgggttctaattgaccacttactcattgtgaaatcttaattaagtcattgagactttctgggcttaatagttccaggtacatgttaagccctcaataattgttcattattgttactcacttatgcaatcaaaaacatttattgtaattcatatttttatatagcaggaatagttaaataaaattcacctgtaattttaagagtcttgtattcaaaaagca

SEQ ID NO: 644171 - DNA, 562 bp, Homo sapiens
agactggggctgttaatttcattctatttttgcatcctctgtgacactgtatgaaaaaactcagtcactgttttgtccatgccatattttctttctcatagaaacctatagatgctttcccatttgttaatatatgcccctggctttgaaatgttgacaagtactaaatattggtatcacttttgctggaaatagtattggataatgttcartttacaaactctaatctatattctgaaaagtattattttccctgtaggcagaaagaaagggaaatgagggcactaattgtatcccagcccttaggttgtggaacaagttagttatggaacgagggtggggaattgctggccaaaggagtagatgctttagaatggattgtaagaaggagacagcttgtgtgccattagcagaatgcaaatggacatggatacatccatcccatatgtctctgaactaggaaaacacccccccacagcatgattagaaagctctctattggccaaagctccagacctttgaattagatgttgggttttctcagatacccctgcattcaaga

SEQ ID NO: 644172 - DNA, 306 bp, Homo sapiens
gtcaccttggtgagctctttatttccacccttctccttggcattcaaagattctatctttgacctggtcatattaagtactttttggtaatcttaactgggatggccttacccactaactatttattgatgactcctaaattctttatctttagaccaaayctttgtcatgagtttcaattctacatcaactgacttcagaagactgcttattgcacattaaataggcacctctaatatatttccaaagtgaaataatcatttactcccttatttacttaaacctgctccacttcctatattttct

SEQ ID NO: 644173 - DNA, 450 bp, Homo sapiens
ttttgttaaaacataattctaaatagtaaaatctttaaaatatttcatgcaactctataaagcattttttttaccccataacaagtggtataacaattgattcttaaaaatcctgaaaaatttatctgggtcatgaaaatgcttgttgaaaatataatttactatataattccagtaactaaacaacaaaaccaacaaacacaaaaaatactgagacaactrgcaaattcagtgtttgaatttttttagttagtgtcataattcatgtgaatggtagtgaatgttattttattcattaatctcgaaagagcttcacacagttatgaaggcagcattttatatatatatatacatcatcataatacataaaaatatatgtatattatatgtataacacataatatgtattatatataagatttgtgtatacatatgtgtgtacaaaatttt

SEQ ID NO: 644174 - DNA, 450 bp, Homo sapiens
ttttgttaaaacataattctaaatagtaaaatctttaaaatatttcatgcaactctataaagcattttttttaccccataacaagtggtataacaattgattcttaaaaatcctgaaaaatttatctgggtcatgaaaatgcttgttgaaaatataatttactatataattccagtaactaaacaacaaaaccaacaaacacaaaaaatactgagacaactggcaaattcagtgtttgaatttttttagttagtgtcataattcaygtgaatggtagtgaatgttattttattcattaatctcgaaagagcttcacacagttatgaaggcagcattttatatatatatatacatcatcataatacataaaaatatatgtatattatatgtataacacataatatgtattatatataagatttgtgtatacatatgtgtgtacaaaatttt

SEQ ID NO: 644175 - DNA, 597 bp, Homo sapiens
ccaacaagtgtccagctcctagcaaagaggaggccctggaggtagaagctcctctctgcaggcaggttgtcctgttgagtgttcagctttcagcacacagtaggcagtaggccctagagtggtctatctcctctctgcaggcaggtagtcccatggtctcccagtcacctctccatctgcaagggtccaatgctgcctccagcacctctctgcccacccctccgtgcctgaccaagctgctcccccaccagtgggcaactcagcccagccccattgtggtagctcccagggtggcaggctctggggggctcccagggatgggctccaaggactgtccaccttctccccacgccctccctgcagtggccatggtcaagaatggcaatgtggggccaggttccggagcaggagaggctccaggcctgggagcrggtcctgcctggtcacgtgaggttgggggtggcacagtcggctgcctcagggatgtgggacacaggggacccaccaccatcactgctactcccgcatccgctcctgctaccactgctccagacagcctgtagctgccatcactagcacttaagaaaggcacattca

SEQ ID NO: 644176 - DNA, 546 bp, Homo sapiens
gcttcagtgttctggggcacattgacctcccaaagccacctttttcctattttcatgccttgcaccaagaagaggcaaatcccttccttccttccttctcaattctcaaacctatgctaccatcctcagtttgaaaagaacatttgattctcaatcaacacaagtttgaaagcccacagtatccatgatgctgcattcgtgcaacactgcttagtgcaatgtgatcaaaggggtaatgtgtaagccacccttccccttcccacagatacacatcaatmcacttgcactcagacatgtacacacagttgcatgcatctgctctgggcacaagtcattccttcatacgaaagcatgtaaagtggagttgacatgtaaaaacacattcaaaaagacactgcaataagtcagactttgcatcaggaagtaatttcatgagaaggtaaatgtgaaagataacatatttcccccaccgcttcccatctttccacatatgtgtgattctagccacacagatgctctggttatcatcttgtattaaacaattag

SEQ ID NO: 644177 - DNA, 546 bp, Homo sapiens
gcttcagtgttctggggcacattgacctcccaaagccacctttttcctattttcatgccttgcaccaagaagaggcaaatcccttccttccttccttctcaattctcaaacctatgctaccatcctcagtttgaaaagaacatttgattctcaatcaacacaagtttgaaagcccacagtatccatgatgctgcattcgtgcaacactgcttagtgcaatgtgatcaaaggggtaatgtgtaagccacccttccccttcccacagatacacatcaatccacttgcactcagacatgtacacacagttgcatgcatctgcyctgggcacaagtcattccttcatacgaaagcatgtaaagtggagttgacatgtaaaaacacattcaaaaagacactgcaataagtcagactttgcatcaggaagtaatttcatgagaaggtaaatgtgaaagataacatatttcccccaccgcttcccatctttccacatatgtgtgattctagccacacagatgctctggttatcatcttgtattaaacaattag

SEQ ID NO: 644178 - DNA, 519 bp, Homo sapiens
cttgcagtgagccgagatcgtgccactgcactccagcctgggcatcagagtgaracttcgtctcaaaaaaaaaacaaaaacaaaacagggattcctgcaacaagacaattccttcagactaccatactgtgtgaaagtcgccgtgcacaaaaacctcttaaatatcaccagacagccaaaatcacaggacatttggagaaacccgctaaggtgattgatgggaagaagtaaacagaaggctgtgggaagaaacagaggctgtgtaggaaaaagaaagatttagaaaatcattaatatcaggccaggagtggtggctcacacctgtaatcccagcactttgggagactgaggtgggtggatcacgaggtcaggagttcgagaccagcctgaccaacatggtgaaaccccgtctgtacttaaaaaaaaaaaaatacaaaaattagccaggtgtggtggcacacacctgtaatcccagctactcaggaagctgaggcaggagaatcacttaaatctgggagg

SEQ ID NO: 644179 - DNA, 519 bp, Homo sapiens
cttgcagtgagccgagatcgtgccactgcactccagcctgggcatcagagtgaaacttcgtctcaaaaaaaaaacaaaaacaaaacagggattcctgcaacaagacaattccttcagactaccatactgtgtgaaagtcgccgtgcacaaaaacctcttaaatatcaccagacagccaaaatcacaggacatttggagaaacccgctaaggtgattgatgggaagaagtaaacagaaggctgtgggaagaaacagaggctgtgtaggaaaaagaaagatttagaaaatcattaatatcaggccaggagtggtggctcacacctgtaatcccagcactttgggagactgaggtgggtggatcacgakgtcaggagttcgagaccagcctgaccaacatggtgaaaccccgtctgtacttaaaaaaaaaaaaatacaaaaattagccaggtgtggtggcacacacctgtaatcccagctactcaggaagctgaggcaggagaatcacttaaatctgggagg

SEQ ID NO: 644180 - DNA, 519 bp, Homo sapiens
cttgcagtgagccgagatcgtgccactgcactccagcctgggcatcagagtgaaacttcgtctcaaaaaaaaaacaaaaacaaaacagggattcctgcaacaagacaattccttcagactaccatactgtgtgaaagtcgccgtgcacaaaaacctcttaaatatcaccagacagccaaaatcacaggacatttggagaaacccgctaaggtgattgatgggaagaagtaaacagaaggctgtgggaagaaacagaggctgtgtaggaaaaagaaagatttagaaaatcattaatatcaggccaggagtggtggctcacacctgtaatcccagcactttgggagactgaggtgggtggatcacgaggtcaggagttcgagaccagcctgaccaacatggtgaaaccccgtctgtacttaaaaaaaaaaaaatacaaaaattagccaggtgtggtggcacacrcctgtaatcccagctactcaggaagctgaggcaggagaatcacttaaatctgggagg

SEQ ID NO: 644181 - DNA, 566 bp, Homo sapiens
tcttttccagtaagaatgcaagcctactagcatgttccccatgaaacatcatttgaccctctgtaacaaggcaagcagtttttggccctgtacttgcaatattttttttwaataaagacacttgagtccttgtttaatgagctgaaaaagcaacattttttttttacctgctgaacgtgcgtcagtgaattctgatgctgagactagaagtatacaactgatgagctattcaaacctccatcctctgtccccaactttctctaaaaaacacacagataggccaggaatctgtgacccaaaaaatacagagtatattaattgaaatggaaaatatgtccatcaagataaagtgagcaatcttcctgtttctgacagatttcatttcaaaaggaatgacagaaatcctgctgcctaactccccataacaaaaggaaagggctttccttgaactcttggagcccttctttctcagcagaaataaaacactgatacacccaatgtgtcacaaataattgctttgactagtagaaagcatgctgtgtgaaaacctgaagtcattccagttt

SEQ ID NO: 644182 - DNA, 537 bp, Homo sapiens
cctaatgcccagtatttcagaatgtgacaatatatgttgatagggtttctaaaaaggtaattaagctaaaacgagctccttcctcagggtgggatctgatccaatatacctggtgtccttacgaggagaatggggtggkgggagagttatgcgaagacacagaaagaagacatccatctacacaccaaggagagaggcctcagaagaaaccagccctgccaacacctggacctcagacttccagcctccggatctgtgaaatttaaaaaaaagaaaaaaaaatcctgttgtttcagccacccagtcgatggcattttattgtggcagccctaacaaactatccatttgcatttagccaaccatgatctaatggtgcaggtgttttacatttctagagttagaaatcctgtgttatcccatagcaaatatatctgagagcctgacccagtttctgtgcccacatagacgtgagttaggtgttttttattatcatcaagttaatatgctcaagatagaaaccaattatgctcttctacc

SEQ ID NO: 644183 - DNA, 537 bp, Homo sapiens
cctaatgcccagtatttcagaatgtgacaatatatgttgatagggtttctaaaaaggtaattaagctaaaacgagctccttcctcagggtgggatctgatccaatatacctggtgtccttacgaggagaatggggtggtgggagagttatgcgaagacacagaaagaagacatccatctacacaccaaggagagaggcctcagaagaaaccagccctgccaacacctggacctcagacttccagcctccggatctgtgaaatttaaaaaaaagaaaaaaaaatcctgttgtttcagccacccagtcgatggcattttattgtggcagccctaacaaactatccatttgcatttagccaaccatgatctaatggtgcaggtsttttacatttctagagttagaaatcctgtgttatcccatagcaaatatatctgagagcctgacccagtttctgtgcccacatagacgtgagttaggtgttttttattatcatcaagttaatatgctcaagatagaaaccaattatgctcttctacc

SEQ ID NO: 644184 - DNA, 547 bp, Homo sapiens
tatggagtatgcacaagtgctgagcggaaaagcttagaagagaaaagcaattagctttagcccaagttcatttggggttgtatgggacatagttataaaagacaagatgggagggaaacaacactcactggagcctgtcgggggagctgggaggagagcataggaaaaagagttagtgcatgctgggtttaatacccaggtgaagggttgataggtgcagcaaaccaccgtggcacatctttacctatgtaacaaacctgcacatcctgcatatgtaccccagcacttaaaagaaaaaaaaaattaaataattgttttaaaaaagacaagatgttaaaaagggagaaatccacccctaaacttaaaataaaagttaaaaaaaattaaaaatatataaataaaaaaggagagagaagccagtggacttacaaygagagctaaggaaacaattgaaatagattaaggatcgaggtcttcacttatctttgtttttttatttgtttgttggtttttaacaacaaatcataagaacatgggacatgatgtc

SEQ ID NO: 644185 - DNA, 553 bp, Homo sapiens
cagaggtagaggaagtagaagagtaagtagtgaggaaaaggagaaatggtaatcataacgctattagttattctcagcataacactgtccgtgttatatgatccaatatattcataatcactctatgataagcagtgacttataggtcacaagcctttctctagtctcttctttagttaacaagtaaaccagggtgttagacatgaactcgttgcttcacatttttctttaaaatatttttaagaaagccagasaagcaaaagtagtgtaggcacctcttgtttaaacagtgtcattacagagaagtgatatagcccaaagtttacagaaatctaagtttgaatccaattttcctactccactgttgcataaatatgtttggcaagatactgatttgctcattgtcctttgctctttaactttgcctgaggaaataaggaggaatttcatattatttgtctcttttctaactcagtggggttgctacaaaaaccaagagaacataaattcctagtggtggtttgaggtggaaatgtatggcagaaatgcaaaa

SEQ ID NO: 644186 - DNA, 610 bp, Homo sapiens
caggttttttccagaatggggtctgtggtgccacctctgtttttccccaggagtccaggcttttgaaattcttaggttctctcatgtgggcatcaagagcarcaaaaagacaaaatggagaaaaataattccgtcaactgagaagaaaagcctttttcagaaaaatatgattcaagaagaggaaaaagataaaggccttttaagtatgtatagcttggatatccattttaattaagctgattttaacagtagagctcttttgttttttaaaaaaacttttaaaatctcttattccagactccagccaggaaagccaatatttttggcctttgaattctaccacaggtaagctcccagtgaaattaataagttttaactaaggttataacttaaccatggatgcataaagtgtctcaaagagacagtaaacagtttctttatttacaagatttagaatctacccaaagataattgagagaaataaaaaattaagacaggaaatcagaagccgtccataggggaaaataatcaataaatggcaaaaagttacacaaataacaaaccagaaaggactgatttcctaagcgaagaattgaacctaggctgccat

SEQ ID NO: 644187 - DNA, 571 bp, Homo sapiens
tagttatggtatatattttatattttattctaaaaaatggtctaaatttgacttttccaaatggccaattatttagaaattctaacactatactatgcctgaagtaaaaatttgcttagttttccagtgacaaactaataaccaaccaaatttacagtgaaaaataaagtataccacctttaaatatagcagcaaggtatttcaacatgaactttactgttttaacctactaaactcaaagcaaaacaagacattcttatctcttattcatttattatcttgggaaaatatttaatagtttcgttttttctgattctagaaccaaaattaaagttatgggatccttargttttgttttgttttgatttttcacaccgaaatataaaatttatgacttaaaagtactctaaggtttaggtaacagatctaatttacttcttaataggaagttaaaaaagcctttcaacgtttcatagactttgtgagaatcctgtatgaaacttgtcactgaccctatgttgaaggagtaaatacagggaaaagagacattggctaatagataaatgtatgt

SEQ ID NO: 644188 - DNA, 471 bp, Homo sapiens
ggaggaactgtaaagtgaaaagcagaattcaaacatagaaattttgaatgtaaccaaagatttcagagaatttttttatcttggagcaagtgaccactggygatgccaccccccactccacagggttatacgttttttttttctcctttattagagattattttgtggaaatgtgtgagaagtactcttatttcactgaggtgtgtcttttatttttggcattttttgagtggcccatcaaactttccagataattggctcttcgttccctgaaagagctaagtataagcacttcacttggaatattcactcctgtctgttgatcaaattacagaaacatgaatgctaatccttaggatcttttttttttaactttattatccttttctgtaaagtaattcaaaagtgaatgaaacttttaatagtatttttattagaagttacagaaaatttttgacagtctaaattaaa

SEQ ID NO: 644189 - DNA, 585 bp, Homo sapiens
cagtggctcattcctgtaatcttggcactttgagaggccaagacaggcagattacctgagcccaggaattcgagaccagcctgagcaatgtggygaaaccctatctctacgaaaaagacaaaaaattacctgggcatggtggcatgagactgtggtcacagctacctagaggctgagacgagagaatcacctgagtccaggaggctgaggctgcagtgagctgtgatcgtgccactgcattccagcttgggcaacagagtgagaccctgtctcaaacaaaaaacaaatgaaaatccctgattttacttgaggtagttacaaaaggggtaatgttttttaaaaatatataatgtgaaaaaggtataatatcctgaatatataaagaactatgactcaatacacaaaaaataactcaagccctttattagatattccccccaaaaaagatgtacaaatggttgataatcacatgaaaagatgttcaacatgattagtcatcagggaaatgcaagtcaaaaccactatgagataccacttcacacctactagaatggctatcatatcctacaaaaaaaaaaaaaagaa

SEQ ID NO: 644190 - DNA, 392 bp, Homo sapiens
agaattcctatgctgtggagctcctaaacrtgcttctctctcaagcttagtctcagctttcagacaaccaaattgtagagcccagttataagcatcagaagcgttttgggctttgggagtattttcccttctgtctttttctccaaagggtggatccagcagagaggcttaaataatttatgaagccgagtttcacttttagaagaaaagaaaaccccatgctattatatatatacagatacatatattactttattccccactaggcacttacacatcgtattcatttgtgcaattctatacctcgtgtagagaatgagaagagaaatggcctgaaccctactgtggaaaaagaaaactaaaaacacagggaggtgacttggacacaatgc

SEQ ID NO: 644191 - DNA, 590 bp, Homo sapiens
gtattcacaagagtctaggcatatatacatatatatttgcaaactatatatttgataaagaggctcaatttattcacagttatgtaggcctaacagaaaacatgactgggggggtcccaggaaacttacaatcatagtggaaggtgaaaggcaaccaggcaaaacttaccatggtggcaggagagagagaaagtaaaggggaaattgccacacacatttaaaccatcagatctcatgagaactcactcagtaycataagaacagacaggaggacatctgaccctatgatcagtcacctcccaccaggccccacctccaatttgacatgagatttggttgtggacacaaatccaaacactgtcattctgcctctggtgcctccaaaacttcatgtgcttctcacattgcaaaatactattatcccttctcaaagagtccccctgtcttaactcacttcagcattaacttaaaagttcacagtccaaagcctcatgtgagcgaggtaagtcccttctgcctgtgagcctagaccattaaaaaaaaattagttactttcaagatacaatggggttacaggcaagcattgtgta

SEQ ID NO: 644192 - DNA, 587 bp, Homo sapiens
ctcaatgctcagcccagacctgccctccaggtgcacctctgtactcactctccttgcaaagagtcggcagagcatcagaactcagcagcgcttcggacaccgggaagtccacaccgctctgcccctccctccagggctatggaccccggatcctggtacatgctgggattatagctctgaagcttaccgacaaacaggctgagagtagttaacggactacagctcccagcatattaggtggggcgggtaccactctgccccttcttccagggttgcccctcgccctggagcctggtgcatgctrggattgtagtcctgtagccctttgacccaagggttgggagtgtttatgagagtgcatcttccaacaatcctagggaggcgcgcacagccctgcctcgtcctccagtgacgcgcactttcccggagcccggtgcattctaggattgtagtgctgcagccctgtgaccaaagggctgggagtgtttatgagactgcatctcccagcaagaccagcgagatgcgcggaacctcgtcccttcctccagtgattagcgcactctccctgagcctggtgcatgctggga

SEQ ID NO: 644193 - DNA, 626 bp, Homo sapiens
tttgctattgagaatagtgccttgcagaagtctgaatgttacctctctcttgcctgtctcctgcctggaatcaatctctgcttgaggtggacttgaatttggctcctgttctttggacttgtaattttggactctgactgctcccctccccaatgacagtatcccatcagtttctcttttccttcccttcttcttccctctctccgcttttcattgcagaattgggtgtggacctgagctgtctgcatttcatggagcggtgcttgtgataagggaactcagagatctgggatttaggttcaatttcctaaaagtgtgctctcaccaagatgtttaaattctctgagtcataatttgttagtctttaaagtggaaattcattcattcattcactttttatttctgaacccttattaattgtgtacatatatgtggggagagtgacttgtgactttcaatttagggaattacactttttgaagtcagtaaattctttctacatcatgactgcacacctcctrttttacttatctatactatcgttcttgtaatttggctcatatgtttcagtatattccaacattattttagaattatatcctattttactaatagtagtgacattt

SEQ ID NO: 644194 - DNA, 406 bp, Homo sapiens
ctcaggaaagcagcctctgtcagacaagagtcttccaccctggctgcaatactgtggttgcttccataggactggtgttgtaacctgggcagtctttccaagaaaatatagtgcaggaaggtcaggtgtttcctaggggaccatgtatagtaacttggtacacactaagcccaatgcatggtgagctagcttccaggtacaatttatgtcctagtatagatggtgtttcttgcctccccacctggtcctgggtgaaggaataaaaaagatgatttcatgcttaattctcatgattccatgccaccttcttcttgagcacctaacatgaaagttgtttaataatacacatcttcctatttatatacgcaaatatccacacagmctttaaaaaaaaaagaagactaaa

SEQ ID NO: 644195 - DNA, 579 bp, Homo sapiens
aatatataaaatatgcataagaataatactaagagttaatactaaagatactgccatgtcacgaactaggttaattgtttatattcactttgtttcacaagaaccctgtgaagcaggtgctattatgctgctcattttacagtcaggaaatgagggcacagaggtggcaactgcccaaggtcactgcaaagcctactctataaaccactgcattatggtgctttgcttgccaccaaggtgctgctctacatcgattatagaaataggtgaggggacttgaggggamgtgtgggtagagaaatgccgtattaaaatgatgaacagaagcacagcacaaacaaaagaaaaagagtgagactgtaaggtggccctcggttacagaacatccccatatgaaaaatacaagtaagagcatttcctgtgtcaactggccatatcacaagcacggagccttccagtgccttggttgcctcatctgggaggagatggctacagcagctcaaagttcttaatggagagagaacatacaaactacctagctcaattcctggcacaagcaggtacctggtaaaccaatca

SEQ ID NO: 644196 - DNA, 494 bp, Homo sapiens
tacctggtattagcctgttttcacagtgctaataaagacacacctgagactgggtaatttataaagaaaaagaggtttattggactcacagttccacatggctggagaggcctcacaatcatggcagaaggtgaaagccacgtcttacatagtggcagacaagagagaatgagagccaagccaaaggggaaaccccttataaaacatcagatcttgtgagacttatccactaccatgagaacagtatgagagaaacygcccccatgattcaattctctcccaccaggtccctcccacaacatgtgggaattatgggagctacaattcaagatgagatttgggtggggacacagccaacccatatcagttatctaccattctactcagctgcagcaccagaataaagccttcttccctggaaatactcattgtctcaatgattagctttctgtttggcaagcaatgggacctagagtcaatccctgacattttgg

SEQ ID NO: 644197 - DNA, 541 bp, Homo sapiens
acgaaaacacaaagagagggggattaatatttttcagaaaacacaacatcatatttattccactttctgagacttattaaatttcctgctacagtaattatagccatgtaytgttagggaggtataaacactagaggaacttattactgtcagagattattattaaaactacaaaattttgcctacagactaacacaagcaaaaaagaaagttattaaaactcatttttaggagtctgcttgtgtccttgggctaagttctaaagcagagtaggaaactgatactctgataatcttcatttacagcacttttattaacagcgtatcttgtctccagcaattaatcttggcaaaatttttacttctttttctgaatgcagactgaattttgactctatttcttgcaacccctataatggatgaaaatgtttcttcacctgttctgcattgtgcatttctctaaagaaggtggctaaactccaaagcagtcaaaatattccactactgcaaaatgtttggtaaaaaatgcattattaccatga

SEQ ID NO: 644198 - DNA, 589 bp, Homo sapiens
atgataggtcttctgattctctgtgctgtcctgaccacccctgtcccactgatccttgttggtcaaatgttcatgcaaaccaagagtcccccaacccaagacaaaagcagtggcttgggccttccagaagggccagggaggatagggagctcaggccaggcatgacaagccagaccacagtgggaggaggatcctcaactcccagtgctgtgcttttcagtcttttcaggttgtgaaccccaaccacttgactccagcaccccctgaaatgcacgacagtcatgtgccacataacracgtttcagtcaatgatggtggaccacatgtaggatgtggtcccataagattataatagagttagaaacaaaagaaatatgtattaaaaaaaaaagattaaatcacatctctacaaaaaatacaaaaattagccaagagtggtggctcatgcctgtaatccaagcactctgggaggccaaggcagacggatcccttgagctcaggagtttgagaccagcctgggcaacatggcgaaaccccatctctagcaaaaaataccaaaaaattagctgggtgtggtggcacgtgccta

SEQ ID NO: 644199 - DNA, 522 bp, Homo sapiens
aggtcttgcttgttcccaccgcccaggctagtcttgaacacctggcctcaagtgctcctcctacttcagcctcccaaaggaaggattacaggcgtgatccaccatgcccgaccaccacccctgaaagtgcttgagtgtgccttgaacatacaaccttcccgtaagtagacccttctcctaatatgccctccttcaggcctcttcctggtgaacttacatcatcataaacattggactgggagtcaaaaaaaattggttgataaggtctactttttgccaygccatagtaccagtgatcagaaaaaaaataaaaataaaaataaacatagaagcacctattttcatatagaagcacaggccagtaattcctgagaacagggacacagatgagataaactctgatggtccagttatctccttggaggcacatttgagaccactgcatgaagagagaatccaggtggagcacaacagtctaactgagctgacgagacagagattgggatccagggagcctgaggc

SEQ ID NO: 644200 - DNA, 522 bp, Homo sapiens
aggtcttgcttgttcccaccgcccaggctagtcttgaacacctggcctcaagtgctcctcctacttcagcctcccaaaggaaggattacaggcgtgatccaccatgcccgaccaccacccctgaaagtgcttgagtgtgccttgaacatacaaccttcccgtaagtagacccttctcctaatatgccctccttcaggcctcttcctggtgaacttacatcatcataaacattggactgggagtcaaaaaaaattggttgataaggtctactttttgccacgccatagtaccagtgatcagaaaaaaaataaaaataaaaataaacatagaagcacctattttcatatagaagcacaggccagtaattcctgagaacagggacacagatgagataaactctgatggtccagttatctcmttggaggcacatttgagaccactgcatgaagagagaatccaggtggagcacaacagtctaactgagctgacgagacagagattgggatccagggagcctgaggc

SEQ ID NO: 644201 - DNA, 522 bp, Homo sapiens
aggtcttgcttgttcccaccgcccaggctagtcttgaacacctggcctcaagtgctcctcctacttcagcctcccaaaggaaggattacaggcgtgatccaccatgcccgaccaccacccctgaaagtgcttgagtgtgccttgaacatacaaccttcccgtaagtagacccttctcctaatatgccctccttcaggcctcttcctggtgaacttacatcatcataaacattggactgggagtcaaaaaaaattggttgataaggtctactttttgccacgccatagtaccagtgatcagaaaaaaaataaaaataaaaataaacatagaagcacctattttcatatagaagcacaggccagtaattcctgagaacagggacacagatgagataaactctgatggtccagttatctccttggaggcacatttgagaccactgsatgaagagagaatccaggtggagcacaacagtctaactgagctgacgagacagagattgggatccagggagcctgaggc

SEQ ID NO: 644202 - DNA, 522 bp, Homo sapiens
aggtcttgcttgttcccaccgcccaggctagtcttgaacacctggcctcaagtgctcctcctacttcagcctcccaaaggaaggattacaggcgtgatccaccatgcccgaccaccacccctgaaagtgcttgagtgtgccttgaacatacaaccttcccgtaagtagacccttctcctaatatgccctccttcaggcctcttcctggtgaacttacatcatcataaacattggactgggagtcaaaaaaaattggttgataaggtctactttttgccacgccatagtaccagtgatcagaaaaaaaataaaaataaaaataaacatagaagcacctattttcatatagaagcacaggccagtaattcctgagaacagggacacagatgagataaactctgatggtccagttatctccttggaggcacatttgagaccactgcatgaagagagaatccaggtggagcacaacagtctmactgagctgacgagacagagattgggatccagggagcctgaggc

SEQ ID NO: 644203 - DNA, 609 bp, Homo sapiens
gggctgtgtttcccaatgatgccatctcagagttagtggggtatgcatatgtgtgctgcatatgtggcatgtgcttgcatgttttagggggaacaacagaattttaaacagtttattaaagagccactaacggtgccttggatatgaaatttctactggaaaataactctctgttttgacgatttaagtgttaatgattcaaaaccatatggatcacatttccctcccatccatgtggtttttaaagagtatcagaaagactgcttagagcaaaatgcatttatgattctatcgatcttgtagcattgcaagggctgttcaacagacctgagaaagaggagagcctgtggggccaggatgtgggcctttccctgggccctctgcacgtagtctccaaggcaagcagctcttggcatctggggagagttttcagtacacaacttggtgggaaaggaatgctgcrtcccggtgggattttttgcaaaacctccagaactaattttaaaatgacttaggttttggcagactgaagaggtgttaactcaaacccgggtgtatttcaagggaaatgtaattagaaaaatgctctcctagttagctgggagcctg

SEQ ID NO: 644204 - DNA, 617 bp, Homo sapiens
aaattagcaaaacaggcccacaatccaactctgatctcaaaagagatgactccccctctaccctaggcacagtggttttttttttctttttttcaagtttctaaacaataaaggaaactactttcttattaccttgatagatatttctgtggagctgtacgagggcacccggcttgccactgaaatctagataaatgattcaataaagatacacaagcatataatagaggttcatgtggtctgcaaaagataagacacaccacattaaccctctccatgagaaataagaaaaacgtacacatctatctaaatacctctggaattgtgrgctcaatgcctttatatcattgactgaaaaatacgtttctgtggaaatatcccccttgctgggacttttctatccaaagcaaactgccagtttaaagtagtcctcagtcaagcagccataaagcagcaaaagaaaataagtctgtgattttaaaacctgctgtttggtacagaaaataaaagacagcatattctaaaggagctgtggctttcccccatgaagcacctctcagctccagagacttggggtagcaattcttcaaaacaagtaacactgtaacccaggcttg

SEQ ID NO: 644205 - DNA, 616 bp, Homo sapiens
tttcatggtgcatattccttagctccttaagtagctgatggtttttaaactcaatatgtaattgtttaggaatttataaaggttgcattgctcataaaaaaagcacttccaccttttcactgtattttactgaagtcttcrtcttcattcataaatatttaggtcacactggaagaaaaaaaggcccttgctttataagtctatcttgagaatcagtactttcatttttttcattcattcattaaaaattgatattatggacagcctatttgtaatagattctgttcctaaactttcggcaatagagggtcataaggagacaataggtatatatgaagtaaatagaaaagagatgttagattgcactatatgctatgaaagaaataatgtaatatgatagagagtaaagaagagaggtactcagagaaaaatgaagaaaaacatgggaaaaagataaaagtaatagaaacaacaacagggagaagaaagggagttatatggcaggttgaatcaccgaatagtaattcatcctgtgactaggtgaatggggcagagaaagttcttagagaatagacaaagaatgttttcatgaaagaggcaaataacccaaaagggg

SEQ ID NO: 644206 - DNA, 620 bp, Homo sapiens
tgatgtaagagtcaggataggagcatttgaaatatttccattcccttccactgcagtgtttaaaattatgtcaaacactgcaatctagtcttactacagcaaataagaacatgacaatggtgttccttctaccaaaagtataatagattgttattttgcaaaattgagtagagacatatttatgtttcatatgcatactgaatcaaagaacaaaagggatctttagacaccttcacattttgcagaagtgaaaattgagtaccagatagataaagtaacttctgtaagattttgttgttgttgttgttattgatatatttgaaagttatctcctcaaataagatcagtgctttacattttatctccgtggcagaaatcacctttcacagtaactgtacaatgacaagcagagtctatattccacaaatacaaaggtcagttctaatacagaattcaactcagcctgtgtgaattcaatgccaaattcctmtctttctttgaataataaataatattaacagtaacacacaaaaacaccataaggtatgtgcttctttcttattatataaggccctttctaatatagaagcaattgggtggaatgtgtaatgctatgaaat

SEQ ID NO: 644207 - DNA, 363 bp, Homo sapiens
aatctcatgttgaattgcaattcccaatgttgaaggtggggcctgacaggagctgtttgatcatgaaagccgatccctcatgaaggactcgggccatccctttggtgacaagtgagcttttgctctgagttcacaggagatctggtcatttaaaagtgcgtggcacttccttctttctcttgctcctgctctggctatgtgagtgmctgcttctgctttgccttccaccatgattgtaggcttcctaaggcctccccaaaagctgaacagatgctagtaccatgcttcctataaagtctgcagaaccatgagccaatggaaagtgttttatttataaattacacagtcttatgtatttcttta

SEQ ID NO: 644208 - DNA, 578 bp, Homo sapiens
gctaagcttttggaaaggaatgtggtattgcccattaaaatataaaacgaacataaactttgacttaactatcttactttagggaatctaaccaaaatcaaagtaccagtacttaggaaatacrtgtaaatatatatattgcagaaaaagtcaactggagaatgggtgaatatattatggtatttccatacaatgaaatattagacaactattaatcctatgtcagaatatgtcttaacctatataataatatagtttaaattttaaaaactatggttgcagggtaattgtagagttgcagagcccacatcaatttttatttaaactttaaacagaaaatctgtttttatatctttgtgtattcttagataaactattatattggttgcctctgaatcaggattcaggatgatgggaggaaattattaactttttctctatatcattctatattgattttcactaaaatattagcatacattaactttataatttaattttttaaaattttggcttttaaaatattttattaaatgttaaataggtacaaaataatagttaagtaaaatatctttaag

SEQ ID NO: 644209 - DNA, 578 bp, Homo sapiens
gctaagcttttggaaaggaatgtggtattgcccattaaaatataaaacgaacataaactttgacttaactatcttactttagggaatctaaccaaaatcaaagtaccagtacttaggaaatacgtgtaaatatatataytgcagaaaaagtcaactggagaatgggtgaatatattatggtatttccatacaatgaaatattagacaactattaatcctatgtcagaatatgtcttaacctatataataatatagtttaaattttaaaaactatggttgcagggtaattgtagagttgcagagcccacatcaatttttatttaaactttaaacagaaaatctgtttttatatctttgtgtattcttagataaactattatattggttgcctctgaatcaggattcaggatgatgggaggaaattattaactttttctctatatcattctatattgattttcactaaaatattagcatacattaactttataatttaattttttaaaattttggcttttaaaatattttattaaatgttaaataggtacaaaataatagttaagtaaaatatctttaag

SEQ ID NO: 644210 - DNA, 578 bp, Homo sapiens
gctaagcttttggaaaggaatgtggtattgcccattaaaatataaaacgaacataaactttgacttaactatcttactttagggaatctaaccaaaatcaaagtaccagtacttaggaaatacgtgtaaatatatatattgcagaaaaagtcaactggagaatgggtgaatatattatggtatttccatacaatgaaatattagacaactattaatcctatgtcagaatatgtcttaacctatataataatatagtttaaattttaaaaactatggttgcagggtaattgtagagttgcagagcmcacatcaatttttatttaaactttaaacagaaaatctgtttttatatctttgtgtattcttagataaactattatattggttgcctctgaatcaggattcaggatgatgggaggaaattattaactttttctctatatcattctatattgattttcactaaaatattagcatacattaactttataatttaattttttaaaattttggcttttaaaatattttattaaatgttaaataggtacaaaataatagttaagtaaaatatctttaag

SEQ ID NO: 644211 - DNA, 578 bp, Homo sapiens
gctaagcttttggaaaggaatgtggtattgcccattaaaatataaaacgaacataaactttgacttaactatcttactttagggaatctaaccaaaatcaaagtaccagtacttaggaaatacgtgtaaatatatatattgcagaaaaagtcaactggagaatgggtgaatatattatggtatttccatacaatgaaatattagacaactattaatcctatgtcagaatatgtcttaacctatataataatatagtttaaattttaaaaactatggttgcagggtaattgtagagttgcagagcccacatcaatttttatttaaactttaaacagaaaatctgtttttatatctttgtgtattcttagataaactattatattggttgcctctgaaycaggattcaggatgatgggaggaaattattaactttttctctatatcattctatattgattttcactaaaatattagcatacattaactttataatttaattttttaaaattttggcttttaaaatattttattaaatgttaaataggtacaaaataatagttaagtaaaatatctttaag

SEQ ID NO: 644212 - DNA, 573 bp, Homo sapiens
actatatgtatattcagggagataaaaggacacaaacgtttttaaaggaaaaatgaggaggattatgtcattgtcttcagatagttatccttggctacagaatcagtgacaagggtggcaccagtctgaggttggacaggcagttcctgggcagatatccttgcagaagtatttgtgtgtgtgtgtgtagagtggcaatggcctttatgcaagtttgtgattctgtatagtcttttgtgatagttcttgttatcaggcatttgtgacatayactcccttcatggccttccctagctgtgtttgtctgagtttttaacacaagtggctccatgctgattctgacaactttcacaatgcattgcatgaataaagtgaagagaggagattaatagctgtttaaatcactgtattatgacaatttaatttatgttacttatgccttcatctatagtagttcacctcctgaataatagaagcatcataaaaggatatagtcatgggcaagttggagagttagtttggaagcagatcgtagacagctgtgaatgcagggttcctcgtaatcaagtggtg

SEQ ID NO: 644213 - DNA, 576 bp, Homo sapiens
ctctcctgagtctccagcttagtgactgcagatactgggacttccataatcatgtgaatygatttcttataatttctctcctgcatgtataataagagagagtctgttcctctggtgtacacagacaatacactatgtcataggctatgtgtaaggataaacaatatctgtaaaaaacaggaatattgcttagtctttggaagactcttaataagtagtagtactcctagttattctccttcttcaaatgcatttatccctcgagtcctttaaaacttggatgaacaatttttcttatgaatttcatagaatttttgattttttaatacagctggacatgctgtttgttgatactccatagtgacttcagaattgagtgtattcaaaacaagaccacaaggttcttattcatctttacttagtttttagctatacccttgaagagtcatgctgaaatcacagaatttcacatattagctgtagaggcaaacctaggggtcactttgtccagtgcttttgttttccagattaaggaaactaagacctagtaaggttaaataacttaacatggtcaca

SEQ ID NO: 644214 - DNA, 598 bp, Homo sapiens
tggttatctaagaaaatggtagtttattttttttaaatggtgatttaaggaaaatagggatgaccacatataatggtagctcatttcttttactttagagaagctgttctcaaattttattacataaaagaatcataagacatgctcattaaaaatacagttttctaaagttttccattgcaggtttctaatgaaagagtttgagtcccagaaacttgcaatttttgaaaagcaccttagaaatttatatatgcatggtcatccaaccctattatttttttaaaagatggggaattgccatgctgcccaggctggtcttgaactcctggcctcaagaaatccttccacctcagcttcccaagtttctggaattgcacktgtgaaccatagtgcctgtctctccaactctgttttgagaaccactgatttcaaaacaactgaaaatattttctcagactgctaatacaaagtaatattgcctttcattatgtatcagtggaagaaatttgattcatttcatgggtgtctggactctgatttgagtcaacaatttcatttcaaaatatttattgagtgcctaccatgtgacaggcaaatt

SEQ ID NO: 644215 - DNA, 576 bp, Homo sapiens
caatacctgtggagcatacccttaacatctgtcagcaattccaggtttgaactgcatagaattggcctctacctcccccagtagatgtttaaatgtagaaacataatccaaaaattttacaaggttttcacttagttttgctaaaatgtccatctctttatcttgtttcaattgtgagagtcaattgtgcagcatggatacgattatactctcttcatatgcagaatgtcaccactatagatactttcaatttttcacctgagacaacaggctgatttcaaaaagaagttatttctaattatgtagcttctattacatagctagtattacttttgttggtttatttcatgtatatgccaaaataaaatgttcaactctacttgaataaattgacccaataaatttaataaaatcaattatatcaattttacaaagtaaaatgatcaataactaaatraaaattggattaaatagcattctctaattgaaacaaaatgtaaaatatactaaataacatacaataatacactcagtgtgaaattacatgtgaaaattattttatgaacaccattaaat

SEQ ID NO: 644216 - DNA, 573 bp, Homo sapiens
cattatatagtatgtatatttttacatctactttcttttgtacatcacatttgtaatattcatcagtgytgctgcagatatttaaacactgagattacaggcataagccaacatgttcagcctataatattttaggaggctaaggtaggaggatcacttgtggctgggaattttagaccagtctggacaatatagtgagaccctctctctacaaaaaaattaaaaattagccaggcatggtggcatgtgtctgtcattccagctactcagatggctgatgcagaaaaatcaattaagcccatgagttcaaggctgcaggaagtgatgattacaatcctgcactccagtctgggtaacagagcaagactgtctcctaaaaaatatatatataaaaatttaaaagaattttatacatgatgttaaattacacataaaactaactattttaactattttaaaggtttcagttgacatgaattaaggacactcattaatttgctaccataatttccatgtataaaaagcattttccattttttgaaactgaaactgtacccattaaacaacagctcc

SEQ ID NO: 644217 - DNA, 465 bp, Homo sapiens
gaaaactggcacaagacagggatgccctctcaccactcctattcaacatagtgttggaagttctggccagggcaatcaggcaagaaaaataaataaagggtattcaattaggaaaagaagaagtcaaattgtccctggctgcagatgacatgattgtatatttacaaaaccccaytgtctcagtccaaaatctccttaagctgataagcaacttcagcaaagtctcaagatacaaaaccaatgtgcaaaaatcacaagcattcctatacaccaataacagacaaacagagagccaaatcatgagtgaacttccattcacaattgctacaaacagaataaaatacctaggaatccaacttacaagggatgtgaaggacctctttaaggagaacttcaaaccactgctcaatgaaataaaagaggacacaaacaaatggaagaacattccatgctcatggataggaa

SEQ ID NO: 644218 - DNA, 397 bp, Homo sapiens
gggcaagggaagggcttagcttcaaactgtagacagaagtgggaagcccaaatctttgcatggtgagaagtgggatggaatgtaggtgctagagatggtgcaccagtagggactgtcactggattggggaaaaaaatccggggctgtccttatctgctcccttaggcaaaatcgttctgtgttagtctggagggtgaacctattttaatgcaggagggcatagacttttgggtggaagcggaccctggagatgtactggcaggtgaatagagtgtggaaaagtggggaaaggagaagcacgattcatgagcctgagttcgggcttccatggatggaraagcatcaggagtggaatttaaagacggtgtgtttcaggtgatgtgaggtcctggatgcc

SEQ ID NO: 644219 - DNA, 397 bp, Homo sapiens
gggcaagggaagggcttagcttcaaactgtagacagaagtgggaagcccaaatctttgcatggtgagaagtgggatggaatgtaggtgctagagatggtgcaccagtagggactgtcactggattggggaaaaaaatccggggctgtccttatctgctcccttaggcaaaatcgttctgtgttagtctggagggtgaacctattttaatgcaggagggcatagacttttgggtggaagcggaccctggagatgtactggcaggtgaatagagtgtggaaaagtggggaaaggagaagcacgattcatgagcctgagttcgggcttccatggatggaaaagcatcaggagtggartttaaagacggtgtgtttcaggtgatgtgaggtcctggatgcc

SEQ ID NO: 644220 - DNA, 547 bp, Homo sapiens
acagtactatccaaagcaatttatagattcagtgcaatcctcatgaaaagactaatgacattcttcayaaaaatagaaaaacaatcctaaaatttatatggaatcacgaaagactctgaatagccaaagcagtcctgagcaaaaagaatgaagccagaggcatcactctatctggcttcaaaatatactacaaagccatagtaacaaaatcagcatgatattggcataaaaaaaagacacatagaccaatggaacagcatggagaacccagctgtaaatccacacatttacagccaactaattttttacaaaggtaccagagcatgcaatggggagagcgcagtctcttcaataagtggtgctgagacaactggatatctatatgcagaagaatgaaactaaactcctatctcttaccatatacaacaatcaaataaaaatggattaaagacttatgtctaagacctgaagctatgaaagttctagaagaaacctttagggaccgctctagaacactggtctgggcaaagaatttttacataagatc

SEQ ID NO: 644221 - DNA, 462 bp, Homo sapiens
atcacctgaggtcgggagttgagaccagtctgacacatggagaaaccccatctctactaaaaacacaaaattagccagtcgtgatggcgcatgcctgtaatcccagctaattgggagggtgaggcacgagaattgcttgaacccaaaagccagaggttgtggggagctgagaktgcgccattgcactccagcctgggcaacaagagcgaaactccatctcaaaatctgaaataaaataaaataaaataaagatctatgggcattttaataatgctctatttatctgtgattttcagcagtttaaatatgatatgtttaggagtgtgtgtgtgtgtgtgtgtgtgtgtgtgtgtgtgtgtattttagtccgcatatgcttctttgtccttcttggatttgtggtttgataacttccattatttttgaaaaattgttggccattttctctttaaatgtttcctc

SEQ ID NO: 644222 - DNA, 533 bp, Homo sapiens
ctgcttccttctcttcatttcatttaccctccctaccttatcttttgaccctgttcttaaccaaaactgcttccagagcgaaatgctcctgtctcccagcatcttcttactttgtgacctgaaaataattacaaaaatgtattcattttaagggttttattgatgagcagagtggtgaaatggattgggaaaatcagccaagaaaaatgawaaagcaacattttgagaattatataagacctatcgctcagaatccttgaactttgatttttattcttgatatggtttggctgtgtccccacccaaatctcattttgaattgtagctcccataattcccacgtgttgtgggagggacccagtgtgaggtaattgaatcaagggggtgggtctttcctgtgctgttctcatgatagtgaataagactcatgaaatctgatggttttataaagagcagttcccctgcacaccctctcttgtctgccaccatgtaagacataacttttctctttatttgccttctgccatgattgt

SEQ ID NO: 644223 - DNA, 550 bp, Homo sapiens
ttgcttgggtcaaggtttatgtcattagtgataaaaataatgttgatagcatgtacctgtgaatgatatgttgagagtagcatgttttctctgttgtccttctcccaagaatctataaccacagtcttatcatgggtcaaacatgagacaaacataaattaagggaaattttacaaaacacctgacaagtgccccccaaaactgtcaagggcaacaacaacaaaatagtctaataaatccttatagcctagagaagcctaagaagatataactaaatgcaatatggtatcttagatgggacactagaataaaaaaggacattaggaaaaaactagggaaatccaagtaaagtatgcacttcagctaataacaatgtatcaatattawttcactagttttgacaatatgcaatagtaaggtaagatattaacaatataagaaatagttcatgttagaaaagagttatctgtgccatctttgcaacttttctgtaaatataaaactatttaaaggtttatttaaattttaaaggacaaaaataatattataa

SEQ ID NO: 644224 - DNA, 619 bp, Homo sapiens
gaacagcaacaacacagcaataaaaagacagagaaaaatcccagttgggaagtttattttgttttctaaaaccatgttttttgtttgttttgtttcactgagttttagtgtttgctttactgtaatgtatttacttcttcaaaatattggttatattagctcttgacaatctttcaagataagccaaattgcaaacttcatrgtacaagatcttttcatcttatcatcaaacaataaaagtttcatgggatctgtttgtaggcctttttaagtctgagtaaagaaccttgacacgtactgttagacagcattattggtgtcttaactaatagaaaaccttaaggagacaaaaaatgtaaaaaattcctacaagtatgagttgagggttacaaattatttttaacctaagaaaaactgaatgaattatttctaatttaagagaaacttaagtacagtatgcaaaattctttgcaaagaattccccactcaccaaacaaagagttaccctctgtcaatggcctgtcatctggaagttttctatatgatttggtctgattctttcagtgatgctaaaaatcagagtcttgtaatgactttattttattttaatatttacatt

SEQ ID NO: 644225 - DNA, 602 bp, Homo sapiens
ttgagctttacttccagggcaaaattacccaacaatataatgaaagttctcagctttttacatatccaaaatcattccattgcaaatctataacaagtatatacatgtaaaatttttctaaacatcaacaaattacctttatattgaaagtactaataccacttttctgtaggtatacttaagaatatatcaaaatattgtgttttaaaagtcttcagttatatgtagatttttaatcttgtcaagcgtaatttaattttgaaattacttgcatgttttagtgtttagcgatatgtaagtaggtaaacaactgtaatgatttgtcattttccaacaccattacttattttttggaaaaaaaataattaaattgcrtaataaaatatttataatttaaatgcatcaaacatcacttagtatatatgatacaacatgctttgaaatagtgtcttatattttttaaagttttaaaaagccatcaagatacaacattgagatgctttaaaattgcttttcacaaatgtaataaggggatttgtgtgtacaagtatgtggctagggtgtttagagagagttaaaaaggataaatttaatttttattt

SEQ ID NO: 644226 - DNA, 428 bp, Homo sapiens
aattttctcagcaactctgcctttctatcctttgtcacagccccttggcaaagtcccaaccctgaatgaaacctcccatccgctgtctccacgcctgctccagagcagttgcctgttcttggagataatcacacaatagggctggctgattttgctctaaattcatgatcttggcccatgcacttgccctcaagactgccaggcaaccccaccactctctctagtaggccactgcccactcccagatgacaattttacttctctttttcctctcaccttcccttccaccctgctctctccctctggttccaagggacccttccccttcattacttcrctcaactctcatcttcccaataccagactaggacccatcctggctgcttctctcttctgcttcttcctgtgctgatggagaaagtccctcc

SEQ ID NO: 644227 - DNA, 483 bp, Homo sapiens
ctatggaagcaaaactcaaatacttcccatcactcttcccacccctctgtattggcttcatccgcagaccaattcttctcatatgccatcaacatggcactagtagttccagacctagatggtgtccttgcacacagagctcctttctcacttaacattttggcaatcttttaagataaggtctcagtggtcagtctgggccccatgccaatgtgctggggtgaaatgaacctatgtgattgacagctgcacacggagacagacaatgtcaacagagatgaagggtgctgagatgctggtgggaagtagttcatggggccaagaagattracagaacgatctgaggtttcttttaagctttgctggcatgtcactgtcatcacaggatagagaaaacttgcattcacacgtcctatcagactggagctaggaaaactgtcaccatggttagatggtgtggctcctggtaaacagggggccagg

SEQ ID NO: 644228 - DNA, 591 bp, Homo sapiens
agcagtaataaatgtgttttttatgaaacagtctactattaggccacaatttaaaagttataaaaatattaaatattataattgcaagtgaaaaattatagcaaagtccctaaaactgaggacacatttgaaaatatcacaaactaagcaatctttttttttgaaacaaggtgctgcttgacctcatgggctcaagcaatcctacctcagcctcccgagtagctaggattaaaggcacaagccactgtccatggctaatttttgtgtgtgtwtgattgttttgtagagacagagtcttgctatgttgcctagactgatctcaaactcctggcatcaagcaaacctccttccttggcctcccaaagtatcaggaatacatgtttgggccaccatgcctggccatttgtgcaatcttcttgttacatttgggccactgaagagataaaatgcaaaaagaattctgaatgtgtgtcctaagaatgagaagagtatatattaattacgtcagatatctactgtcagcaccaaatagctgacttctgcacatgaatcaaccaatagcctagctctgcatgtgctcatcctcaactc

SEQ ID NO: 644229 - DNA, 591 bp, Homo sapiens
agcagtaataaatgtgttttttatgaaacagtctactattaggccacaatttaaaagttataaaaatattaaatattataattgcaagtgaaaaattatagcaaagtccctaaaactgaggacacatttgaaaatatcacaaactaagcaatctttttttttgaaacaaggtgctgcttgacctcatgggctcaagcaatcctacctcagcctcccgagtagctaggattaaaggcacaagccactgtccatggctaatttttgtgtgtgtttgattgttttgtagagacagagtcttgctatgttgcctagactgatctcaaactcctggcatcaagcaaacctccttccttggcctcccaaagtatcaggaatacatgtttgggccaccatgcctggccakttgtgcaatcttcttgttacatttgggccactgaagagataaaatgcaaaaagaattctgaatgtgtgtcctaagaatgagaagagtatatattaattacgtcagatatctactgtcagcaccaaatagctgacttctgcacatgaatcaaccaatagcctagctctgcatgtgctcatcctcaactc

SEQ ID NO: 644230 - DNA, 574 bp, Homo sapiens
ggttcttgtcagagattgatgacctaaacagtcactgaaacttaataacagcgttaacaactgcaggtcgatctcacacaccacaaaatagtgcttgtgtttttctccatgcttatttttagccaagttatatcaacattttgaccagagaaaatgttggaccaagttacaattttttattattccgtattagtaatcatagacggcatagaggttgctgtattagcagtaccacagcaaaaataattcacttgcaaagcaactacaaaacattatgcaacaattcattaatgggtttatccaggtagctttacattgactctgtgacacacggaaagcactaaatggaaatctagagagaaaataatatgatgctggccagtatgttttaatggtaattatgtccaaaaagtttatgaaatattttattcatgccactgctaacakatacctatgagataactgtatcaaaaaagatgattttctggttgtctttttctttttccagaaaatgttttgtttcctattatcaatttgatagtttgatgaaagcatattttgctggaaggtacct

SEQ ID NO: 644231 - DNA, 576 bp, Homo sapiens
taccacttcactcctgcaagaatggccataattaaaaagtcaaaaaataatagatgttggcatggatgtagtgcaaagggaatacttttacacggtgggtrggaatgtaaactagtacaaccagtatgaaaaacagtatgtagattccttaaagaactaaaagtagaactaccatttgatccagcaatcccaatactgggtatctacccaaaagaaaataagtcattatattaaaaagacataattcacaactgtaaaaaatacggcaccagcctaaatgtccatcaaccaatgaatggataaagaaaatgtgatacatacatatatatatatataaatcacagaatactactcagccatcaaaaggaattacataatggcattcacagcaacctggatcattgctctaaatgaagtaactcaggaatggaaaaccgaatatcatatgttctcacttataagtgggagctaagctatgaggatgctgtactagtccattctcatgtggctatgaagaatatccaagactggatagtttataaagaaaagagttttaattgactcacagttccacat

SEQ ID NO: 644232 - DNA, 576 bp, Homo sapiens
taccacttcactcctgcaagaatggccataattaaaaagtcaaaaaataatagatgttggcatggatgtagtgcaaagggaatacttttacacggtgggtaggaatgtaaactagtacaaccagtatgaaaaacagtatgtagattccttaaagaactaaaagtagaactaccatttgatccagcaatcccaatactgggtatctacccaaaagaaaataagtcattatattaaaaagacataattcacaactgtaaaaaatacggcaccagcctaaatgtccatcaaccaatgaatggataaagaaaatgtgatacatacatatatatatatataaatcacagaatactactcagccatcaaaaggaattacataatggcattcacagcaacctggatcattgctctaaatgaagtaactcaggaatggaaaaccgaatatcatatgttctcacttataagtgggagctaagctatgaggatgctgtactagtccattctcatgtkgctatgaagaatatccaagactggatagtttataaagaaaagagttttaattgactcacagttccacat

SEQ ID NO: 644233 - DNA, 584 bp, Homo sapiens
gtgcattttatttgcgcctcagttttctaatttattttaaaaatcacttgaccagataattttaaatatcctttcgattataccttctaaaatcatgccacaaagatatttccttcatgattcctgtttttttttatgctgtcattggtgcattaaaatgacaatcttatcttagattcttatttatggagcaggaarataaatgtatggcaagttaccaaataaatgacattcccaagtttggaagtcagccaaacttgcttttaatccaaattctactcagaatgtatggggcattagggctatatttatatgataaaaaagaagggtcctctttcttgatttgttccatgccctgtagatctgaaaaagcctgaaacatcatttctaataagtaatatttccttcatagtaagtttcccagagtaatggaatatacatatatatatgtatattccatctatatataggtacagatatatgatatatgtatatgtaaatagagatgtgagtgtttattgtatgtgtgtatttgtgtatgtgatacccaacggtgctcatataaggaaaggaatattgcaaaa

SEQ ID NO: 644234 - DNA, 584 bp, Homo sapiens
gtgcattttatttgcgcctcagttttctaatttattttaaaaatcacttgaccagataattttaaatatcctttcgattataccttctaaaatcatgccacaaagatatttccttcatgattcctgtttttttttatgctgtcattggtgcattaaaatgacaatcttatcttagattcttatttatggagcaggaagataaatgtatggcaagttaccaaataaatgacattcccaagtttggaagtcagccaaacttgcttttaatccaaattctactcagaatgtatggggcattagggctatatttatatgataaaaaagaagggtcctctttcttgatttgttccatgccctgtagatctgaaaaagcctgaaacatcatttctaataagtaatatttccttcatagtaagtttcccagagtaatggaatatacatatatatatgtatattccatctatatataggtacagatatatgatatatgtatatgtaaatakagatgtgagtgtttattgtatgtgtgtatttgtgtatgtgatacccaacggtgctcatataaggaaaggaatattgcaaaa

SEQ ID NO: 644235 - DNA, 516 bp, Homo sapiens
ctttctagttgttctagccattactgaaagtgcagtactgaattctccaactgttatttttaaatttctatttcttttgtcttttgaggctatgctgttcgatgcatatacatttataattggtataaattcttagcgtattgactgttttatctatataaaatatyctttttatctctactaacaacttttttcttaaagtctattttgtcttctattagtctaggcactccaactttcttttggttatgatttgtatagactatatttttccattattttattttaaatgtttttatgtcttttaatcttttttttaattttttttttttgacagtctcactctgtcatccaggctggagtgcagtggtgcgatctgggctcactgcaagctctgcctcccaggttcatgcaattctcctgcctcagcctcccaagcagctgggactacaggggcccgccaccacacccagctaattttttgtatattttttagtagagacggggtttcaccgt

SEQ ID NO: 644236 - DNA, 516 bp, Homo sapiens
ctttctagttgttctagccattactgaaagtgcagtactgaattctccaactgttatttttaaatttctatttcttttgtcttttgaggctatgctgttcgatgcatatacatttataattggtataaattcttagcgtattgactgttttatctatataaaatatcctttttatctctactaacaacttttttcttaaagtctattttgtcttctattagtctaggcactccaactttcttttggttatsatttgtatagactatatttttccattattttattttaaatgtttttatgtcttttaatcttttttttaattttttttttttgacagtctcactctgtcatccaggctggagtgcagtggtgcgatctgggctcactgcaagctctgcctcccaggttcatgcaattctcctgcctcagcctcccaagcagctgggactacaggggcccgccaccacacccagctaattttttgtatattttttagtagagacggggtttcaccgt

SEQ ID NO: 644237 - DNA, 516 bp, Homo sapiens
ctttctagttgttctagccattactgaaagtgcagtactgaattctccaactgttatttttaaatttctatttcttttgtcttttgaggctatgctgttcgatgcatatacatttataattggtataaattcttagcgtattgactgttttatctatataaaatatcctttttatctctactaacaacttttttcttaaagtctattttgtcttctattagtctaggcactccaactttcttttggttatgatttgtatagactatatttttccattattttattttaaatgtttttatgtcttttaatcttttttttaattttttttttttgacagtctcactctgtcatccaggctggagtgcagtggtgcgatctgggctcactgcaagctctgcctcccaggttcatgcaattctcctgcctcagcctcccaagcagctgggactacaggggccygccaccacacccagctaattttttgtatattttttagtagagacggggtttcaccgt

SEQ ID NO: 644238 - DNA, 445 bp, Homo sapiens
gtccagtaagatgtagcctaagaactgattactgaatgtaacaatgtagaaatcattacttgggtagattggtggaaacaaaacttggttgaagtaaatttaaaaaaagagtaagagctgaagaattaaaatcttaacatcctaacataatcaccaatattattaattattgtttttattcccaagcaggtgagacaaactagttattatacaaaccaccaccccctcgagaataagtggaactctcccagacaaatctaaatgtaatgtccagaaagagcaactgaatcattccttcatcttttttgtgtggcaacatatgaagctgtaccaaattgtatggtrtcagtgatggcagcagtggcctgtctggagtggctgctgcaaagacaacggctgcagcaggcgaggtgtggctggggctgctccctctgtggagtcagtg

SEQ ID NO: 644239 - DNA, 628 bp, Homo sapiens
aaaatgaaatgtatcacctcctgaaaacaacataaaaagagtacctcagggtcagctttattcagtgcttaygcgatattctcaaggtttattcctggactgaatttttgtgtaaattcgattttttgagacttcacttctgtgctactaacatagagaagttcatatttctatttcattctgcctaatgtaaaactttgtttaccagtagttctaaaggaagttctaaaattacttttttctttggctctgattgacatttttggggtaacgtatttatcctctaatattggtgtactcattacctatgagtgtagacttggttagtcattattaaagtttagtgtgcttgataaaacacaggttgctgtacctcaacctatagttttggcttagctgtctgggataagaccaaagaatgtgcatttctggcaagttcccaatattcaaactttgagaactactcgtcttactcttgtactacacccctgaatgccatgatcatcttgatcatgtaggctttcatgggtcacttgctccatctttactcaatatctttgctcaaatatcatcttttcaatcagtatatgttaatcaccctatttaaaatttcagcatgcatcccaca

SEQ ID NO: 644240 - DNA, 628 bp, Homo sapiens
aaaatgaaatgtatcacctcctgaaaacaacataaaaagagtacctcagggtcagctttattcagtgcttacgcgatattctcaaggtttattcctggactgaatttttgtgtaaattcgattttttgagacttcacttctgtgctactaacatagagaagttcatatttctatttcattctgcctaatgtaaaactttgtttacmagtagttctaaaggaagttctaaaattacttttttctttggctctgattgacatttttggggtaacgtatttatcctctaatattggtgtactcattacctatgagtgtagacttggttagtcattattaaagtttagtgtgcttgataaaacacaggttgctgtacctcaacctatagttttggcttagctgtctgggataagaccaaagaatgtgcatttctggcaagttcccaatattcaaactttgagaactactcgtcttactcttgtactacacccctgaatgccatgatcatcttgatcatgtaggctttcatgggtcacttgctccatctttactcaatatctttgctcaaatatcatcttttcaatcagtatatgttaatcaccctatttaaaatttcagcatgcatcccaca

SEQ ID NO: 644241 - DNA, 628 bp, Homo sapiens
aaaatgaaatgtatcacctcctgaaaacaacataaaaagagtacctcagggtcagctttattcagtgcttacgcgatattctcaaggtttattcctggactgaatttttgtgtaaattcgattttttgagacttcacttctgtgctactaacatagagaagttcatatttctatttcattctgcctaatgtaaaactttgtttaccagtagttctaaaggaagttctaaaattacttttttctttggctctgattgacatttttggggtaacgtatttatcctctaatattggtgtactcattacctatgagtgtagacttggttagtcattattaaagtttagtgtgcttgataaaacacaggttgctgtacctcaacctatagttttggcttagcygtctgggataagaccaaagaatgtgcatttctggcaagttcccaatattcaaactttgagaactactcgtcttactcttgtactacacccctgaatgccatgatcatcttgatcatgtaggctttcatgggtcacttgctccatctttactcaatatctttgctcaaatatcatcttttcaatcagtatatgttaatcaccctatttaaaatttcagcatgcatcccaca

SEQ ID NO: 644242 - DNA, 578 bp, Homo sapiens
agatttatgctgggacacactcagcttgccacaagagggcagaacaagaatgctgtatctcctctggtccccctcctacctttcttctgctgattctcagctttgtcttccctcaaaatgcctaggtttctgagattctgccttgggtcttttttttttctcactccacaccaccctctcccggggcaatctcattgatacttcaattaaaaccaccacttctgtatttgatgactaccaaatttctatctgatttctatctgtaaccctacttgcttcacagcagcagaatgaattccggactacctactgaataattcctcttggacactgcaaaggtcattctttccccacaaacctgctccttattctgagttctccatgaatggtttttgcaacttgttaaccatccaaggcagaaagacaactgggcatcatccttgattccttcttctccgtcagtccccctatatctagtcagtgaccaagttccaaatttmttgcatatatggtattctcatttcattcccactgccttaacccagatttcagtatctactttataaatagcctcctaa

SEQ ID NO: 644243 - DNA, 588 bp, Homo sapiens
tttgatgattctgagactttgctcatgttcttttctctgcccagaatctttttccattccacctgtctactcgactatttctgttgctcagatgtcacctcctcagtgaagctttagtscttgactccagacataattatttcatgcctggttcatttttccaaagctctttatacatagcatcatgtcccagctgtttgtttatgcttattctcctctccctcactaagaatgagccatgtattatttaatagatgtttgatgacttcaattcaactagatcctggtgcctactaacagtctcttcctttcgaaaatactcataaatcactcattcccaagtccaatctagcaagcacaatgtgctccctaagtaccagttcccaagaaaaggaaccagggcttcttggcaaaatggctgatgccaggtctaggcataaagtgtaaaagatgagcctagaacatcttggcgtgccagtcagtgaggaagctatcaaaagcaaggaagctatcaaagataaagaaactatcgaagacgattaagggttgtcaaaaactgagaagtcaaactgaagaggtttccattgt

SEQ ID NO: 644244 - DNA, 545 bp, Homo sapiens
agctaatcgcctcttttatcccccacttcaggctcacatataagtttatagtaaaagccttttcaaatgactgctttaactgctgctacagcatgtgtcatcagttgaatggaatctgtcacgtgactttaagcaaccctttgctgagagacaagattcaatactagggacagtattctagtgtactacatcattgattttatgttatgaagatcatcatttattgaaaatgtataaataatgaagcccagcmttactcttcaacgctgtgtgtgtaaatccactgagtgtgctgacccccacgcttgtacccacctgctaacacagaaagggtccactcagaaggcaggcacagctccagcactgaggctgtccacaccagcttcacaagagggttgccacaaggacgacggatacccggataacaaccaaatggtaatttgagtacttaatggtcatgatccctaaagtgtgtagctcagagggcttgtggtgataactccatcaagactctaaagcatctccccaattcttactggacttga

SEQ ID NO: 644245 - DNA, 497 bp, Homo sapiens
agacctcatcttactaaaaaccaaaagcattacctgggcatggtggtacacacctgtagtctcagctgcttcagaagttgaggtgggaagaactggttgagcccaraaggttgaggctacagtgagctgtaattgcactactgcactctagcctgggtggcccccatctcacacacacaaaaaaagagcgagaccccgtctcaaaaaaaaaaaaaaaaaaaaaaaaaaagggagttcctcatttgccatgagtggacacctgcttctttactgcttcaaagtgaacacagctattccttgtaaagggttggttttactgtaaggaaatctagaacacctgtgtgtgaatgccccctgattttcaaagaaatgagtggttgcatcaaaatcaagcttatatttgtggaaaatcacatgttgccaaattctctcatcaagaaccctttattaactgactaattgtgggccatggtggcaggcacttaacaaagaccatg

SEQ ID NO: 644246 - DNA, 588 bp, Homo sapiens
cccattttattaactctccttcccccaggagctccgtattttgaaatcttttgtttcccagacaattagggagtaattaaaccttttttcccacatgataacaagtatgatcgttcacacttgatatagtccagttctaaagcaaaattagtctagtggtctgggttgcggatgaccaaagcacacatatgttccatccattaggttgcttagccctgtggttagggaaggyggggttattgttaggtgattttgaaatctccaaggtcatcagtttcccaaccccatgtgctgctttggataacctgggtggtgtttgcccactactgctttgcattggtgaccttgattgaccatgctaggtggcacttttcagcagggtgaggaaaggagatgcacagttgagcagccgtcatttcctccgggtccgatcacacctaccctatcccagccagatacaatctatccctttttaaaaagactttcggagaatgaaattttacagtcttttttgtataatgcccccaaaaggaaatcttgattttcacttaagatttgatttgaagtaagtcatgatttagaacagca

SEQ ID NO: 644247 - DNA, 607 bp, Homo sapiens
catctgtgccactggaataaacaaggccactggattcctgtggtatgatttgatcatgagtcattagaatgatgcagaagatagtaaaactcaattttaagactatgatcaaaacgaagacctccaattaaaaagatcctcgtaaaaaattttaagactccccttaggggggcctgtgggagccatggacctcacattaaaacatacatacctaaagacattaggtttaggtcagtagtaggtttgaagttggaatcaaagcaaaattctgggcaaaaaaaagaagccaaataaaattaaatgattacatgacaatacaattcattactcaatagaataatagacttgagtatggaatcttrttataggcatgtccgagactgctatatgtccaactgtgtctgttctctccttttctcttttagtaagaaaattctcccctactccataggtgctttcaggcatcatggctaatcagctagaggccacatttcccagtctcccttgaagcttgttgtggccatgtgatcagcttcttgtgaatgggagcttgagtgtaagtctttcacatctactctcttttcctcttctctctggctggtacttg

SEQ ID NO: 644248 - DNA, 575 bp, Homo sapiens
agataatttgagtgaagctgagttctctctcttcacctcctttcagaattatctagattgtgtatcatctatggatgactaattagaaaractttagtttttcttttattcccagtaatgtcctgttttataactaaatcagttacaattttgattttacaaaatcctattgtatttgatagcttttacttcttcaataaggaagaaaataggaatctggatatattaaaatattgacttttgcccctttccttaaattgtcttctaaactctgatgagagcctagccatctatatcaaatgcaccataaaactcagttcgcatgctagaattagccctcctctaaatacaaagtaaggctgatacagttagatcacctgtgctgcaagtacagtccagaaatcattccacaattctttcagttttctttataagagttaaagtttgttcatagcacactttggtttgttgactagttataattattatgtattagctttgtgtaatttactggaggaaatatcaagggatattaaggggaaataataaacatgatatgtgcataaaaggagcta

SEQ ID NO: 644249 - DNA, 526 bp, Homo sapiens
ggactgtggttcatgacagatgaccagtttttggatattatttggtgttatgacagctatcacttattgtgtatctataatataccagccactaaaaggatccagtgttattgattcttatactaaggcagatattgtgatactaattttacagatgaaataagtttaaacattattaaataatctaccctagtaaggggtcaagctgagttccattaggaaggaaaaactctttccttgacctcttggtttcagtggcagcagccctgaatattgaactgacaaaaaaataggataacaggagaaaaaggtttatttcatatgcatgtggatggggtctcacagaaataaaataaaaactgtagagaggtggtcagacccaaacacttggacactaattttacaaaagggcaggtcatgtcctttgcatacatagaagaaatagggatgcaaatttgyggagaaataacaagacaaagaaaaagagttttgagcttctagaggaagtaaattgtggaaaaataaa

SEQ ID NO: 644250 - DNA, 467 bp, Homo sapiens
ttggtttcttccctatttaactagggattaaagtaactaatctcataatctcctccagccccatccactagagatatacctgrccatacttggagcacagatttttagttatttccttaattctgttattttctcagcaggttactcttcatttgatattatcaggttggagcaaaagtaattgtgatttttgttattacttttaatggcaaaacccatgattacttttgcaccaacctataagatgctttccatcttcctctccttatcttggtgcaagaaaactaagtggtgtgaccatgtgtatacataaatatttttaaaaggacctcccccaaactcaatcatgattatttgtgttataggggagcctgagaacaggagtgacaacttttttaagggactgttactacccactaagttcagagagacttggttttattaagtatgctagaaaagaaataaaa

SEQ ID NO: 644251 - DNA, 467 bp, Homo sapiens
ttggtttcttccctatttaactagggattaaagtaactaatctcataatctcctccagccccatccactagagatatacctggmcatacttggagcacagatttttagttatttccttaattctgttattttctcagcaggttactcttcatttgatattatcaggttggagcaaaagtaattgtgatttttgttattacttttaatggcaaaacccatgattacttttgcaccaacctataagatgctttccatcttcctctccttatcttggtgcaagaaaactaagtggtgtgaccatgtgtatacataaatatttttaaaaggacctcccccaaactcaatcatgattatttgtgttataggggagcctgagaacaggagtgacaacttttttaagggactgttactacccactaagttcagagagacttggttttattaagtatgctagaaaagaaataaaa

SEQ ID NO: 644252 - DNA, 467 bp, Homo sapiens
ttggtttcttccctatttaactagggattaaagtaactaatctcataatctcctccagccccatccactagagatatacctggccatacttggagcacagatttttagttatttccttaattctgttattttctcagcaggttactcttcatttgatattatcaggttggagcaaaagtaattgtgatttttgttattacttttaatggcaaaacccaygattacttttgcaccaacctataagatgctttccatcttcctctccttatcttggtgcaagaaaactaagtggtgtgaccatgtgtatacataaatatttttaaaaggacctcccccaaactcaatcatgattatttgtgttataggggagcctgagaacaggagtgacaacttttttaagggactgttactacccactaagttcagagagacttggttttattaagtatgctagaaaagaaataaaa

SEQ ID NO: 644253 - DNA, 569 bp, Homo sapiens
tggtgacttaatgtggtcctttcagggatagaaatccatccatgtattaatggagtgtagacaattattggtggtgacaatcaatacgttttattagatagcaaaaggagaacaaaggagaagcctgactcgcaaatgtttatttctattagcattcagtcatccttacctcctagtccataccagggctggttttgaactgttgtcctgatacagtcacatacacacagtgtgagagaagcttccaaggggggatgtttgagcacgccagactttagtggcagacagacaagatttaaaaactggttctgctactaacttgtgactctgggcccaatacgtgacacagttgcccaaacctcattgtcttcatcttaaaaacgagaatgctaagatttgtgtcccaaggtagtgtcatcatgtctgcaaagtacttggcttatgggcctctcaataagtggcagcgattactatcatcatcatcatcatcatcatcatcaccatcatcatcaccrtcatcatcgttttgctattttgaaatgcgtgactatatgagtatttatgtgcat

SEQ ID NO: 644254 - DNA, 624 bp, Homo sapiens
acttctcaaggtaagaaagaagtaggcagatctcattgaaattcacctttgggcaaatccctggaatacctatttgccatccacaagagaactctacctagaggctgtatagcactatttctgacacctgataactaggggaaaactggatatataggaatgcaatacaacaaaaatatttttatacttcttttcttgatagtttaaggtaaactgtgagtccagggagcttaggtggaataaatacaagaaaaagctttttacattgttaatagaattttaaatagaattcgaactgttcttattaatagcatgtatttattctccaaacttaatgtgatcatccaaatttcactttccatccaggaacaatattgtaccttctcaaagaactatttgtagtttccctttaataagctactaaaaaatgaagtccatgtatttgrcagctttaagtgctgtgtgtgtatgtgttttggtaaacagaagaatctttataaaatatgataccttcatacttgattttggcattattgtagagaacagtttaaaagggtttgtaataaagtagacaaaacacagctctgccagttatgagctgtgtgaccttcaacaaattactaa

SEQ ID NO: 644255 - DNA, 637 bp, Homo sapiens
aaatattaaagtatctgaagggaaaggtatatttcaatacaatgtaagtagaggatttaataatcactttcaatattggatagacataaaatcaataagaaaacagtggacttgagcaacatttcagactaactggacctggcagacatgtacaaaacataccaaaccaacaacaaccaaatacacattcttgtcaagagcacacagaacattttccagaataaaccatatattaggtcacaaggcaagtctaagcaaatttaagaagattgaaatcatatctggtatttttttctgatcacaatgggttaagactaaaaatctgtaacagtaagactttcagaaaactcaatgaaattaaacatgctcctgaatagccagttgatcartgaataaaagggaaattaaaaaatgtcttgagacaaatgaaaatggaaacacaacataccaaaatttaggaatgcagcaagagaagttctgaggggtgagtctgtagcaataagtgcctatatcaaaaagaaaaaatatttcaaataaataatgttacaccttaagaaaacataaaaagaacaaactaagcccaatgttagcaaaagaaaataaataagaattatcacagaaataaatgaaatagaaa

SEQ ID NO: 644256 - DNA, 494 bp, Homo sapiens
ttcatgtaaaacagtttggtttctgtttaaatgctgagaatgaaataaaactgtttttcaacttcagctcagctctcttgtttcagatgtccataagcaaaatttagcagttgcttataaaagtttcagttggagatatattggaccatctgtttcatttgctctccaatacttgaagataagtaacccctggcatcagaagcaaatacaacagctgtgattttgcttgtagtatgctagttgtgctatcaagattccaaatcctagggtatcataatgtcttccaaggccaaatgatttaaaccaaggtcagtagattgttctctgaggacagggaaaaatratagtttaggatttgatcactcaggtatggtgacaattagcattaatttgtgacttttagatactgaaattgattttaccactaaagtagaaaatttcaaactgaataaggtatgcgcacatcaatctaataaatgtggatgatcaaagca

SEQ ID NO: 644257 - DNA, 436 bp, Homo sapiens
aaatttttagggctcagagggtagactatagtgaactcaatggtggttctcaaaagatatgtcaatgtccttatccccagaacctgcgaatggtaccttacttagaaaaaggatctttgcagatgtaactaagacaaggatcttgaaatgagaagactatgctgcattatctggctgggccataaatccaatggcaagtgtccttataaatgatgcacagaggacagccacagaggaagaagcaatatgggtacagagacagatattggaaacatatggccataagccaaaaaataactgaagccaccagaagttggaaaaggcaaggaatagatttatccttggagcttttagaggaagtgcagctttgccmatccctcagttttgaactctggcatccagaactgtatttatagtgataaatttatattttttt

SEQ ID NO: 644258 - DNA, 566 bp, Homo sapiens
tgaaattcttaatttcagttttacaaataaggatccaaagtaacagaaaatttaaggtcacgtggctaaaatttatcaggccgagactccacacaagattgtctgccttcaaagcccaaggctgctcaggggtttaatcatgattcagtaatatctttgagcacccactgggtcatcaggcacagtgttggatgtagaaacatagagatagaagatatagtttctggcttgaaggaactgcagtgctcaaatttccactacagctcccagattctaytacatggttctacttctttttcaaaggatcacatttggaattgtaccttatggttttgcatatttcctttcgtgacttgtaataaatcacaggaatagaaatttcttctatagttgctctgtttaacacatagcatttaaaaatcaattggatatttcataaacaataatattgaagagctttttattgactcatcactgagctagatgttgtgccatggttaatccaggggagaattagacacactctgacccttaagctgtttgctgtctagggaggaagatagctg

SEQ ID NO: 644259 - DNA, 566 bp, Homo sapiens
tgaaattcttaatttcagttttacaaataaggatccaaagtaacagaaaatttaaggtcacgtggctaaaatttatcaggccgagactccacacaagattgtctgccttcaaagcccaaggctgctcaggggtttaatcatgattcagtaatatctttgagcacccactgggtcatcaggcacagtgttggatgtagaaacatagagatagaagatatagtttctggcttgaaggaactgcagtgctcaaatttccactacagctcccagattctactacatggttctacttctttttcaaaggatcacatttggaattgtaccttatggttttgcatatttcctttygtgacttgtaataaatcacaggaatagaaatttcttctatagttgctctgtttaacacatagcatttaaaaatcaattggatatttcataaacaataatattgaagagctttttattgactcatcactgagctagatgttgtgccatggttaatccaggggagaattagacacactctgacccttaagctgtttgctgtctagggaggaagatagctg

SEQ ID NO: 644260 - DNA, 566 bp, Homo sapiens
tgaaattcttaatttcagttttacaaataaggatccaaagtaacagaaaatttaaggtcacgtggctaaaatttatcaggccgagactccacacaagattgtctgccttcaaagcccaaggctgctcaggggtttaatcatgattcagtaatatctttgagcacccactgggtcatcaggcacagtgttggatgtagaaacatagagatagaagatatagtttctggcttgaaggaactgcagtgctcaaatttccactacagctcccagattctactacatggttctacttctttttcaaaggatcacatttggaattgtaccttatggttttgcatatttcctttcgtgacttgtaataaatcacaggaatagaaatttcttctatagttgctctgtttaacacatagcatttaaaaatcaattggatatttcataaacaataatattgaaragctttttattgactcatcactgagctagatgttgtgccatggttaatccaggggagaattagacacactctgacccttaagctgtttgctgtctagggaggaagatagctg

SEQ ID NO: 644261 - DNA, 525 bp, Homo sapiens
  misc_feature 513, 514, 515, 516, 517, 518, 519, 520, 521, 522, 523, 524,525: n = A,T,C or G
caatttgttaaaacagtctcaggaaactaacatgctccccagccatcatccgtggtagatagcctcaggaggtgctaagggttcaggctctcaagaggcagaagggctgagagagctgcgcatgcccagatctggctttcagactcacctttcaggcagatcactccactttttgtgggacagagtgactaaagagcagggagagccaaggataygtttagagtaaattcctcttcatagagacttctttttaaaaagttattattcataagcatccctaaattctagctattgcaatgttgaaataatttttaatatttaaatattatggtcattgttaatgctggacaaaggctgaagctgacattaacttatacatcagagagctttgaaggccaatattgagattttatgtttgtttttttgttcaataacaaaggttatccataaagttgaaatttacttatctctctgcctcaaaaccaccttctttgttgcatgtcctcagcaaannnnnnnnnnnnn

SEQ ID NO: 644262 - DNA, 634 bp, Homo sapiens
acatcatctacaaaatagactctttcagaagaaagacagtatcagagcttttaaaattttacagtctgggaaggtatgactttatcgctacctaacaaattgtatacctatatgcatgcatgcatgtctcagatttcatcttgtaggtcrttacgtctctattacttaaaacaaaaacaataaccaaaataaaaaacaaatatgcaaaacacaaacaaaacaaaagctaaatatactagaggaaaacggtatatgaaaaagttgaagaaatcagaaaagattaattttaaatacatatacacaaagtaattacagtttgggggttaataattccttcactataatttctaagattctttagtgctccaacatttaaatccttgagtggtatagtctaatgaaatttattcattgaacttaaatattctgtatgtgagatgtgtatggacttttcatcctgtgcattagtctgctacctagaacttttgacatgattgcatcatgaagctttttctgacttcagtgtgcttgctttttaattaataccttttaagacctgttggggcaagcaatgtagtacctaatagaatacgagggagataaacatgccagggcctttttcacctaaggccca

SEQ ID NO: 644263 - DNA, 542 bp, Homo sapiens
tcctggttctatattctgttttgtctatctattattgcrcaataaattttctcaaatgttgtgatctaaaacaactattttattttgtccacaatttttcagatcaggaattagggaagagcttatttgaacacagtttatgattcacttgccatcagctggagaaacttgtgcctagggaatccactttcaaaatggcttcttcagaaacaggagtttaaaaagaaaacggtatcagtgcaagagaaggtaaacctgaagtaaaaagtaaactgttacagaatgatacatatagtataatactgcttatgtaacgtttaaccccacatcaaaatactatgttttgtttataaaaacagtcacatttaggaaaatgtgaaaacatgggcagaaattatatctaaaagcttctgaacaatgacaaccacaggagagagggcaaggagaatgaaactgagaggaacacataaaagacttcaactgtatctctaacatgtataattcttattatctgagctcttgttattttttctcctggaact

SEQ ID NO: 644264 - DNA, 418 bp, Homo sapiens
tcaggccacattcacctgtggagcagcaaggccgtggaggtgacctgaacttgttgccctgttcagcccagaggctgtccctatactgacagcagatttcttgctttgaattatctgtgtaataaaagagtccttccgagcttcaactgacattctgaggctgagagaggaagatccatttttttccccatctaattctttctttcactttttttttctgatgatgaaaaattttttttttggtttgcattttggaggattttcttaatgtgctgcatacagctctcggcttgtggtccactgcgggctgtctctcctcagactggaatgattaggcagtgaaagagacttaccttttccaaggagtacctctgtttyagaattcagggtggagcatgctggcaaccttttgggggca

SEQ ID NO: 644265 - DNA, 535 bp, Homo sapiens
tcctgttttcatttatattctgcatcttaactttggtctgttctcttacgtaaataccctttcgtaagggtaggtctgctggataaatcatcttcatcagatgcgatcacactataaagtaaagtaaggcctccaaaaaagtcactcatgatcaatcactagatccaagctagtcagttgtggggtcagagcctatagtcatgtctcctcccttcagcccactggtacttgaaacaggggtttgaaatggtaggggaagaagacaagatgcatggtacaacgcacaacacaggagctcaatgactactctctgaaaaagtaaaagaacaaataaatgcaagttcttaagaagctcccaggctcaaaggtcagggacatggctccctgtatctctagaccatctgaaacctgtttcctgctgtctattccaaaatctactgttaaatatttataaacacagaaaaaawatgcatcagttgttgtaaacttactttctctctattttattcaactttcaagagctttgcttcctaga

SEQ ID NO: 644266 - DNA, 481 bp, Homo sapiens
attaaaaatagtttaaatgtatgttaagagaagccaacataacttcacatgggaaagaagagaaggaatctaacatttagcaagcacctactatgggcagaacattatgttcagtactttgccgtatgagatcttgtttaagccttatacaaacttatagcaaggatattataatctcccttttgcagatgagaaaatagagccttggagtttacgcatattgccccaaatcacacatgtaagccaagtatcagcaaattttacgtaaagattcaataaataatttaggctttgtgagtcacacaaggtctctgtcacatatttgtctttatttctttggtggtttgtaggctggtttttacaaccctttaaaaatgtaaaaactgttcttaactccttgattggatttggcccaatgttggtagtttatagaccattkaaagatccctgtctcaagaggctggggagaaatatgtaacaa

SEQ ID NO: 644267 - DNA, 426 bp, Homo sapiens
gaattccttttactccacaatctacaaagtccaaccaaaaggcaaatgacagataattttcaacacactactgagtacagagcaggtgtttaatgaatattcactgatagaattaatgatctgctcaaaacccaggaaagattgtaaagtcagttttcaaagcccccaggttccccactccactttctttgcccatcttttcctatcatttctactccaccacctcaactcttactattatcccgcatgccctctcttccacccgtaataatttactttttaaaaacgctatattaaacatccaactgttcatatgtaaattttttgaggtcattatcacttgtgctggaaagtctcatktcaaagaaacaactccctaactgtgaaacgttgcatttctaggtatcggccactagagaaaacaac

SEQ ID NO: 644268 - DNA, 534 bp, Homo sapiens
cagtttgaacaaatagaaagctactagcccgcacaaaaaaataaacccatcatatacatagtactaaatgtaaatgttctaaacactacaattaagaaagagattgtcagatgattggatataaaagtaagccccaactgtatgctgtccacagaaagttgttttaaatatraagttatagataggttcaaagcaaaaaataagaaaagtatacctcacaagtattcttctaaaagaaaacttgagtagctatactaatactataggaatatcattagggataacaaagttaattgcagaatgacgaagagttcaatccatcaaggagatataataaccctattgttgcacctaatagtagtgctttgaatttatagaggaaaattgatagaattgaaagcagaaaaaataatccacaaatttggttgaggtcttcagtacttctatctagtaattgatagaataagaaaatagaaaatcagtataatcatggaagcccttaggaacattatttgttattcaccttattaaatc

SEQ ID NO: 644269 - DNA, 607 bp, Homo sapiens
tcacaaaatcacttcctgtgttcatttataagcctgaaagaatatatgtaaagaacctaaacatatttttttctctgytacacattgttggatggattggagtcatcactgaatgctgtttcctgtctactagcttaatctctatataacacatataattcatactcgagttaatagatgtgacacatctgattgggagggctttttcaatttaattaaatttaattttaagttgtgggatacatgtacagaatgtgcaggtttgttacataggtaaaggtgtgccatggtggtttactgcacctctcaacctgtcacctaggtattaagtcctgcatgcattaactttatcctcatgctctccctctccttgccccactgacaggtcccagtgtgtgttgttcccctccctgtgtccatgtgttctcattgttcagctcccacttataagtcagaatatgtggtgtttggttttctgttcctgtattagtttgctgaggataatggcttccagctccattcatgtcactgcaaaagacatgatctcattgctttttacagttgcatagtattccatggtgtatatgtaccacattttctatatcta

SEQ ID NO: 644270 - DNA, 607 bp, Homo sapiens
tcacaaaatcacttcctgtgttcatttataagcctgaaagaatatatgtaaagaacctaaacatatttttttctctgttacacattgttggatggattggagtcatcactgaatgctgtttcctgtctactagcttaatctctatataacacatataattcatactcgagttaatagatgtgacacatctgattgggagggctttttcaatttaattaaatttaattttaagttgtgggatacatgtacagaaygtgcaggtttgttacataggtaaaggtgtgccatggtggtttactgcacctctcaacctgtcacctaggtattaagtcctgcatgcattaactttatcctcatgctctccctctccttgccccactgacaggtcccagtgtgtgttgttcccctccctgtgtccatgtgttctcattgttcagctcccacttataagtcagaatatgtggtgtttggttttctgttcctgtattagtttgctgaggataatggcttccagctccattcatgtcactgcaaaagacatgatctcattgctttttacagttgcatagtattccatggtgtatatgtaccacattttctatatcta

SEQ ID NO: 644271 - DNA, 607 bp, Homo sapiens
tcacaaaatcacttcctgtgttcatttataagcctgaaagaatatatgtaaagaacctaaacatatttttttctctgttacacattgttggatggattggagtcatcactgaatgctgtttcctgtctactagcttaatctctatataacacatataattcatactcgagttaatagatgtgacacatctgattgggagggctttttcaatttaattaaatttaattttaagttgtgggatacatgtacagaatgtgcaggtttgttacataggtaaaggtgtgccatggtggtttactgcacctctcaaccygtcacctaggtattaagtcctgcatgcattaactttatcctcatgctctccctctccttgccccactgacaggtcccagtgtgtgttgttcccctccctgtgtccatgtgttctcattgttcagctcccacttataagtcagaatatgtggtgtttggttttctgttcctgtattagtttgctgaggataatggcttccagctccattcatgtcactgcaaaagacatgatctcattgctttttacagttgcatagtattccatggtgtatatgtaccacattttctatatcta

SEQ ID NO: 644272 - DNA, 607 bp, Homo sapiens
tcacaaaatcacttcctgtgttcatttataagcctgaaagaatatatgtaaagaacctaaacatatttttttctctgttacacattgttggatggattggagtcatcactgaatgctgtttcctgtctactagcttaatctctatataacacatataattcatactcgagttaatagatgtgacacatctgattgggagggctttttcaatttaattaaatttaattttaagttgtgggatacatgtacagaatgtgcaggtttgttacataggtaaaggtgtgccatggtggtttactgcacctctcaacctgtcacctaggtattaagtcctgcatgcattaactttatcctcatgctctccctctccttgccccactgacaggtcccagtgtgtgttgttcccctccctgtgtccatgtgttctcattgttcagctcccacttataagtcagaatatgtggtgtttggttttctgttcctgtattagtttgctgaggataatggcttccagctccattcatgtcactgcaaaagacatgatctcattsctttttacagttgcatagtattccatggtgtatatgtaccacattttctatatcta

SEQ ID NO: 644273 - DNA, 608 bp, Homo sapiens
tggtatattcgattccaaaacatattctttgtaagttttaatatatttatgtattatttatacttagattgtaacccataatgtacagatattatttttccttcaactcttaagaatattcttaaataataaaattaaaattaatgaattataatttttgttgcttgggaaaaagaatagacacacacgtgacagtgcatcacttcaccccatcatttcatctcatcatttcatcatttcatctcatcattttatctcatttcatctcatcccatctcatctcatcatttcatatcatctcatcatttcatcaaatctcatctcatttccatttcattttcattatttcatttcatcatttcatttcactatttcatttcatttcatctaatttcatttaattcattatgtcatttcatataatctcatttcatttcatctcatatttttgatatcatttttcatmtcatttcatctcaattcatctcatcatttcatctcctcatctcatcatttcctcctttcattacaacatttcatctcatttcttctcatctcatttcaatttcattatttcatctcatttcattatttcacctaatttcatt

SEQ ID NO: 644274 - DNA, 558 bp, Homo sapiens
taatatatttatgtattatttatacttagattgtaacccataatgtacagatattatttttccttcaactcttaagaatattcttaaataataaaattaaaattaatgaattataatttttgttgcttgggaaaaagaatagacacacacgtgacagtgcatcacttcaccccatcatttcatctcatcatttcatcatttcatctcatcattttatctcatttcatctcatcccatctcatctcatcatttcatatcatctcatcatttcatcaaatctcatctcatttccatttcattttcattatttcatttcatcatttcatttcactatttcatttcatttcatctaatttcatttaattcattatgtcatttcatataatctcatttcatttcatctcatatttttgatatcatttttcatctcatttcatctcaattcatctcatcatttcatctcctcatctcatcatttcctcctttcwttacaacatttcatctcatttcttctcatctcatttcaatttcattatttcatctcatttcattatttca

SEQ ID NO: 644275 - DNA, 453 bp, Homo sapiens
gaaccaacagtgactaaaaaattcaacatttaagtatatttcattgtaattaatttgaattgaagtagcagctagtatttactacattgaacaatgcaaataagaggaaaaaattaataaccatctctaataccacatgccaaaatcctcatcaatttattctagctaaaggagttgatcagaagcagcagttgaaagcaccaactaaaccagctggggttggttcactgtcattctctcagaaccatctcttctctgaacaaaacaagtacaggagttcattgtgaatctgcattctccttgcctattttaaggttttgatgttgacgcwaatttgtgaaatccctcctgtggtgtgatatttcgttttccttgctttgtgttaggacaagaatgcttcagctcttaatttaaaattatgtttctccctcctaggttgagtgaacttagaat

SEQ ID NO: 644276 - DNA, 595 bp, Homo sapiens
atttgtgaaatccctcctgtggtgtgatatttcgttttccttgctttgtgttaggacaagaatgcttcagctcttaatttaaaattatgtttctccctcctaggttgagtgaacttagaatgcattctctgacatatccaagattttgttaatatgaatttcgggaaaaaagcatacttaattagctaagacgtcttattctaagcttgaccctatgttcgacatcttttgaatttctggttgcgtgggctgctctctgacactggttagtgacctggaagctctattaatgttaggggaggtggtgtatgagcattagaggtatccttgcaaggaaagacttgtcttatctcaatacktctttttttttgcacacaagaaagtcaatgtctgagtcttctaaaatcttcctatttccaaattgcagattatgattgattcctaaacaaagacctaatttttgactcagagacgtggcaagctagtgaatcaccgttataatttaacaatcttcaagataaaattatctctgatatttagattttgcccaattattaagatatttgggtgttccgttaagaatggaaaactctag

SEQ ID NO: 644277 - DNA, 621 bp, Homo sapiens
cgtggcaagctagtgaatcaccgttataatttaacaatcttcaagataaaattatctctgatatttagattttgcccaattattaagatatttgggtgttycgttaagaatggaaaactctagtctcttgagcagagactataaaggcctcagatgatcatttttaattttatgctcttttctttaacaccttcaacacagttggaagcagccgatattccgcagagttgttgtgttttttaaaccaaatgcatggttcagtggtagaaaactgggctgatccaagctgttttcagtaaacacttcatttcaggtgacccatttcatattaaataatctctagatcctgtcttcgaaactaactagatcagataaactaccctggattttctctttttagggtctgagagctgcagtcacttttgtgaaaatgattacaatgacaagatagagttgtagatggggaaaatgttttgactaatttaagcacagtggtatttcatatgagaatttaagttacacacatttgaaaattataatggagtctcttggctgagctttaaaaagaaatagcgtttaggctaaaaagggaactgctacctctcctaaaatcagaaagat

SEQ ID NO: 644278 - DNA, 621 bp, Homo sapiens
cgtggcaagctagtgaatcaccgttataatttaacaatcttcaagataaaattatctctgatatttagattttgcccaattattaagatatttgggtgttccgttaagaatggaaaactctagtctcttgagcagagactataaaggcctcagatgatcatttttaattttatgctcttttctttaacaccttcaacacagttggaagcagccgatattccgcagagttgttgtgttttttaaaccaaatgcatggttcagtggtagaaaactgggctgatccaagctgttttcagtaaacacttcatttcaggtgacccatttcrtattaaataatctctagatcctgtcttcgaaactaactagatcagataaactaccctggattttctctttttagggtctgagagctgcagtcacttttgtgaaaatgattacaatgacaagatagagttgtagatggggaaaatgttttgactaatttaagcacagtggtatttcatatgagaatttaagttacacacatttgaaaattataatggagtctcttggctgagctttaaaaagaaatagcgtttaggctaaaaagggaactgctacctctcctaaaatcagaaagat

SEQ ID NO: 644279 - DNA, 593 bp, Homo sapiens
tgagcagagactataaaggcctcagatgatcatttttaattttatgctcttttctttaacaccttcaacacagttggaagcagccgatattccgcagagttgttgtgttttttaaaccaaatgcatggttcagtggtagaaaactgggctgatccaagctgttttcagtaaacacttcatttcaggtgacccatttcatattaaataatctctagatcctgtcttcgaaactaactagatcagataaactaccctggattttctctttttagggtctgagagctgcagtcacttttgtgaaaatgattacaatgacaagatagagttgtagatggggaaaatgttttgactaatttaagcayagtggtatttcatatgagaatttaagttacacacatttgaaaattataatggagtctcttggctgagctttaaaaagaaatagcgtttaggctaaaaagggaactgctacctctcctaaaatcagaaagatgttacagtaattctccattctctagaattatcaagaagcacctttgtgatgatttacttttgctcctgcgagtgtgagcccgtgtagtcgtggaaccatc

SEQ ID NO: 644280 - DNA, 598 bp, Homo sapiens
ttttctacctaatattaataactttaatcattcattattccattactatgctctatagtgtatacaatttctgttctttgtcatgttattaactaaattatttattgggtccagtaacgtattccataaatattgtacacataaaaattgtgttatttttattcctgtatgctcagctgcccaataacagtctgaggattaacatatttgttaaatgcacaaatacattctttcacaaatattagtttaataattttatrttaaactccctctatacttacaatatgaattagataattcagaataaacattccattggaaaaagctacacaatttgttataaaacatccttaaaagcatcagaaaattaatacagcaatgaagaattacaggaccaaattaagaatggtatgaaagcctgtttgtgacgcttatgtttgggttatctctttatttgagtgactataaatctcaaaagagaactaaagggagaaataaccgtatctactaacatgctaagggtacttaaacatctcttagtaattgagaaaattgaaagaaaagaaaaaagagaaagggagaaagagagacagcgaaa

SEQ ID NO: 644281 - DNA, 459 bp, Homo sapiens
cacaatggctcacgcttgtaaacccaacactttgggaggccatggtgggtggactgcttgtgcccaggagttcaagaccacctgggcaacatggcaaaacctcaactctacaaaaaaataaaaataaaaaggctgagtgtggtggctcatgcctgtaatcccagcactttgggagrctgaggcagttggatcacctgaggtcaggaatttgagaccagcctgaccaacatggagaaaccccttctctactaaaaatgcctgtaatctcaactactcaggaggctgaggcaggataatcacttgaacccaggaggcagaggttgtgggtgagacaagatcacaccattgcactccagcctgggcaacaagagtgaaactctctctcaaaaaaaaaaaaaaatcagctaaacccagtggtgtgcacctgtagtcccagctacttgggaggctgaggtagga

SEQ ID NO: 644282 - DNA, 459 bp, Homo sapiens
cacaatggctcacgcttgtaaacccaacactttgggaggccatggtgggtggactgcttgtgcccaggagttcaagaccacctgggcaacatggcaaaacctcaactctacaaaaaaataaaaataaaaaggctgagtgtggtggctcatgcctgtaatcccagcactttgggaggctgaggcagktggatcacctgaggtcaggaatttgagaccagcctgaccaacatggagaaaccccttctctactaaaaatgcctgtaatctcaactactcaggaggctgaggcaggataatcacttgaacccaggaggcagaggttgtgggtgagacaagatcacaccattgcactccagcctgggcaacaagagtgaaactctctctcaaaaaaaaaaaaaaatcagctaaacccagtggtgtgcacctgtagtcccagctacttgggaggctgaggtagga

SEQ ID NO: 644283 - DNA, 459 bp, Homo sapiens
cacaatggctcacgcttgtaaacccaacactttgggaggccatggtgggtggactgcttgtgcccaggagttcaagaccacctgggcaacatggcaaaacctcaactctacaaaaaaataaaaataaaaaggctgagtgtggtggctcatgcctgtaatcccagcactttgggaggctgaggcagttggatcacctgaggtcaggaatttgagaccagcctgaccaacatggagaaaccccttctctactaaaaatgcctgtaatcycaactactcaggaggctgaggcaggataatcacttgaacccaggaggcagaggttgtgggtgagacaagatcacaccattgcactccagcctgggcaacaagagtgaaactctctctcaaaaaaaaaaaaaaatcagctaaacccagtggtgtgcacctgtagtcccagctacttgggaggctgaggtagga

SEQ ID NO: 644284 - DNA, 459 bp, Homo sapiens
cacaatggctcacgcttgtaaacccaacactttgggaggccatggtgggtggactgcttgtgcccaggagttcaagaccacctgggcaacatggcaaaacctcaactctacaaaaaaataaaaataaaaaggctgagtgtggtggctcatgcctgtaatcccagcactttgggaggctgaggcagttggatcacctgaggtcaggaatttgagaccagcctgaccaacatggagaaaccccttctctactaaaaatgcctgtaatctcaactactcaggaggctgaggcaggataatcacttgaacccaggaggcagaggttgtgggtgagacaagatcacaccattgcactccagcctgggcaacaagagtgaaactctctctcaaaaaaaaaaaaaaatyagctaaacccagtggtgtgcacctgtagtcccagctacttgggaggctgaggtagga

SEQ ID NO: 644285 - DNA, 637 bp, Homo sapiens
caacagggtctacatagagctagtcaggaaggtttacaggttcaagggcagcctggtgagaccagcagcatctcccagagagcccatgcccgtgcagcgtcctaatgagccgcttttgtctagcttccatttgctcttccctcccaactgaatttaatgtctttccatcctctgcctctagttaagttgtaactgctgttattccactgcagccaggcagctgccagggcctgttggcactgaacccagagcccaacccaactgatgttctcactgagcttcttgtcagatgccaggaaagaggaggcacatcatatgccttttcttccccaatagtagctgcttccagtgtgatcatgatgagaggaaaaggctgtggggagagttaatttgatgcttgcttgtgcaatgaaatggcaatcaggcagatggccttactctatgcatagattcttctttgaggtttcttctyaggacccggacctcagagctgcttaagcaatagagaggatgatggatggccaaggaattgggatctctgggtcttttgggagggatggggaatattatcacagagttacagaatgccattgctgaagagggccttagggattacatttagtccaaggattttcag

SEQ ID NO: 644286 - DNA, 465 bp, Homo sapiens
tccctcccttttgacagaagatggcccagggcattcactactaagtctcaacctcttacccaaagccctcagtctagtgttgctctttccttcgtgctatttttgtttctttcttttcttgtaatcatcttggcaataaaataatcagttttttctttctacctattaaagatgttaccttagttaattacaggggtttccttcagaatgataaatggtctttcaaaatgatgtaaagagatctaaatccgtgtgctccagaacttgaatgaagctctgtctagcacgggtgccagtgactctcccagagtgctccatgcagctggacccacagagtccctctgtgctgtcatatcacccactgccttctgtgaatgagatattctgattagaatcctggtggatgctatttgagccagtgcccccacaactcctaygaaagccgaggaccacaggcccctgaag

SEQ ID NO: 644287 - DNA, 453 bp, Homo sapiens
atcccccctccttcgggctgtcctgccttttcatgtcaaagcaatgtacagcttacacgtattgattgatatcttatgtctccctaaaacgtgtaaaaccaacctgtagcccgacgacctttgacacacgttctcaagacctcctgaggctgtttcactgatatttctttaactttgaccaartaaatttctaaactgattgagacttttctcagatacttatttgtttataggtatcactggatacacttaaggaattgaagagatttatgacattgagaaaaggaggaagccagggtgtgtggacatagagagagagagagagagagagagagaagagagagagagagagagagagattgtgatgtatgtacaggactaacactgagacctggttatgtaatggtgtagtactgagtatcatccccaaatagtgaggtttcattccatgaa

SEQ ID NO: 644288 - DNA, 571 bp, Homo sapiens
aggtgtaaattaaggagcttgaaacagggagatggtcttagattaatcaactgggacttaaatgcaaactcaagtgtcctaaaaaaaacaagaggtagagagacatttagcatagactgaagtggagaaggcagtgtgaacacagagacagagatgcagtcgatgtgtccacatcccgtgagagagaagccaccagaagctggaagagctaaatcagactgctccctagagcttcagaaggagccagaactgatgactccaagatcttagcccagtgaaactgatctggacttctgaactatgagagattccattcctgttgtktgaagctaccacatttttgagaacttgttacagtagcccgaggacactaacacaaatgggctccaggaaaatccagactaaaggtgttgtgttggtttgcaatctccttgcttaactttctgatactagacgtaaatagattggtgaaaaattttgtgattgaagaaatgtacatgaaacctacagtgtacagagaagcatctgttagttataagataaatactgataattttagttgaaaatgaca

SEQ ID NO: 644289 - DNA, 571 bp, Homo sapiens
aggtgtaaattaaggagcttgaaacagggagatggtcttagattaatcaactgggacttaaatgcaaactcaagtgtcctaaaaaaaacaagaggtagagagacatttagcatagactgaagtggagaaggcagtgtgaacacagagacagagatgcagtcgatgtgtccacatcccgtgagagagaagccaccagaagctggaagagctaaatcagactgctccctagagcttcagaaggagccagaactgatgactccaagatcttagcccagtgaaactgatctggacttctgaactatgagagattccattcctgttgtttgaagctaccacatttttgagaacttgttacagtagcccgaggacactaacacaaatgggctccaggaaaatccagactaaaggtgttgtgttggtttgcaatctccttgcttaactttctgatactagacgtaaatagattggtgaaamattttgtgattgaagaaatgtacatgaaacctacagtgtacagagaagcatctgttagttataagataaatactgataattttagttgaaaatgaca

SEQ ID NO: 644290 - DNA, 571 bp, Homo sapiens
aggtgtaaattaaggagcttgaaacagggagatggtcttagattaatcaactgggacttaaatgcaaactcaagtgtcctaaaaaaaacaagaggtagagagacatttagcatagactgaagtggagaaggcagtgtgaacacagagacagagatgcagtcgatgtgtccacatcccgtgagagagaagccaccagaagctggaagagctaaatcagactgctccctagagcttcagaaggagccagaactgatgactccaagatcttagcccagtgaaactgatctggacttctgaactatgagagattccattcctgttgtttgaagctaccacatttttgagaacttgttacagtagcccgaggacactaacacaaatgggctccaggaaaatccagactaaaggtgttgtgttggtttgcaatctccttgcttaactttctgatactagacgtaaatagattggtgaaaaattttgtgattgaaraaatgtacatgaaacctacagtgtacagagaagcatctgttagttataagataaatactgataattttagttgaaaatgaca

SEQ ID NO: 644291 - DNA, 563 bp, Homo sapiens
tctatgcgtgacacagttatcatctttgtgcatcttcagagaattgtttttccttttactcctagggacaatgtcttaagtttgttagtaaattctattgaatttattaaagatgcttctgataaattctttttatattcatttcaaacaagaagcaatttcacactgacattgttattatagcactaaatacttttacactcatcaaattcctttgagactaactgaaatttctgacagccccacattctacaactttattgtaaattttctgccaaaaatgatgctttcctatacactcctaatacaagtataaatatattatttaatctagtcttaggttgatttaaaattttgaaaattcactccaaamatatgttctgtaaccatatggccaccaatgagaaatgcattctttcaaggtaaatctgtgctgccctggtttgacctgggactctggggatactgcgcccctgtgctgagttactgagatgagccagccctgcagctgtgctcagcctgccccatcccctgctgatttgcctgttcctagagcacagccc

SEQ ID NO: 644292 - DNA, 476 bp, Homo sapiens
gcatgatcttggctcactgcaaactccacctttcaggttcaagggattgttgtgcctcagcctcccaagtagctgggattacaggcgtgcaccaccaggcccggctaatttttgtatttttagtagagagggggtttcaccgtgttggcgaagctggtcttgaactcctgacctcaaatgatccacccatgtcaacctccaaaagtgctgggattacaggtgtgagccaccatgctgccctgaccctcttaccttaacacaagcattcttttctactgaattcaagtctttaagcaatagcttaactctctcaaccatcaactaaagaatttctaaaacccacccatgacttgcaagctcccacttcaagatgtcccarcttttcaggccaaaccaatgtataccttttatgtattgatttatatctttgcctgtaactcctgtccctctaaaatgtgtaaaaccaaagtgtaacc

SEQ ID NO: 644293 - DNA, 476 bp, Homo sapiens
gcatgatcttggctcactgcaaactccacctttcaggttcaagggattgttgtgcctcagcctcccaagtagctgggattacaggcgtgcaccaccaggcccggctaatttttgtatttttagtagagagggggtttcaccgtgttggcgaagctggtcttgaactcctgacctcaaatgatccacccatgtcaacctccaaaagtgctgggattacaggtgtgagccaccatgctgccctgaccctcttaccttaacacaagcattcttttctactgaattcaagtctttaagcaatagcttaactctctcaaccatcaactaaagaatttctaaaacccacccatgacttgcaagctcccacttcaagatgtcccaacttttcaggccaaaccaatgtatacmttttatgtattgatttatatctttgcctgtaactcctgtccctctaaaatgtgtaaaaccaaagtgtaacc

SEQ ID NO: 644294 - DNA, 649 bp, Homo sapiens
aaattcaaaaaggttttaagtagagaaaagagagattacttaaaaaccatgaactgcttattaaacagggaatcctttccccattgcttgtttttctcaggtttgccaaagatcagatagttgtagatatgcagcgttatttctgagggctctgttctgttccattgatctacatctctgttttggtaccagtaccatgctgttttggttactgtagccttgtagtatagtttgaagtcaggtagcatgatgcctccagctttgttcttttggcttaggattgacttggtgacrtgggctcttttttggttccatatgaactttaaagtagttttttccaattctgtgaagaaagtcattggtagcttgatggggacggcattgaatctgtaaattaccttgggcagtatggccattttcacgatgctgattcttcttacccatgagcatggaatgttcttccatttgtttgtatcctcttttatttcattgagcagtggtttgtagttctccttgaagaggtccttcacgtcccttgtaagttggattcctaagtattttattctctttgaagcaattgtgaatgggagttcactcatgatttggctctctgtttgtctgttattggtgtataagaatacttgtgatt

SEQ ID NO: 644295 - DNA, 649 bp, Homo sapiens
aaattcaaaaaggttttaagtagagaaaagagagattacttaaaaaccatgaactgcttattaaacagggaatcctttccccattgcttgtttttctcaggtttgccaaagatcagatagttgtagatatgcagcgttatttctgagggctctgttctgttccattgatctacatctctgttttggtaccagtaccatgctgttttggttactgtagccttgtagtatagtttgaagtcaggtagcatgatgcctccagctttgttcttttggcttaggattgacttggtgacgtgggctcttttttggttccatatgaactttaaagtagttttttccaattctgtgaagaaagtcattggtagcttgatggggacggcattgaatctgtaaattaccttgggcagtatggccattttcacgatgctgattcttcttacccaygagcatggaatgttcttccatttgtttgtatcctcttttatttcattgagcagtggtttgtagttctccttgaagaggtccttcacgtcccttgtaagttggattcctaagtattttattctctttgaagcaattgtgaatgggagttcactcatgatttggctctctgtttgtctgttattggtgtataagaatacttgtgatt

SEQ ID NO: 644296 - DNA, 579 bp, Homo sapiens
aaacctagactagatgacatgaagatagagacccttgtgactattaccctttatgacagaatgttaagcaagccttttagagtgtaatcaatagtagccaatcaaatcttatatctgtatgttagcctttgtacggaaaatgttatagttcagcccctccatttttgcttatagaaacaatcctcatttttcccccayactaggagcactgatcactattctttggtgtaattctgctcccttgtcagctgccctacctttgtgcttgagtaaactcttttaaccggatgctgagccttttgactgttttatgttgcattcgctacccttcatagttcttagctgggacaaatccctgtaacaaaagaaagattcacaagagaaaaacaaacagaagtttaataacatgtatacttcatgtgtacatagaagatatccagggaaaatgagtaaatctcaaagaagtggcttaaatttaggcttaaatgccatcttcagctgaaatgataagagtatttgggtaaggagcagttaatgggaagatgaccacagaagcacaggaagcaggataagttttgt

SEQ ID NO: 644297 - DNA, 579 bp, Homo sapiens
aaacctagactagatgacatgaagatagagacccttgtgactattaccctttatgacagaatgttaagcaagccttttagagtgtaatcaatagtagccaatcaaatcttatatctgtatgttagcctttgtacggaaaatgttatagttcagcccctccatttttgcttatagaaacaatcctcatttttcccccacrctaggagcactgatcactattctttggtgtaattctgctcccttgtcagctgccctacctttgtgcttgagtaaactcttttaaccggatgctgagccttttgactgttttatgttgcattcgctacccttcatagttcttagctgggacaaatccctgtaacaaaagaaagattcacaagagaaaaacaaacagaagtttaataacatgtatacttcatgtgtacatagaagatatccagggaaaatgagtaaatctcaaagaagtggcttaaatttaggcttaaatgccatcttcagctgaaatgataagagtatttgggtaaggagcagttaatgggaagatgaccacagaagcacaggaagcaggataagttttgt

SEQ ID NO: 644298 - DNA, 579 bp, Homo sapiens
aaacctagactagatgacatgaagatagagacccttgtgactattaccctttatgacagaatgttaagcaagccttttagagtgtaatcaatagtagccaatcaaatcttatatctgtatgttagcctttgtacggaaaatgttatagttcagcccctccatttttgcttatagaaacaatcctcatttttcccccacactaggagcactgatcactattctttggtgtaattctgctcccttgtcagctgccctacctttgtgcttgagtaaactcttttaaccggatgctgagccttttgactgttttatgttgcattcgctacccttcatagttcttagctgggacaaatcccwgtaacaaaagaaagattcacaagagaaaaacaaacagaagtttaataacatgtatacttcatgtgtacatagaagatatccagggaaaatgagtaaatctcaaagaagtggcttaaatttaggcttaaatgccatcttcagctgaaatgataagagtatttgggtaaggagcagttaatgggaagatgaccacagaagcacaggaagcaggataagttttgt

SEQ ID NO: 644299 - DNA, 579 bp, Homo sapiens
aaacctagactagatgacatgaagatagagacccttgtgactattaccctttatgacagaatgttaagcaagccttttagagtgtaatcaatagtagccaatcaaatcttatatctgtatgttagcctttgtacggaaaatgttatagttcagcccctccatttttgcttatagaaacaatcctcatttttcccccacactaggagcactgatcactattctttggtgtaattctgctcccttgtcagctgccctacctttgtgcttgagtaaactcttttaaccggatgctgagccttttgactgttttatgttgcattcgctacccttcatagttcttagctgggacaaatccctgtaacaaaagaaagattcacaagagaaaaacaaacagaagtttaataacatgtatacttcatgtgtacatagaagatatccagggaaaatgagtaaatctcaaagaagtggcttaaatttaggcttaaatgccatcttcagctgaaaygataagagtatttgggtaaggagcagttaatgggaagatgaccacagaagcacaggaagcaggataagttttgt

SEQ ID NO: 644300 - DNA, 592 bp, Homo sapiens
cttttgtgctttgtattgagatactgcttgtgaaaaaaaacaaagacaatccaaataagaacaaacagaggccatttaatcagagcttgataaagcaagggagtcagccaccatcacttgcatttggtagactcaaaggcagacaagggagctttrtagtggataaaaggggagacttcagttataccttgataagaggttattggcacaaagaagctggaagtaaattaactagcagttgggcatagtatataattggtttgggaagtatatttggctctctctgattggtgctgaggtggaagtcagggcaaaaattaggaaagttggcagtgaatgactaagtcttgacaattctgggctgattcctgcggacgttttggattaaaattctattgtcttatatggtctgacccttttctatttgtacattgtccctcaagacagtttaattttaacattgtaaattttatgaccatattttccaagaacctagataatgaaaataaaagcaattacaataccaacaccagtattacccatatatccccctaaaagaaggcttaataactttgttacattaatggcaaat

SEQ ID NO: 644301 - DNA, 579 bp, Homo sapiens
gggattccaaattaactaaatatttctttatttctccactaccattaatttcatgtttaagatagcgaaataggcaataaaaagctaacacctccaaaaataattggtatagcttctttagaggagaatttagtaatattttgataattatgaatcttagccagatgtggtgtggctcacttttgcctccctgaactttgggaggccaagatgagaggattgcttgaggccaggagtcaagaccagcctggggcaacatagtgaggccctgtctctacaaaaaaattaaaattttgttgggyagtcctagctactccagaaggctgatggggaaggattgtttgagcccaggagatcaaggctgcagtgaactatgatcttgcactgcactctggcctggatgaccgaataagaccctgtttctaaaaacaaaacaaaacaaaacaaaaaacaaaccaaaaaaaaaacccactgtggatattgtactctttgactcagaaatttccatttatctttaggtatacccaaaaacttcattcacaaaacatatttacaggcatgttcaatacaggattattt

SEQ ID NO: 644302 - DNA, 556 bp, Homo sapiens
ttatttgcagttcacgtcacaaaattaaagtaagaccatcaacatggccacattgttttctccagttacactcagctgcactgagagttggatctaaccagggttgtgggttttgtcaaatgaggacaatgaagcaaaaaagggataagggagttaargatgtgtgcaagggggtgagtaaccataaatttaagctggttaagtagggaagagaggacatgaagtagatgatgggcagtggcagagtagcagaataatagataagaggtcctagagtcaaaagattgttggagttagtgctaaagaaatgagctggaaagataggaggcatggccagaaagaggaatgaataaacaattaggaaggagttacagctactaaaaatgacaagatagggcacaacccgtgagtacatgactaagggagggtgaattgcaagctcattggtaagggcaaggttctgttttcttttcttactagcacagagcttggaacatagtaggcactcattatatatccgttgaaatgatgaataaggaatgactaccacctcccc

SEQ ID NO: 644303 - DNA, 556 bp, Homo sapiens
ttatttgcagttcacgtcacaaaattaaagtaagaccatcaacatggccacattgttttctccagttacactcagctgcactgagagttggatctaaccagggttgtgggttttgtcaaatgaggacaatgaagcaaaaaagggataagggagttaaggatgtgtgcaagggggtgagtaaccataaatttaagctggttaagtagggaagagaggacatgaagtagatgatgggcagtggcagagtagcagaataatagataagaggtcctagagtcaaaagattgttggagttagtgctaaagaaatgagctggaaagataggaggcatggccagaaagaggaatgaataaacaattaggaaggagttacagctactaaaaatgacaagatagggcacaacccgtgagtacatgactaarggagggtgaattgcaagctcattggtaagggcaaggttctgttttcttttcttactagcacagagcttggaacatagtaggcactcattatatatccgttgaaatgatgaataaggaatgactaccacctcccc

SEQ ID NO: 644304 - DNA, 505 bp, Homo sapiens
gctcgttattccaagaaggggccctgaagaggtctgccagccccttgcctctccctccactgaccagcacactgcaggtgcttgggaaatccagggattgaagtgagaggtggggcagggcaggcagaaacttccccgaggcaactgcaaggaggttgactgagctccatgcttggctggggacacagatacttatgactcactgttggtgttcccctcattaccctctagtaactgttattgatagtcaataatgagcttgcattttcccaagtttgtgtaactgccttgaggagtcctatttctctgaaataaaataaatattggcacttaaaatcaagaggacatgatcttgctaaatgaacaaattattatctcagtgacccagcaggwtgctggggacagtgggccttccatgaaagtttactgaaaaaaaaggatgaatggatggaaagaaggaagaaagggggacctttaacattaactacaataggatcatcatcaa

SEQ ID NO: 644305 - DNA, 383 bp, Homo sapiens
ttcagtaattctatgaaaagaaggaatagttcacaaagcacataatcacagaaagttggctgttccatgacctgcttcttaccttccattgtgttggtcagaatgctggctatgctcacggctctttgccttccagaggaatcctccagcatctccattgaaatctggtaagagcttaaccttctctttctgacttccgtttcwgtggtggtgccctgcaaaccaaatactgatggctcaaaccactcttcccaataagtaatacaacaccacatagcatttctttggcaaatcatgctacatgcaatttttccaggtaagaattttcaaggaataaaatattgaattattgctaagttataaacagttttttttttaaaaaa

SEQ ID NO: 644306 - DNA, 606 bp, Homo sapiens
actgacttctttactatgttgaatttttcaatacttgaaatactttactgttattctttgatttctttcatcaaggtttatagtcttcagcatacatacaatttatgtacatgtttgttagatttacatgtattttatttattttgagtgattataaattatattttaaaaacttttatcatacatgattaatatataaatgcatcacataaactagataatattataaataattacaattgactttaaaatatttatcttgtacactgtaaactttctgtactcatttattaattctgagagtttttttagaattctttgaaattttctgtgaagacaatcgtatcatcatcaaatagagacagttttatttacttatttctgatctgtatgcctttattttctcttcttgttttagtgcactggctaggacctccaacatgtgttaaaccagagtgctcttctgttttctggaagagatcatacagatttcatgttaattttttaaattcttggtagccttctccagygaaaccatttgggcctggagatttcttttctgggcataaattacaaacccagtttccttaatagagagctattcac

SEQ ID NO: 644307 - DNA, 625 bp, Homo sapiens
gcgatacagtacaaagccccaaatatatacagaagattgctaaggggtgggcatggcggggctgtatgaacagatgcaggacacaggaagagactctgggccatccaccaggtgatgctcttgggagctacttttggaccaatctggatcagtcagctcttccccagttttctcatagggtatargaaggtgcctatccacaggtttaaagagtggtgctttgcaggaactggagacagagaaaggtatgtccccagatgtgtgcacagacatcacaagacaagattctggcccatcccctttatcaaataaacaatgagacagttgtacatggtgtattccagaaaagtaaatgttttcaagaaagatgaagacaggtaaaagagatcatggtgaaaaacaagaaagtaaaatatattttaagcctcatgacttttgatacagaatgtaatacaatgtttatatttttaaatctaagctgctgaaggatgttaatattagggtggtggtctaaggggaagatcatgttaatgttctgggtttcttgaggaatggagattctgattcactccagacatcaatacaaagtatatatttaacatatatattaaaaatgtaagagtaa

SEQ ID NO: 644308 - DNA, 540 bp, Homo sapiens
tttatataaacattaaaattccaggaaagttgtcttgtaagagagataaatgcagtgttctagaagtacagagggctagaataattagcctggtggaattagaaacgtgtgtaagaaagggacaaaatgttttgaaggataggaaggagttcaccaatgagcaagaaggtaaagaatattcgagaaaaggaaactgtatacacagagtcatgaaacaatgagtgttcagggtatgggttgggggataaatgtttttggagcaagactgtcrgaagttttagagatccaatttgaagttttaaaaagatgattagaagagtgctataaatagatggcttgaaagggacagagccacaggtaaatttcttctgcagctcatcagttacagtgtcttgattgattggtgatgcatctagagtataagatgagatcagatgagtttatgagccaagtatttgctatcctaaatcaatgtgattctatgatgaccataagatcttgtgagtctgtcatgtttttccgatttgctctttacttgtg

SEQ ID NO: 644309 - DNA, 609 bp, Homo sapiens
ccttctttggtttgattctcaaataytgaagtcacaaatatttttctagcttttttatctagataagccttgacatttcattctactttgcaatttttaaattgcattttgtttctaacagaactggatgatgaggaagatggagatagaggtaattatttccattctccaaatgaatgaatgttaacaaattctatggagaaaaatagaattgtcttttgtttttttaaaagtttctcttgatttaatattaaattttaatatactatgaagaaaatgccaatcagaaatcatctgaggaaaattcatgaaaagatccaaaaaatgctgataaataaaagcagtgggggaaatagttcaaatagatattaacatatttcaaagctagcttttaaaaatatatttttgaactagtaaaggaataaacagatatatcaatggaacatgaaacaaagatcagaaaaaagacaagcaataagaatttaatatatggtaaagtaacacttcaaatcagtgaggaaaaaatggattattcaacaaaatatgttgagctcaagggttggttattaaatatatgtatacatgtatgtgtatgtatgtatacacata

SEQ ID NO: 644310 - DNA, 593 bp, Homo sapiens
aagtaataggcttccagtgaagtaacaaagctgagcaaagggaaagaatgtacttgaagacagcactgattcactgcaaaccaaaattgaagtctgaacagttaagcagctcctagcagaaatatccaccagctaaataatggtttaccattagcagaaatatccaccagccaaaataatggtttaccagctaaatagctgacatgagaataccaagagtaatatgcaaaagtaagaggatgttctgtacagatttctccagaggcaaaatacaaggttgataacaggtactttaggagaaataagtaatgcatgtggcatacatagaagaatgtataatccttagagcaatcatcaaattcaggatggtgaaagagaacaggaaatagcctgcagacatgtactgaggaacacataatgtattcctaatatttcattcttttaaaattaatcctaatcaattttgacaaaatcttaagatatgatgggggtggtcactgttaatcttactcttctgttacttctctgattttttkaactgattcatagaaaaaataaatggcctgaaaagatatccaaaatgcacgtataaa

SEQ ID NO: 644311 - DNA, 551 bp, Homo sapiens
gggactgaagtggggtagagaatggtgcccctggagcaactgtgcaaaggaggccactctgcaggagctacagccatgcagggatagagccagagacgtggccctgaaacaggcagggtatagggaagaaatgccctgacttttctctcttcccatattctgaactctgccagctgttcctgctttggcccccctacaaaccctactggatgcacagcaagggagcctggtgagacagtcctctggtgtcagcctcctggggcctgaagggtggagaaaggatggggagaggggtcaggatatggtccttcctgtctctcctgtccacrcccactgaccactggcaggaggcctttcacttctcctctgcaggaggatgattctaggagcagccagatcctgggggcttggcctgatttggaggaatcaatccctccctctcctctcctttctccctccttccttcatgctctttttttctcttgcccttcatttagactccacattttacaggcgttacttgtccctctgactctgggcacccaggcact

SEQ ID NO: 644312 - DNA, 446 bp, Homo sapiens
ctgaaaacagcttccaggttccttccaacccagtggcaagaccaaaatgtaattactaatctgaggaacaaggtggactgcagcaatgccaagcctcttggatgtcaagcaacttaatcttttcctaactcttctccctcatgttttttttattctttttctccttaatctccaggtctaacacaaagtcacaaactccttcataaaagcaggttacaagatttcatttcttgtctgtgatagactggcttgtatcagacagattctcatgctcgctctgctgcctggctggagtgcagaggtgatcttggctcactgcgtcctccacctcctgggttcaagcgattctcctgcctcagcctcccaagtggctgagactgcaggcgtgtgccamcatgcccagctaatttttgtatttttaatagagacggggtttcaccatgttg

SEQ ID NO: 644313 - DNA, 416 bp, Homo sapiens
tggcaagttctcagtgatatgtaaggcaattcttcgtaagcagacggttcaaatgtttggaagttccctagacttgagaacaaaatagccttcagcattttttttttccatctgtattctttcttctagccagaagccaactactgggcatctttgaaggtaaaccattttctgataaattgtaggctgaaaacaatttgtattttcatttccagattkcttggcatcagggatccaattgcattgaactgatcaatggcacatatctgggggagtcctgaatgcatccaatctatcgtcaccaatcctctgtggttttgccctgacagcttccatgtgggctcagagaagggctgggctgccaaaggattgtaaatatgagcctggggtggggcccaagtcttccagatgtggct

SEQ ID NO: 644314 - DNA, 570 bp, Homo sapiens
tttgtctttcctattcatacttttaactaaagatgttttaaaatatgtcttgaaacttgtattttaatatatcataaatatattgtactttgyatgtttattttataatttatcattttcccaagctctcatattattttaataatttttaaatattgtttttcaattttcttttcagttttacactatattatttacaaatcacattgtggtttcctttcaaatgttcatactttttttttaattgtctaatggcagtggttagagcatacaatgttttttagatttaataataatgctttttatattttactcataaggatgatgctggccatttgtttgtaaaatttatatttaaatatattaagaattattattctatttattctttgctaaggagttttatgaaaaaaggatactgagttctatcaaatgctgtttcccacataaatcaaagttaatattttcttttaacctattaatatgatagattataattctcctaatactaatacatattgttattcctgaaatgaatgtcaaaaactcagttattggtatttctgtctc

SEQ ID NO: 644315 - DNA, 563 bp, Homo sapiens
caaactacctagattttacaattgtcctcctcaccagtcctataagacatgtgccartgatgccaggaatccttggttttctcattgctttacgtttttatctgcctgccttcactgaggccatagactccccaccgttccattccttatgatcatggcagattcctttcaagaagaatttacagcctcttaatccaagccaatcactttccctaaccagttgtatcacttactagctggaggaatcactaacattctaagcctccgttttctctacctacaaactgggcataataatagtatctatttcttagatttgttacaaaaaataattaggttattgtacaaaatgcacttacttagaaatgcatttacatatgcgttcgtgactggtgcataattatttcattatttttatcactatcatcatcattatccattcatcatcatcacttccttcatcattattgaaaagttgataaaatcataacttaatgagcaagcctgactcttgttagatttttattgtttttttaatcactctatttagagactttaaaatt

SEQ ID NO: 644316 - DNA, 563 bp, Homo sapiens
caaactacctagattttacaattgtcctcctcaccagtcctataagacatgtgccagtgatgccaggaatccttggttttctcattgctttacgtttttatctgcctgccttcactgaggccatagactccccaccgttccattccttatgatcatggcagattcctttcaagaagaatttacagcctcttaatccaagccaatcactttccctaaccagttgtatcacttactagctggagraatcactaacattctaagcctccgttttctctacctacaaactgggcataataatagtatctatttcttagatttgttacaaaaaataattaggttattgtacaaaatgcacttacttagaaatgcatttacatatgcgttcgtgactggtgcataattatttcattatttttatcactatcatcatcattatccattcatcatcatcacttccttcatcattattgaaaagttgataaaatcataacttaatgagcaagcctgactcttgttagatttttattgtttttttaatcactctatttagagactttaaaatt

SEQ ID NO: 644317 - DNA, 563 bp, Homo sapiens
caaactacctagattttacaattgtcctcctcaccagtcctataagacatgtgccagtgatgccaggaatccttggttttctcattgctttacgtttttatctgcctgccttcactgaggccatagactccccaccgttccattccttatgatcatggcagattcctttcaagaagaatttacagcctcttaatccaagccaatcactttccctaaccagttgtatcacttactagctggaggaatcactaacattctaagcctccgttttctctacctamaaactgggcataataatagtatctatttcttagatttgttacaaaaaataattaggttattgtacaaaatgcacttacttagaaatgcatttacatatgcgttcgtgactggtgcataattatttcattatttttatcactatcatcatcattatccattcatcatcatcacttccttcatcattattgaaaagttgataaaatcataacttaatgagcaagcctgactcttgttagatttttattgtttttttaatcactctatttagagactttaaaatt

SEQ ID NO: 644318 - DNA, 563 bp, Homo sapiens
caaactacctagattttacaattgtcctcctcaccagtcctataagacatgtgccagtgatgccaggaatccttggttttctcattgctttacgtttttatctgcctgccttcactgaggccatagactccccaccgttccattccttatgatcatggcagattcctttcaagaagaatttacagcctcttaatccaagccaatcactttccctaaccagttgtatcacttactagctggaggaatcactaacattctaagcctccgttttctctacctacaaactgggcataataatagtatctatttcttagatttgttacaaaaaataattaggwtattgtacaaaatgcacttacttagaaatgcatttacatatgcgttcgtgactggtgcataattatttcattatttttatcactatcatcatcattatccattcatcatcatcacttccttcatcattattgaaaagttgataaaatcataacttaatgagcaagcctgactcttgttagatttttattgtttttttaatcactctatttagagactttaaaatt

SEQ ID NO: 644319 - DNA, 601 bp, Homo sapiens
tacatggaaattaaaccctatgctcctgaatgaccagtgggtcagtgtagaatttgagaagaaagttgaaaatttgtagaaacaaataatgatggaaccacaacatatcaaacttacggaatacagcaaaagcagtactaagagggacttttatagctataactgcctacataaaaaataaataggaaaactttaaacaatctaatgatccatcttaaagaactagaaaagcaggagcaaactgaactaaaaattagtagaagaaaataaataataaagatcagaaaagaaataaatgaaattgaaataaaatacaaaaggtcaataaaacaaaaagttttttttttgaaaagttaataaaaattccgtacaaacctttagccagatattttttaaaaaagaaggaagatccacataaataaaatcaggaatgaaaaaggagatattacaactgatattgcagtaatccaaaggatcattagtggctactctgagcagstatatgccaataaattggaaaaatctagaagaaatggaaaaattcctagacacatacaaattaacccaggaagaaatacaaaacctgaacagaccaacaaca

SEQ ID NO: 644320 - DNA, 551 bp, Homo sapiens
caatttcattgtgtgaacatcatagaatatacttaagcctaaatgatacagccwactacatacctaggctgtgttgtatagcctattgctcctagtctacaagttcatacagcatattactattctgaatattgtaggcaattttaacacaatggtatgtgtttgtgtgtctaaacatagaaaagatatagtaaaatatgacataaaagatgaaaaatggtatacctgtatagggcacttaccatgaatggagcttacaggattggaaattgctttggatgagtcaattgctcagtgaatgagtggtgagtgaatatgaaggcctaggacattacactactgtagactttataaatactgtacacttaggttgcactcaatttattttaaaatattttccttaataaattaattttagattactgtaattttcttctaaagtttataactttttaatttttttaactttttgactcttgtaataacattaaaatacacattgtatagctgccctacaatagtgtttctttatatccttattttgtgagctt

SEQ ID NO: 644321 - DNA, 380 bp, Homo sapiens
cagaagaggaggaatgtaaagtatgtttaaaatgtgaaacctttagttctacttgctctttactcagaaaggakagagtattcccttatgccaacgaggtctctctgagttgtttgcactattggtagcaggtgctgcctggggtagctcttatggtctgtgcttgaagtgtgcaccagctgctgccctgaacatgactgttggtccctgcatacaagcagccacctttaaacagatcaaatgactcttatgatgacagctgtctcactctactttcaaactggttttaatttggttacttgcaacctaagacagcaaacagcattttagggatgaattgcgttcctgaagtgcatgggtcagaaagctcctacattcac

SEQ ID NO: 644322 - DNA, 604 bp, Homo sapiens
ttaaaaaaaagcaaaacactacattattttgacggaggttagaaaaacaaagaacttcaagaaaaacagactatagggtttcccaatttacaagcagcgtaacagcttggaagagcaaaggattaagaggacttgggttcaaattccaaggtactaatcacattaaggatatgttcagtctcttaacctctctaagccacttacttcatttgttaaatggaaataaataataactcttcttaccagcattgctggactaaggaagataatatctgaaaaagcaattataaactgtaaagcactgtaggagatttatttttagtgggtgttaaaaacgctgacacacacacactcatcttctgccaatttcagagggaaacacaagtacagccatgaccataaaaagaaaccagaatgatttatagaaayaaaagccatagaactcgacacctaattgggaatcacaggcatttagttacctgaaaaattactggaagccaagaaataggaaaaagattgcatgtgactattaacaagcgccttcagtgctctgtgcccagattccttatctgtgaagtgggataatgaaaacataccactcaat

SEQ ID NO: 644323 - DNA, 604 bp, Homo sapiens
ttaaaaaaaagcaaaacactacattattttgacggaggttagaaaaacaaagaacttcaagaaaaacagactatagggtttcccaatttacaagcagcgtaacagcttggaagagcaaaggattaagaggacttgggttcaaattccaaggtactaatcacattaaggatatgttcagtctcttaacctctctaagccacttacttcatttgttaaatggaaataaataataactcttcttaccagcattgctggactaaggaagataatatctgaaaaagcaattataaactgtaaagcactgtaggagatttatttttagtgggtgttaaaaacgctgacacacacacactcatcttctgccaatttcagagggaaacacaagtacagccatgaccataaaaagaaaccagaatgatttatagaaataaaagccatagaactcgacacctaattgggaatcacaggcatttagttacctgaaaaattactggaagccaagaaataggaaaaagattgcatgtgactattaacaagcgccttcagtgctctrtgcccagattccttatctgtgaagtgggataatgaaaacataccactcaat

SEQ ID NO: 644324 - DNA, 603 bp, Homo sapiens
cttgctgcagggcttaatacaggtgggagttattggttctggttcttaaataaattagggtgacttatgcctcaccccaaccctattgttcttccaagcctgcttagaagaccagtcactactttccaaaggattatatataccttagctgtcaaatcacatttaactcatacccacgtccccgtatttgagaattaggggattttatgcagatgccttttaggttatagtccccagaatcaactcctacagtaaactaagaaactctcaaccccatcatggattacaaaatattcaactatttcttaacacccaaattctctaatttagtctctaagcatacatttttgagaacacatacagtaaaagtaaaaaacctaagaccygttaaggccatcaactcttggtgataaagctgagtcaagagtcttgagttccagttacagctccaacaactacaaagaaccagtagcagcttccctatttgcaaagcagaagtacaactaagcagcacagagcacctctgtcctcaacattttacgtgagtaaaattaagcataaaatttttctattaatagcacagcactgtccacaagaaaaatt

SEQ ID NO: 644325 - DNA, 560 bp, Homo sapiens
tgacccttggactgaatttgtttccattggattttgccattgaaaaggcacctatttggagagtgctgtgagtggggtaasctgggtgcaccccatgtttgatgacaaagatgggcccttgcaaggcaatgcacccaggaagggaggagagagggaggggaagagagggaagagcaggtgattttttgtttgtttgttggtttgtttgttttcctccccagctgtaagcacaattaggtataactcagaagtggccgccaagtatgtgccctcagtgctcattaattggacagctattgaagcgcggcttataagcgccaatcgccatgtcctgccaggtgtcgtgagggtccagggtagacacacgtggggcaggtagggaaggtcaacgtgttggggtccattagagatgaaagatgcaaagtaacaaaacaggaagtgcagagggcccatcggcctgcaggctttactgagactgcaaatcccaggggccttctctgtggaacagagacctgcgtgccgatgtgtgccattcattcctcagccttccgagaagggct

SEQ ID NO: 644326 - DNA, 560 bp, Homo sapiens
tgacccttggactgaatttgtttccattggattttgccattgaaaaggcacctatttggagagtgctgtgagtggggtaacctgggtgcaccccatgtttgatgacaaagatgggcccttgcaaggcaatgcacccaggaagggaggagagagggaggggaagagagggaagagcaggtgattttttgtttgtttgttggtttgtttgttttcctccccagctgtaagcacaattaggtataactcagaagtggccgccaagtatgtgccctcagtgctcattaattggacagctattgaagmgcggcttataagcgccaatcgccatgtcctgccaggtgtcgtgagggtccagggtagacacacgtggggcaggtagggaaggtcaacgtgttggggtccattagagatgaaagatgcaaagtaacaaaacaggaagtgcagagggcccatcggcctgcaggctttactgagactgcaaatcccaggggccttctctgtggaacagagacctgcgtgccgatgtgtgccattcattcctcagccttccgagaagggct

SEQ ID NO: 644327 - DNA, 560 bp, Homo sapiens
tgacccttggactgaatttgtttccattggattttgccattgaaaaggcacctatttggagagtgctgtgagtggggtaacctgggtgcaccccatgtttgatgacaaagatgggcccttgcaaggcaatgcacccaggaagggaggagagagggaggggaagagagggaagagcaggtgattttttgtttgtttgttggtttgtttgttttcctccccagctgtaagcacaattaggtataactcagaagtggccgccaagtatgtgccctcagtgctcattaattggacagctattgaagcgckgcttataagcgccaatcgccatgtcctgccaggtgtcgtgagggtccagggtagacacacgtggggcaggtagggaaggtcaacgtgttggggtccattagagatgaaagatgcaaagtaacaaaacaggaagtgcagagggcccatcggcctgcaggctttactgagactgcaaatcccaggggccttctctgtggaacagagacctgcgtgccgatgtgtgccattcattcctcagccttccgagaagggct

SEQ ID NO: 644328 - DNA, 584 bp, Homo sapiens
gtttattttatttcttgctagttccagagaatcgatcaaagacaggacaacttttcattgtataaatccagagaaatgatcaaacacaggacgtttcattgtataaatctagtaaaataataaagtcatatcaggctttacatatcacaaaacattttaatgacattttcatataatcaccataataaaccctgtaatattataagtaaaattttagatatttttgtcatttttctagatgcaacataaagagtctttaatgaycccaaaagcattaaatggcaacactagaattcagaaagtattttttatttcatgctgccttatctactagaaaaactctaaaagataagtacatattcttataagcagttaggtctagtggtttatgaaaatgccctccttagtagaagtatgtgctaaaatgtgctgtgtctagtatcccacaatgggttgtaagcaggatacatattttatgctgtcatctctaaaataagacttatctcacaatttttaaaaccttttatttctctgactggtctgcaaacaccagacctctgagtttcatttttctcctttggaac

SEQ ID NO: 644329 - DNA, 614 bp, Homo sapiens
gaaataattcacattataatttttttcttctttacttagtgagtagcaaataaattaatccaatataccaggtgaatatgtcaacccaagtaataaggataatgttcctagtcatgtgtctattaaaatgggcatgtaatttgagtttatcaaaaaaattattttaatggcagatataaatcaaataaatagcggtcaaatgatatatattttgcttgcatttttattaactgacataattattttaacttcgaagaagattcacattttaaaatgttgttaacastgttaatgacatctgttttgtttgagacagtcttgctctgtcacacaggctggagtgcagtggcaagatcctggttcactgtagcctcagcctcccaggctcaagtgatccccctacttcagcctcctgagtagctgggactataggtatgtgcaagcacaccccactaaatttttatttttattttttgcagagacagagtttcactatgttgcccaggctggtctcaaaatcctgagctcaagcaattctcctgccttggcctccccaagtactgagattacaggtatgagccagcacacctggcttaatgatcacttctttattg

SEQ ID NO: 644330 - DNA, 556 bp, Homo sapiens
caaattatttgaatttataattagaaagttatgctaagtgtgacagagattcttgctattttttatttattgtctggacttctttttttaaagaagtgacccttgccccgccacctgttaatgacyctgttaaagtaattttaagtattttctttcaatacatttctatttgatattattaataaatttactttaaatgcttggaactagagactttataacatgtaaattaatacaatatgtggcaaaactatgaaaatatttgcacctcagattatgacagtgatggaatatggaatctgctatctttagagtatacttaagagtgcagcttaggctgggcacagtgactcacacctgtagtctcagcactttgggaggccgaagtgggtggattgcttgaacttacaggttcgagaccagcctgggcaacatggctggtctttacaaaccctgtctctacaaaaaatacaaaaattagctgggtgtggtggtgcatgcctgtagtcccagctactgagggggctgagttgggaggatcacttgagcctgggag

SEQ ID NO: 644331 - DNA, 610 bp, Homo sapiens
ttgcaacctgcgaaaattactttttctggttgcaaaaaatgtatgtgtactatgagaaagtatattatctctgaaagaaattcaaacatacaaaatatagaaaataaaaaagtagaactaatcccataatctctccctccggatgtagccgcagttagaatttatcttcaaaactttttaaatatccttaagtctctgggagtgttttatttttgaaaattaagataacagggccaggcgtggtggctttgggctgggcacagtggtttatgcctgtaatcccagcacttcaggagsctgaggtgggtggaacacctgaggtcaggagttcgagaccagcctggccaacatggtgaaaccccgtttctactaaaaatacaaaaattagctgggtgtggtggcatgcacctgtaatcccagctacttgggaggctaaggcaggagaatcgcttgaacccgcgaggcggaggttgcagtgagccgagatcatgccactgcactctagcctgggcgacagagtgaggttccatctcaaacaaaacaaaacaaaacaaaaaaactaaaataataatactactaaaaaaagacaattaagagaacattaaaatta

SEQ ID NO: 644332 - DNA, 574 bp, Homo sapiens
gctgtgatcatcacactctgtcctggacaacagagtgagacctggtctcaaaaaataaataaataaataaaatgaaaacgaaaatgattggtcagagtagaatctatgagtggactagaaaagaccctgaggttctggagtactatacacattatgtacatcagaaaaaaccattacgaggaagggtgttgggaggtgttggtcaaagggtacaaaatttcagttagamgggaggaataagttcaagacatctattgaataatatggtgactgtggttaatagcaatgtattgtgtttcaaaaattgcaaagagaatagatttttaagtgttctcactgcaaaaaaatggtatgtgaggtaatacatatgttaattagcttcactgagccatttcataatgtatgcatatttcaaaacatcatgtacacaataagtatataatattgttgtcaataaaaataagaaagagtaaataaattataaaaataaaatttaaaaaatcagagatttttaaaatgaataaaccattataataaaactccatggtttttggcttttaatttcaaaaaaaaa

SEQ ID NO: 644333 - DNA, 630 bp, Homo sapiens
attttgctatcaggaaatctagaaaaaaggttattttaattccaataacatttcaaattttaattaaaaaaaatttaaattcaataatttcaatatgttttctgtctggtctagtactgtttttatttgaattgcccacatgggcgttggggcccctagaggccttatagccactctttggacttgccttagctctgggttttctattgtctttatttttccatacattgcttctttatgtagtttgttctgctgaattgtaactacttttgtaagccacctccagtgattttggtaatgagatggtatataaccatgaataaaaatgcmatttattgggtcaaaaaatgtgaacttcttgaggctattgatgcatactgccaattaactttcctttctctgattacctccctgggctgtcatctgtttttttcttggactttaggacattgggctgctactaaaaggtctaaaactactcttagcaatgaaataagagggttaatgttcacttagtttgaagactcagtgaatgccatatcaatttttaaaatctaactcactctttcttctgttgtagagtgagttccctgggaagctgactctgaaactggcaatgtgcaggaagct

SEQ ID NO: 644334 - DNA, 562 bp, Homo sapiens
ttcgtgctctgctggatccccttctttctcaccgagctcatcagtcccctctgctcctgtgacatccccgccatctggaaaagcatcttcctgtggcttggctactccaactccttctttaaccccctgatctatacggctttcaacaagaactacaacagcgccttcaagaacttcttttctaggcaacactgagggagaggaccaggattgaaaaaagtttcttcccataattcagtggaattcccagttcatccatttcccatccccacccaacagccatgtggacgggatgaatcctcaccattctccagggtcatcttcagaactgcactggcctcttttccacctcctcagtaggaatatgactcctcatagagttayggtgacatgatgtatctaacttatctactatccctttctctgtgctgacagtcatggtctttgcccgcaaagtgtcctttcctccccaaattcactctggcatggtgatcgacattgtcttaaagaagtcaaggcaaataagaaggaggaggtaaaacaatatgggcaggttgagatt

SEQ ID NO: 644335 - DNA, 611 bp, Homo sapiens
tttatcattcatctgttggtggatttcatgctgttttaattttgcaactattaggactaaacagaccatgaacattcatgtacaagtgattttgtgggcatgtgtttttatttattttgggaaaatatacatagaaatggaattgatgggtcatatggtaaatatatagcttcgtaagaaactcagatctctttccaaagtggttgcactattttccaatgactccagcaatgcatgagagttccagttgatccacactttgccacatttggtgttatcttaatattagctattttgttggacaygctgtagcatcttataacttcaatttgcatttccctaatgaataaagatgttagacaagtttccatgtgtttattgaggtgcttacatgtcttctcttgtaaaatatgtgttctaatcttttgtccacttttatagctttcagtttgttgtcctcttattgttgagtttaggagttcttcatattttctcactacaagtcctttgtcagatacatgaatcacaaatatttcctcccagtttgtggctcgcgctattggatgactatgtgccttggagttatctgagttatcttctttggtttattc

SEQ ID NO: 644336 - DNA, 551 bp, Homo sapiens
tgtgatcatcaccactgtgaacagtatcttcagtgtgaccagcatctccagtataatcagcatccgtggtgtctccagtgggaccagcatccccattgtgaacagcatctccagcgtgaccagcatccacagtgtgaacgacatccacactgtgaacagcatccatggtgtcaccagtgtgrccagcatccacagtgtgaatggcatccatggggtcaccaatgtgaccagcatccacagtgtgaacagcatccatggtgttaccagtgttaccagcatccacagtgtgaatggcatccatggtgtcatcagggtgaccagcattcacagtgtgaacagaatcttcagcgtgaccagcatctccagtgtgaccagcatccccagtgtgaacagcatctctagtatgatcagaatccatggtgtttccagtataaccagcatctccagtgttaccagcatcctttatgtgaccagtgtgataagcctccacagtgtgaccatgtctcaagtatgaccagtgttaccagtgtccccattgtcactcataaaaa

SEQ ID NO: 644337 - DNA, 428 bp, Homo sapiens
gaattcccatcccaagcgctctgtggtcttgggctcctttccaattctcagttttgacaacagcactgtggtgtttgcaagcacaagataaccccacacgccctgccagggccttataacaactttatagaaaagcactcacaagagatgytcactcactctgagtcaccatgcaccaagcaccaaaccaaaagctgtgccgggatgagatcagtaaatcttctgtgccactccatgaaatgggtctggtcatgatccacatcatacagacggggaacccagggaggttgtgtaacttgcttttgcagctcagtaagacctgccaaagccagttgattccggggggcaaagatttaagctactagacatggcatgctttatttggctgtggttaatttcttgtcttgtatggttataaaatagaaaca

SEQ ID NO: 644338 - DNA, 509 bp, Homo sapiens
ttaatatgagaaattaatcataaaatgtctggactactgagagaacagctagaaggtgaggcaactctgagatcagtgactgcaggaactataggaaggcactaacaaccctaacatccactagggccagagggcctaggaaggcagaggagttgctgaaactccaaagcttggccattggtgaaagctagattcaggagctgagaattgagaggaaacggctgactacagggagctagaaccacttaaccgttgcagtcactgccaacggtgcctaaggcaaagaaagggagaaaaataccctaccggcctttagcacgaactaatccctagaatggtcagcatcattctctactataattscctgtatatttctccatctatgtcagtgcttcccaatggaaagcctaactggaaggcagcacaaagaagcctgagaaatgcagtttgcagtgggcagttcaaagcagggaaatggcagagaatggatctaagatcaaacaagcaaa

SEQ ID NO: 644339 - DNA, 485 bp, Homo sapiens
caggtgtcgaagcagggcacccgtcctttttgcacacctgactgccatggagtgtcctagcagaaggtcatctacatactggagcaggatgcaacctaggtctttagcaggaaacatttggaggtctccaaccgaggcctcccsaaagatggtgggggactttttgaacctttgggaaagtcgagtctaagtgtactgaatggtgacatctgactccggatcttcctactgaaaggcaaacagcttttggctctcaggaactagcctgatgtgaagaaggcatctttcaagtcctgtacgggtcgatagtctttggtccttggtttagggacaggtaggaggtgggtgttccatggagactggcaaggaactagaattccagaggcttttaagcatataagatgagtctctattcctttaaaggcttccctgggaacaggatacggcttttgtccaattggctaggtcgtaggctaaacttctat

SEQ ID NO: 644340 - DNA, 617 bp, Homo sapiens
actgctctatctccagcactaagaataataatgacactcaggaaatactgtggaaggtagatatgttacaattggcagttagtcacacacaagcagggcagaagaccctccccccaacycccaccaggaatgtcaggtgaccatcaggtaatggtcagacagttgggttaactgtctctctcaaataataattggtcacaaccagcaccagagaaagccagtctcccaacagctagaaacacctgaaactgatgatcagcagcttcccaataagatttcaggatttgggcgagtgggctcaaacatgcacaataagatgcaaaatggtggagtttaactgttacatgaccttcttctcggaacacttgactggtaagggaaaaatgcctgaagtgagcatgtgcaacatttcagtaagcacactgcacatgtgccagcagaccactgctcaggcagacagcgcaccccagtggaagaattgggggagaagggatgcaacccccaggaagcatgccaacatgtaagatcccaagtcaaaggtcaaaccatgcacttgatctttcatgtcactcgcttagccctcttccaagtgtactttacttctttttcttcctgct

SEQ ID NO: 644341 - DNA, 487 bp, Homo sapiens
ccagagacactacacccaagacttgtcacctaaatcttttyatcccattacaccaatattttggaggggaaaaagagacaaactgatttttagcatccactcaactggattctgcagaaatagaggctgagagtccagctggtaagaatttatttcccttctgccagtttgtcacatcctgagtttccttgactgcagcttccagaagagcagagtgactggttatcctgttcatgatgccaaagctgtagagaccaagggaaaacttcccctttaacctctgaaggtttgctgaaactcaactaacaaaaggcaggttagtagaagaaaaggcatgcacatttactaacatgcatggaagaaatcacagagtgattaccacaccacacaagaaggtacagatggttatgtacccttcttcttaaaagaaagggagatggggaaatgtgggtgattttagggggctagtaaatgatttttaagagga

SEQ ID NO: 644342 - DNA, 487 bp, Homo sapiens
ccagagacactacacccaagacttgtcacctaaatctttttatcccattacaccaatattttggaggggaaaaagagacaaactgatttttagcatccactcaactggattctgcagaaatagaggctgagagtccagctggtaagaatttatttcccttctgccagtttgtcacatcctgagtttccttgactgcagcttccagaagagcagagtgactggttatcctgttcatgatgccaaagctgtagagaccaagggaaaacttcccctttaacctctgaaggtttgctgaaactcaactaacaaaaggcaggttagtagaagaaaaggcatgcacatttactaacatgcatggaagaaatcacagagtgattaccacaccacacaagaaggtacagatggttatgtrcccttcttcttaaaagaaagggagatggggaaatgtgggtgattttagggggctagtaaatgatttttaagagga

SEQ ID NO: 644343 - DNA, 600 bp, Homo sapiens
tgttagtgtggccatggattcacytgctactatcagttaatgcattactcatttataaaattattgcctttcttattccttagataaaaagatgactataaataagatctttaacaatttgttttcaatcctcaacaaatcatcttgagcactctgctctggagaccactgatatagcaggttgaactttttcatttatcagaatatctttacaattttatttttattcagccttcgtctctgccttcttttcatgtttcagaactgaggataaatatcaactcagtagatgaacttgtgtgactacactaagtcagggccttccagttttgctatgattttcataacaccttgtttatttgtcattacatttcaaaatcccaaattattcatgtgtttttttatttttgcccataatatgtctttctaattggattacataatatgtgaagactagaaccatgtttagtttatcaacttttgtgtccacaggacctaggtcaatgcttggcacatggaaaacatttattacctatttattggaaataaataaatgaacaaaaacattattctcactgggaggccactcaaatttcttaa

SEQ ID NO: 644344 - DNA, 176 bp, Homo sapiens
taacaatgataaaaattaagtttcaaaaaaggtttctaagcataccattgaaactgttacatttctcctcaaaarcaacatatttgactccccttttattaactctaataacattcaattattgtgcaaagttcccaaacttcattccaaaggcagccatctgggaaaggaagtca

SEQ ID NO: 644345 - DNA, 499 bp, Homo sapiens
aatgctcctagggtcaatcgttcacttctattgttagctgacatgggtaaatgccttatgaaataaggcagaatttttcaaggttgttggcactgaaaattacagattttattatgagccgacaatgatctttcatgagggccttatggtagattgtattaatggattgcattatccagttctttgctgctccctgcttctatactcttgctatggcttcattgtggctgaaatgtatttccctactccatgactttgggctcagctttgtgatctattcttgctaatgtcatgtgtgtagaagtgacagtgtactgattccaaacgtaggccataagaggcyttgtacatttccgcaggccatcttgtgcctctgtcatcaccatgagaaggacatgcctggattagcctattggtccaaggaggatgagagacatgtggagcacagctgctcagccatgcctagtctaggtcagcccacttgtagatgtgttaacaa

SEQ ID NO: 644346 - DNA, 556 bp, Homo sapiens
tgaggtcaggagttcaagaccagcctgaccaacatggcgaaaccctgtccctactgaaaatacaaaaattagccaggcatggcgccatgagcctgtaatcccagcaactcaggaggctgaggcaggagaatcacttgaacccaagaggtggaggttgcggtgagccgaggttgcaccactgcacttcagcctgggcaacagagcgagaccccgtctcaaaaagaaaaaggaaaagaaggaatgatggaagatagaattgaggtagtatcccaggaagtaaaatactagagagatagaaaattaaagagaaaataatgagcaaatgagaaccagtttaggaggtttaacatccaatagataaaatccaaggtccactttatctcttttattattctagaattcctgtaaaagaactgaatgcagtaaaatgtacccaaagttaggacacatttttcctttttaaaaggactcaccrtggaccagcacaatgaatgataaaatagtcctgcaagaagacttactgtcataaaattttaaacacctaagatagagaaga

SEQ ID NO: 644347 - DNA, 592 bp, Homo sapiens
agttacaaagcaaacaacccaataacaatagcttttatattttgctatgtaactagcattgtttatttcttcctatggcttcaagttaaatacagtgctctttcattttagcctgactccctttagcctttcttataggatagacatactagcaaacgaatgctcccaattttctttttctgggagtgtctttattttgacttcagttttgaagattaattttgccagttagagaattcttgattgaccgtttgtgttttttttagtttcagctctttatgtcttccagttgggcacagtgatttatgcctgtaatcccaacactttggggagctgaggtgggaggatcgcctgagcccaggagttcaaagctgcagtgagctatgatcatgtcactgcactccagcctgggcaacagagtgagacccygtctcaaataaataaataaataaataaataaatacataagtaaataaataaataaataaataaatagtcttcccactgccttctggcttccaaggtttctgatgagaaattggctgttaattttattgaggatgctgtttatgtgaggaatgttctcttttat

SEQ ID NO: 644348 - DNA, 584 bp, Homo sapiens
gaaaacagcacaggaaaagcctacctccatgattcaattacctcccaccaggttcctcccacaacatatgggaattcaagatgagatttgggtggggacacagccaaaccacatcaatgaagctctctgttgtatatgttaatgctgataatgtttttttgttttgtttttgagatagagaaggagatcttagagaygaaaaaggggaagctccattaaaattggtaaaggaagaaacataatatgaaaggagggaaataatgaggtaaaagatgcagagactgctttccagacaaagtaagaatgaacttcactttggaataacaaagcagtgcttgcttggcaaggtgagtcttagaatctgactaacatcaacagggcagagtctcaggtaattaacaaaaccaggaaggaacagggagcagcaatgctaaaacacaagaaaccaggttactttgtcctacttcatagttgttattttcctaatcattggagataagctatgattaacagaaaaactacccatgtaaaatattgtcacccaacttttaagaaaaacaagaaagaagatacaaaacttagca

SEQ ID NO: 644349 - DNA, 288 bp, Homo sapiens
ggacttcccagattgaatcaataatattaacagtatcaatctgccactaataattatttaagaaaagtatttttctgctttcagttttatttattaaatagtttctgctagcctaatgttaaagtctgccaactagttccttcaagttaatcacattcacttttgattccctcttaacacattaagatattttataaytctgtgagtttaaaatccaatgcaaattcattgtggtcaggcaagatgcaagaccagtcaggcaaatacacttcccttattttttatggg

SEQ ID NO: 644350 - DNA, 288 bp, Homo sapiens
ggacttcccagattgaatcaataatattaacagtatcaatctgccactaataattatttaagaaaagtatttttctgctttcagttttatttattaaatagtttctgctagcctaatgttaaagtctgccaactagttccttcaagttaatcacattcacttttgattccctcttaacacattaagatattttataattctgtgagtttaaaatcyaatgcaaattcattgtggtcaggcaagatgcaagaccagtcaggcaaatacacttcccttattttttatggg

SEQ ID NO: 644351 - DNA, 288 bp, Homo sapiens
ggacttcccagattgaatcaataatattaacagtatcaatctgccactaataattatttaagaaaagtatttttctgctttcagttttatttattaaatagtttctgctagcctaatgttaaagtctgccaactagttccttcaagttaatcacattcacttttgattccctcttaacacattaagatattttataattctgtgagtttaaaatccratgcaaattcattgtggtcaggcaagatgcaagaccagtcaggcaaatacacttcccttattttttatggg

SEQ ID NO: 644352 - DNA, 524 bp, Homo sapiens
ctcaaagtaaggtaaattcaaagagttccacatcaaaacagcttgatattatcaaattgtcaaaagagcaaatcttgaaatcaacaagagagaagcaaaacatacaagtaaccttcaataagattttcagctgatattgcttcaggaaccaygcaagttaaaaggcagcaggataacatacctaaggtgctggtgagaaaagataaccaatctgtcaactatcctggcaaagctatccttcaagaatgaatgataaagtaagatgtcctcagataaacaaaagctgagggaatttattactaacctgccctacaagaagtgtcaaagggtgccctccaggctgaaatggaaggacactaaccatagaagaaataaagatcactagtgaagggaaccctaaaggtaaatataaaagcaagcattattgtatttttggtgtgtgactcctttttttcccctctgtgatttaaaagacaaaggcataagacactaactaaaactctatgttaatgagtatgaaatgg

SEQ ID NO: 644353 - DNA, 524 bp, Homo sapiens
ctcaaagtaaggtaaattcaaagagttccacatcaaaacagcttgatattatcaaattgtcaaaagagcaaatcttgaaatcaacaagagagaagcaaaacatacaagtaaccttcaataagattttcagctgatattgcttcaggaaccatgcaagttaaaaggcagcaggataacatacctaaggtgctggkgagaaaagataaccaatctgtcaactatcctggcaaagctatccttcaagaatgaatgataaagtaagatgtcctcagataaacaaaagctgagggaatttattactaacctgccctacaagaagtgtcaaagggtgccctccaggctgaaatggaaggacactaaccatagaagaaataaagatcactagtgaagggaaccctaaaggtaaatataaaagcaagcattattgtatttttggtgtgtgactcctttttttcccctctgtgatttaaaagacaaaggcataagacactaactaaaactctatgttaatgagtatgaaatgg

SEQ ID NO: 644354 - DNA, 599 bp, Homo sapiens
tatcctgtttagagttcacttagacccttaatataagtaaattttttatataaaatttataaatttttcaacatattacgaagtattttccgcccctttttctcgatatcatttcaaaacgtcaaataaaaatcagttagaccttttattttgtctcatggccattaaaaccctctttactttttcaaaaatccttcgtctttctgttccacagatcagataattctgttgttgtgtgtcaagttcattaacacattcttcttccatctataatctgttattaagaaaatgagtgcaagttttcatttcatawagtgtattttaatttctagaattaccatatagtcattgttcttgtttccattatcattcataaattattcatctctttacccatatttctatgattttctatagatttataaaaggtttaacattgtagatgatataattgtagataattcatttctgttatctttctttcaatagtgttatttttgttctagatgtcagtaactctattcaatttaaattccaaagtctgtctcccgtctggtgggcggtaactaaaatacctactttttcttttagacttctgg

SEQ ID NO: 644355 - DNA, 565 bp, Homo sapiens
tattgcgcttgtttatattattaataaaatcatgtaattaaaaatctgttcaggacctaagaaattatcaaatgcaatttctttcctttacagattaaaatgctgaggtctacaaaactaaattcatttatataaggagacctcacagatctgtgactctaaccaaggtctcctgggtcccaggctagttttgtgtttgtcttctctttactagcaaagctctcagctgtctcagtcctgcgcctctcaacacctcccccttgactaacaagattacttttttattagctgttccttctgtgtgtgataatgccactgttaacaaaattttggttccaaatgacaaagatctgcacaaaatggggtgaaacaaaaaaatggattcattcatacaatggaaatgtccaacagaggattagatttaggrattcacaggttgcagggtctccaggtgtgctctctgagtcttcagaccctgcctgtctcctctcaaggttgtcttcaagatgactaatggaagcaacataatagaagttgttgctcttgttctctctccaaactgtct

SEQ ID NO: 644356 - DNA, 594 bp, Homo sapiens
aaactagaaagaagctttctgaataactgcattgtgatgtgtgcattcatctcacagagttaaaactttattggattcagcagtttgaaaacactgtttttatctattctgcaaacagacatttgggagctcattaaggccaatggcaaaaamgataatatcaaaggataaaaactagaagaaagctatctgagaaacaattctgtgatgtgtcctttcatcttgcagatttaaacctttcttttcattcagtgctttggaaacactgttttggtagaaactgcgaggggatgcttgggaatgcaacgaggcctatagtgaaaaaggaaatatcttccgatgaaaactagaaagaagctttctgagaaactgctttgagatgtgtgcattcatctcacagagttaaatatttatttggattcagcagtttggaaacactgtttttgtagaatctgtgaagggatactttacagctcattgaggttataagcaaaaaagcaaatacacctggataaaaactagaaggaagcaatctgagaaactgctgtgtgatgtgtgcattcatctcacagagttaaacttttcttttcattc

SEQ ID NO: 644357 - DNA, 594 bp, Homo sapiens
aaactagaaagaagctttctgaataactgcattgtgatgtgtgcattcatctcacagagttaaaactttattggattcagcagtttgaaaacactgtttttatctattctgcaaacagacatttgggagctcattaaggccaatggcaaaaaagataatatcaaaggataaaaactagaagaaagctatctgagaaacaattctgtgatgtgtyctttcatcttgcagatttaaacctttcttttcattcagtgctttggaaacactgttttggtagaaactgcgaggggatgcttgggaatgcaacgaggcctatagtgaaaaaggaaatatcttccgatgaaaactagaaagaagctttctgagaaactgctttgagatgtgtgcattcatctcacagagttaaatatttatttggattcagcagtttggaaacactgtttttgtagaatctgtgaagggatactttacagctcattgaggttataagcaaaaaagcaaatacacctggataaaaactagaaggaagcaatctgagaaactgctgtgtgatgtgtgcattcatctcacagagttaaacttttcttttcattc

SEQ ID NO: 644358 - DNA, 635 bp, Homo sapiens
tggacatttggcagctcattgaggccaatggtgaaaaagtgaatatcccaagaaaatactagatagaagttatctgagaaactgctttgtgatgtgtccattcatctcaaagagataaaggtttcttttcattcagcagtttggcaacaatgttttgctagaatctttgaagggatatttgggagcacattgagacgttttttgaaaaaggaatacgagaaggaagctttctgagaaactgctttttgttgtgtgaattcaactcacagaaataaaactttattttcattcagtaatttggaaatacttgttttctacaatctgcaaagggatatttgggagctcattgaatccaaaggtgaaaatgtgaatattccaggataaaaactagaaggaagaaatatgacaagctgatttctgatktgtgcattcatctcagtgagttaaacctttcttttcattcaccagtttagaaacactgtttttgtagaatctgcaaaaggatatttggcagcgcattgaggcctctggtgaaaaatgaattatctacaggtaaaaaataaaaagaagctttttgaaaaaactgcttcatgatgtgtgcattcatttcacagagttaaacttttctttccatt

SEQ ID NO: 644359 - DNA, 635 bp, Homo sapiens
tggacatttggcagctcattgaggccaatggtgaaaaagtgaatatcccaagaaaatactagatagaagttatctgagaaactgctttgtgatgtgtccattcatctcaaagagataaaggtttcttttcattcagcagtttggcaacaatgttttgctagaatctttgaagggatatttgggagcacattgagacgttttttgaaaaaggaatacgagaaggaagctttctgagaaactgctttttgttgtgtgaattcaactcacagaaataaaactttattttcattcagtaatttggaaatacttgttttctacaatctgcaaagggatatttgggagctcattgaatccaaaggtgaaaatgtgaatattccaggataaaaactagaaggaagaaatatgacaagctgatttctgatgtgtscattcatctcagtgagttaaacctttcttttcattcaccagtttagaaacactgtttttgtagaatctgcaaaaggatatttggcagcgcattgaggcctctggtgaaaaatgaattatctacaggtaaaaaataaaaagaagctttttgaaaaaactgcttcatgatgtgtgcattcatttcacagagttaaacttttctttccatt

SEQ ID NO: 644360 - DNA, 635 bp, Homo sapiens
gtactttcagcaggaagtgggaagcctatgcatgccatgtgacctcaaggctacagataagtattaaattggatgactgattctcatatttttctgattattattgtttttagagacagaatctaactgtcacccagggtggagtgcagtggtgctatcatagctcactgtaacctcgaactcctggactcaagcaatcttcctgcctcggcctcccaagtagctgggactacaggtacaagccactaattttttcatatttttagagatggggtcttgttatattgtccaggcaggtctcagactccagggctccagtgatcctgcttccttggcctcccaaagtgctagaattacaggtgtgagtcaccatgcctggccatgaatctcatatttttataaagcagccatgtgttctagattttgctgaacatcacaatttccaatactctaatgctcataaagagacggctcayggtcaaactaaaggtataatttttaagttttttaagttggaacaaaatggtcaataggaggtaagaacttaaaaggaaagggtttgtttgcaagtgctcccacaagaaaactcggaagcgatgaacaagagtcaccacttcacttgcatgagaaagttc

SEQ ID NO: 644361 - DNA, 582 bp, Homo sapiens
gtcctgtgcactatcctgggatcttatattcacccaggccattttctacttaagtcagtcacttctgggatttgtccttcctttccagatactctattgagaagcatgctttgtttataataacattttttgaagaaatgaaaattataaaactcttctcaaaacttaacgaatatatctgattcttgacccacataaaccaatgtataaacaaggtgaaatatgtccaacaatagaaacaataaaacaaatataaaaatgaccttttttgttccagccactgctacattttcctgctgtctgttagcataaaacttagagttgtccattcaatttggtgtcactytttacatttcttcctctttaaactcactcaagccaggtgccagcagacatcaccctaggaaactcatttttgttaagctgggcgatgaactccatgttgctgaatctgtggtcagttcacagagctcctcttactaggactttggcatcgtttcacattcttgaaatataggctctgatttctgcatgccacagtgccttgttttccactatgcatcgctgacttcttcagcctcc

SEQ ID NO: 644362 - DNA, 512 bp, Homo sapiens
tcatgatactgctggaagccctcactctattactgtgccctaaccaacttcagtccattctcatattactcaatccattctatgtgctatacagaactgtattagttcattttcatgctgctgataaagacayactcaagactgggcaatttacaaaagaaagaagtttaattggacttaaagttccacgtggctggggaagcctcacaatcatggcaaaaggcaaggaggagcaagtcacatcttacatggatggcagcaagcaaagagagaacttgtgcagcagaactcctctttttaaaaccatcaggtctcatgagacttattcactaccaggagaacaacacaagaaagacttgcccccatgattcagttaactcccaccaggtccctcccacaacatgtgcgaattcaagatgagatttgggtggggacacagccaaaccatattaagaagtaagtggaggaaaccaaacagatacttaagcatgatgtattctgagaaggcctgg

SEQ ID NO: 644363 - DNA, 515 bp, Homo sapiens
acggttcacaaaggggttggtgggataggggcttggccttatgggcgsgttgaatgtagaaagcacttgagcaattaattcagttcaacactaagtcccatcaacatcagccatcctgacttcctttcactggctgtaaccctctttccaagcccactgatagccccaggagctttaacacaggagctgaatatgagtcactctgacccatttccgtttcaggtgtgaaattaggatggaaacttaatcaaattgccctgagactttagatgtcacccagcagaacatcgggcctcccatccccaccgccctggtttctgaagctcactgcagtcagtcgcatgattgtcttcagagccctccttttgtgctgtgtgctgcagacattgcatatatgtgcacaggcaagtgtagccagtaaaaataggagcgtgtatctctgggtgacatgggtgcaaagaataacctagccagccttaagagaagggtgatcagaaggcagcaagggtgcaaaa

SEQ ID NO: 644364 - DNA, 463 bp, Homo sapiens
caaacctcatcttgaactgtaactccacaattcccacgtgtcatgggaggaactaggtgggaggtgattgaattacaggggcgggtctttcctgggctgttctcrcgttagtgaatgagtctcatgatatctgatagctttaaaaatggcagtttttgtgcataagctctctgttcatctgctgtcatttacataagatgtgacttgctcttctttgcctttcaccttctgccattattgtgaggacttcccagccatgtggaactgtaagtccacatcttttgtaaattgcccagtctttggcatgtcttaacagcagagtgaaaggaaactaatacagtgaattgataccaggagtggggttcttctatacccaaaaatttggaaacaactttggaactgggtaacaggcagaggttggaacagtttggaaagctcagaagaagtcagaaaaatgtgtgaa

SEQ ID NO: 644365 - DNA, 552 bp, Homo sapiens
gaattctgtatctatcttccatgtatcccgatttttcttatgctcttaattctttgtctttttcagtacgttctggacaagcccctggatcaatttttcagcacactaattagcacttatgttctattttatttcattgtttgacagtcttttatacttctgagagatctaatcacttcttgaaagaatgtcaaggagctccattaaacagcaatctactgggggtatttatacttatatttaagtcttatgtttgctataattttctctgctttctacagtgttctgttaggaatggtgtctcccttttatggccttggtttttctcagatgctgtgtgattcttgatctgtttgcttttgtgttttgaccttccttgtttgcctgtctttggttgcctgcctctcataatgggaagccaagttggatgtgggtctgacttgtctttgggacattgggatgtagggttcttttcctacttgaaggtgataagctttctagattcccaccttttttctcctggtstctgtgactctgagctgagtagtaaaa

SEQ ID NO: 644366 - DNA, 532 bp, Homo sapiens
agcccagtaaaaaatggccaatagatttgaacaggcccttcaccaactaacttttgaggttgaatgtgtgacttttttttcaggctgcctgagcactggtgctgatgatcttgagccggatgtgttcattgtgacctaccctctgstcttgcagaccctgtgcattgtccacctctgtgtgctggcctcccctcctgtgtgtccccagcaaagcacctctgtgcctccaaacaccaactttcctggaccacgtaacaccccatcttcacacaaaccaccctctttctctctccttcctccttctaccttttttattttttcctaacaggaagagcatcagtttcagctctaacagctttgtcgtactacataagaaaatcttttttatactgtgaaatttttagtacagccagggaaacgtggggtctagcttcagtttggagggtgttgagtgtcatgtactctgtaagagagtaaaactcttctaaagtgctcccttaaactctaacacccaatgtttccgattactata

SEQ ID NO: 644367 - DNA, 532 bp, Homo sapiens
agcccagtaaaaaatggccaatagatttgaacaggcccttcaccaactaacttttgaggttgaatgtgtgacttttttttcaggctgcctgagcactggtgctgatgatcttgagccggatgtgttcattgtgacctaccctctggtctygcagaccctgtgcattgtccacctctgtgtgctggcctcccctcctgtgtgtccccagcaaagcacctctgtgcctccaaacaccaactttcctggaccacgtaacaccccatcttcacacaaaccaccctctttctctctccttcctccttctaccttttttattttttcctaacaggaagagcatcagtttcagctctaacagctttgtcgtactacataagaaaatcttttttatactgtgaaatttttagtacagccagggaaacgtggggtctagcttcagtttggagggtgttgagtgtcatgtactctgtaagagagtaaaactcttctaaagtgctcccttaaactctaacacccaatgtttccgattactata

SEQ ID NO: 644368 - DNA, 532 bp, Homo sapiens
agcccagtaaaaaatggccaatagatttgaacaggcccttcaccaactaacttttgaggttgaatgtgtgacttttttttcaggctgcctgagcactggtgctgatgatcttgagccggatgtgttcattgtgacctaccctctggtcttgcagaccctgtgcattgtccacctctgygtgctggcctcccctcctgtgtgtccccagcaaagcacctctgtgcctccaaacaccaactttcctggaccacgtaacaccccatcttcacacaaaccaccctctttctctctccttcctccttctaccttttttattttttcctaacaggaagagcatcagtttcagctctaacagctttgtcgtactacataagaaaatcttttttatactgtgaaatttttagtacagccagggaaacgtggggtctagcttcagtttggagggtgttgagtgtcatgtactctgtaagagagtaaaactcttctaaagtgctcccttaaactctaacacccaatgtttccgattactata

SEQ ID NO: 644369 - DNA, 532 bp, Homo sapiens
agcccagtaaaaaatggccaatagatttgaacaggcccttcaccaactaacttttgaggttgaatgtgtgacttttttttcaggctgcctgagcactggtgctgatgatcttgagccggatgtgttcattgtgacctaccctctggtcttgcagaccctgtgcattgtccacctctgtgtgctggcctcccctcctgtgtgtccccagcaaagcacctctgtgcctccaaacaccaactttcctggaccacgtaacaccccatcttcacacaaaccaccctctttctctctccttcctccttctaccttttttattttttcctaacaggaagagcatcagtttcagctctaacagctttgtcgtactayataagaaaatcttttttatactgtgaaatttttagtacagccagggaaacgtggggtctagcttcagtttggagggtgttgagtgtcatgtactctgtaagagagtaaaactcttctaaagtgctcccttaaactctaacacccaatgtttccgattactata

SEQ ID NO: 644370 - DNA, 548 bp, Homo sapiens
catttggacaatgagagggcagatcccttacccatcatgattgtctaaccaaccacctacttcctattaaccaactcctcttccttacccattcctagttcctgttttcccacacatggttacaattcttccttgctatacgaaccactaattttagtccatcaaggagacrgatttgagactgagctcccttcttggctgcagcaccctattaaagcctccttctccaacaatactcatcatctcagtgattggctttctgttcagcaagcagcgtaggacctaggccaaacccttggtatttcagtaacactataactagcttctcatcagttcaggtcagacttttccaataaataagtataggtctggtcaagtttttctaccaaatgagtatcaaaaatcttttgattttcaaagatttgggtactaattgtggtaaaaagatcacatacctgtattatctcctttctacaggtagggagctaaggtgtatgaaattaagtaacttgcttaatactatatggtgagatagaagttagagtcaa

SEQ ID NO: 644371 - DNA, 548 bp, Homo sapiens
catttggacaatgagagggcagatcccttacccatcatgattgtctaaccaaccacctacttcctattaaccaactcctcttccttacccattcctagttcctgttttcccacacatggttacaattcttccttgctatacgaaccactaattttagtccatcaaggagacagatttgagactgagctcccttcttggctgcagcaccctattaaagcctccttctccaacaatactcatcatctcagtgattggctttctgttcagcaagcagcgtaggacctaggccaaacccttggtatttcagtaacactataactagcttctcatcagttcaggtcagacttttccaataaataagtayaggtctggtcaagtttttctaccaaatgagtatcaaaaatcttttgattttcaaagatttgggtactaattgtggtaaaaagatcacatacctgtattatctcctttctacaggtagggagctaaggtgtatgaaattaagtaacttgcttaatactatatggtgagatagaagttagagtcaa

SEQ ID NO: 644372 - DNA, 565 bp, Homo sapiens
ttgctcaattctgtaatttttaaaaacatgtttactggccaggcacggtggctcacgcctgtgatcccagcactttgggaggctgaggtaggcagattacttgaggtcagaagttcaagactagcctgaccaacatggtaaaacccagtctctactaaaaatacaaaaatttgctaggcatggtggcaggtrcctgtaatctcagcttctcgggaggcgaaggttgcagtggagccgagatcgcaccaccgcactctagcctgggcgacaaagatagactccgtctcgcaaaaataaataaataaataaataaataaataaaataaatattcactattttccagtaatgctaagtactatcaaaaagagtagattactctgacactggttgcataaatattaagctcaagtttgatcagcacattctatgctagatgtaaaagcattttgaaaaaagtaccttacaaataaaatggtattcttagtagacttaaaatttgtttttttaagcaagttaaacatataccctgatctttttattattgttatttatgggcttagtaaa

SEQ ID NO: 644373 - DNA, 568 bp, Homo sapiens
aaatttctctaggctccaaagtcacactttgaaattaagacatacaaaagagaactgtagctagaaaaagggaagaaaggctgtatcagtgggggataatgtaggggatgatgatgttttggaaacagagaaacactcagctgtcagtggtgacaaagaaagaactgaaggtggtggcagcagaattaagtatcagaggagagggaatattccctaattatccctacaagtccatggaaaaggggtttggtattgtgctactacaggatgacccttycagaatgtccagactgacctagaccatttaactttggaccactggaattcatttcaagaagagagaatactcaagaggacttaagggtctgctctcgaggactgactgaatgaattcaaatccaaagagggaaacatctttcaaacacactttaaaagctttcacaaaagctatttaaagccagaaaagcagaaggagcaaggttaaagtcagagaaatactgtaaaatatgtggggcaagaattagcatggaatggggagggagggagggattgcaagatatgttacgta

SEQ ID NO: 644374 - DNA, 578 bp, Homo sapiens
ctcatcaaaacatctgttgagacttaattttttagagccatttttggttcacagtaagattgagaagaaagtacggagatttcccatatacccctgtcctcacacatgcacagcccctccattctcaacatccaccactagggtggtgcatttgttacaattgaggaacctacactgacacatcattgtcacccagagtccacaatttacattagctttcactcttagtgttgttttttctatgggtttggacaaatgtataataacatatattatcagaacattttttactggtttgcaagttatatacattcgatgacttttttacagctacaactataattagccacactatttaaatgatctaattttaaagctccaggttaaacactgcacagaatagcatcctgcccttctattttgccattattaagattccctcattgaaagatgaaaataaaattcctagagaatgatgaaaaaaagcatcacgaagagaagtttcytaagtattatggagatgtttcacacagcatagagcactaattctgcttgtgttttatatttttgaaaacaac

SEQ ID NO: 644375 - DNA, 550 bp, Homo sapiens
ggcagccgaagcatactgacagagccacctgctgggacaggtctcagtcagatgggaggagagaggagcctgcaaaagatggcacagcctgatgggcacaatgtttctcatccaattggagtttggcattttctttaaacataagctcactggctttgaggactgtggtctaagcagatccatttagctatgtacatacatgggtgcaaatctgtgtgcttgtacatactaacatttgcttatcacttagatttgcattgaagtctcacatgtgaaagtgattagtctcaaagggataagaggatggtgcaggagaagacaatttaaaaaccatcattaaaatgcaactaaacagaatggctacgtgaagggaggtattgattgtgtgtgtgtgtgtgtgtgtgtgtatgtttagtgttatctctcttataragaaaaagcatgagcaacttatatgtcccacatccatgtaatggaacacaatgcacaaatttaaaagaactaaaaagacaatgcagaaattgtatgaaccgttttgacacaaaggtag

SEQ ID NO: 644376 - DNA, 613 bp, Homo sapiens
ttctgtgtttctctgtgcgcctaattatgaccagtgagttttgtgccttcagatgatttcttattgctcattaatatccttttctttggattgaagaatgctttttatcatttcttgtaggacaggtgtggtgttggtgaagttctttagcttttgtttgtcaggacagtctttatttcttttcaatgtttgaaggatattttcgccagatattttatttcagtgtaaaagttttcttttatccttcagcgctttaaatatgccatgatactctcccttggcctgtaaagtttccactgaaatgtctactgctctatgtaatgggtcaccattgaaagttatttatcacttttctcttgctgtttttagcatactgtctttattctttccattttggattttattattaaatgcgttgaggtagccttctttgggttatgcctgctttgtattatataaccatcttatacttgaatattgatatctttttctaggttttggaatttctctgttattctccttttgaataawctctctctctctctctctctctctctctctctcccttttctctttgggcaatatctattatgagtctgcaaagtctaatatt

SEQ ID NO: 644377 - DNA, 609 bp, Homo sapiens
tataagttggaggtgattataatgtcactgtgaagaaaaaattaaatgagacacttgaaaataacacagagtatgtaactaaatttcatatagttgtagaaatktaaagaggtagatagagatcagagaagactagagtagcagtggaagttacagaggagaacaacttgagccaagccctaaagatggatagggggataggaaggggaaggaagatcattcttttgggggaaggaaatataaacaagaggaggtgttagatcaatttttaacatgtattcccagtggaaagagaagatctttgatgcatattttaccatagagttgggcttcatatatttgttttatgatgttatttttttttcttttctttgcagcatattttcgttctttatgttggtaacagctaggagtaatattttatttcctttattataccatgttatatcatagggcccaactctatggtaaaatatgcagcaaagagaaaaaagattatgccttggaacatttgcaaggaaattacctgcagaggtaaaatttatttgggagaaatattttgaaaggtatgcaattttaggagtgccttaattgttggaaatttacctg

SEQ ID NO: 644378 - DNA, 609 bp, Homo sapiens
tataagttggaggtgattataatgtcactgtgaagaaaaaattaaatgagacacttgaaaataacacagagtatgtaactaaatttcatatagttgtagaaatttaaagaggtagatagagatcagagaagactagagtagcagtggaagttacagaggagaacaacttgagccaagccctaaagatggatagggggataggaaggggaaggaagatcattcttttgggggaaggaaatataaamaagaggaggtgttagatcaatttttaacatgtattcccagtggaaagagaagatctttgatgcatattttaccatagagttgggcttcatatatttgttttatgatgttatttttttttcttttctttgcagcatattttcgttctttatgttggtaacagctaggagtaatattttatttcctttattataccatgttatatcatagggcccaactctatggtaaaatatgcagcaaagagaaaaaagattatgccttggaacatttgcaaggaaattacctgcagaggtaaaatttatttgggagaaatattttgaaaggtatgcaattttaggagtgccttaattgttggaaatttacctg

SEQ ID NO: 644379 - DNA, 532 bp, Homo sapiens
ggtgccttggcaatcagagctggttccttcagagtcttctggtcctgtactcccattttccaggtggggactctgacgtccagggatgagaatgcccttgcccatgtcacagaagaagttccaagaacaggaccctggactctgccaccaagaccccttcatcattctgcttcatcacaacacttcttaaaaggaaacttaaccctggccttctacccaatasacccagcagacctgccactgtggccctgagagtcagggcccaggccacaatggggaaaagcagctctagagaaaggggttgtgaacacaaggcctagcttgggggctgtgtggactctgcccctcctacacctctcactcccatccacacattggagctggaagggcctgcccagaacagtggaagggaaagggcaccaggccactaaacaccatgttctagatctgtccctgttgcccctcataaaccactttcccacattgtgcctcagtttccctatctgcaaaacgcattggtctcactttacac

SEQ ID NO: 644380 - DNA, 532 bp, Homo sapiens
ggtgccttggcaatcagagctggttccttcagagtcttctggtcctgtactcccattttccaggtggggactctgacgtccagggatgagaatgcccttgcccatgtcacagaagaagttccaagaacaggaccctggactctgccaccaagaccccttcatcattctgcttcatcacaacacttcttaaaaggaaacttaaccctggccttctacccaatagacccagcagacctgccactgtggccctgagagtcagggcccaggccacaatggggaaaagcagctctagagaaaggggttgkgaacacaaggcctagcttgggggctgtgtggactctgcccctcctacacctctcactcccatccacacattggagctggaagggcctgcccagaacagtggaagggaaagggcaccaggccactaaacaccatgttctagatctgtccctgttgcccctcataaaccactttcccacattgtgcctcagtttccctatctgcaaaacgcattggtctcactttacac

SEQ ID NO: 644381 - DNA, 532 bp, Homo sapiens
ggtgccttggcaatcagagctggttccttcagagtcttctggtcctgtactcccattttccaggtggggactctgacgtccagggatgagaatgcccttgcccatgtcacagaagaagttccaagaacaggaccctggactctgccaccaagaccccttcatcattctgcttcatcacaacacttcttaaaaggaaacttaaccctggccttctacccaatagacccagcagacctgccactgtggccctgagagtcagggcccaggccacaatggggaaaagcagctctagagaaaggggttgtgaacacaaggcctagcttgggggctgtgtggactctgcccctcctacacctctcactcccatccacacattggagctggaarggcctgcccagaacagtggaagggaaagggcaccaggccactaaacaccatgttctagatctgtccctgttgcccctcataaaccactttcccacattgtgcctcagtttccctatctgcaaaacgcattggtctcactttacac

SEQ ID NO: 644382 - DNA, 510 bp, Homo sapiens
aacccacagaaactataaagcaaccacacaataaaaccttcaaaactatcagttaacaacttcatgacagtatcaaaacttcacatatcaatattaatcttgaagacagaaggtctaaatgctgtacttaaaaggaacagagtggcaatttgaataaaataaaaaaagacaacccatctgccagctgtcttcaaaagaaccatcccacatgaaacaacacccacaggttcagtgtaaaagacttaaggaagatcggttaaacaattagaaaataaaaaagaaacattatttttacataaaaacatactttaaaccaacagcagtaaaaaaagggacaaagaaatgcattacataatgataaraagttcaatttaacaagaagactcaactattcatcaaacattagagcacttttagtcataaaagaagtacttttagacctctgatagacttaggcagctacatgataatagtggaggaatttaacactctactgacagcatcagacag

SEQ ID NO: 644383 - DNA, 510 bp, Homo sapiens
aacccacagaaactataaagcaaccacacaataaaaccttcaaaactatcagttaacaacttcatgacagtatcaaaacttcacatatcaatattaatcttgaagacagaaggtctaaatgctgtacttaaaaggaacagagtggcaatttgaataaaataaaaaaagacaacccatctgccagctgtcttcaaaagaaccatcccacatgaaacaacacccacaggttcagtgtaaaagacttaaggaagatcggttaaacaattagaaaataaaaaagaaacattatttttacataaaaacatactttaaaccaacagcagtaaaaaaagggacaaagaaatgcattacataatgataaaaagttcaatttaacaagaagactcaactattcatcaaacattagagcacttttagtcataaaagaagtacttytagacctctgatagacttaggcagctacatgataatagtggaggaatttaacactctactgacagcatcagacag

SEQ ID NO: 644384 - DNA, 536 bp, Homo sapiens
tcttcacatcaagtgaagcaccttttcatttggttggttttcatctgtatatcttttttggtgaggtattttttaaggtctttggcccatttttaagaaatyggtttttgttttgttttgttttatattgttgagctttaagggttctttgtatattttaaaaactgtcctttatctaatatgtctttggcaagtagtttatcccagtctgtggcttgtcttttcattcccttctctgttgcagagcagaaactttattttaatgaagtctcatttatcaattttttcagagatcattcctttggtgttatagatacagacattgccaaacccaaagtcactttgatttttctccttttttcttctaggagatttcaagttttgccttttacaagtagacctgtgattcattatctatcaattttgggggagggtataaggtttgtttatatacttttctttagatgcggctatccagttgttctagcactgtttgttgaaaacactttttccctctttgctcttttttcaaaggt

SEQ ID NO: 644385 - DNA, 536 bp, Homo sapiens
tcttcacatcaagtgaagcaccttttcatttggttggttttcatctgtatatcttttttggtgaggtattttttaaggtctttggcccatttttaagaaattggtttttgttttgttttgttttatattgttgagctttaagggttctttgtatattttaaaaactgtcctttatckaatatgtctttggcaagtagtttatcccagtctgtggcttgtcttttcattcccttctctgttgcagagcagaaactttattttaatgaagtctcatttatcaattttttcagagatcattcctttggtgttatagatacagacattgccaaacccaaagtcactttgatttttctccttttttcttctaggagatttcaagttttgccttttacaagtagacctgtgattcattatctatcaattttgggggagggtataaggtttgtttatatacttttctttagatgcggctatccagttgttctagcactgtttgttgaaaacactttttccctctttgctcttttttcaaaggt

SEQ ID NO: 644386 - DNA, 563 bp, Homo sapiens
tgctaggccagtctctcctttttgtgtttttctgcctgctttatattcgttggaagctgattagattgtgcccaccagattaagggtggatctgctttccccarcccaccaactcaaatgttaatctcttttggcaacaccctcacagacccaggatcaatactttgtatccttcaatccaatcaagttgactgacactcagtattaaccatcacaccctcctagtattaaacaatcaacaagatgggacagtaagaaacggcggggagaagacaggaaatgggcgaaccatgactcaactttatctgaagcccgcagaggagaaaagcagggaggggagagtagaaagttcactgtaaagaatctcaagtctccaagaaaggagaaatgtcagaacatagagctggagacaaggaaagacatgagataaaggcagaacccaagaagtcaaaaacaagagaaggggagctcaggccatgaactaaagaatgaagtaaacacaatcatacaacaactcacgttatcatacttaagtcacaggtgcaggcgtgctaggtaaatgg

SEQ ID NO: 644387 - DNA, 563 bp, Homo sapiens
tgctaggccagtctctcctttttgtgtttttctgcctgctttatattcgttggaagctgattagattgtgcccaccagattaagggtggatctgctttccccagcccaccaactcaaatgttaatctcttttggcaacaccctcacagacccaggatcaatactttgtatccttcaatccaatcaagttgactgacactcagtattaaccatcacaccctcctagtattaaacaatcaacaagatgggacagtaagaaacggcggggagaagacaggaaatrggcgaaccatgactcaactttatctgaagcccgcagaggagaaaagcagggaggggagagtagaaagttcactgtaaagaatctcaagtctccaagaaaggagaaatgtcagaacatagagctggagacaaggaaagacatgagataaaggcagaacccaagaagtcaaaaacaagagaaggggagctcaggccatgaactaaagaatgaagtaaacacaatcatacaacaactcacgttatcatacttaagtcacaggtgcaggcgtgctaggtaaatgg

SEQ ID NO: 644388 - DNA, 563 bp, Homo sapiens
tgctaggccagtctctcctttttgtgtttttctgcctgctttatattcgttggaagctgattagattgtgcccaccagattaagggtggatctgctttccccagcccaccaactcaaatgttaatctcttttggcaacaccctcacagacccaggatcaatactttgtatccttcaatccaatcaagttgactgacactcagtattaaccatcacaccctcctagtattaaacaatcaacaagatgggacagtaagaaacggcggggagaagacaggaaatgggcraaccatgactcaactttatctgaagcccgcagaggagaaaagcagggaggggagagtagaaagttcactgtaaagaatctcaagtctccaagaaaggagaaatgtcagaacatagagctggagacaaggaaagacatgagataaaggcagaacccaagaagtcaaaaacaagagaaggggagctcaggccatgaactaaagaatgaagtaaacacaatcatacaacaactcacgttatcatacttaagtcacaggtgcaggcgtgctaggtaaatgg

SEQ ID NO: 644389 - DNA, 563 bp, Homo sapiens
tgctaggccagtctctcctttttgtgtttttctgcctgctttatattcgttggaagctgattagattgtgcccaccagattaagggtggatctgctttccccagcccaccaactcaaatgttaatctcttttggcaacaccctcacagacccaggatcaatactttgtatccttcaatccaatcaagttgactgacactcagtattaaccatcacaccctcctagtattaaacaatcaacaagatgggacagtaagaaacggcggggagaagacaggaaatgggcgaaccatgactcaactttatctgaagcccgcagaggagaaaagcagggaggggagagtagaaagttcmctgtaaagaatctcaagtctccaagaaaggagaaatgtcagaacatagagctggagacaaggaaagacatgagataaaggcagaacccaagaagtcaaaaacaagagaaggggagctcaggccatgaactaaagaatgaagtaaacacaatcatacaacaactcacgttatcatacttaagtcacaggtgcaggcgtgctaggtaaatgg

SEQ ID NO: 644390 - DNA, 583 bp, Homo sapiens
cacaaactaatgtgctcaatttagggaggtcctgagaagagaataaaaggcattcaaatagttgctgtgaatgcactggaaagaaagcaagttgcatgtaggatggactggaacaaataaaccttgtcctgactcagctccttgctggcttgtgactcttgaacaagccgcttcacttctgtaagcttcactggactcatttgtgaaatgggcacagaaatatttgcctcagtgttagcgtgagggtcacccaagattcgatgtttgtggaagggcctggaatacgatagtagctattattttaacaaatgaacagagtggcagtgaattatatagaatcayagaatttaaaaatttttaaagggaagcagcctgtaggaatacctagttcagttttcagccttggctgcacattaaaatctcctgaagagctacttaaaaagaatattgcctggatcccaccccaggacaaataaatcagaattactgggtttggggacagaacaaaggtaattttgcctctttgttaaaacatccccgattttagtgttcagtcaggtggagaacctttgatttaactcaa

SEQ ID NO: 644391 - DNA, 554 bp, Homo sapiens
aagaaagaaagggggagagaagaaaaaaaaaccttagaaatctacctagtgttcaattgtagtatggctgagctattgaggcttaccaattttattgatcttttcaaagaataagcttttgattttgtttattttctgtattgatttttgttttccattttattgatttctgctctaatttagatttttgtatattttattttattttttaatttttggccagggtcttgctttgttgcccaggctgcagtgcagtgcagatcatggctcactgcagcttcacactcctgggctcaagctatcctcctgtatctgtctcctgagaagctaggactacagctgtgcaccaccacgtcaagctaatttttttcttttctcttcttcttttttttttttttagtagaggctgggtcttgctatgttgcccaggctggctttctttgtttttaatatatgaatttaacaccatartcttttcctctacacactgtttttgtggcatcacacaaattttaatatgttatgttttcgtttttatttgttagaaatatttt

SEQ ID NO: 644392 - DNA, 527 bp, Homo sapiens
gtcttggggactttgttaaggcagttcagggaaactaatacagtggccctaggaacaagagagagtgaggataactctcaggggtcgaagggcatgccccaagcagtccacaaggaacacagtgtttctttgaagttcattgtctgaaacccttgttgcattcaattcaggaaggcagtagttccactttttatggtatgaaacgatgagtcagaagagttagtccaccaaggggcagactccagtcacaggggttttcttttcttctctttatcctctgcctaagacaatactcaagatattcacataataaccactctggtttttcagcttctacggatacaatagtgtctttcaaatgtctgaatagtccagcgggtgtggtggtgtgcacytatagtcccatctacttcagagactgaggcaggatgattgcttgagcccaggagtttgagactagcctgggcgatatagcaataccctgtttctaaaaaccaaaaccaaaacaaaacaaaaaacaacaacaa

SEQ ID NO: 644393 - DNA, 581 bp, Homo sapiens
ttttggggttgtgaatttcacaattttagacattaggaattttgatctttcaggatttaaacttttggaatttcatcattcaggattatggcatttgaaattgtgtcttccaggattatgatycaaaggcaaggcactgatgtaaattcctgtctagagctgaagggctgagaactaggagcatcaaaggcaggagaagataaatgtcgcaactcaagaagttaggcaaagttaattcaaacttcttccaccttcttgctctattcaggccttcaaagggttagatgatgcccactcaacatcggagagggccgtctgctttattagtccaccaattcaaatgtttatctcttctagaaacaccatcacagacacacccagatattttaacctggtatttggccccctggggcccagacaatttggcatataaaattaagtatcacagtgcggatagtatatttacttaaaaatgttgtgaatattagcttgttaattaaaaatctatggattttactttttaaaaatctggatttccattttcttttatacaggtaaaaatatcaagaaatactgaagcc

SEQ ID NO: 644394 - DNA, 493 bp, Homo sapiens
acaaagctgagagccacaccaggtggtagacaggccaccaaggtaaatgtccccctgaagaaagctgcctgaggcccaaccagccctgccccatgtcacaatttgtcactkttgtgccacacatgccactttaatagtgtgcactgaagactagacatcacgtagaatcataggcttatagagctagaaggagccttagagatgagaaggcctggtctgggctcttcatttgaaggtgagagtgctggccactagaaaggctagataacttgcctgtgtactatgcagagagtgagttggtcagggccagtccccaaggcagtgtccttctggccacactttcccactgcccctctacacaggtgcatctgtatgtgggctctgggatcaatcagccggaagaattttacagacagtaagggtgagtttgtcagggatatggtggagtgctagactcactaaggcagacagcgccgggcctgtatcaccctct

SEQ ID NO: 644395 - DNA, 550 bp, Homo sapiens
gagatttgaagatgctcaccttgaagactggaaggaagtggctacaaactaagaaatgctggaaactgccagagttgaacatataagggacacgttctcacctgcagcctcccaaggaaagggaaccctgtctacaccttgagtttggcctagtgatactgatttcagacttctggcctccaaagctacgcaaaaataaaattccactgtttgaagtcatctaatttgcataaatttgttacagcagccacagaaaactaatatagctttcttaaggtgattgtgtgggctgytctgatgtttgtgtcttaagaagtgggtggaaatgtaaaaggataataaatctttcttaaaggaaactttacacaagaaggcttaaacattttcatgattcatgcatatatttgtcttcaacacaaacattaagaaatgaaaagattgcacacagaccctttccttttcaccacttgccaactttccattctttgtctcatgagcaattatctaaagtgaaaacgttgtcctcttgaaagtagtttacacagagata

SEQ ID NO: 644396 - DNA, 612 bp, Homo sapiens
actgggggtatgctgtgtgagccacactgaagggacaccttctccccgctccctgggcctgtctccctagtagccacctagtcattctgaggactttaggctcacttttgtgacaaagcgctttcctgatcccctttcagatgttcctgaaaagatgtctgctcccttctctgtgctcccactggcactgtccaggcagctcttttgcatgccacttcgtttgctttcccctccatctcgccactagagcacaagtcagttgagacgatgcctagacttgatgtgtctgtcccccttgtgctggtctagcgtctagtacctaagaggggcttaacagtaacttgtggatggcttctccttccacctttgtagggactggcgttagctgttattsgccaaagggggtttggaagtggtcagaagggtgatgttgagggtatctcctgggccccagggtttgcagttcccttaatgcctattctaagcaagagatgaagactcttgtctgcatctttctcaggccaccaacagtggtgtttatctgttcctagccctatgcacagagtcactcattcatcacatgcaacccaatagggtatcttgggaagctat

SEQ ID NO: 644397 - DNA, 533 bp, Homo sapiens
cctttgaaaaaagagcaaagagggaaaaagtgttttcaacaaacagtgctagaacaactggatagccgcatctaaagaaaagtatataaacaaaccttataccctcccccaaaattgatagataatgaatcacaggtctacttgtaaaaggcaaaacttgaaatctcctagaagaaaaaaggagaaaaatcaaagtgactttgggtttggcaatgtctgtatctataacaccaaaggaatgatctctgaaaaaattgataaatgagacttcattaaaataaagtttctgctctgcaacagagaagggaatgaaaagacaagmcacagactgggataaactacttgccaaagacatattagataaaggacagtttttaaaatatacaaagaacccttaaagctcaacaatataaaacaaaacaaaacaaaaaccaatttcttaaaaatgggccaaagaccttaaaaaatacctcaccaaaaaagatatacagatgaaaaccaaccaaatgaaaaggtgcttcacttgatgtgaa

SEQ ID NO: 644398 - DNA, 583 bp, Homo sapiens
aagtaaataccccatgtttattgcagtcttattcacaatagccaagatatggaatcgatgtgtctatcaatggacgagtggatgaagaaaatatggtacatatacacaatggaatatcagctattgaaaaaagcctgaaatcctgtcatttgcagcaacatgcatgaaactggaggacattatgttaagtgaaataagccaggcacastaagacaagtatcacttgttcttactcatatgcgggagctaaaaagagctgatctcttggaggtagaaagtagaatggtggttaccagaggcttgaaagtgtgtatgtgtcgggggtagggagtgtagacaggttagttaatgggtataaaaatacagttagatagaagaaataagttctggtgttcattagcacagtaggatgactacacttaacaataatttattatacatttcaaaatagctggaagatttggaatgttcccaacacaaataaatgataaatgtttaaggtgatggatatctcaattaccctgatttgatcattatatgttgtatgcttgtatcaaaatatcacatgtactccatcagtctg

SEQ ID NO: 644399 - DNA, 611 bp, Homo sapiens
ttttaaaacctgtggagaattaacaaaaaataagacaatctgtacctgctatccaggttccacaatttagtcaataaaataagatatataagaaaacaaccacaataactaggatagctactgatgtctgcaaatggtatagacagacaaygctctaaaaaaacttgttttcatgtagaagcaaacaagtaaataaactaagtatgaaatctccttcctttcaatgaaagtgattctattccaagtgaatatgttagaactgatgcatgctcaatattacctgcacttctatttggattttcaaaaaaaaaaaaaaaacatagtagaactagatttattaaaacttctgttactccctctttttaaatgaaatctgaaaatatgaggctcaggctcaagtgagaaggataagctgtgaaatggaacatgccaaaacagaatagactgtatgcagggcactggtataggtaagaaacagatgaagtttttagtgaaagcttcttgactttaattcaagtgagaaatagttttgaacaaatactatgcccccaggcactttttagccagtggaccagaaggatatgtgtgtggtttgttgggatagaaataca

SEQ ID NO: 644400 - DNA, 560 bp, Homo sapiens
aaaaaaaaaaaacctttcatcttgtcacttaagttktatctagtgcaatgttaaaattaggctcaattttctagcctgttaagagcttttttactccaaattctgtcatctaacaagttcgcaatttctttcaacttcatatcaaactcaaatttgatgtgtgtcatcttcgagaaaataaatcattatttattaagcaggtctatggtcatttccttttttaggtagtgcatattttattattcaattttattagatacaggttctactaataggaatcagagtttgattccataaatatatatttggcttcatgttacttctctcattgtttattttttcatttcttgttctctagaaatttcaaggagatttctctatttctatagaccaagttccaattttagatataaaaaacatttcattgaactcagaacattttcttcagccataatatacaccactgttggtaatttttaaaatacaatcttaccttctagtttacccttcaaaagccagatggcagaaacattctatgagaagacaaggtaatgaaatta

SEQ ID NO: 644401 - DNA, 490 bp, Homo sapiens
ggtttggtacacagcgtggctttttccaacacacaagatgtgagaaatgcctttttttggtatttcaatgaaacaagtgtcacatgctctctgtatgccaccagcactgaactgayggtaaatccagtggcagccttttctgagtctccttcctctacccatggagctgccattgtccggaagctgatatctgtttcttctcgtgtccatgaccaccagtcacctctgacaggctccatgtgcaagcatagacatggggatatccatgcaggctggagtattctgagcttagggtccagccatccctggaagcatcaccccaccctgcacctgccagctccctcatgctgtgaagagcaaggcaaggtgcccacaagtcctgagacacaaaagcctctgccccctttcccaacttgggcaaagctcttggccacattccacccatgtcccatggctcccaaagccccacatgacctttgggccatgcagc

SEQ ID NO: 644402 - DNA, 554 bp, Homo sapiens
gcaaagactggaaaaggaacagcaaaaagttgccagcaatgatctctgaataaggaaataatggatgattttttattttttctttctaattttacatatggccctcattttctacactgaatatagagacttttatatccagctaagaattatcatgttcgtaaatgaagaacaggaaggcctatgcaggaaataatctgaaaatagcagctaagacccttattagaccttagactctccccgccctgcgcccagttatgccgccacgacaggcagtcaggacccaggggagcatgaaccccaggtgtcgatggactccccacaaagggtctgtctgcctttcctgtcctgtgacttcagcggctgtacctgtcagggaaggctggctggtgggaggagcagcactggaacctcgctggtctaacacygcagaagtttctgtttccagctcaatctgtagggcagaggggaggagaggttggggggactctactccacaccttccttcagggacccagcttgctgctctttgggggtgctgccatcctcaacac

SEQ ID NO: 644403 - DNA, 634 bp, Homo sapiens
taatgataaaccaatcttgcatatttgagcagactttggacagttcagaaaatttatgtgaatctacatacacagattggaatcaagttgtgaaaaaaatgaatcaaaatgcattaaatgtaaaaggaatataagtatattcgtcagacaaaaattagtggtctgacacccacttccaaccaagtaggagtaacagggaccagacttacctttatgcatgaaacaattaaaaaatccgaatacaatgtattaaataacagtgttcaagacaccagacaccaggaaatgaggagcaatgatgcccaacaggcagaaaacgaatgaggtgagcactatgatggccctagcttacttccttaatagagtttccagttacactgtggggaagggaaacccaggcagagcccaggaaccaccatgagttgaaaagaggaatgtgaatgtccagagaggctgaggcagctagaattcacaggacacagtgtcacggaggatagttccacacacagagagaaggccagggagctgcagagggtcccaccttcccacaacttcaggtgagtactgatcagttcwtgcatttgcggaaatgatcagaaactggggaacgaacaatctggaaggaatatagaaa

SEQ ID NO: 644404 - DNA, 574 bp, Homo sapiens
ataaaactatctatatcatcattttaataaatgtaaagttttccgctatatgaagctaggataacttatttaaccagttctctggttgtccaattttttcactctgaagagttagactcaacagcttcctttcgatttgcggtttacattgttttgtgaagccaccctcagtaaactaccaaaaagtaacaagagaatgggcttttgttccaatgaaaatgtatccccctctgtagaccatcttccctccttcttccagctgtcctggaccagttctgccrtgggttttcatctcgcagtatgagagtcctctggccaggacaccttgcttcagggtcaggctctcctaaggaaaggggtactatatttgttcttctgcccacctcacctactttggcttttgtgtagctcttggctatccctataattttggctatccttgtttccatatccttctgtatctgggcctcccgggagttagttattctatgtgtctacctgtatttgttccatggcctgactctgacaatggatgcacccatcagtgcgctagcttctacttgcaggtctcact

SEQ ID NO: 644405 - DNA, 585 bp, Homo sapiens
atgaaacttgcctgctacgaaatgctcttgcatcattatacaaacacccacactttcacacacatggctctactagagctcgttcctcatgatagctctttttcatcccttttggtccaggaagacctagccaggaacaacaacaacaacaacaacaacaaacrggcaacagtgttagaggtatgttgtaatgaaaagctactttcaggtcattatctttccgccttgacaagtatctggcaagagagcagatacaaacataagcaaaatgaaatcaaggtctttatactgtacctagaactttaaagtcactttaccttgcctcttcattttttctaactatattgaaatcatttttccttctgatttcacatatttttttaacaactaataaatactataagtaaagtttgtaccaaagatagtgtggtgggatgttattcaatttttttttccagtttagaactgggtcttcctcctgagaagaatcacagaggcatacaattctctcttaaaatttaagtgtaaaattgttggacaatttattttttgaaacatctatgatgttactcttggatttaataa

SEQ ID NO: 644406 - DNA, 585 bp, Homo sapiens
atgaaacttgcctgctacgaaatgctcttgcatcattatacaaacacccacactttcacacacatggctctactagagctcgttcctcatgatagctctttttcatcccttttggtccaggaagacctagccaggaacaacaacaacaacaacaacaacaaacgggcaacagtgttagaggtatgttgtaatgaaaagctactttcaggtcattatctttccgccttgacaagtatctggcaagagagcagatacaaacataagcaaaatgaaatcaaggtctttatactgtacctagaactttaaagtcactttaccttgcctcttcattttttctaactatattgaaatcatttttccttctgatttcacatatttttttaacaactaataaatactataagtaaagtttgtaccaaagatagtgtggtgggatgttattcaatttttttttccagtttagaactgggtcttcctcctgagaagaatcacagaggcatacaattctctcttaaaatttaagtgtaaaaytgttggacaatttattttttgaaacatctatgatgttactcttggatttaataa

SEQ ID NO: 644407 - DNA, 563 bp, Homo sapiens
gcatcacttgagtggttggatagggaaacatttgagcaattttatggctcttagagaaggtagggaacatatttttgtgcttataaaaaaattgttcttttgcttttactgaaaacatttactctctctrtgcggccagcctttaacctttgagtttaaaaatctgaggcctcatgatttctactgggaagttaagacattacacaatgttcactcctattccatctttaataacaaagcttggaatgtgaatcccaaaacaaagttatggcaaaatacataccagaatagcaaggaaaataaccatacagaagttttgatggacatgcccactgcataaacaatgctgttacctctagaacatttaaggaaacagtattatctgtgagtcttgggatgctggaactgtaagttttcctaaatgcatcatacagatgccccaatgtttgcaaaaattggaataaaggtaaaaggaaaacagtatggacttcctgtaagcctactgaaaatttgtgtcagatattttaaattaaaaatagtacattaggccaggtgtggtggct

SEQ ID NO: 644408 - DNA, 649 bp, Homo sapiens
tctgcttcctagaatgccttcaatatccagaattgcagaacaaaaccacacacacatccccatgctgaaacacacacacacaaacacacacacacatcaccaaacacacacttaaagtttaatcatyctgtttatcctctgggttaccagaatctggaagaaggaaaatgtgaaaaagaaagactgacaaaagaatttctcattttaaacattgcagctaattccattaattatgttgtgatgcaattaagcatttcatttcagagctattaaagtttaaattatttattaataattacagatcattacctgatagtgttcactctgcagaacaggtgatgaataatttagcagctttgacatggttttctccttacagccctctttggatggtgtctatatttgtacatgtcagcttgccgatatatgtgcctgtttgtgtgaacctacctgttccttctgtttatgcaggatcttcctcatttctgaatatagcttaaaacttttcacccttaaagttttatgacatagattgcaggtgagatagcaataacggaacgttatatagataaaacgtgcattttcttcttatggttgaaatggacttcaattctaagggtaaatgagaattacgcttattcattacaga

SEQ ID NO: 644409 - DNA, 596 bp, Homo sapiens
tataactaccagtcttatcaagaaatagactatttccagcagcccagaagccccttcagatcccttccctgtcactaatacctttctccaaaagcagtcactgtcctgatgtttaccacaatagagattatggtttttttaaactatatatgcataaaaatctagaatatgtataattttgtgtctggcttgaggctcaacattatgtttgtaaattcatccacattgcrgactatagcaataccttgttcattttcattctcatattgtgttccattgtatgacttttactaaaattaatccacctgactatcaatatttgggttatttacagtattaggttgtcatgtatattgatagttcattcttttttattacagagtagtattctattgtatggatataccacaatttgtttatccatttacctgttgatggacattagggttgctcccagtttttggctattacaaggaaagctgctataaatattcatgtgcaaatgtttgtatggacatatgttttcatttctcttggctaaatacctaggagtggaataagtaggatgcatgataggtgtgtgtttaatgtcttaa

SEQ ID NO: 644410 - DNA, 520 bp, Homo sapiens
taggccactggatggtgtgttggacactagggataaagttagattaagcagtcttgtcctcaggtcccttgtcatgagtataggatggctatgatagacagaggcagggtgattcccagacccctggcagaatgctcaggttggggtgggagtgatcgtactgtggcgcagctcctgggagggcagggttggtttcagaggcagcagccataaacagggagagcaaacacttatagccaccccgtggtggctataggtagtatagcctttccttcaggtgctcttaaatgtgcagtggccctggtactgggggtggcagagttgctgctaatggctcacactctgacccttgtggcagcagccagcagcagtacccggatacatgtggggraaatcaatgaggctccaagaatgtggagatgcaggaggtcttgggccccagtacaggatgcagtctagtgggggctaggctctcaaaatggtgacctactgtagctgcttaggcttggggtgtgtgtga

SEQ ID NO: 644411 - DNA, 597 bp, Homo sapiens
atagttttggtagttttcttcctggtaaaaatactaaaaatagcagcacaagttagtgagacctaataatatcttagaagatgcatactaaagaatttaggaataaagaattcaaagtatgtgatttaatttctaagtattcaacaagatagacaaataaagtaaatctgtaagaatatttgcttaacaatcacaataacaaataccaattattgttaaatatagattatatgtgtgtgtrtatatatatatacatttttctttctttcaatttttctatatgtttagaaatttaggtgacacatattagggacaggaaatagcagaaacctcaaatagcagagtttctcttttgcatctttgagtaatgctcagtctcaaaaatgccatttttgagtgctattgtttaatgtctcgatctaaacatatatttttattattatgctctaatatcagaattggtgataccaagagtataggtatatatcaataaagatttgctgtccacagatattttagggtcttataattgttagaaagcccaaataggttgaaagctgcttgtttactatacaaagttgagcatcaaaatgacta

SEQ ID NO: 644412 - DNA, 597 bp, Homo sapiens
atagttttggtagttttcttcctggtaaaaatactaaaaatagcagcacaagttagtgagacctaataatatcttagaagatgcatactaaagaatttaggaataaagaattcaaagtatgtgatttaatttctaagtattcaacaagatagacaaataaagtaaatctgtaagaatatttgcttaacaatcacaataacaaataccaattattgttaaatatagattatatgtgtgtgtatatatatatatacatttttctttctttcaatttttctatatgtttagaaatttaggtgacacatattagggacaggaaatagcagaaacctcaaatagcagagtttctcttttgcatctytgagtaatgctcagtctcaaaaatgccatttttgagtgctattgtttaatgtctcgatctaaacatatatttttattattatgctctaatatcagaattggtgataccaagagtataggtatatatcaataaagatttgctgtccacagatattttagggtcttataattgttagaaagcccaaataggttgaaagctgcttgtttactatacaaagttgagcatcaaaatgacta

SEQ ID NO: 644413 - DNA, 484 bp, Homo sapiens
ctctctctctatctctctctgtgtgtgtgtgtgtgtgtgtgtgtgtgtgtgtgtgtgtgtatgtgtatgtgtgtgtgtgtccatgggtgctggactctatgaggtaaagcatgtccccctggggctggcaaccaggatgagtggtcccaccctaggagatttgctattggtatactgaccacccttactcctgctttgcctttattactagaggtagcaaccactcggattcttttcctcgaacattttactaaggaaacagagtatggttggtcagatgctgttgggcattggagctttaaggtcacacaggggttgggccatgacaattcaaaaccatatacaagctgaatttaagggagcakaaactaagggctagccaaaaatggtgcagatccagagagaagcaaagagaatgagagagtgagagagagaaggaagcagggagagaggaagagaagagaaagagggagagggagagaaa

SEQ ID NO: 644414 - DNA, 563 bp, Homo sapiens
ttgtgtatgcatttattcaaaaacagtagtaggtttttgagcaccgaccactatgtgtccaaaagtgctgggaacaartgaagcaaaaatggaggactgtttcctgcacttatggagattacagcctagtggggtcaacaggtaaatgattaactatagcgaaatgatgtcatggtttgtgcaggacataggaagaggtaatcaattccatcaagcacggggtgagggcatgtttacaaaggcatcacagaaggaattatgtttatcttgagtctggaaagatcaccagttacccaacaacataacatattccagaattcaagttcttcagtgtggcagtaatgtagattccattcctctccttctcccctttctaccccaatctctttccttccctttttcatttcagtggttcacatctgagggcaatttgccccccttcctccacctcagggatatttggcaatatctaaagatgacatttttggttgtcaccacttgggggatgctattagaatctagtgggtagaagccaggaatgctgctaaacattctatgatgca

SEQ ID NO: 644415 - DNA, 545 bp, Homo sapiens
tatgatacagctgcacagaaatatatcctttatatccttattctataagcctttttaattttttatttacttatttatttttgagatggagtctcgctttgtcgcccaggctggagtgtgccgtggagtgatcttggctcactccaacctccacttcctgggttcaagcaatcctcccacctcagccttctgagtagctaggattgaaggcatgcaccgccacacccagctaaatttttttgtatttttagtagagatggggtttcaccatattggccaggctggtttcaaatgcttaacctcaagtgatctgcctgccttggcctcccaaagtgctaggattacaggcataagctgccatgccaagcctaatttttttttcatcttttactttttaagcttttttgttacaaactaataccccaacacacacattagcctagccccacacaagkttaggattattaatagcattgtatttttctccttcatgtcttgccccactggaagatcttcaatggcaataatatacatgaagctgtcat

SEQ ID NO: 644416 - DNA, 416 bp, Homo sapiens
gaattctatccctttctccttttttgtgctcttaccatagaagaaaagtattttgtcatgatctaaaagcatcttactaaaaagcattgagatgtattaccaatcagcagcagagattatctgttcaccaacttgaactcatctagcttgtatcaaattctcagataacaaatttgatcttcgtcttgatctgctgaatgtcttgcgtgtgtaactaatccctccaacccagagaaagctacatgccccacctcattacttcagcttaaataatacattataaatgaaatgcttattttgtgtaatgtcacaacaaacatttaatttagtcatttactgaaagctcaattactcttacagtatgaatggaaggaggaagaagaggaggractaaaaccatctcttggaggagatat

SEQ ID NO: 644417 - DNA, 468 bp, Homo sapiens
ttttttttttttgagatggagtttttgctctgttgcccaggctggagtgcagtggctgaatgttggctcactgaaacctccgcctctggtttcaagcaattctcctgcctcaccctcccaggtagttgggattacaggtgcccaccaccacgcctggctaatttgagtatttttagtagagatgaggtttcaccatgttgcctaggctggtctcaaactcttgacctcaggcgatccacccacctcggcctcccaaagtgctaggattatgggcatgagccactgtgcccagccttactgcagctatttttctatgacagtaacccttcaacccttttattttcttcatacacygaacagtgtctaaaatggctttcaaaaatgttaggtctctgctgccagaatataaggacatgcaatattgtattctggcaatacactgcatgtttcgttttccttgttgtctcg

SEQ ID NO: 644418 - DNA, 592 bp, Homo sapiens
attatctgctaatgctttacacgatttggatgtagagctgcatagttgacatcttgggctctgaattagaaagactgsagtccaaaccccaaatccacccctttcccgccctttcaccttaggacaaattacttattattgctaagcctcagttttcttatccgtacaatgagtataataacaacaatagggtaatcatatttaccttaaacattatgattaaattttaaaattataaggctccacactacttagaatagaacctgaggccttggcacagtggctcatgcctgtaactctagcactttgggaggcagaagcaggcggatcacttggggtcagaagttcgagaccagtgtgaccaacatggtgaaaccccgtcactactaaaaatacaaaaaattacccaggcatggtgacacatgcctgtaatcccagctgctccagaggctgaggcaggagaatcacttgaacctgggaggtggaggttacagtgaaccaagattgtgccacggcactccagcctgggagacagagcgagactctgtctcaaaaataaacaaacaaaaaccaaagaaaagttagaatagaa

SEQ ID NO: 644419 - DNA, 592 bp, Homo sapiens
attatctgctaatgctttacacgatttggatgtagagctgcatagttgacatcttgggctctgaattagaaagactggagtccaaaccccaaatccacccctttccygccctttcaccttaggacaaattacttattattgctaagcctcagttttcttatccgtacaatgagtataataacaacaatagggtaatcatatttaccttaaacattatgattaaattttaaaattataaggctccacactacttagaatagaacctgaggccttggcacagtggctcatgcctgtaactctagcactttgggaggcagaagcaggcggatcacttggggtcagaagttcgagaccagtgtgaccaacatggtgaaaccccgtcactactaaaaatacaaaaaattacccaggcatggtgacacatgcctgtaatcccagctgctccagaggctgaggcaggagaatcacttgaacctgggaggtggaggttacagtgaaccaagattgtgccacggcactccagcctgggagacagagcgagactctgtctcaaaaataaacaaacaaaaaccaaagaaaagttagaatagaa

SEQ ID NO: 644420 - DNA, 585 bp, Homo sapiens
gaaacctttgaacatgggagcacagaatagtgttaaaaataagaggttctaagtctcagtaaaaagcaattaagtcctcttatgtcctcatctcaagcaacacaattaacctcttcctgtattaacagaaatagaaattttctatatagagagagtgtatcttgggggttctagatttggggacataagcacctgaaggcagacatgaagcataatattgaaatcaagacaacaattcaacagtgatacaggggcttttagaatgccttacctccccagttttccccagctcagctcctgaacagggcaaagaggatgactctctggaaaaactaaaaagtcaaaaagaaactatctctggacagtgagaatttgagaatttactaatgaaagaactcagctagccaatatttctgggaagctcatcggtcaaacggatccttgtttatattcaygtatgcagagtttgcattgaggattgtaatgactcaaacacagactcacaggtgttctctttccagtaatggtgtactacatattttgcaataagtctctcattgagaacacctaagaaaggtaggcaga

SEQ ID NO: 644421 - DNA, 546 bp, Homo sapiens
ggcatgtgcataagctacttgtcatgtagaccaagaagctgacctttataaagagaagaatgaagcaggctgatggacgggaacaacgatgagaaatggagaagttctggtggatttctagttccagattttacctctttcctgaagcacaatacaggcctagcctctcttattatctgacatctctacataggagaagaattcagatgaatatgctagtatagcgatattagttgtttttttttwaaaaaaactgttgtacactctaactgatgggtacccatcctgtattagttttgtactgaaatgttttctaccttctgaatttagggccattggtagtaaattttgatattttaaatatctttctcacaaacactctgagggattgtagacaaaatattttctattcaatcattgaagaaatatatagacaactgctaagaaggttgtaatttgagagttgttaagtattttaaacatcacatatacctttatattcatataggaaatatctattttttttgataagctagcttaagttgg

SEQ ID NO: 644422 - DNA, 546 bp, Homo sapiens
ggcatgtgcataagctacttgtcatgtagaccaagaagctgacctttataaagagaagaatgaagcaggctgatggacgggaacaacgatgagaaatggagaagttctggtggatttctagttccagattttacctctttcctgaagcacaatacaggcctagcctctcttattatctgacatctctacataggagaagaattcagatgaatatgctagtatagcgatattagttgtttttttttaaaaaaaactgttgtacactctaactgatgggtacccatcctgtattagttttgtactgaaatgttttctaccttctgaatttagggccattggtagtaaattttgatattttaaatatctttctcacaaacactctgagggattgtagacaaaatattttctattcaatcattgaagaaatatatagacaactgctaagaaggttgtaatttgagagttgttaagtattttaaacatcacatatacctttrtattcatataggaaatatctattttttttgataagctagcttaagttgg

SEQ ID NO: 644423 - DNA, 595 bp, Homo sapiens
tttgaacagatgaacactttataaagatcactctgacagcagtgctgaaagtggattgggagaggaaggtgaaagaacgtagagacagggagacctctggttgactgatgcagaaaataatgaaggcttgcactagagaatagggagtgatgatggatagaagagacagattgaagagaaaataagaagggagagtcattaagactttgataacataagatttcagaatggtatctttacttctttctctttcaaccactaaaatgtctcagtggcgtctcttcttttggcacactttgastaagctgtgccaaaagtggaatccctggtgctgtgccttctttttgtctctgctttccgtggaagtaatgtgggctgccatagcttcatctgcatgaaggatgactcagtgtcaatagcactgatctttatatcctcttatcaaactgctagtaggctatctccgcatacatgtgctgccgattcctaaagcttaccaaaataaaatgaaactcaacaccttctccccaaaactggcatctcaccattatcattaaaaaatatccaagtcatgctccagtttttccaggaagaa

SEQ ID NO: 644424 - DNA, 637 bp, Homo sapiens
cctcatatttatttccactacatttttttcttgatgtacaaaattatcttcactaactgttcttgtccctggtctgctacaaaaatgcctcaaaattctaaaagttaactttagtttccccagaccattcctttctgatttagggttttatcttgttttwgtatttgaccctggacactaaagtaatctacacaaacttcattctataaatgtttaatctcaactttgtaaatattttgttaaatagtttatgtttctattaaatcacagactttgaactggaacagcagctctccctgggtccccagtctgcctacccctcctgaaatttggacttactagcttccataattgtatgggacatatccttataattcatacatataggtacatgtatacacatgtatacatgtgtatacatagcctgcataacctattagctctgtttctctagggaaacatatataaggtttcaaaactatcaattattattacaaacattatgttgtgtgcaaaaggcttggatgattcaaatataaatattactcagttttattgattatgagcttgtaaagaaaaaagatcatgcttatttaatgcttactatatgacaactctttttctaagcattcttcta

SEQ ID NO: 644425 - DNA, 644 bp, Homo sapiens
caatatataaatgaatgggtatggctgtgttacaataaaactttatttacaacaataggctgtgggccggctttggcctttggttgtagttttctgatttctggtttctgatttctgctggtcatactatttccctcaacagtgacttggtcaaaatggcacgtgcatgtgacccaatcttggtcaaggaaacatgaaggatatctagtggggacctctaggaaaggtttccttaattctaaagagatgcagttagagcctctcccttgtttttctctggatcttgttgtggtgggagcaggcattttgccacctacctgaggcagacaacaggctgagagaatctccgagaagagagagaccctgacctacatgacctggagcccactctgtcctggtctccaagctatggaaattaataaatgtccttctgtgtaaatcatttagtcttttttttccttccaagaaagcgtaataattgatactattgtattcctgaaagaagatgttaaaatgataccaaaatgatataagttgagtttggcttctctatggggcaaagtaatatgctttgaattacatttctgataaagaatacagtgcccaamttttaacagaaatgataaaaaaagccatgtcaaatc

SEQ ID NO: 644426 - DNA, 555 bp, Homo sapiens
cagtactcccattggaggttccccagtctagaaattcttgccttacactggcagcttagagtccctgcccagaaggatgtcagttatagaactgatccagtcacaaggctgtggaaggcttaatgcacgtcttgccacaggctgagtctgtgtcttgactccttgccccccaggttcacaggttgctggggccatcmctgtggcaggccatggatcattggggtttttctttaaggtttttcatgagctaggatgtcctttcccaggccctagcatcaagcattaggctttttctggcctctcatcttgcatggagccccttagttccattatccaacacatggcttacttctggactttctgccagacacagagaggagcagacacatgccttcagctttgctcatttccctgcctttctgtcttattgagggtatgcagacatgtttatattgtgtttgagcctgttggtatcctttttgcttttaattgtttatctatcattgctgatcatatgcaccattggggatatcaaatcaaacgtgtgaacatact

SEQ ID NO: 644427 - DNA, 632 bp, Homo sapiens
gcattaaaaagctaatctattttttatttccccatctagatcaagactctctaataaaataaattgaagagatgattattcactttatgcaaaagaataaaatactaatamatttcatgtagttaaatctaatagcacatttagattgtgaattgcttttaaaagattcgatttgcactcaacccttcaaaattacatgtttgtaaaaaatattaaatatgttatgtagtagacagtagaaatctataagaactttccatatttgagatggactaattttaatccatattcagatattggtaatctgaactgcagctgctgaaattagtggtgcaatgagaaggacagtaaacacagtagaggggaaagcaatttcatctgaggatcgctaaaaaattttttataacaaaattatttctgtgtataaatgattatgccttatcagagaagactgaaacaaaagtataaatatttagacataattaagattgtggatttcttttagcctacatcacactgaaggaaatgaatacatagtaagaacagtgttgctgccctaatcaacatgtgtgtgtgcgtgtgtgtgcatgtgtgcacgcatttgtaattgtgggtggaaaagggtgagtata

SEQ ID NO: 644428 - DNA, 601 bp, Homo sapiens
ggatgctactttcagtaaatgttgttgggccaaatgtatatctacctgttggaagacaaccttggtccctcttaaaactgtacataaaaattaattccaggtggattttgacctaaatttaggagggaaaacaatgaaacttctaaaaggtaatataggagaatattttttatgacgtctgatttggcaaaggtttcctaatcatgacacaaaacgccctagccttaaaggaaaagaatgataaattgaactgcagaacttcttttttatcaaaagaccttattataaatgtgaagagagaagctacaggataggagaagatattttcaaatgtttatctgacaaaggactctcatctactatatataaagaactgttaaatcaataagaaaaaaatcaatcaacgccctgaaatgggcaaaagcttgaaaaaaacacctcagaagtagatttccaatacctgagtagatgacaaacatatacaaaggtgctcaaygtcattaatcagtaacatgcaaattaaaaccaaaattagataccatttttgttcaccaaaatgatatgtttaaaaacactgcaaccctaagtgtttgagaggata

SEQ ID NO: 644429 - DNA, 464 bp, Homo sapiens
ttccagtttttttcttgaagcttaagcaaagttttaactatgtcctggtaagctartgtgtaaaagctatgctctttcaaaagacagtttctacaattgcagctctcatgactctaacgccttagactgagcatccctgagaggttattatttgatttagcaagagctttaactttataccagtccattataaacagctgtggttagatactttgaaaagtaaaaatgagtcacttgggatataaattgcctgtcccttgaaagtaatttcaaaaggtactctgtctcgacagaggatgcctagaaaagtataagaaaggagtaaaatcatttgacttaattgcttggaattgtgtaaaaataaaatctctatgtgtccattgttttccttatcagacagcatctggtttgtgatgaccgatgggttagggttagggttcacttgcatgactagcagtcagtgc

SEQ ID NO: 644430 - DNA, 555 bp, Homo sapiens
gaattcatttttgagtgactcatgggaaactgggtgttaagtgactttttgggggctgggatgtggctgatacggtcagtcatcagagagcaacacttggtgtccctgtgcctttatggaaaaagggagaagccagctgcatgccttttgtaggctggacagaaagatggtgttacttgttcctcatcctttgttgtccttgccaaggctctcttgttggccatgtatacatgtatacacccttgctccactggttttgggtttgatctgtgacttggaatgtgagtaggggtaccatatgcccattcaaccaaaggcattaaatgtacttgcatggtttggtttgctttcttcggcttctgccatctgtcatcagaacagcawtccccaggaagctacctcccatccagcctgggtcccaaaataagtgacatgtagaaaattaaactcaacccacagcctgaagcagtgtctggaggtccttcccatcacgtgtcttcccatccttcaaccacctcctgctctctcctggcctgggccatgtggacacagtcg

SEQ ID NO: 644431 - DNA, 558 bp, Homo sapiens
tatagaagagtttttgaaacttagattcttaaagggaaaaataataggttggcctgaggtttgaaagaaatgttgtaacagtcactgtgaggcatccttcaggaaaaatagtgctttcagtgtttataagttattcattagaaaactcagggtctagctggctgacactgtaggtgscaaagcaaaactttcatcctcattggaagctaggagctataaagccaggtgtggggtgtgatttgtttctggagggcagctctaaatcacaagaacataaagaaagggagagagaacaagagctagagatagagcagccttgctgttttgtccatgaaaggaaatgctacatgtcagaggaagagctgctggagaactcactagcagagggaggaagcaaggagaagacctcattttgggaagataatcacaagagctcagagccaataccataatttttaaactcaaaaaccagaactgtacagccttaagactctgatgcaaataagatattcagagttagagacccagcattattaagtagatgattataatgagaga

SEQ ID NO: 644432 - DNA, 616 bp, Homo sapiens
gcaactttgtgctttttgataactaataaataggatattggaactttcttattttgcagcccagtctacagaagacatgtgaaagatatttatagctttcataactgtgatcctactccttcctaattgccaagtagtcctccccacccccatccccctttttttttttctgtgaatcatctaggacttagagtcattgcaactggctagagagggactttaatcatcctgaagattcccagatagcttgggagacaataatatcatgtaaaagatagctgctttcttccctttggtttggggacttggttaaagaaatgttagtagatggacaatatttagattttatattctgtgccagtagtgctaagaaaagattactrgcttcaagagtgagcagttctaggagagcgagaaaccacagctaggagctccaccagcccttgaagatgcagagacatttatccagtccagagggatggggagataacacactgagtatggaatagtggttaagagccctggtttcacagttaggctaattcagttcaaattgtacctctattactcattaaggggtgacattagggaaatcacatgatgtttgagcctcaat

SEQ ID NO: 644433 - DNA, 599 bp, Homo sapiens
ttgagtaggttcatcttggcttgtgcacgtcttaatctgagtaagacaaatattattcacagtgtaggcgtggcagctcaggaggacaataatggaagctccagtttcacatttttttttatttggtgtacattctatgcatcaaaactatataggatgtttcaatgttcttttgagagttcaagctgagaaaactcccgtggttggtgcatccctgaaatactaatcaccacaccaaaattttacagaagagagaggaaaagaaagagggtggtggtgggagggtaggggtgagtggttataaagttacaaagcattagaawatttcctgagtgtcaggaatttaaaattaaaggactcaaacttagaaaacctctgtggaaatgatgatatgaatggacatttgcatgctcaaccttgatgactggctatcaataaccctgagcaacatcagggtttgaaactattagcctctaactaccctataagaactgcagaaagtcaactgactgtgactagtggctgtgaatgttctttaacttcatcatttctaatgcttttacagtgtcccctaactccacataagcgataggtgtcag

SEQ ID NO: 644434 - DNA, 540 bp, Homo sapiens
gtaccaggtgcctttacttcctgatctgttttgggattctgcagacgaaatctgcctgcttcttgttggcctgcagctcttcaagtacttagatttcagctttctggctgtgctgtgtcatttcatcaattttctagattccaatattttgttgacttctattgtataatctgccctgtctctttgcccttatcaccttgttttcttctttactgtcgttttagtaaaaggaagtagaaataaatgcatgcaatcaattcaccactaaagtgcaatcattcacttccttagtaggaagccccctttgctctttttttttcttttttattatactttaagttcgagggtacatatgcccaatgtgcaggtttgttacmtatgtatacatgtgccatgctggtgtgctgcacccattaactcatcatttacattaggtatatctcctaatgctatccctcccgcccccccccaccccacaacaggccccagtgtgtgatgttccccaccctgtgtccaagtgttctcattgttcaattccca

SEQ ID NO: 644435 - DNA, 585 bp, Homo sapiens
tatggtgagtgctctataaatattgtggtggtggtggtggtggtagtaaatactgtaaatgagaacagggaggaaaatgaacatagaagcaacacaaggatcaatttttaatacacccttatgttgttatttatgtacttgatatagttttaaaggaagcagataggaacttaataaatataactcaaaggctgtgatgctttatttgctattttttaaatcaaactgtaaaaacggactaaaaatttttcaggctatttaaattattcaatttaagtaagtttcagagccaaaagatattcrtgaatcattttaattcttttttgggtatataattttttgaaaaccttctgtaccataatgttaatgtttaaatcaatttgttttctaaagttatgtttctattaatagtttttactttattcaattcctcttaaatattttcattttatgtaattttgtccttcttttaaaaattatatttattgttctcataataacaaacacacagttgaatacaaaacacaaaagccatcaacagtgaagttactaatataccttcaagataaacatgattggatacca

SEQ ID NO: 644436 - DNA, 593 bp, Homo sapiens
tatggaaaaaaatctaatctgattaaaaaatgggcaaaagatctgaatagacatttcctaaaagaagacataygaatggcgaacacacatatgaaaagctgctcaacatcattgatcctcagagaaatgcaaataaaaattatagtgagatatcatctcaccccagtaaaaatggcttttatccgaaagacaggcaataacaaatgctgttgaggatctggggaaaaggaacccctcatacactgctggtgggaatgcaaattagtacagctactatggagaatagtttggaggttcctcaaaaatctaaaaatagaactaccataatccagcaatcccactgctgcaaatctacccaaagagatatatcatagagatagctgcactcccatgtttgttgcagcactgttcacaatagccaagatttggaagcagcctaagtgtccattaatagatgaatggataaagaaaatgtacatatatacaatggagtactatttagccataaaacagaattagattctgtaatttgtgacaacatggatggaactggaggtcattatgttaagtgcaataagttaggcacagaaaga

SEQ ID NO: 644437 - DNA, 555 bp, Homo sapiens
ccttctcatatgattttcattactgtagtaatatttgcacatacttaatttctattggaaatatttgttgtaaatataatttctatacycagtataggcaaaacaatcaaatttaattaacaaaaagcatttgcacagccagtctggctggaccttatgcaaatgtagaaaatgacaagcttgaaattaatcaccaaatgtctgaaattaaaacagaattgtcaaggcagaaatgtatgaatcataatagtatctaattccatggtttctgggcagatgtctttctgtattctgatgaaaactagcatttatttatattaaaacctcttcaacaaaccatatgttatatttagctcagccaaaattcccaggtggagaatatttgtatggaagatttcaaaaggatgatcaatttagatgtaacctacatcttatttatttatttatttatttttgccttttatatctgaagactgcattgaaaagacagatgcatcttttcttttatacttcaacatccccagtttgatttaataagtcaggaaagcaagcacc

SEQ ID NO: 644438 - DNA, 580 bp, Homo sapiens
accacatggtttaaagggatataggtcagactatggtggttatagtaaagtcttttatctgtaatatcatagaaaagggacaacaatgtctaacatatattgaatgcttatcatgtgtctggcatccttctaagcattttgtgtgctttaactaatttaatcctcacactggccttatgaagtaagtccatattgtcctcattgtacagatgaaaatatggaattgcagagcagttgaataacctactaatggctcattactcagctagtaagtttggatttgaacccagagttgtctagctactaagcacttctctgtatcaacttcataatttggatgagatacatcaacatctcctgatcctctytggaagactcagttcatccttaatgtagctggttcatcgctttggacagatggctgatgtatgtggtcactttgttttcatcctatgaatgctacttggtagatatcagtcttggaagctgactcattatggtgtgtagatgcccaaacagttactagaaagaaaaatcctaatattttcaaagtctatcagttattatctgtttttgcaat

SEQ ID NO: 644439 - DNA, 633 bp, Homo sapiens
ttcaaacaacagcaatttttggtataagtatgttccatgcactatttgggatatacttatactaagaaataatctgttgttcctctgaaattcaaatataattaggaatcctatatttttatttgctaactctggcacccttgttcacatttttttttgccagtccttcaatctcattgcaccacagtgtgatcaggggctgcatcagtcccatacaggagaggaggatggctcagaaagcagccagctgtatttcaaatgaattcctaccagagatctgcaggccccaggacagaatccttatctaggcaaagaagtgctatatgggagaagaatgcttccaaccttggagtcaactctttgactcacttcctagattggcaatcctcagcaagttgtatggtaccactgatacagttttctcatctgtaaaatggagaaaatgatacctcctactttgcaaacgttaaatggcattccaagcacagtgccaagataaattgcttgayaacatgatagggatagtttctactattctgttcataaggtacacttctttttagggcacactaccttgggtaatgctcaacgaatgaaaatcagtcccagtgctttccactggatattctaagg

SEQ ID NO: 644440 - DNA, 586 bp, Homo sapiens
ccttatttttcagatcagttctagatttacagcaaaattaagtggaagctacagagatttctcatatacctccctgctaagcccacatatgtgcagccttctccactatcaaaaccctgcaccagagtggtacatatgttacaatccatgaagctatatcracatattatcaccccaaagtccataggttacattagggtccacacttggtgtatattctatgggtttgaacaaatgtataattacatggggttttgggggggttgtctgtttttgaaacggtatttttctttcacccaccctgcagtgcagtggcacaatcgtggctcactgccgctttgaactcttgagctcaagagatccacctcagcctcccgagtaactgggactacaggcacatgccaccatgcccagataactttttttttccattttttgtagagatggggtcgtgtcaccatgttgctgaagctggtcttgaactcctggcctcaagggatcctcccaccttgacctctcaaagtacaggcataagccaccatgcccagccaagtgtataatgacatgtatccatcattattgtatc

SEQ ID NO: 644441 - DNA, 595 bp, Homo sapiens
gtactcttttctaggaacatagcattacttcattattactaacaacacagcacagcacctaaataatctttttatctcttcaaagctgtagaggctgttcatattgcctaagatcaacaacattacaattgaaaaaaaaaagcagctagctggctaaaacacacacaatgcacacacacgcacacagacacacaaccatacacaaacttggtctctcacattaaactctgtaacagtaaaaawcactcctaaatagttgtttctattaaactgtttctgttccagagaagaaaaatacaataatatatatgattaggggtcatgattctaaaatcattaactttattttttttttatgattgtggtcccatcaatttaaattttcctttacactttcaaacaaggtggccacacactcgactccattgttcttctggggttagacaagtgtgaggtgaccccagttagggatgccccaacaggcattaagttgacagcacaagagcttccatcgcaaccctctagacactgcaaccgccacaacagtctcttggtactcatttagtgtcttactaaacgtttaccttgtcaatga

SEQ ID NO: 644442 - DNA, 595 bp, Homo sapiens
gtactcttttctaggaacatagcattacttcattattactaacaacacagcacagcacctaaataatctttttatctcttcaaagctgtagaggctgttcatattgcctaagatcaacaacattacaattgaaaaaaaaaagcagctagctggctaaaacacacacaatgcacacacacgcacacagacacacaaccatacacaaacttggtctctcacattaaactctgtaacagtaaaaaacactcctaaatagttgtttctattaaactgtttctgttccagagaakaaaaatacaataatatatatgattaggggtcatgattctaaaatcattaactttattttttttttatgattgtggtcccatcaatttaaattttcctttacactttcaaacaaggtggccacacactcgactccattgttcttctggggttagacaagtgtgaggtgaccccagttagggatgccccaacaggcattaagttgacagcacaagagcttccatcgcaaccctctagacactgcaaccgccacaacagtctcttggtactcatttagtgtcttactaaacgtttaccttgtcaatga

SEQ ID NO: 644443 - DNA, 595 bp, Homo sapiens
gtactcttttctaggaacatagcattacttcattattactaacaacacagcacagcacctaaataatctttttatctcttcaaagctgtagaggctgttcatattgcctaagatcaacaacattacaattgaaaaaaaaaagcagctagctggctaaaacacacacaatgcacacacacgcacacagacacacaaccatacacaaacttggtctctcacattaaactctgtaacagtaaaaaacactcctaaatagttgtttctattaaactgtttctgttccagagaagaaaaatacaataatayatatgattaggggtcatgattctaaaatcattaactttattttttttttatgattgtggtcccatcaatttaaattttcctttacactttcaaacaaggtggccacacactcgactccattgttcttctggggttagacaagtgtgaggtgaccccagttagggatgccccaacaggcattaagttgacagcacaagagcttccatcgcaaccctctagacactgcaaccgccacaacagtctcttggtactcatttagtgtcttactaaacgtttaccttgtcaatga

SEQ ID NO: 644444 - DNA, 595 bp, Homo sapiens
gtactcttttctaggaacatagcattacttcattattactaacaacacagcacagcacctaaataatctttttatctcttcaaagctgtagaggctgttcatattgcctaagatcaacaacattacaattgaaaaaaaaaagcagctagctggctaaaacacacacaatgcacacacacgcacacagacacacaaccatacacaaacttggtctctcacattaaactctgtaacagtaaaaaacactcctaaatagttgtttctattaaactgtttctgttccagagaagaaaaatacaataatatatatgattaggggtcatgattctaaaatcattaactttattttttttttatgattgtggtcccatcaatttaaattttcctttacactttcaaacaaggtggccacacactcgactccattgttcttctggggktagacaagtgtgaggtgaccccagttagggatgccccaacaggcattaagttgacagcacaagagcttccatcgcaaccctctagacactgcaaccgccacaacagtctcttggtactcatttagtgtcttactaaacgtttaccttgtcaatga

SEQ ID NO: 644445 - DNA, 447 bp, Homo sapiens
gatccgccagcctcggcctcccaaagtgctgggattacaggtgtgagccaccacacccgacctattcttcttgtttaatcaaaactttgcacccttggactaatatctccccttcyctgtccactgtcccacctctgggaaccaccattctactctgtatttccgtgagttgctatatacaaccttctgaattttgctgttactgttttcacttagcataacatttgagatctgtcatgttatttcagtggttctttcctctgtggtactgaataatgctccattgtatgaaagtaccacacttgattcaccagttgaagaagactcggttcctagttattacaaaattacgcataaagcttctgtaatcagcattcctgtggtggattatggtggattatgtcctcctctctcaattcatatgctgaagccttcacccctaacgtg

SEQ ID NO: 644446 - DNA, 461 bp, Homo sapiens
tgtggagatagcagtgcagtgtacagagcagagaccgtgggcctgtctcctgggctccatccaagttgcttgtcttttctgtccctgtttcctcacctgttcagagggtactacaataatacctacctctgtaaattgctgcagtgaattacatgagctatttcttgtcaatctcctagaacatttattrgcacacagtaaacactatctattagttcttcattctgctgtttctaaattaacacaaactttattaacatttgggcatatttccttcatggccttatggtgttatgtgtcacactttatgcttcagatatgattcttaaaatcataactgaagatatgatttaaaaatcaaagattttaaaaatctttcgcatacttgtccttgaaattcccagtaaaagggaagccatcagtcccatagtcctaggggccttcccgactgtacaagaaat

SEQ ID NO: 644447 - DNA, 532 bp, Homo sapiens
tttttttactattatatttctttgtggtcaggggtaatgtctcctttgtcatttctgattgtgtttatttggatcttatctttttttcttcattcatctagataatggtctgtctgtcttattaattttttcaaaaaccaactcctggattcactgaccttttttatggtttttttttttttgcatcttaatttccatcaatttaraattgattttggttatttcctgtcttctgctagctttggggttagtttcctcttctagttcctctagttgtaatgttagattgttaatttaagatgtttctgactttttgatgttggtgtttagtactataaactttcctcttaacagtgccttagctgtgtcctagggagtctatgttgtatctttgctgtcattagttttaaagaattttttgagttctgctttaatttcattatttacccaaaagtcattcagtagcaggttgtttaatttctatgtaattctatgagtgattttttaaattcaatttctatttttattgtgc

SEQ ID NO: 644448 - DNA, 536 bp, Homo sapiens
gcagctggtatgcctggagtgtaggcttatcccaggtgtctgggagcaaggctggaagtgtcggtgcagggaaattctcgaagggtactgtctgtcctggctgaaggggatgtaaggaggaagaggatcagattttccctctagatctaaccacggtgttgttgtggaggatgaattggagggaggctagacagatggcatgggcttggataaggagtctatttcaatagtcgagatgggaaatcataagctgaactcaaacaatggcagtgagcttgaaaaggatgggacagactttagagatgtgcagaaggtagcatcagcaggcatcagaaacttacagcccattacaagagacaaaggagtataataggacttttagatttttgatatgagctaagataaggagtgtgggagaagagcagtttctttggaaataaaatragttcagttttaaaaatgagagtctgagatgcttttgtagaagacaggaataaacatgagattgtagctcaggagagaagtctacactgaaa

SEQ ID NO: 644449 - DNA, 589 bp, Homo sapiens
gagatattcaaatattttaatatcttttgtattaaaataaactgcttcctgaaattagggcaaaacaatatttgattaaaaacatatctacaggctgggtgtggtggctcacacctgtaatcccagcactttgggaggctgaggcgggtggatcacctgaggttaggagttagagacsagcttgaccaacatggtgaagcctcatctctactaaaaatacaaaaattagccaggtgtggtagcaagcacctgtaatcccagctacttgggaggctgaggcaggagaatcgctcaaacctgggaggtggaggttgtagtgagcctagatcacgccactgcactccagcctgggtgatagaacaagactcggtctcaaaaaataaataaataaaataaaaataaaaacatatctacagtcacacacctcataacaacatcttggccatagattacactggtcccatgagattataataaaactgaaaaattcctgttgcttagtgactttgtaattgttctaaagtcttgcattactcatgtgctgaggtgatgctggtgtaaacaaaactactgcagtgctagtcatata

SEQ ID NO: 644450 - DNA, 409 bp, Homo sapiens
aaattgctactagtatcattaattattacaatcttattttcaaagaaaactaaaaagaaaataaaatatgggtgcactaagaatttctcatggactaactccatgccacgtcctgtgctaaggccactttttcataagtgccttaagaataagataaccagccccatacactaggaactcctaagtgacytgtatcctctgctaagatcttcagcagtgtctacatctaggacaatcaaaagactttcaccaccactatcattatcatcattaccatcattatcaccatcatcatagctggcatttattccagatagttacattatcgcattcagtcttcacagcatcaacaggagatctacagtattattttgcagatgaggcaactgaagttgaaaggggttttgta

SEQ ID NO: 644451 - DNA, 550 bp, Homo sapiens
atgctttttatgacctggtcttggaagtcacacaccatcacttctgttacattctatttgttacacaagtcagccctgttaaatgcaggaaggccctatgcaagggtgggagtaccaggagaatgaggatcatttgggggtcctggtggaggttggctaccacatctcctttaaatcacaaccagaaattccttaaatttgtttggagacacactccagtgcttamtaactataaatatcaagaaaccctaacttctctctgactggtctggctgccttttccaaactactttaccattgaccactatagttgactcccacaacaacttttgaatattaaactagagttggaatttgaagaagcacggacacacagagattaagtgatttctttaaggtcacccaatggtagagcagagggttggagacctctccactgggttcatgccatttgactacattaccctctctcactttcttggttatctttcttccgtctgatcactactgatcattcagtaaaattctatctcatggcttacattttttc

SEQ ID NO: 644452 - DNA, 550 bp, Homo sapiens
atgctttttatgacctggtcttggaagtcacacaccatcacttctgttacattctatttgttacacaagtcagccctgttaaatgcaggaaggccctatgcaagggtgggagtaccaggagaatgaggatcatttgggggtcctggtggaggttggctaccacatctcctttaaatcacaaccagaaattccttaaatttgtttggagacacactccagtgcttactaactataaatatcaagaaaccctaacttctctctgactggtctggctgccttttccaaactactttaccattgaccactatagttgactcccacaacaacytttgaatattaaactagagttggaatttgaagaagcacggacacacagagattaagtgatttctttaaggtcacccaatggtagagcagagggttggagacctctccactgggttcatgccatttgactacattaccctctctcactttcttggttatctttcttccgtctgatcactactgatcattcagtaaaattctatctcatggcttacattttttc

SEQ ID NO: 644453 - DNA, 503 bp, Homo sapiens
cgtgagtgaaatttggtgccgtgactcagatcaggggacctcccttgggagatcaatcccctgtcctcctgctctttgctctgtgagaaagatccacctacaacctcaggtcctcagaccaaccagcccaagaaacatctcactaatttcaaatccggtaagcrgcctcattttactctcttctccaacctccttcactatccctcaacctctttcttatttcaatcttggcgccacacttcaatctctcccttctctttatttcaattcctttcattttctggtagagacaaaggagacatgttttatctgtggacccaaaactccggcgctggtcacggactagggaaggcagccttcccttggtgtttaatcattgcagggatgcctctcttgattattcacccaggtttcagaggtgtcagaccacgcagggacacctgccttggtccttcacctttagcggcaagtccctcttttctgggggagaggcaggaaccccg

SEQ ID NO: 644454 - DNA, 574 bp, Homo sapiens
tacagtaggtcctagtccacctccctgtggtccccacgacatgctgtgtttacactttgaagggcagcacacargactctattcctcaacgacccccttgctagcctctgagggcagctgttctggtgatttcagccacagctctgggagctgccccgccccccttgccacactttgccacgtgaagaggctggcaccacatcttccgcatttcttaaaagggagtccactgacaatttgcctgggaattccccgggaagcttgttaaagccagacactcccatctcaagggtccagctgggaatctgcagtagacactccctcacccgcaagttcaggaaccacaagcttcagagcagacatctgggaatgacatggctcagactgaaagacaccagtccacactctagctctgtaccgtccaacgtgggagcaacgagctgcacgtggccatctcaatgaaattctcactgattaaaatgaaataaaaatacaaattccattcctcagtcgaacaggccacatttcaagggctcaatatccacacatggccagtggccgccacattggacag

SEQ ID NO: 644455 - DNA, 413 bp, Homo sapiens
cattttattttcttacctgtaaaatgagaataaagagcttctcatcccagcctgagaacttagagcgggtataactgataatattctgcaattcaggaacaaatatgtagaaactattttagttttaataaatgtagacagactctgtcccgtggaggaataagctctagctagttatgtttttcacgcaactgtaaaattttatattttcacacaattatattcataaagtattgtgatcctgataattactattcatttatatcactaagaagttatttctgtctagcaactggcattctttactcattttaaagtcctkaacatatccaaacagttaccagtacatcctaagatttattctgcagcgcaagggagagttgagagagacctggtgctcattcacaattgac

SEQ ID NO: 644456 - DNA, 571 bp, Homo sapiens
tttttaaatcaatacatgtatactgagcctaaaaatttagacaatcaagatattatccatccataagtatgtaaagactccatatgcatagatttaaattttttagaaatagcacagtcattgcaaacatacactctgaatgtactttgtctataatcttacttagctatcaactctcttcagaaaaaaatggattctatttggttctagttgaagtcttacaagttccaaataaagctttattgtgtttggggacctccgaagttgaagtactgatcccttcagccatttgccatttgtttcctactaatgcaatgggtaactcgtgtgtgtgtgtgtatgtgtgtgggtgtgtgtgtgtgtggtttgttttgaaccaacaatatactgttagtaaatggcacgcaaacataaagacactgtgyaaaattatccctcaggtccattcgaagggattcagttgattttattgtcttcccctaagtgtgtacaacacatatatgaaagaaaaacactggaacttttagttatttagtaaagatggaaattttcactattttgctgaaggttc

SEQ ID NO: 644457 - DNA, 573 bp, Homo sapiens
atatagatatggaaacattaatatattcatgtacaaatacattgattgagttcatctaacagttttacataaagcataaactgactgatattatttagctacacctgcataaaacattgatattaatatacctcaatatatgtatattttattgatatatgatwgatgtattaacatatatatctccttgttattgcatcatgtcaatgtacaataattacacctgacctatcattggtgataagttttattacttaagttgtgaatatcctgttttctgtttttcacccaacgattgatgatgtttgagtggttcagtgactgctttagtaattgtgaaaaatatgtctttctatttacatcaatcattttgcattttcacttgtcattccttagtaatgaggaattttctcctctcccttatatcccttatatattgtgccagaaagtacagaagtgcttaaaaactgacaaggaaatggcaaaagggcccagaagtcagcttaaataagctctcactggctacatttggaacaatttaagtattaaaacgactaatgagataaattggtt

SEQ ID NO: 644458 - DNA, 508 bp, Homo sapiens
gtttgaagttaaggtgaaagtctaaatttgacatattttgtgaataagaggcctggaccaatgccatcctagataagctacttgttctccctgttctcaaagggacacaatgaaatcacatgtaaaaaatatttttgagtaacaagataattgaatttggtgagagagtgctgttcttaaaatcggkatgttggcaggatggttctttccatctttgctgaagtttgctatatctccggtcctaacgtttttgagcaaagtttactgcatatctcttgccaggtcagctgaatatgaacttaaagggacctaacaaaacaggcagtatgcatcgatgatttagaattccactgtgcccacgaggacaagtaagagcaagcgccttgggcaaaggacatgggtattacctccataacatgctgtgctaggctgcatattcaggacaggatctctgacagcggagaaataacgactttctgatggactgctagggtgccagcatggattt

SEQ ID NO: 644459 - DNA, 608 bp, Homo sapiens
agggctttattttacatatagaaccaaccatctcacacgcctctcaacaccggttccccaacatgccaatttaaactttcattttcaaagacactaaatcaatagatgcccactgagcttgtgactgaactaactcctaatagaagaaaacttaaaagggttgacaggtgtcaataggtgctgattgacttttaagagatatattaaaaaatgagggtgccaatttattttctctgccagtgacaaataagtttcaattcccttacaatacagttgcatccctttcatacacctytttgattattcagggtttctgtacctctctcttcttctgctattctttttctctagaacatcataacttccccaatggataagagttatgtctttatcttctgcactgaagcccacttcttggaactaaacaacataccatgagttaacttacttatctggcaatatctattatgttaagtgtgagagcaaatcaaaatattaaaagtcttctttataaagatagtaagtcacctggtgaaggttatatctaaaactatgcataataatgcgtgaatgtgactcatattaacatttataaatttctaccctct

SEQ ID NO: 644460 - DNA, 608 bp, Homo sapiens
agggctttattttacatatagaaccaaccatctcacacgcctctcaacaccggttccccaacatgccaatttaaactttcattttcaaagacactaaatcaatagatgcccactgagcttgtgactgaactaactcctaatagaagaaaacttaaaagggttgacaggtgtcaataggtgctgattgacttttaagagatatattaaaaaatgagggtgccaatttattttctctgccagtgacaaataagtttcaattcccttacaatacagttgcatccctttcatacacctttttgattrttcagggtttctgtacctctctcttcttctgctattctttttctctagaacatcataacttccccaatggataagagttatgtctttatcttctgcactgaagcccacttcttggaactaaacaacataccatgagttaacttacttatctggcaatatctattatgttaagtgtgagagcaaatcaaaatattaaaagtcttctttataaagatagtaagtcacctggtgaaggttatatctaaaactatgcataataatgcgtgaatgtgactcatattaacatttataaatttctaccctct

SEQ ID NO: 644461 - DNA, 568 bp, Homo sapiens
tctggcaatatctattatgttaagtgtgagagcaaatcaaaatattaaaagtcttctttataaagatagtaagtcacctggtgaaggttatatctaaaactatgcataataatgcgtgaatgtgactcatattaacatttataaatttctaccctctgaatgcctatgtctccccgaaatttataggttggaattctaaccctaaaggtgatggtattaagaagtgattaggtcatgagggcagagtcctcagaaagctcctttgtcccttacaccaggccccgaggactccgcaagaatgcactttctacaaaccaggaagcaggccctcgccagacactaaatctgctggcaccttgattttggagttccyagcctctagaactataaaaaataaatttctattgtttataagccacccaattataaaacagcatccaattgggatgctgttttgttacagcatcccaaacagactaagatataaatatactataagctctttcagggtgagcgtattatctttatttgggttcgtggaattaaaaaaatacctggcacagagtaa

SEQ ID NO: 644462 - DNA, 593 bp, Homo sapiens
ggctaaaatatttcacagatccaataggattccttgacatttctgtacctcacatacagcagctttataaatatatacataagtgaggctcttaatgtggaggaatataagtgcatttctcatgagcaattgcaccttgaattggcaagacttgtggattggtaaaaaacaaatcacccagctttttaatacagtcaccattgccccttttcattattgatactattgactgcaggtaccttgcaatttttgttgtattcacatcgcccattattcttttctaactttttagaaagtcagttgtgtcagtgtacagttctctttgttaagaacaaaagctacaaatgaatgagccttcaaaaaaggcagtagaaataaactctctttaggttaggaaacacttgctattttattgaaatttcctaccctatatagtcaggracagaaaaaaaaaaaaaaaaactattgttatgtgtactcatttcattcctgttagtggttagcactggtatatctcaagtcaccctgttataattcttaaatcttcagcaaatatttattgggcacttactgagtttgtagtcacactatga

SEQ ID NO: 644463 - DNA, 593 bp, Homo sapiens
ggctaaaatatttcacagatccaataggattccttgacatttctgtacctcacatacagcagctttataaatatatacataagtgaggctcttaatgtggaggaatataagtgcatttctcatgagcaattgcaccttgaattggcaagacttgtggattggtaaaaaacaaatcacccagctttttaatacagtcaccattgccccttttcattattgatactattgactgcaggtaccttgcaatttttgttgtattcacatcgcccattattcttttctaactttttagaaagtcagttgtgtcagtgtacagttctctttgttaagaacaaaagctacaaatgaatgagccttcaaaaaaggcagtagaaataaactctctttaggttaggaaacacttgctattttattgaaatttcctaccctatatagtcagggayagaaaaaaaaaaaaaaaaactattgttatgtgtactcatttcattcctgttagtggttagcactggtatatctcaagtcaccctgttataattcttaaatcttcagcaaatatttattgggcacttactgagtttgtagtcacactatga

SEQ ID NO: 644464 - DNA, 572 bp, Homo sapiens
tctccctggggcatctttctctctccaacgctgccaacattccaattttggcatttgtttacacccttccctctagaatttccctctagccagactccaaaaaccagctaaagccttcctccttcaggaagtcttgcctgcttcatccctctctacctccacttaagattccctctctacataggctgcagcccacactaacagtaataaaaacacaacagtaagrgcaagaacagtttttattgagttctagctctatgtcaagctctgttctcagtacttactgtagataaatgttaatcctcataaaagtcctgtgaggtgagtactagcaccctcttactcagacagtaaggttaggttacttgtcccccgtcacaagctcagaagcaacagggacaagattcaaacccaggcagtctgtcccagccagatcttcattcctaatcacccccactgcactgtctcatattttcaggattctttacaaacagcctcctcatttttcatctcatgttcaggttcacaacaacccttagatataaaaagggggaaatcttaaaagaagaaaa

SEQ ID NO: 644465 - DNA, 572 bp, Homo sapiens
tctccctggggcatctttctctctccaacgctgccaacattccaattttggcatttgtttacacccttccctctagaatttccctctagccagactccaaaaaccagctaaagccttcctccttcaggaagtcttgcctgcttcatccctctctacctccacttaagattccctctctacataggctgcagcccacactaacagtaataaaaacacaacagtaagagcaagaacagtttttattgagttctagctctatgtcaagctctgttctcagtacttactgtagataaatgttaatcctcataaaagtcctgtgaggtgagtactagcaccctcttacycagacagtaaggttaggttacttgtcccccgtcacaagctcagaagcaacagggacaagattcaaacccaggcagtctgtcccagccagatcttcattcctaatcacccccactgcactgtctcatattttcaggattctttacaaacagcctcctcatttttcatctcatgttcaggttcacaacaacccttagatataaaaagggggaaatcttaaaagaagaaaa

SEQ ID NO: 644466 - DNA, 599 bp, Homo sapiens
tctttgttgattttctggtgagaagatctgtctaatgctgaacgtggggtattgaagtctccagctattattgatagatgcaggaggcaggtaagggaacctgcacagggtcttgcctgggcttgcccgcggtgaactgggggtctgcatatgctcctgtgtggtggcctsgtattcaatctatgaggtgggagcctgttagcagaacccccttcttcttggctgagagctttctttttgtctagtaaatgtgctctccacactctttgatgtgtctctgtgcctaatttttcctggtcatgagacaagaactggattttagttgaagtaaggaacaaaaaaatcctggatcattattgtgttggcatatatctctttctttagctctaataatatttgctttatatatctgggtgctccagtgttagatggatattatttataattgttatatccccttgctgaatttacccctttattatcatctttgtcacttcttacagtttttgtcttgcaatctattctgtatgatatagctacttttgttcttttttggtttccattggcatggactgtcttttttttatcactttattttc

SEQ ID NO: 644467 - DNA, 599 bp, Homo sapiens
tctttgttgattttctggtgagaagatctgtctaatgctgaacgtggggtattgaagtctccagctattattgatagatgcaggaggcaggtaagggaacctgcacagggtcttgcctgggcttgcccgcggtgaactgggggtctgcatatgctcctgtgtggtggcctggtattcaatctatgaggtgggagcctgttagcagaacccccttcttcttggctgagagctttctttttgtctagtaaatgtgctctccacactctttgatgtgtctctgtgcctaatttttcctggtcatgagacaagaactggattttagttgaagtaaggaacaaaaaaatcctggatcattattgtgttggcatatatctctttctttagctctaataatatttgctttatatatctgggtgctccagtgttagatggatattatttataattrttatatccccttgctgaatttacccctttattatcatctttgtcacttcttacagtttttgtcttgcaatctattctgtatgatatagctacttttgttcttttttggtttccattggcatggactgtcttttttttatcactttattttc

SEQ ID NO: 644468 - DNA, 607 bp, Homo sapiens
ttcaactggccactcctcaactgtttaacctgccctgcctcagaaaygtcaacaaaggccatggcccaagctctcccccatcccagtgttctgcctcctgactacccccacattccccagtgatctctgcatggcatgtggtgaccccctctttaggacctgagtataataaactttcttctacaagcctctcctatctttcctcctgtggcgacatctgactatcctataaatgtacaatttaaatagctttgacaacatccttgataaaaactgagcatctcctagagattccctggtatgaggagccctggagagggggtggaccaatttgcatagcagcccagagtcttttagtagggacagaaataaaactctcaagacttgaaattcagagaatttttctgggttaagcagagtacccctgacgaaggacaatttaccaagaagtgggcatttgggttggaaaacagggcccaaaacaaaggcctaaagttcagtggagaagctggtttcaatatggcatctggctaaggctggaaatctctctgggtccagccactcttacatgtcctgctttggagaacagtggctgagtgttagaatg

SEQ ID NO: 644469 - DNA, 444 bp, Homo sapiens
ccttgtctgataattacaaggtctagggtctcactgcaggactgctactaagtggctacaaatcctgagcaagttattttcctctctgggtttaagtttccttcttttcaaatgagggctctacattgaatcatctataaagattctgaaaagtcctgcaataaatcraactaactcaccaggattccctaaactaaaaatgaccacggtggtagattgcattattgctcccaatttttcacccctccctgtatccacaatctctgccatgactttgcagttcctgccactagaggtggagtatatttccctgctttgttaatactgggcttggccatgtgacttagtctgggcaatgggatgttaatgggcatgacctgagaaaaggcttgaaatatatttatgcaggttagtttgcccacttattcttccataaccatgaga

SEQ ID NO: 644470 - DNA, 496 bp, Homo sapiens
actgggcacacagcagatatataataaatggaattgttactactgttattcctaagctttaaaattatgttacaacaggaaaaatacatctgaaaccacagtaagcaaagagaaaacagcaaaatagtatgttcactatgcaaaacaaagaaagaaacataggaagaaaacttctgaaagatatacatcaaatgctgacaacragttgttttttcccccagcaaaaatttcttgagtagaatgtgctcagaactgagtgtgcattcaagatacgaagattaaagacagcatgctaaggaactcacagtccactaggtgattcaagttaagtcaacgggcagcacagatgaaagcaggtaaaggggaggtctcaagaaaggttagcttgaagtagtagctgagctggctcttgaagtctgatacacttttccgaatcttccaagagggtgtcatcttattttgcagagtttagtttcctgacactcacccagcttcc

SEQ ID NO: 644471 - DNA, 569 bp, Homo sapiens
cactggaatcacaggactaatgaggcaccatgactgctcatatgggacaaactctggtttgttttgccccgggacaggctcctagggagatcaagatgtcaggggccccagtagggcagggatgtggagctgtctccttcaccagctgctgcagcgatgctttatgggatggcaaaagggatagtttgtttcttcaaagccagcctcctccatttccagggtacaacacaacctccagcactgagtcawcagggctgtttagtctcacattttttcccatctcctttttttttctgcacccacaagtgggagagcttcattaagctaattaaaaaggcaccagggagaaagcatgacagaaaaccacttgggctttcttgtgtggcataggtgggagcattggctctgctttccttttctccagtttgggcttcttctggtcctgtggctgtggggtgggggtaaagacagaagcagcagcaaaaggatgaagtgagagaagacagagacatttctcaagcagctgagccaaagcccaggcttccaggccccaaggaagtctccatacc

SEQ ID NO: 644472 - DNA, 450 bp, Homo sapiens
atacctttgaccatggttggacatagaatatttctgaaattgagccagaatagcagaaggaggaagaggaaggagaggaaagtctaagcaaggatgttctgaaaatgggggataaagagaaggatgagcagacaaaggaaaagaaatttcaggagtctgtgttcaattcagaaattattttagacaattttttgtttctcttacaaaggaatgactttatcagaacctcttttagaggtttctaagtaccactgaaaatagctctaccacttgtgttttgttttgttatttwagagcgaactttttctaattgagcatgcagataaactagtttatgtatttcaaaggtacaccattctggccactgtaatttggagtcattgcaagttatgtgtgaccaattttctaaacatttgcatgaagaggtgccgtaattattaaacatgaatt

SEQ ID NO: 644473 - DNA, 573 bp, Homo sapiens
ctcatcaacaacattggatactccatagtcatagagcaaagatttcagaagcgtgaaatatattttgactaaaattccatgtcacacraaactgtcattcaaatgtttgtactaaacatttttgctaaacatttgtactaaactaaacacattttcagacatacaagttttcagaaatatcacttctcacatactctttgctctagcaaaatgagtgtgtaaaccaagaaaaacaaagacttgagttccaggaaacatagcctaacgaacaagaacttctggataaccaccttgaagcaaacctaaaaaggaacttgtccagatgaccagtggaagaagaaaaaaagaaagaaagttttatacaatacctgaaaagatgaacagtttaaatataatattggaataaagagatacaatgggtaaaaagaaaaaattaaaaacttttggtaaatgaaaaagctgcacaagcataagatatttggctttcaagtaaattacatttacatagtttgttaatgtaattaaagcaggcatttgattgtactaggaaattggtcgaataagagatgaaag

SEQ ID NO: 644474 - DNA, 580 bp, Homo sapiens
agaagtgagaagcaacccaaagatgaaatgagatgtgatccgattgggcaccaggtgtatttgtttcctaggacctactgtaacaaattttcacgacctaagtggcttaaaacaacagwaatttacagtctcacagttgtgaaggatagaagtgtgattgtcagggtcatcctctcactgaagtccctatgggagaatttgccccatgccttctggcttctggtggttcctggcaattcttggagctgcttggcttgtacacttctcactccaatttctgcctttgttaacacaaagcattctccctgtgtgtctgtgtatttgtgtctcctcttcttacaaagacaccagccatatcagattaagggcctattctactccagcatgacctcatcttaatttggctacattataagagactcttttttaagaaaaggttacattcacaggtactagaggttaggacttgaacatcttttaaggggacacaattctaaaaggggacatcttttaaggggacacaacactagaagtcactcacttttgggaaaaatcaatatgatctttttttttttttttt

SEQ ID NO: 644475 - DNA, 647 bp, Homo sapiens
caatatacatgtgtatgactataaacaccagtacttactgtgaagcaggtttactggaactggttaactacttatctgaatttggtgaaacagaacacactcacacacaacaagtcatacaaagctcgtttactacatacagggacagaagaagcctaggatccactctgaagcagttgctcaaagctcaagaaagcttcccaaggtggatacagtcttgagtgtcttgtaccacaactggatcctctgaaaagcagtccatcttcaattacatacctcagaggtaatgagactccctaggtaaagcttggaaggacatcttgctcctgtgtgagagaggcacaaagcccagactctcctgggcaatttccctctatctcaagatgttacattccctaggagggacaggaacagggccgaagctatttcagttagttcctccttagggtgttgcattaccagcacattccacagctattctgragaaccatgggtaaggaaggcggggagaactgggatggtccaaagccactcagagaagtattctgcacaggcatgcattgattacttattatggtctaggcatataatgatagcacataacatttaatttatttaatttctgataagaaaagtacattttacag

SEQ ID NO: 644476 - DNA, 449 bp, Homo sapiens
ggctaaccataggcaaactaccaaacctttttgagtctcacttaaaacatgaaaaatctagtaattagactgatcttgtaaattacaaaatcagtttaccccctataaaattttctcttacactttggatgattatatgtcaggtattgttgttacttgtccagctgaggcatggtacccccgtggagtaggcttggagttcagttcggagctttaattagcagatttgctaaatggcaaagaccaactcatacagttattctctcttagataatcacccaatttgggaagagtgatgataagaatctcttctcatgaagagcactcaagagctgagtaggaccagtagtaactactrctggatgatctgtcattggcttctttagagtgcaatcttgcttcttggctagacagaaaataaatgaaatcagtaatttctgacctgactt

SEQ ID NO: 644477 - DNA, 556 bp, Homo sapiens
tcgtaatggtatgtgccaggcaagttacaaaattctaagtctccgttttcctgctggggaagtgggtgcagtaacacctacctcacagagttgttgggtgtaatttgaactaacacaggaattcatgccttgccaatcttgaggactaaataaatggtgatattctttgaggaggggaagagaagccaggcagggtacagtgaacatttttaggatggagatttccaaatattatcttttagtcccagaggatcaggcaacatccaccaaccagagcaggagggaccagttgaattctctgtctagctgtctccacccagctagaggtcagggttactctggtctttccaaggaagaaagcaaggatcctgtttttaggatcagcttatctccctcactagcctcatgctctttggtgtctttttctacaattttcaggataggtaacgtagatgattacccatgagggtaagcgtctacatgtcatcagaaaatttgattaaacacccacccatggctgtggtttgagggattktgaggcacagaccagaaaata

SEQ ID NO: 644478 - DNA, 598 bp, Homo sapiens
aagctttgctctctaaataagtggagagacataccatgttcatgaactggaagattcaacaatgtaaaaatgtccattcttccaaaactgatattgaaactggtttcatgcagtttctatcaagattgtaccatggattttagtagacttaaataaaaatttttgatttaaattttaataracaagcttgttgtgacatttacatagaagggcacaggacctagaatagctgaagaattatgaaaaagaaaaataaagtgggaggaatcagtttacttgactttaagacttacaaaatagtaagcctaattaaaactctgtggtattcttagagggaagaacacaaacaaattttgtgatttaatttttctatctgtgatcaaagaaaggatatcatgttgtttctttgaatcactttggtttggcatttgttaaccagcacgatcttgcagtgttggagatattaaaatatttagccattaagatcaattatgttattcagtaaacttttctttcagcacctaaaatattcaagtgattatttcagtatcacaatacttttatacttatttgtaagcatcattaggactatttcctt

SEQ ID NO: 644479 - DNA, 598 bp, Homo sapiens
aagctttgctctctaaataagtggagagacataccatgttcatgaactggaagattcaacaatgtaaaaatgtccattcttccaaaactgatattgaaactggtttcatgcagtttctatcaagattgtaccatggattttagtagacttaaataaaaatttttgatttaaattttaatagacaagcttgttgtgacatttacatagaagggcacaggacctagaatagctgaagaattatgaaaaagaaaaataaagtgggaggaatcagtttacttgactttaagacttacaaaatagtaagcctaattaaaactctgtggtattcttagagggaagaacacaaacaaattttgtgatttaatttttctatctgtgatcaaagaaaggatatcatrttgtttctttgaatcactttggtttggcatttgttaaccagcacgatcttgcagtgttggagatattaaaatatttagccattaagatcaattatgttattcagtaaacttttctttcagcacctaaaatattcaagtgattatttcagtatcacaatacttttatacttatttgtaagcatcattaggactatttcctt

SEQ ID NO: 644480 - DNA, 324 bp, Homo sapiens
aaatgagccacctctgttgcaagtcctgcgaaggggtcaaggaattctcttgtttcatctggggacttgcccagatctgtcacaagggtgagttcagatgcagaactgtctcttttccaagaccctgccacctctctctttcttttgggtgaaagaaatgttggctctgtttcccttcacagaggtttagctgttgtgtgaggtgargacaaggtcctgggccactgaaggcatcagccaagatacccagattttcctgtggtatctttccttccttgtttcacagttagaaatggctcctatctcttcctttataatgttaag

SEQ ID NO: 644481 - DNA, 610 bp, Homo sapiens
tagcctctatgcaaacccacaaaccccagaattcccaaggtaccctgttaactgctacagatgtggaaagaacagttatctctcttctactcagggtacaatgttgttagtatattttacttcttatttctgcaatcattggcactagattctttctctgtataatacacatgtttaacccatctatacttaaccttataaaacttgtttgtttttggccgagcatggtggttcatgcctgtaatcccagcactttgggagactgagaagggcagattacctgaggtcaggagtttgagaccaccctggccaacatgacaaaaccgcgtctctactaaaaatacaaaaattagctgggtgtggtggtgggtgcctgaaatcctagctactcgggaggcttaggtaggagaattgcttgaacctgggaaggsgaggttgcaatgagccgagattgtgccactgcactccagcctgggggacagtgtgagactgcatctcaaaacaaaacaaaacatatatatatttttttcctctctcttgcctagaggccatcaaactccaaatggtcaggcaaccagagccttggatgatggctcccttttgccagaga

SEQ ID NO: 644482 - DNA, 640 bp, Homo sapiens
tttgtaattatactcagaatatatttttttcagttttcaaaaatttaaataatctagggagtcaaacattgactttccatttcatcttgtgaaataacaagaaattcaaatagggaaacagagagagattacactcaaaaacctaagtgtttagttcttagaacttmaaattttgtaaaaattttagattgaatagcaatagtcagtacttggtgaattcgatgatactctagattgtctttcacacatctgtgtattctcaaataagaaactcaatatctgcataaccatcccaagtctcttcttcaaataatttatgaaacaatgagaaaaaatgagtgttgtaatttcgaacaatatatttctaaatgataaaatatggatttttagaatttagcaattacattaaaaatgagtggcagagttagatgcacacagaagtttaaccttcatggaggaaactgaccttgatcttttcctttcagaattcataaggtttattttactacttcatacccaaaaggggtattttcattcaatcattgtttcttcatatattagatgaaatatttctattaagagataatttcttcatctagtcagatagtatttggttacccagtggagtgattagtgtaag

SEQ ID NO: 644483 - DNA, 618 bp, Homo sapiens
ctgctaacacttagatctgaatgaactagaaaatatctgtaaatggttgacccactcaggttctgagtggctgcatgacagaacaatctttgatttattacaaggatcccagtatgggacccatctcctcaatacaactcactatcaagaggagaacacataacatgcctttgaaaaatgttcttccccagatttagtgccctgtgaattgattgttatttttgtagcatgatgtgaatgtctactatattgtaagagattctatgagtttcttggggcaaatacacataggaataagtttccgcaaaagaacttaatgtaatttttagaaaacaaatacatacacatataaattaatgaagtagataaatgtcagaaacaggccatgaatatatatgtgagctacatacagtgatggacagcctccaagtttcaaaactgtataagaccttagttaaaagtagtcaagtatgaccaccagtgaagaatagaatagagagagtgcagagtagagatgaccagaagtagaatactttaaaagaaaaaaaaayacattcttacatctcattcaaacttttatgtacataattgctcccacatctgaaaggtgctgccatt

SEQ ID NO: 644484 - DNA, 565 bp, Homo sapiens
cccattctaggaggcaatgggtgtttctatagcaaccagcttcccaaaaagtccacaccaatgcaacaagcctcagccctaactctgaggcctctaggctgcattcttgtgggtcatcctcagagaaggattctgctggcctgtagaattgaggcagagaacgctaggggagatttcaatcttggcaaccattggcattgaaaagtgctagaaagcatgtatccttttgaaatggttatccaacccgtggcccacatgcagcccagggtggctttgaatgcagcccaacccaaattcgtaaactttcttaaaacattgtaagaattttttgtgttgtttgttttgttttgttttgtatttagctcatcagctwtcgtgttagtgtatttttatgtggcccaagacaattcttcgtctttcaatatggcccagggaagtcaaaagattgtacacccctagattagacatgtccgtaatgcagtcaagcagcaaatatgaatcaaagacctagtatatgccagtcattgttctaggtattaggcatacagcagtgaagaggacagaa

SEQ ID NO: 644485 - DNA, 605 bp, Homo sapiens
ttttgtcctagcaagcagataaaatactggaatattgccttgaacttgtaaagactcacttttgaatatctctctctctctttctctctctctctgggggtgtgtgtttgtgtgtgtgtgtgagagagagagagagtctattttagtttttatcttatgcctgggacttaatatttactttcaaagcttggcctgtcttgactttcactcgcaagtgtctatacaaatatttctcatttttggaagaggtttataattgtaattggcagcgtagttagtccatgtttagttactccaccactcacagaagacagaaaacctgtgyaatagacttcagaaactagaggttattgcttacttgctcagaacattttcaggaggatcgcaggatgaaaaccccaaaggcaggaggaaaagcctggatgtagtcaattgaggagtgaatagcctttaacaaagtatgtgcatttagtataaaagtctgtcaagaattttggcagtacatgggtagggacaagattatacattggatgagagttgaaagacaaaagaaggtctgtttgcttgtccaataaaaatattcaagaataaatttttatttactt

SEQ ID NO: 644486 - DNA, 605 bp, Homo sapiens
ttttgtcctagcaagcagataaaatactggaatattgccttgaacttgtaaagactcacttttgaatatctctctctctctttctctctctctctgggggtgtgtgtttgtgtgtgtgtgtgagagagagagagagtctattttagtttttatcttatgcctgggacttaatatttactttcaaagcttggcctgtcttgactttcactcgcaagtgtctatacaaatatttctcatttttggaagaggtttataattgtaattggcagcgtagttagtccatgtttagttactccaccactcacagaagacagaaaacctgtgcaatagacttcagaaactagaggttattgcttacttgctcagaacattttcaggaggatcgcaggatgaaaaccccaaaggcaggaggaaaagcctgratgtagtcaattgaggagtgaatagcctttaacaaagtatgtgcatttagtataaaagtctgtcaagaattttggcagtacatgggtagggacaagattatacattggatgagagttgaaagacaaaagaaggtctgtttgcttgtccaataaaaatattcaagaataaatttttatttactt

SEQ ID NO: 644487 - DNA, 540 bp, Homo sapiens
ggatggtataggatttgaaacttgaggagatttgatttctcaactgtgggcattgcaatgatcatgaatactaagagttaaaaaggragataacgaaatgcatccagtctaccaattattacttgagtgcctgccatattgtagaatgttctagggacaaatatggcagagaacaaaacaaaccaaatctctgcccccatagctacttgtttggaagttgaagaaagaatgatgagaaagagacaataaacaaataaatatagtttgttagatggttgtaagtgtcacacagaaaaataaagcaggccgaggggatcatgcctgtgtgtgtaggggctggctggtggatgggtggatgaatattgccattttagaaagggtggtttattcttgttattaaaccttaatgttttggatctgccttgaaataccagtgtgagtgtgaaggcttaacatcaactgcatgttaactttattttctgtggtctctactgggggcccagaaggcagaatgcttattaatagtacctgagctgtaga

SEQ ID NO: 644488 - DNA, 562 bp, Homo sapiens
acgactgccagtcattattctggaggtcacaagatcaagatatgcaacctccccaattactcctacagataacatcactattgcagaacctaagattggccttttgagatatgctatcaggttttttgtacgtctracacctgccaaccagctcccgtagccccactcagaagcagctcagcctgcaggaagactatttcccaaacccctataattgcacgcccaagcaatcagcagcaagcacccactgccgagccacccccatctcttcccccaaactatccttgaaaaagcctagtccccaaatgctcagggagatttatttgagtaataattttgtctcccccatggcatggctgacctcatgtcaacaaaactctctctttactgcaatgccatgatctccatgaattaaattttgtttgtgcagtgggcaggaagaacccgttggaaagtcacagtcacttcgggtctcactggcctaaatcaaagtgtggattggctgggcttttacctggaggctctagggaagaatgttctctttccggctgttggaagaatt

SEQ ID NO: 644489 - DNA, 540 bp, Homo sapiens
atctttatttagataaccattgtggattcatatctgacatctctaaatcttcagcttacagagatcagcctccccaacaagaactcccaagctaaggacagaggtggcctttttatagtaactacctcataggagcaatatggggaaaggtgacacaatagaagctccatgtgcctccacggacatattaaatggttcccagatgttgtttactattagtgtttctattataagtaacatacctttaacataacatagtgagaacttaaatagctgctatttcaatcctcttttcattttacagatgagaaaactggagtttgcaaaggtgggcctcraattcaggtttccttaacgccagtctgatactctttatctaacactattttgtcttttggtaggttttctatggacagactgaaagctagagacaccttaattctcacaattacactaatcagagcaatctacaatttgagatttaagtctacatgctcaaaatatacttcatttacagatatctgcctggttaataataat

SEQ ID NO: 644490 - DNA, 558 bp, Homo sapiens
aacagtctgatatttctaagtttactatttcccttttgacctaataaacacagaaggcaaagggaaagattttagatctaggtggcaaatgcccacctccagttgttgcattctatccatcattgtgctaaaagatcaacaaaataaagtaagaaactaagtagagagtttaaaacaaagctcttttggatggatcctctcaaagctaacaagcagccaccaggctcacagcatctgataactccaaacttaagccaaatggctcactctaaactttkaacaatgaccaaacataccaataaaattacagactaataggaatgacactattttccatatgtttgtttatgtgtgtgtgtgtgagagagagacagagagagagagaaacagagagaaaagacagggagagagaagaagggaatggatagactaagcaagtataaacttacctgaaacagcctggtaaaaatatcaaattcaaaaactgaaatgtaatcattgcaagttaaatcaattgttgattttagagccattgcttccaggccagagctaatctgg

SEQ ID NO: 644491 - DNA, 425 bp, Homo sapiens
gaattctctgaagaggagttctgcaggatttcaacatccttaaaacaaaacactagcagttactgattggaacatactttcctttgggatctacatggcctttgcaagaatagcataaatagcacatagcctagcccctatctctaaaaaaaaaaatccttactccatggttatttgggagtgatgggtttctggagggctgttttaaactcaaaggacaggcataaaccctttgaatcttcacttctcacaggaatctgatttccatcaagtaggaaagaaatcatgaagcccagtcagctcttaggtagtgttttaagtaaggtgaaggaaaaacaaacattagggaagttcaaagacaaaaaatcctacaagaggacaaccatrattgaaactgtactctgatttctgttatgggtatgtgc

SEQ ID NO: 644492 - DNA, 517 bp, Homo sapiens
ccagtaccttctggccgttttggcactgcctggccaaaagttgattcactgcttacagaaggttagaccagtagctrcctggaagtctccccactgcttcaacagcatacttcactaaatgactggctagacaggctggtttttcattgaagtaccagctatgtatacatcattcttttccttcctgaaacagagaaactcttgtgtaaacatgggccaagtccaaagtccatgtgaggggtgtctcctgttattcagacatccattacctggatagtgtagccaagtagttctggaaaaccatcctaccctcagtactgtatttatgtctgttctttccagagtagatcaatgcacaacaaatggcaagtggtttaataacagaatgcaattctaaaaataataaacagcttacctgctcaaaactctcttaccaactgacatgaaaaggatctgaaacttatgtccacttctaaatgaaggcattgactttagaaatctgaaaagatgcatgtgt

SEQ ID NO: 644493 - DNA, 517 bp, Homo sapiens
ccagtaccttctggccgttttggcactgcctggccaaaagttgattcactgcttacagaaggttagaccagtagctgcctggaagtctccccactgcttcaacagcatacttcactaaatgactggctagacaggctggtttttcattgaagtaccagctatgtatacatcattcttttccttcctgaaacagagaaactcttgtgtaaacatgggccaagtccaaagtccatgtgaggggtgtctcctgttattcagacatccattacctggatagtgtagccaagtagttctggaaaaccatcctaccctcwgtactgtatttatgtctgttctttccagagtagatcaatgcacaacaaatggcaagtggtttaataacagaatgcaattctaaaaataataaacagcttacctgctcaaaactctcttaccaactgacatgaaaaggatctgaaacttatgtccacttctaaatgaaggcattgactttagaaatctgaaaagatgcatgtgt

SEQ ID NO: 644494 - DNA, 501 bp, Homo sapiens
agggattaagtttttttaaggggaaagatattctgaaagtagtgtatatccattaaaacaaaattcaaatggaatacgtgtgtaatgcaaaactgaaagtttatgcattcctttctgttccagagaattaacttaggctatagttctatgtatatcctttcagctcttcctttctccatataaaaatctaaaacaatgtacatgtatgtgtgtgtgcatacatctttccatgatgtgcctcattcttaatggctggtgcattratggtcaatgataatatatttaaccagttcccatttgatgaaatatttaggttgggtcccattttttccctactctaaacgatgctatggtggagttcttaaatagtattcttatatactaagtgatgacatttttgtaggatagattcctaggagtaaaactactaggtcaaaagatattcctactttaaattgtactcctaaaagtttgcttgtaaaaaatttcggttccattctt

SEQ ID NO: 644495 - DNA, 630 bp, Homo sapiens
ttttaatgtcttttggggggaaatatctatccaagtcctttaccctttatttatttatttatgtatttaatttactactaacctataggaattttttgtatattttgcatattaacttcttatcagatatataatatggcatgtccttttgcttcacttccttcatttgtatagaaggggtagtgttattacttactgcatggtgttattgaaggtttgaattgattaatattcacaatatgcttagaaatgtgtttgctcaaccatcaatagtacayaacattaacaggataaagaacaaaaatcacatagagaaaaagcatttaacacaatttaacagcttttcatgataaaaaacacaaattaatgatagaaggaaattatctcaacataataaaagtcatatatgaaaagctcatatcttatatcatactcagtggtgagaatgagaagcttttcctataagatcaaggagcttctgtctgttgcttttacacttgcagatcttcctgccagtaatgcttctcctgtggagaattacataacttatttccacagtttattcaagccatgactcctttgtcaccttagggaggctttcctactcagcctcatataaatgcaaaccac

SEQ ID NO: 644496 - DNA, 538 bp, Homo sapiens
aaaagtgtcaaataaacctagagaaattgtggaaattggtagaataaattaacttcttgtaaaatcatttttccacatcattataacatttgttttcaaatgtcagaagcagatgaaataattttcctacagatattgcttcaaggataaggctaraactcacagagcacttagaagaacaaggatacaaacatcccaaaggtgtacattaagattaaatttgcacgttgaagaggaaaagaattgcactttatgactgaacttttgagttgtttctgcatgaattttaggtaagtatacataatgaaatatggtaaagcatagacagcaatatctgccaaccatatttattaagattgaatgcacatggagcattaggatgccatacaatacaatttgtcatgttgaattttaagaaatttcaaggcagattattagaaaattaggacaagtcacctgccttattcttccactattaacattcctattattgctattttttctctttcatcgctagcaaccttcatttctttggcgt

SEQ ID NO: 644497 - DNA, 632 bp, Homo sapiens
caaacaaaaacaaaacaagcaaaaaaaacaataaattattgttatatcttgaaactattagaaaagcaattcttgaaagtacaacatgtaacaattatgcaaattgaagtcactcatgttttattactccctttgtcccatgaagccaatataaaaactgctaagaamgtttttgattaaataacaagtatttttcaacaagttaggccctactcagatgaatggaagaggattaataaatgttttcttgaacgctcatggcattcagtcaagtgagtacatccagaatctaataaatttcaaataagaaatgtgtatcagtgagccattatgttccctgttaccagttgcagggcattgtaagaaaaacaacaatattatttaatttttgataaaaacatatgctaatatacctacaaaagcctgaaaatgctttccttttaggtgttaattaaggaattattatttcttataagtcatacattaagagatcaaaagtattagaataaagtgaattaatattttaaaggtattaataattcattttttacatctttcccttctcatcaatataaaggcataaaaagacagtgttttattgttaatatcacataataaggttaacaaaccaa

SEQ ID NO: 644498 - DNA, 598 bp, Homo sapiens
cacatttttatactgtcaggcaaatatttttaaaagaaccatctactctagaaaaaaaatggatatataatacacacatattttgtatacgtattttgtatacatacatggatacatattttgtatacatattttgtatatatacatgtatccatgtatgtatgtatgtatgtattacattggcacaaaagtaattgcagttcttgccattaaaagtaatggcaaaaaacgcaattacttttgcatcagtctaatatatatatacacacaaacacacacasagatagatttagataattacatacaggacaaaaattcattaaattcattgagcatcatttttccttgtataatgttacctaatcagccagttgtttcagttattcatttattcaattatttgtttaagagacactttaaaagtacttactgggtctagatatgcctcacatagtgttagtcactgacacaaggcccctaccctcatggcactcacattctactgggggaggcagacacaagtaaatctaaataaatgagatatttgcagactgaaataagtcttacaaagtaaatacagtaatgaaaaagagggaga

SEQ ID NO: 644499 - DNA, 646 bp, Homo sapiens
acttcactggcagctgaccaatgtttttatccacctgaaaatcttcaagagaatatgaccattatacaagttgacatggagaagacacaagacaatccatacccaaaatacacagtagactaatatcagaaagtccctagaaaagygtacaaacagtgagagctcaacaagtgtttgttaaataaacgaaacaccaagactttacaaaatctcccttattcattattgagtaatgagaaaaaaataccagttggagactaaaagctattgtagaaccaggggaaaagaacaacatcctataaacacagaataaaaatataccatcaaaataatctaatatccagaagaaaatatcagaaaagtatgaggaatcgtaaagaagaccgtctctatgaaatacaaggtaaaatcttaagaattagctaagacaaaaagagaacagaataatatttaaaaggggatatgattaagatgaaaaatagaaaagaagcaaaaatgcagagcacaataaaaattcataatggaagtggcaaagagcaaaaatgcaaatcagtgatgttgtaaaccatcccatatactcagaggacaaaaacaacacatgaaaatatgagaaagaaactagaaatatgaaagaatgataaaagag

SEQ ID NO: 644500 - DNA, 646 bp, Homo sapiens
acttcactggcagctgaccaatgtttttatccacctgaaaatcttcaagagaatatgaccattatacaagttgacatggagaagacacaagacaatccatacccaaaatacacagtagactaatatcagaaagtccctagaaaagtgtacaaacagtgagagctcaacaagtgtttgttaaataaacgaaacaccaagactttacaaaatctcccttattcattattgagtaatgagaaaaaaataccagttggagactaaaagctattgtagaaccaggggaaaagaacaacatcytataaacacagaataaaaatataccatcaaaataatctaatatccagaagaaaatatcagaaaagtatgaggaatcgtaaagaagaccgtctctatgaaatacaaggtaaaatcttaagaattagctaagacaaaaagagaacagaataatatttaaaaggggatatgattaagatgaaaaatagaaaagaagcaaaaatgcagagcacaataaaaattcataatggaagtggcaaagagcaaaaatgcaaatcagtgatgttgtaaaccatcccatatactcagaggacaaaaacaacacatgaaaatatgagaaagaaactagaaatatgaaagaatgataaaagag

SEQ ID NO: 644501 - DNA, 615 bp, Homo sapiens
gtttaaaaatataacttctttaaaaatataactttaggggtaaataatgtttttccacygtaatggaatattataaaaactatgcatattaagcaagaaaagatatgtttccaagaagctatatgtcagtttgttggaaaaataacaagtaaaagtgaagaaaggcctccaataactccaataacttcttccctttggtctcaaactgactgggttcactcacttctattggttctttgataatgccaatgaatagtctaaaatttctgcttactccagggactgaattaggtacagaaatctttatgtttactattcaagtttgcaggcatccttttaggctatttctagatgtctccttaattcaattttttctccattttaaatatcactattaattccttgagatatttttcaccaaccttacaaacaaaatgatcaagtcacaattcctcactttggcaatcttaaaactaaattcagatttatactatcccgttatactttaaaatcccatacaagaccaatttaacctagctctccctgtctaccaaaattcaaaattcaagctcctgggtaaactggaaggcttaattcttcccacatatgtgtatt

SEQ ID NO: 644502 - DNA, 442 bp, Homo sapiens
atttctagataactgaaacaaggcaaggatgcccactctcacggctcctactcaacatagtacttgatgtcgtagacagggcagtgaggcaagagaaagaaagaaaaggcatccaaaaaaaaaaaagaaaaaagaagaagaaatcaaactatctctcttcactgacattatgattctacaagtaaaaaaccctaaagactccccaaaaaggctcctagaactgataaacaacttcaataaagtctcaggwtacaaaatcaatgtacaaaatttagtagcattttaatataccaacaatgttcaagctgagggttaaatcaagaacacagttctatttagaatagtcattaaacaaataaaattcctagtaatacagctaaccaaggaggcaaatatctcctctgtttaattttcaaggaatactaaagaacactactgaaaa

SEQ ID NO: 644503 - DNA, 485 bp, Homo sapiens
gactgactaattcctaggcatgtggctctctcacaacatggcagcatacttcattaaagtctgcaggggagtttatttttcttcagttttgtacttgtttttaaccaaattccatttcttaaagttatgtaataatttctctttttaccatgcatttaaaatcttggctttaaaaatgaaaaaatagtctctgaggtgttcrtatacttttcacccatattggcttgtattctttatttttctttgaattaccacctcaaagccctttcttaatgatcatctttttcttgcattcacaccttttccaaaatccatgcctcatttgtaaaaacaaccctttacaacccttttctattgggtttgtctgacaagcaacaattcattgacaagtgagttatgcagaggggaatggcataaataactctctcaatcagcctaagacaatcattgaggaagtaaacactttttccgaaattctaagtcaa

SEQ ID NO: 644504 - DNA, 585 bp, Homo sapiens
tgatagaatatacattaataccagaatattctcttggtaagtgaggagctagttattttgaagttcattggtgaaagagaaaagtaaaatcctaaaatctgcattagagatatttctctgatttttttaaaggaggaggtgggttattcttatattatatactaggtgaaatatatatatatwtgtgcttatcatggatattttgtggttatataattaaaaatatgtaacttaagaaagggacacaggataaattcatagagaattattaatccacatttatctcattttctttgagacgcagttattcaatttgtcaataaaaataaaatccgaagtgtagctgaatttcagcaaagcatatggcaaaatttttacatttgtaagtattaattaaccactaatattatttatcaatttcccaaaagtttaattactctactcaacaactgattagtgaatttgtatattgttatttagatcttagcctagtgctcaccttctgagaaagtccttccataaccatccactcctcacttatctcacccactgtttgccacattacactatttaaatatttattcc

SEQ ID NO: 644505 - DNA, 585 bp, Homo sapiens
atttgtttgacatatggtaagtctaataacaaaacacacacacacacacacacacacacacacacacccaccccaatataaagaatttttaaaacaacattagttacagaatgtacagaggtttatcgtttatttcccagatagcttgtgtttttctaagtatctgatttttatttattaataatttaatatgcttgtgatcagagaatgtactttctatgatataaaaagttcaaatatattgagacaatgtataactcatcatatattccatcttgttaaatgtttggtaacatttaccaatggaaaaatatatatattttgttaattggttataaatgtcaaatatttatttgttttattttttaactattcttttttcgtactgatatcttattcatttgatcaagtggtgatggaaaggtgttaaattgtctttattttaatagtttttagaggaagaggtggtttttggttacatgataagttatttrgtaatggtttctgagattttgatgcacccatcacccaagcagtgtacactgtgcagaatgtgtggtctccttcaccctcctaccacccttc

SEQ ID NO: 644506 - DNA, 191 bp, Homo sapiens
ttatgtcacctgcaaaaagagacaatttgacttccttttatttccawtttggatgccttttattgcattctcctatctaattcctctagctaggacttctagtactgtgatgaatacaagtggtaaaagtagccacacttgttccagatcttaggagaagatctttcaacttttccccattgattgtgatg

SEQ ID NO: 644507 - DNA, 191 bp, Homo sapiens
ttatgtcacctgcaaaaagagacaatttgacttccttttatttccaatttggatgccttttattgcattctcctatctaattcctctagctaggacttctagtactgtgatgaatrcaagtggtaaaagtagccacacttgttccagatcttaggagaagatctttcaacttttccccattgattgtgatg

SEQ ID NO: 644508 - DNA, 191 bp, Homo sapiens
ttatgtcacctgcaaaaagagacaatttgacttccttttatttccaatttggatgccttttattgcattctcctatctaattcctctagctaggacttctagtactgtgatgaatamaagtggtaaaagtagccacacttgttccagatcttaggagaagatctttcaacttttccccattgattgtgatg

SEQ ID NO: 644509 - DNA, 572 bp, Homo sapiens
cttcagtggatttaaactttcctgcctgccagctctgaagacagcagctgatcctgacaagtgggattctcccagcacagtgcaccagctctgctatgggacagactgcctcaagtgggtccctgacccccaagcgtcctgactgggagagacctcccaacaggggtcgacagacacctcatacaggagagctctggctggcatcaggccagtgcccctctgagatgaagcatccagaggaaggagcaggcagcaatctttgctgttcttcagcctccactgttgatacccaggtgggcagggtctggagtggacctccagcaaactgcagcagacctgcagaagaggggcctgttagaagaaaaactaagaaacagaaagcaacaatatcaacatcaacaacaacaacaacaacaacaacaaaaaacccacasagaaacctcatccaaagaccatcagcatcaaagatcaaaggtagataaatccatgaagatgaagataaaatagcagaaaacgctgaaaattccaaaaccagaatgcctcttctcctcaaatgatcgcagttcctttcc

SEQ ID NO: 644510 - DNA, 572 bp, Homo sapiens
cttcagtggatttaaactttcctgcctgccagctctgaagacagcagctgatcctgacaagtgggattctcccagcacagtgcaccagctctgctatgggacagactgcctcaagtgggtccctgacccccaagcgtcctgactgggagagacctcccaacaggggtcgacagacacctcatacaggagagctctggctggcatcaggccagtgcccctctgagatgaagcatccagaggaaggagcaggcagcaatctttgctgttcttcagcctccactgttgatacccaggtgggcagggtctggagtggacctccagcaaactgcagcagacctgcagaagaggggcctgttagaagaaaaactaagaaacagaaagcaacaatatcaacatcaacaacaacaacaacaacaacaacaaaaaacccacagagaaacctcatccaaagaccatcagcatcaaagatcaaaggtagataaatccatgaagatgaagataaaatagcasaaaacgctgaaaattccaaaaccagaatgcctcttctcctcaaatgatcgcagttcctttcc

SEQ ID NO: 644511 - DNA, 270 bp, Homo sapiens
tatgactatttgctgagtcctgtgagtccttctagtgaaccaycaaacctggggtggtcttgggaaaccttgacacaaatacattgtgtaagatttgtattaagttgatatgatatatgtaactgtaatcagatggctatttcacagaataattttccctaaactgtttcttttctttttttcccttgatatttgacttggagattcttgtatttctatatctatccacaggaataaagccataaaaggaataaatgacacaataatatc

SEQ ID NO: 644512 - DNA, 270 bp, Homo sapiens
tatgactatttgctgagtcctgtgagtccttctagtgaaccatcaaacctggggtggtcttgggaaaccttgacacaaatacattgtgtaagatttgtattaagttgatrtgatatatgtaactgtaatcagatggctatttcacagaataattttccctaaactgtttcttttctttttttcccttgatatttgacttggagattcttgtatttctatatctatccacaggaataaagccataaaaggaataaatgacacaataatatc

SEQ ID NO: 644513 - DNA, 270 bp, Homo sapiens
tatgactatttgctgagtcctgtgagtccttctagtgaaccatcaaacctggggtggtcttgggaaaccttgacacaaatacattgtgtaagatttgtattaagttgatatgatatatgtaactgtaatcagatggctatttcacagaataattttccctaaactgtttcttttctttttttcccttgatatttgacttggagattcttgtatttctatatctatccacakgaataaagccataaaaggaataaatgacacaataatatc

SEQ ID NO: 644514 - DNA, 614 bp, Homo sapiens
catatgctgatgcctaggacccaaggtgatgaagtcacctttgggagtgatgagctcatgaggggagagcccttggggatgggatcggtgcattaaaaggggctaaagagcccagcattccccccttccaccacatgaccacacagcaagacgatggctgtttgtgaggaggaggccttcaccaagcccccaaccatgctgacaccctggtctcggacttccagcctccagaactgtgagaaatacatttctgttgtttataagccccccagtctatggttctgtgttctagagsgccaaatggactaagacaccctgattcccaccacagacatccagcaggcctgctgccaacagtcagtctggagtctgacagtctgaccaggccaggccagggaggacttgcatcatcacgtgaaggatgcagatatcggcctccacgctgcagtcatggaggattggaaaggattcctttccaatcatggagttctcagagaggcacaggagctgccggcttcagtatgacaaatcacaagaacacagcaccagcccagcactgagggcagcacagagtgggtcccggggagggtgtgcacacatgcacaaagccacga

SEQ ID NO: 644515 - DNA, 614 bp, Homo sapiens
catatgctgatgcctaggacccaaggtgatgaagtcacctttgggagtgatgagctcatgaggggagagcccttggggatgggatcggtgcattaaaaggggctaaagagcccagcattccccccttccaccacatgaccacacagcaagacgatggctgtttgtgaggaggaggccttcaccaagcccccaaccatgctgacaccctggtctcggacttccagcctccagaactgtgagaaatacatttctgttgtttataagccccccagtctatggttctgtgttctagagcgccaaatggactaasacaccctgattcccaccacagacatccagcaggcctgctgccaacagtcagtctggagtctgacagtctgaccaggccaggccagggaggacttgcatcatcacgtgaaggatgcagatatcggcctccacgctgcagtcatggaggattggaaaggattcctttccaatcatggagttctcagagaggcacaggagctgccggcttcagtatgacaaatcacaagaacacagcaccagcccagcactgagggcagcacagagtgggtcccggggagggtgtgcacacatgcacaaagccacga

SEQ ID NO: 644516 - DNA, 395 bp, Homo sapiens
ctcttagtctgtgacttgcttgctttttttttttttattagctcattaatctcttgyttgcctgagttggatttgtaacactgtttggtttaccttgatgccaatctggaaatcgattgggattctgcttttgtaactaattcatggttttattcaggtggtgatatgctcatattctttgcctaggtccccagagtacattatctggtgttcaaccaccaatgaattattgtagtacaacatatatttgggtcaccacttttctttcaaaatgtttcagggaacttattacatgctgtgaaaaccaactgtatttttatcttttgaagtatacccatcagtgtttaggacaatgtctagcacatagttagtgctcaacaaatataggttgaata

SEQ ID NO: 644517 - DNA, 566 bp, Homo sapiens
gaacatacaggttatctaaactctttgtcactcatttacagcgaatgttttggcttattccatggagagttaatcacactcattcagtaaagatttagctaatagaaagcttggcgaacaatcttggaggcttcttcaatgatgtttcccactcccaacaggatgcttctatgtttrtattacctaggagctaaacgccaggcttctctacaatataattcggttgctcagtgctttaattaaaagagaccagggaaaaaattctgttcccaccattttaccagctgtgtgtgtgactttaggcaagaggtgtaactcactggaggcttagtctctgtttttctgtaaaatagggataaccatgtctgatttacaggattgttggaaagataaaatacagtgtgtaaagtgcacagcactactttatgcataacatcctcaataaatatattagttccctttcccttgtgatgctaccatacccaaatagccattgtgatgtttccttttcatgcacttcagctttctttttctaagtagttctctgtttctcaaactccaggttc

SEQ ID NO: 644518 - DNA, 584 bp, Homo sapiens
ttaatttatatctttgtatacaatgtgtcattttaatctacctgttttcaaaatgtttctccttattgttggttttcaaaagttttattacaatgtgtctaggtgcaattttatgttcttaaacttcttaggggtcactgagtttcctggatctgcaagttacatatttcacaaaacttggaaaatatcctgaccctttctgtctctcctctctaggacttcagtgacatatatgttagaccacttgatgtcccacatgcyacggagaatcttcttaaatttttttctctctgttcttcaaattatatactccctattgatttatatttaagcgtattgactcttctaccatctctaatatgctattaagccaatcaggacattttttatttcagatactgtatctttaattctaaaatttctatctgcttctttctcatactttccatctgttaatgtattactccacatttttccttaaaaacattaacatatttataatagctactttaaggtccttgttcaataattccaatatctcatttctgtgagagttgagtactattaattgcttttttctgggc

SEQ ID NO: 644519 - DNA, 551 bp, Homo sapiens
tgaatttgtttataaattctaaaatgtttttgctggagtcttagatttcttcaaatataagaacatatcatctacaaacaaggataatttgacttcttcctttccagtttggatgccctacatttctttctcttgtctgattgctcaagataggacttccagtactatgttgaataatagtggtaagagtggacatccctgtatcttttcagaccttagaggaaaggctttcagttttcccctgcttattatgatgccagctgtgaatctgtctcatgtagcttttattatgttgaggtatgtttcttctatrctgagttttttgagggttttcatcatgaagggatgttgaattttatcaaatgctttttcagcatcaattgaaattattatatggtttttgtccttccttctgttgatatgatatattacatttattgatttgcatatattgaattatccttgtatacctgggataaatcctgattggtcataatgaattatcttttagatgtattgttgaatatggcttgctagtattttgttgggga

SEQ ID NO: 644520 - DNA, 551 bp, Homo sapiens
tgaatttgtttataaattctaaaatgtttttgctggagtcttagatttcttcaaatataagaacatatcatctacaaacaaggataatttgacttcttcctttccagtttggatgccctacatttctttctcttgtctgattgctcaagataggacttccagtactatgttgaataatagtggtaagagtggacatccctgtatcttttcagaccttagaggaaaggctttcagttttcccctgcttattatgatgccagctgtgaatctgtctcatgtagcttttattatgttgaggtatgtttcttctatactgagttttttgagggttttcatcatgaagggatgttgaattttatcaaatgctttttcagcatcaattgaaattattatatggtttttgtccttccttctgttgatatgatatattacatttattgatttgcatatattgaattatccttgyatacctgggataaatcctgattggtcataatgaattatcttttagatgtattgttgaatatggcttgctagtattttgttgggga

SEQ ID NO: 644521 - DNA, 551 bp, Homo sapiens
tgaatttgtttataaattctaaaatgtttttgctggagtcttagatttcttcaaatataagaacatatcatctacaaacaaggataatttgacttcttcctttccagtttggatgccctacatttctttctcttgtctgattgctcaagataggacttccagtactatgttgaataatagtggtaagagtggacatccctgtatcttttcagaccttagaggaaaggctttcagttttcccctgcttattatgatgccagctgtgaatctgtctcatgtagcttttattatgttgaggtatgtttcttctatactgagttttttgagggttttcatcatgaagggatgttgaattttatcaaatgctttttcagcatcaattgaaattattatatggtttttgtccttccttctgttgatatgatatattacatttattgatttgcatatattgaattatccttgtrtacctgggataaatcctgattggtcataatgaattatcttttagatgtattgttgaatatggcttgctagtattttgttgggga

SEQ ID NO: 644522 - DNA, 630 bp, Homo sapiens
tactagttatttcatatgtcagctcctgtatcaatttattgtgattcttagttttcttggattgagttttgtcattctgaattgtgatgatctttgttgctatccataatctgaatctcatttccatcatttcagccaacttagcctggttaagaacccttgttggagaactggtgctgtcatttgtagggaataagtctggctatttcagttgccaaagttcttgcatcgtttctttttagaggcttcactggctctgtgtcactcttgggtgggtcctgccatacttttctttgttcttcttgggttgaggtttttcttgatgaatccccacgtgtgccaggatgtttcagttgaaggtgctatatttactcatcctatttctctctatgagagtggcatacactagctgcctttggttggccrttctcctccaccagctatctgaatttccaaatcatgtactgtgcatctacattcttgtgctttcctccaagtgagggatcttccaggttctccccatccttttattttcagtctgtgtttttattggtgaagtgtgtttcttgtaggcaacagatcaaagggtcttgtttttttcactgattcagccactctgtttctttttat

SEQ ID NO: 644523 - DNA, 554 bp, Homo sapiens
tttttaaactctggcctccacgcattctaggggcgggggtgtctttttttttttttttttttttgagggagggtggcaggctrgctctagttcctgaaacagacgctccgaagtcgagttagttatcccttggccgtcttagtactcctcgggtttaatcttatttccacagagtttcttctgccgggatctccaccgaggttaccgaacaaaaacagcacagagcccagactggaggcagacccgggcgctgtctctgctaggcttatttacgtttagggcttttctttcctttttttaaagtgatgggggaagtctcattgtgtggcatgtgacagttcgtttgcttcaaaacaacaggacgtaaccacgcgaaaactagaaccagaggagggggcatgcgtttcttcaagtcagccaaacagcatctggtctttgaaagcgcaatttcatcaagaaactcctgttggatccctcctaactgtggaccaaaataagccaacaggaacgggtgtttacttaatggctagtttctgtttgaaatgggaggaggg

SEQ ID NO: 644524 - DNA, 554 bp, Homo sapiens
tttttaaactctggcctccacgcattctaggggcgggggtgtctttttttttttttttttttttgagggagggtggcaggctagctctagttcctgaaacagacgctccgaagtcgagttagttatcccttggccgtcttagtactcctcgggtttaatcttatttccacagagtttcttctgccgggatctccaccgaggttaccgaacaaaaacagcacagagcccagactggaggcagacccgggcgctgtctctgctaggcttatttacgtttagggcttttctttcctttttttaaagtgaygggggaagtctcattgtgtggcatgtgacagttcgtttgcttcaaaacaacaggacgtaaccacgcgaaaactagaaccagaggagggggcatgcgtttcttcaagtcagccaaacagcatctggtctttgaaagcgcaatttcatcaagaaactcctgttggatccctcctaactgtggaccaaaataagccaacaggaacgggtgtttacttaatggctagtttctgtttgaaatgggaggaggg

SEQ ID NO: 644525 - DNA, 561 bp, Homo sapiens
gatgatgatatcctttggaggagccaggagtgccatccatcccactctgtcatctatccctctaaagctttcctccacagtccactgtttctgytctgctccagaggacagcctttctctttttctcccccagacctcctccattgactccttctgaaacttcctctttggggcagccaccctaggttaagaagcacaagaaggatttttcagctgaccaaaccataagactcagaaaatatcctccacggagatccaaatacaagtcatctctagaagtcatcttctctttcttccactcaaagccatcatagttcgacttggaaaggctctagggaaagtgagtctagtctgctgttgatcctcaagtagagtatttgtaactctcttttatccttcctattgtgatttttggccatgttctgttgagattattttgtttccactaaataggaagtttcaggtgaaggataagggaagtagggaggcagggacagagaatgctgggtagtgtagtacacacttgttttttgttgtttttgttgtttgtttgtttgtttt

SEQ ID NO: 644526 - DNA, 602 bp, Homo sapiens
ttatttgggggaggttttggttttagacaggcctgggtttaatttctggtacttctgatacctgtttgtgagcaagatactgaaactcattaaggccccatttccctctcagcatgatgaagttcataatacttatgaggttattgtgaagattaaattatgtatagtatctgtaaaggctgtagcatagtgcccggcaatagctgaaagtattattagctgttatggttggtgcctgatttctgctcttgaaattgagtccatgctaacaaagaaggcccttgctacttccctgtaataggaagaagtttttctaactggctgaatgttttttttcctttttcstttttttttttttttttctaatatctctcaccctgactgaatcagactattcttaccacaggaaaagatatttgttagttacgtgttaacttttttccctttaaagtctcctgtgtccatattcagatgaatcctctgattttaggctatttattaccagggtcctgatagacctagtgtatctacatattttgtttccagccccttcgtttatccttgggaatctgagtcccacagcagggatacaaaggtgctat

SEQ ID NO: 644527 - DNA, 555 bp, Homo sapiens
acttctaagaacatctagaaacaaatttaataaaagaaatgtattctatgtttctttcaattatgtttcataattctatatttaaaattataaaatttcacaatagactcaaataaatcacaatcagaattccagtatacgctttttatcaaaattgacaacattctrgaatttatatacaaattcaaaatggctacatctagttaagataaacttggaaaaaaaaagttgggagagttatattactatttatgttggagttcaggatctagaacaaagtctggtgaattataaggaatctttttgggggagtgagagggaggatctatagtccttgagaattgggctctgctggtgagtttaaagagaggcacttcgtctgagtaaatgacagtttcctaattcaatcagttttacaccttaactggagaaagaggtgaataaagaccatgacagtggagtggataacctgaatggatgtattgccggaaggtatcagacacaccatctatagagtagaaaggtttttgtactcttctgagaaagccaggttag

SEQ ID NO: 644528 - DNA, 370 bp, Homo sapiens
ttgcccacctcgacctcctaaattgctaggattacaggcatgaggcaccacgccagcctgaactacactattctttattttgtttgtttgtttgtttttccaaaaatccttgatgttatgccttttctggatcaattatcagccacacacttcagcaatgtgtaagactctgttatctttgtgtagcacaaaatgaagaagaaactattttaaataggagatgtaaataagtattttctagtaacttcagagatggctcttaatctggtatgagtttaccaaacatgaattgacagaccattaaaaacagaggacacaatagytaaaccacagccatcttttctcaaatccccacctttttttttaacca

SEQ ID NO: 644529 - DNA, 484 bp, Homo sapiens
gagagacacaagaaggtaccaaagaaaatgaaaaaacccttggtagtaacggaagcatgaaaaattaagcgcccccatttctcccaaaccaagttcgcgtatgttttcgtgaacaaacaccttggatctttccggttcgccagggcagcgagcaaagcagcagcgaacggaaaccccgcagtctgcgcaccgcacgtaaaccgacgctcgcaggagaggggaagtgagtggcagggttccctgccaagactcactgcttgtaaacaggcagtgagtggaagcagcagcagctctggagagtaagtgggtcttatgtaaagtgccatttgccacatattgttatttccaaaggatttcagaataccctcgaactcgaaaaacagagtgagtgtggaggggaggggggtgctccacgtggaggagggtcgcgagaaggrgagtgcgccgggctgatggtcagcggtgcctgcgggggtcgatgccg

SEQ ID NO: 644530 - DNA, 600 bp, Homo sapiens
caaactcctggcttcaagcgatcttcctgccttagcctcccaaagtgctgggattacatatgtgagccaccacacccatcccagtcttggattttttatgttatttttcataatgaaaagcaaaggattgtttgggatctataggtatcatatattagagattgcatatatagggttagatttgaggtttggaatttataggcttaagatttttaactcttggccgggcacggtggctcatgcctgtaatcccagcacttttggaggccaaggcgggcgagtcgcaagttcaggagttcaagaccagcctggccaacgtggtgaaatcctgtctctactgaaaatacaaaatattagctgggtgtggtggcgggcacctgtaattccagctactcgggaggctgaggcaggagaatcacttgaacccgggaggcagaggttgcagtgagccgagatmgcgccactacactccagcctgggcgacagagtgagactccgtctcaaaagaaaaaaaagaaaaagggacattttttgctgtggatccacacctgtaggactctgccatgatcctttttaccaggaggtcttccatgtaggtat

SEQ ID NO: 644531 - DNA, 627 bp, Homo sapiens
cttgagcctgggaagttgaggctgcagtgagtcatgatcgtgccaccgcactccagcttgggtgacagagcaagactctgcctcaagaaaaacaaaaaggtagccattcggaaggaatccctcggtaggcaccttggacttcgtagcttctggaactgtgagaaataagtgttgtttaagccacaaatctatggcatttgttacagcagccagagcagaccaagacagagtatttgctgataaagctgtaatttgttttgtgggaatttctgtactcatgttttatcttaagattaaatatttaaaacaaaaaacaaaagcaaactaaaaacctttccagatcccttacctgtgccttggccaatttcttttccagaaggtcccgttccctctctgtttgctggagacgtttattaagttccactatatctccctttagtgatgccagggctgctgaatggagctgtggtgacagaaaggmggagattagagtattgtagcagagatgtatttccttcccttcattcccgcaactagtataaccaaataaaaagcctatcatccaaaaagcaacacttttgagaatgaaggtaagtgttatgagttttggggacaacaggcataagt

SEQ ID NO: 644532 - DNA, 599 bp, Homo sapiens
ggcagtggaaccacaccatactagtcattgtgttctctaccaccactcacttgcagcaaaaaaaaaaaaaaaaaagccaatttcatttcagaatgtcttcaatgatgcagtaaaaatgattacttttattaaatctcaacccctgaatacatgtcttttcaatattttgttgtgaggaaattacacataaagtgagcaattttgtaacagagtgcctctgttgagaaccctcccaggaacagctatcctcagcacctaggggacagatttccagcaagttctgcagcatagcaccacagtgcttccctgccattccatgagccacacccctgccatctgcagtcaagtctggatcagctctaagtaaagggcagagacctctttcctggtcactctatctcagctgtagggtagtggatgccccatrtctgctattgtattgtttagtatcccccttacattttactatctaatccctcaattactccaatgctccgtgtaattttaaagtctttatattaaacttccttgttcaacttcctgtgtggtttctctcttctgactggaccaggttggtaagatggtttcctctacaagga

SEQ ID NO: 644533 - DNA, 237 bp, Homo sapiens
ccaatgaaaaacaaaaataatacagataatacaaacctgatcattctaagtatattttatttagttttaatacagtcagaatgataacacatgtacattctaattctcatattgatcttattaatattacactayataagtcaaatagaagaaaagctctggaattatcatgaatgatcaatatttttcttagtttatcctagaaatgagaactttctgtcatatcatagtgacttg

SEQ ID NO: 644534 - DNA, 543 bp, Homo sapiens
gtctctatccatgggtaaaattttttcatacacattatttttaagtgaagtacttgcataaagttgcttttttcctcttggaactcaccctttgagaggttgtacaataacctgttatataaatgtacagtggatatttcaatagtggcttatattgccttaagtgagacacacgtgagtttcatcaagggcattgctgtatataatgtgttgtcacaccyccgtgtgggactgggcctcgtaaccattatatttttgggaaagtcacattctgatccacctccccactttaccttattttttgattcctttaaaaatatttagaaaaacacaataatggtatagttgtatcagccagttgaaatttttaattaaaaaataagtacaacattcacatgttttgaagtttataatagagtattaatatagatgtaatagtattagcaatgtttgtttttaagctgagtaattctcagagattttattgatatgcttcaaaatgtacatatagtcctttgtatgcatccaataacacacaaaaag

SEQ ID NO: 644535 - DNA, 532 bp, Homo sapiens
taagaaattttagcaaattccctggtctctattaggtagatgacagttacaaccctatacatatttatagggtggaacctatatatgtttcttccttactatctgaaatagctttaataaatataatttttctattgtctttggccctcaattttcccttcttcttacaagagtaacagatccattggtctcttcctttatatcattaactgataattattgaaaggcatcttttatgtctctacctcctttcccatttcaaaatttctrcatatcttattttacttaatttttaaactttttcacaaaagtttaaagctctatatagtaatggtattattcctgaaatcagatttaaaaaaatgtaaaaaatacaagtaatgcttcagggttatagggttatgagtgtttagggaagaatttttgtgacatggtacaattcactggaggagttgtttaaaactttttgttttaaacaaaacaatttaagacttgaaagtattcagaatgtataatacaatctttatcatca

SEQ ID NO: 644536 - DNA, 561 bp, Homo sapiens
tcctgttttaaagtaaaagccttcttttcttaaaaaaaaaagttgccatactttttttttaaataaaaataatgtgtgaattggtagctcaatgttttgatttccagcaccattgatgaagaattttgtcttttcaaacatttattgagcatcaggtatgctcttctgggaaatgcatgaacaaatcctttacccattttttacatctggttatttgatttttcccttatatgtctgagtgccatatatggtcttcctatcatctagttttggattacatgagttttaaatatgtacttctctctgagactttaaaaaaatattggtggtgtctttgccctatagaagttttaaatgtrccaacttgaaatctgatataagactaaactcaccaaaatgatgcctatattccactttttgttagataaacagaatcctagttttgttatttcattatttgttttagaataggctaaagtttgggagaactcattaggatgggtggcaaaagaaatgagccaggcttcaggaatatctcacacacagcagcctggggaaggg

SEQ ID NO: 644537 - DNA, 604 bp, Homo sapiens
atgttttattggattacaaagaattttttaaaaaagaatttttcaaacaagaatttttcaaaattaattcatttccttaatacatccattatttatttacttttatttatgttttcagtttcctttaattgatagaaaatttacatgcagtaaaatgcacagaacttcagtatacaattcaattattttggataaatatgtacacctaggcaattgacatctcaatcaagacacagaacattctcaacactctggaaagatcctttgtgtccattttagttatgcttactcctatcaccaaccatgtttctggtttctattgccatatattagtttatcttgtccttgaatttcacrtaaatggaatcatacactgtgttctcttctgtgccttcttgaactcaatgtaacattttgagatgcatttatattacaggatgtacctataattcatttctatttattgctaaatatgtttaccattgtaggaatataacaagttttattatccatatttgataggaaaacatttttggttttagtttttatactattacaataatattgctataaaccttcttgtacaagtcatttttgtacatat

SEQ ID NO: 644538 - DNA, 614 bp, Homo sapiens
caattttatttctaggggataaaggattattaccaagtatatgacatgtactataatatattttgtttttgtaatatacagtattgcatttgattcatttctgtattattttcctggtgcaacttcctaccacrctttgacaaacaaggaatgagctgcttatctagtcaagatttatagcatagggattctatagtctttggaagttgtcattggcagtgcaaatagcaaggttaacatggttgtttacgaaataaatacaaacttcagttagtatttcatcttgaaaaccagtttaagtgctctttagataacgtcttataattgaagttcttttataagtttggcctttatattgagttttgtcaaattcaaggtcagagagaaattctaactttaatcggttcaaaattgtggctattgtcttctcataaaatgtactagctgttacttgcctttctatcatcttcccttttcttcttgtatctcatatatgtagggtttttttaaaaataattcattaagttgaattagtcacagtggaaaagaagttcttgcgttttggtttagtgaatgccttctgacttattacatcaacagtcaaaagcagttca

SEQ ID NO: 644539 - DNA, 614 bp, Homo sapiens
caattttatttctaggggataaaggattattaccaagtatatgacatgtactataatatattttgtttttgtaatatacagtattgcatttgattcatttctgtattattttcctggtgcaacttcctaccacgctttgacaaacaaggaatgagctgcttatctagtmaagatttatagcatagggattctatagtctttggaagttgtcattggcagtgcaaatagcaaggttaacatggttgtttacgaaataaatacaaacttcagttagtatttcatcttgaaaaccagtttaagtgctctttagataacgtcttataattgaagttcttttataagtttggcctttatattgagttttgtcaaattcaaggtcagagagaaattctaactttaatcggttcaaaattgtggctattgtcttctcataaaatgtactagctgttacttgcctttctatcatcttcccttttcttcttgtatctcatatatgtagggtttttttaaaaataattcattaagttgaattagtcacagtggaaaagaagttcttgcgttttggtttagtgaatgccttctgacttattacatcaacagtcaaaagcagttca

SEQ ID NO: 644540 - DNA, 587 bp, Homo sapiens
cacttcttttttgcatttttttcatttttaatttttgtgagtacatagaaggtatgtatatttatgaggtacatgggatattttgatacaggcatgcaatgtgaaataagcatattatgaagaatgggttatccatcccttcaagcatgtatcctttgagttataaataacccaattacagtcyttaagttatcttaaaatcacaactaagttattgctgactacagttaccctgttgtgccatcaaatattaggtcccactcatttcttccaactatttttctgtgtacccatcaaccaaccccagctcccctcatcctcccactaccctttcccagcttctggtaaccatccttctacttcctatgtcaaagacttcaattgttttgattattagattccatgaataaacgagaatattcaatgtttgtctttctgtgcctggcttatttcacttaacataatgacctccagttccatccacgttgttgcaaatcactggatctcattcttttttatggatgactggtactccattgtgtatatgtactacattttcttcatccatttatctgtcaatggacacg

SEQ ID NO: 644541 - DNA, 587 bp, Homo sapiens
cacttcttttttgcatttttttcatttttaatttttgtgagtacatagaaggtatgtatatttatgaggtacatgggatattttgatacaggcatgcaatgtgaaataagcatattatgaagaatgggttatccatcccttcaagcatgtatcctttgagttataaataacccaattacagtccttaagttatcttaaaatcacaactaagttattgctgactacagttaccctgttgtgccatcaaatattaggtcccactcatttcttccaactatttttctgtgtacccatcaaccaaccccagctcccctcatcctcccactaccctttcccagcttctggtaaccatccttctacttcctatgtcaaagacttcaattgttttgattattagattccatgaataaacgagaatattcaatgtttgtctttctgtgcctggcttatttcacttaacataatgacctccagttccatccacgttgttgcaaatcactggatctcattcttttttatggatgactrgtactccattgtgtatatgtactacattttcttcatccatttatctgtcaatggacacg

SEQ ID NO: 644542 - DNA, 595 bp, Homo sapiens
cactatagtaaaaggaaagtggtcaacagcattaattttatagatcagtcaatgattgcagagtatgataaaaatctacttgtttggacttgtgagaagtttaagatcttgggataagtgggacagaatatawattgcagatggttaaggagtaagtatatgacaagggagtggaggtagaaaaggaattctgtgaagaaaggaagaagaattggtaacagctcgatatagaagtaaaggaataaatcaatcaaaaggacttattgaagttgtaggaaattgaggtgaaaacaaagtgttgggaaaaattctaaaggaaacaaaaagagttgggattgaaaggccagctggacaattaatattggaaaggcacttagtattgaaggggagaagttcagagcatttacagtacatgaactctgtgttctaagtgatgtaagaggcaaaatcaaatgctgagaataatggacacagatcttgtatttctgaaataaaattggctatgtattatttcatgaaagattgtgagatttaatttgctgaaatattatttagaattttagtacttatattcatcaataatattggcttgctt

SEQ ID NO: 644543 - DNA, 595 bp, Homo sapiens
tattgacctgtacataagaaactgggtgtcaaattagaacatagaatgcttatttcctgatttaggamatgttttgtgttttttatttgtttatggacccacaaaagcaattgcttttgaaattttaactaattttctccctgtggaaatgtgagatgcctacaggaactgccaggatcacatcctccatgcctctactcaacaagaataaccccgaagcaggcaaaatggacaagtaccatatcaacaatgaaatacccactgattatgcactgacggttttaattgttgatgatcatgtttgtattccacatcagaagcttgatccctttcatagataattaggaccaggagaacaatctgagcaatgaaccaattcacacatgtaccatcagtagagcctccacatttacccccctcttgatgtcctccatgtagggatgttagtcactagtacaagagaggtaacctgggtgctcaattacatgatttatgaattacactgatctgagcagagacagcaggtgaagcaacttgggtgtagttccaagatatatattctagtgaatagacttgcatcagccttttttttctg

SEQ ID NO: 644544 - DNA, 608 bp, Homo sapiens
aaactgccttccaaaaagcttctagggtaktctgatgctactgctccggaactacactttgagtagcaaccctaaatccagtgtcaacagctaagtatccacatggaatgtcagatacagtttgttgcttatttccattatgcaatgtgagctcaaagaacacatgctcctcttactattacccctcccacctccatgaaaagttactgagagtctaaggagcgctgtgcatttcaaaatcaaatataaatgaattaggttggatcgttcatgtgactgctcctctcccctggtgatgacattcgtgggcacatatataatacacaggcactctgctaaagcagtccaaagcaagttttcttcgaaatctctacacttgtcttggggctttagctgaatttcctgttaaatggcattaatgaggactcagagaaataaaaccacaaaaattggttttacagtgtaatgtggggaaagtgaccaagtgttcacatggaggaatacattcaactcatccccacgtcctgtaactccgaagtgaacattcatgattttgaggccatttccaattgaaggtgtcagcctagtaggggcagagcgctgaatct

SEQ ID NO: 644545 - DNA, 608 bp, Homo sapiens
aaactgccttccaaaaagcttctagggtattctgatgctactgctccrgaactacactttgagtagcaaccctaaatccagtgtcaacagctaagtatccacatggaatgtcagatacagtttgttgcttatttccattatgcaatgtgagctcaaagaacacatgctcctcttactattacccctcccacctccatgaaaagttactgagagtctaaggagcgctgtgcatttcaaaatcaaatataaatgaattaggttggatcgttcatgtgactgctcctctcccctggtgatgacattcgtgggcacatatataatacacaggcactctgctaaagcagtccaaagcaagttttcttcgaaatctctacacttgtcttggggctttagctgaatttcctgttaaatggcattaatgaggactcagagaaataaaaccacaaaaattggttttacagtgtaatgtggggaaagtgaccaagtgttcacatggaggaatacattcaactcatccccacgtcctgtaactccgaagtgaacattcatgattttgaggccatttccaattgaaggtgtcagcctagtaggggcagagcgctgaatct

SEQ ID NO: 644546 - DNA, 608 bp, Homo sapiens
aaactgccttccaaaaagcttctagggtattctgatgctactgctccggaactacactttgagtagcaaccctaaatccagtgtcaacagctaagtatccacatggaatgtcagatacagtttgttgcttatttccattatgcaatgtgagctcaaagaacacatgctcctcttactattacccctcccacctccatgaaaagttactgagagtctaaggagcgctgtgcatttcaaaatcaaatataaatgaattaggttggatcgttcatgtgactgctcctctcccctggtgatgacattcgtgggcacatatataatacacaggcactctgctaaagcagtccaaagcaagttttcttcgaaatctctacacttgtcttggggctttagctgaatttcctkttaaatggcattaatgaggactcagagaaataaaaccacaaaaattggttttacagtgtaatgtggggaaagtgaccaagtgttcacatggaggaatacattcaactcatccccacgtcctgtaactccgaagtgaacattcatgattttgaggccatttccaattgaaggtgtcagcctagtaggggcagagcgctgaatct

SEQ ID NO: 644547 - DNA, 608 bp, Homo sapiens
aaactgccttccaaaaagcttctagggtattctgatgctactgctccggaactacactttgagtagcaaccctaaatccagtgtcaacagctaagtatccacatggaatgtcagatacagtttgttgcttatttccattatgcaatgtgagctcaaagaacacatgctcctcttactattacccctcccacctccatgaaaagttactgagagtctaaggagcgctgtgcatttcaaaatcaaatataaatgaattaggttggatcgttcatgtgactgctcctctcccctggtgatgacattcgtgggcacatatataatacacaggcactctgctaaagcagtccaaagcaagttttcttcgaaatctctacacttgtcttggggctttagctgaatttcctgttaaatggcattaatgaggactcagagaaataaaaccacaaaaawtggttttacagtgtaatgtggggaaagtgaccaagtgttcacatggaggaatacattcaactcatccccacgtcctgtaactccgaagtgaacattcatgattttgaggccatttccaattgaaggtgtcagcctagtaggggcagagcgctgaatct

SEQ ID NO: 644548 - DNA, 576 bp, Homo sapiens
aactagaaaaaaaatcacctatgagaaagtcaacaaaatgtcaactctggatttgtggctattttcagaatattaattttttgatatttaatggcattgtgaatatatttatttttaagaattccttgtcttctacagatacatataaggtaattaaaaatgataggatgtataggttttacttcaaaatmattcagaggaagaaggaatgtatataaatgaagtgggaatataaatgaaacaaaactggctgtggccaggtgtggtggctcacgcctgtagtctcagcactttgggagaccgaggcaggtggatcacctgaggtcaggagttcaagaccagcctggccaacgtggtgaaacaccatctctactaaaaatacaacaattagccggatgtggtgccgggtgcctgtaatcccagctactcgggaagctgaggcaggagaatcgcttgaacctgggaggtggaagttgcagtgagccaagatcatgccactgcactccagcctgggcaaccacagcaaaatcccacctttaaaaacaaacaaacaaacaaaaaacaaccaaaaaaaaa

SEQ ID NO: 644549 - DNA, 576 bp, Homo sapiens
aactagaaaaaaaatcacctatgagaaagtcaacaaaatgtcaactctggatttgtggctattttcagaatattaattttttgatatttaatggcattgtgaatatatttatttttaagaattccttgtcttctacagatacatataaggtaattaaaaatgataggatgtataggttttacttcaaaatcattcagaggaagaaggaatgtatataaatgaagtgggaatrtaaatgaaacaaaactggctgtggccaggtgtggtggctcacgcctgtagtctcagcactttgggagaccgaggcaggtggatcacctgaggtcaggagttcaagaccagcctggccaacgtggtgaaacaccatctctactaaaaatacaacaattagccggatgtggtgccgggtgcctgtaatcccagctactcgggaagctgaggcaggagaatcgcttgaacctgggaggtggaagttgcagtgagccaagatcatgccactgcactccagcctgggcaaccacagcaaaatcccacctttaaaaacaaacaaacaaacaaaaaacaaccaaaaaaaaa

SEQ ID NO: 644550 - DNA, 548 bp, Homo sapiens
tgctgccaagttctcatttttagagaggcagtgtggtaactgcccaaccatcacttgctggtcrcctgaccttcctggtgggttgggggtagagccctctcctgcctggttcatctctgtctaactacctgtaacactcccatttggagtccaggagcaacttaagcgtcagtgataaagattctgtgttagcaggcccagcagtcagcaatgatcagtcagaagaaactgaacacttaccagtgacatgcagaggggaggggagaaagatgacaacttggacgaaaagtaaattctattaaaaaaaatgtgaggggccaacactttctgagaccaaaacacgatttctcttatcaacaatttagtgagtgaattgagatccaaatttgatttgactaatacttcaaaacaaaaagcagaaatataagaaaccacgaggaaaaagaagggacgtggcagataaatgaagaataacaaaatgtaaattactagaatttcacaaggagtaaaaggtattcgtggaagtaagacaataattaaagaatagt

SEQ ID NO: 644551 - DNA, 562 bp, Homo sapiens
tggaggcatgtactgaggctgggactaaatatttcaataatttcttatgtgyataacagaaaaagaagtttagacttcaggtaaagttcattctcagttgtaaataaggactcagaaattgaaggaactatctgtgagatacatttcactaaggctattgaactaaaattaacaaaatatcctggcaaaacctggaagttaggaataggggatcagtcaaaagtgaaaaagaattaagagcattgcaaaactcttgttttcaaataagtactagagaaacgtgttctgatcaggaaggcagagaaagcgcaggtaaccatttaatggggtgggtaatccaagtagaatttcaagttaggtacaaaatggagtatataacaacttgacaaaaaccaagggcagaaataacaatataaaataaagaagatgtgaggaatgtacagtaaaaaagtcattacaccaaatgtgtatagactaaattctagcattaaataaattttgaaatgtgggtgggtgaagggatcacaggaataagaaataaaatcaggatgaacataatcca

SEQ ID NO: 644552 - DNA, 562 bp, Homo sapiens
tggaggcatgtactgaggctgggactaaatatttcaataatttcttatgtgcataacagaaaaagaagtttagacttcaggtaaagttcattctcagttgtaaataaggactcagaaattgaaggaactatctgtgagatacatttsactaaggctattgaactaaaattaacaaaatatcctggcaaaacctggaagttaggaataggggatcagtcaaaagtgaaaaagaattaagagcattgcaaaactcttgttttcaaataagtactagagaaacgtgttctgatcaggaaggcagagaaagcgcaggtaaccatttaatggggtgggtaatccaagtagaatttcaagttaggtacaaaatggagtatataacaacttgacaaaaaccaagggcagaaataacaatataaaataaagaagatgtgaggaatgtacagtaaaaaagtcattacaccaaatgtgtatagactaaattctagcattaaataaattttgaaatgtgggtgggtgaagggatcacaggaataagaaataaaatcaggatgaacataatcca

SEQ ID NO: 644553 - DNA, 562 bp, Homo sapiens
tggaggcatgtactgaggctgggactaaatatttcaataatttcttatgtgcataacagaaaaagaagtttagacttcaggtaaagttcattctcagttgtaaataaggactcagaaattgaaggaactatctgtgagatacatttcactaaggctattgaactaaaattaacaaaatatcctggcaaaacctggaagttaggaataggggatcagtsaaaagtgaaaaagaattaagagcattgcaaaactcttgttttcaaataagtactagagaaacgtgttctgatcaggaaggcagagaaagcgcaggtaaccatttaatggggtgggtaatccaagtagaatttcaagttaggtacaaaatggagtatataacaacttgacaaaaaccaagggcagaaataacaatataaaataaagaagatgtgaggaatgtacagtaaaaaagtcattacaccaaatgtgtatagactaaattctagcattaaataaattttgaaatgtgggtgggtgaagggatcacaggaataagaaataaaatcaggatgaacataatcca

SEQ ID NO: 644554 - DNA, 562 bp, Homo sapiens
tggaggcatgtactgaggctgggactaaatatttcaataatttcttatgtgcataacagaaaaagaagtttagacttcaggtaaagttcattctcagttgtaaataaggactcagaaattgaaggaactatctgtgagatacatttcactaaggctattgaactaaaattaacaaaatatcctggcaaaacctggaagttaggaataggggatcagtcaaaagtgaaaaagaattaagagcattgcaaaactcttgttttcaaataagtactagagaaacgtgttctgatcaggaaggcagagaaagygcaggtaaccatttaatggggtgggtaatccaagtagaatttcaagttaggtacaaaatggagtatataacaacttgacaaaaaccaagggcagaaataacaatataaaataaagaagatgtgaggaatgtacagtaaaaaagtcattacaccaaatgtgtatagactaaattctagcattaaataaattttgaaatgtgggtgggtgaagggatcacaggaataagaaataaaatcaggatgaacataatcca

SEQ ID NO: 644555 - DNA, 545 bp, Homo sapiens
tgaaacagtcatgccccaactataagaccacatctttccattcacttttgcttctttatttaaactataagggctgtttgaccatgcattgtgccacaacccatggattccagcccaatccctacttattyaccctttctggtccaaaaccaggtttcatcgtttatcactataattacaccctttcaaactcccgaagcttttctgcaccttgctcttctgtcacatttgcattgtccatgtccaaacagagagaaaagagaaactcaaccaccttgtcatgtttttccaaatggattggctggaaaaagtagtatctatgggacagtctcacttttatcttcagaagagctctcacaaaaaactacactcaggtttgtattcccatattttaaaacaattatctatgccaaatatcctcaccccatccccaatcatgatcctgactgcccactgccagctgatggccttatcttaagccacattgacagaatagagagaaactatcagtgaggaaacacctcactgccctaccaccaaaacct

SEQ ID NO: 644556 - DNA, 545 bp, Homo sapiens
tgaaacagtcatgccccaactataagaccacatctttccattcacttttgcttctttatttaaactataagggctgtttgaccatgcattgtgccacaacccatggattccagcccaatccctacttattcaccctttctggtccaaaaccaggtttcatsgtttatcactataattacaccctttcaaactcccgaagcttttctgcaccttgctcttctgtcacatttgcattgtccatgtccaaacagagagaaaagagaaactcaaccaccttgtcatgtttttccaaatggattggctggaaaaagtagtatctatgggacagtctcacttttatcttcagaagagctctcacaaaaaactacactcaggtttgtattcccatattttaaaacaattatctatgccaaatatcctcaccccatccccaatcatgatcctgactgcccactgccagctgatggccttatcttaagccacattgacagaatagagagaaactatcagtgaggaaacacctcactgccctaccaccaaaacct

SEQ ID NO: 644557 - DNA, 545 bp, Homo sapiens
tgaaacagtcatgccccaactataagaccacatctttccattcacttttgcttctttatttaaactataagggctgtttgaccatgcattgtgccacaacccatggattccagcccaatccctacttattcaccctttctggtccaaaaccaggtttcatcgtttatcactataattacaccctttcaaactcccgaagcttttctgcaccttgctcttctgtcacatttgcattgtccatgtccaaacagasagaaaagagaaactcaaccaccttgtcatgtttttccaaatggattggctggaaaaagtagtatctatgggacagtctcacttttatcttcagaagagctctcacaaaaaactacactcaggtttgtattcccatattttaaaacaattatctatgccaaatatcctcaccccatccccaatcatgatcctgactgcccactgccagctgatggccttatcttaagccacattgacagaatagagagaaactatcagtgaggaaacacctcactgccctaccaccaaaacct

SEQ ID NO: 644558 - DNA, 545 bp, Homo sapiens
tgaaacagtcatgccccaactataagaccacatctttccattcacttttgcttctttatttaaactataagggctgtttgaccatgcattgtgccacaacccatggattccagcccaatccctacttattcaccctttctggtccaaaaccaggtttcatcgtttatcactataattacaccctttcaaactcccgaagcttttctgcaccttgctcttctgtcacatttgcattgtccatgtccaaacagagagaaaagagaaactcaaccaccttgtcatgtttttccaaatggattgrctggaaaaagtagtatctatgggacagtctcacttttatcttcagaagagctctcacaaaaaactacactcaggtttgtattcccatattttaaaacaattatctatgccaaatatcctcaccccatccccaatcatgatcctgactgcccactgccagctgatggccttatcttaagccacattgacagaatagagagaaactatcagtgaggaaacacctcactgccctaccaccaaaacct

SEQ ID NO: 644559 - DNA, 288 bp, Homo sapiens
atttagtctatacacatttggtgtaatgacttttttactgtacattcctcrcatcttctttattttatattgttatttctgcccttggtttttatcaagttgttatatactccattttgtacctaacttgaaattctacttggattacccaccccattaaatggttacctgcgctttctctgccttcctgatcagaacacgtttctctagtacttatttgaaaacaagagttttgcaatgctcttaattctttttcacttttgactgatcccctattcctaacttcca

SEQ ID NO: 644560 - DNA, 288 bp, Homo sapiens
atttagtctatacacatttggtgtaatgacttttttactgtacattcctcgcatcttctttattttatattgttatttctgcccttggtttttrtcaagttgttatatactccattttgtacctaacttgaaattctacttggattacccaccccattaaatggttacctgcgctttctctgccttcctgatcagaacacgtttctctagtacttatttgaaaacaagagttttgcaatgctcttaattctttttcacttttgactgatcccctattcctaacttcca

SEQ ID NO: 644561 - DNA, 567 bp, Homo sapiens
tgatctcttcccagactactctatctaaaatagccaaactccaacccagcttcttcttagcgcttattccttcctggcatgattttgtatctttttggttattgtctgtccctccttactgtagaatgtgaactccacaagggcagggaactgttttattctctattgtatcttaacatgttggccagtacttggcacatagaaggtgctcagtaagtatttgttgaatgaatgaatgagtgccctgctcttcatcccttagttgttcccatacttaaggtggtcaacgcagatgccatctttactccacccatccaacccctctcatacatatatctactctcctgattataagcagttcccaattctaaagaaattgggarcttttagactgtgtcatccataaaaactgatgaacaggagggggcagccagaactgaggtatgggcaaggtggtgcaggagaaagtgtatggaccatggactcacactgatctgatttgaatcctgtctgggccacttaccagcagtgattagatgtatgcaaatgttctggcatagtacctgt

SEQ ID NO: 644562 - DNA, 483 bp, Homo sapiens
ggtttcccccatcctattctcatgatagtaagtaagttctcatgagatctgatggtttgataaggggttttccctttgcttggatcttattcttctccttccagtcatcatgtaaagaaagacgtgtttgcttccccttccrccatgattgtaagtttcctgaggcctccccagccatgtggaactgtgagtcaattaaacatctttcctttataaattacccagactcaggtatgtgcttattggaactcaccatattgaggtgctgctgccactcccagctgccactgtctgcatagcttagcctgagagagtactcttggaagccagagtggcagtactggggaaattaacactgctccttgcagctgtcaataaattgctgacttgccccttgggtggggtaccccagaggctcctgttttacactgtgccccagagttctccctggctttaagccctagttgtccacagtggtagctg

SEQ ID NO: 644563 - DNA, 483 bp, Homo sapiens
ggtttcccccatcctattctcatgatagtaagtaagttctcatgagatctgatggtttgataaggggttttccctttgcttggatcttattcttctccttccagtcatcatgtaaagaaagacgtgtttgcttccccttccaccatgattgtaagtttcctgaggcctccccagccatgtggaactgtgagtcaattaaacatctttcctttataaattacccagactcaggtatgtgcttattggaactcaccatattgaggtgctgctgccactcccagctgccactgtctgcatagcttagcctgagagagtactcttggaagccagagtggcrgtactggggaaattaacactgctccttgcagctgtcaataaattgctgacttgccccttgggtggggtaccccagaggctcctgttttacactgtgccccagagttctccctggctttaagccctagttgtccacagtggtagctg

SEQ ID NO: 644564 - DNA, 450 bp, Homo sapiens
atttgtatatgctgatggtgaagaccaagggctttcctactccgatgactcaaccctggctacacattaggatcactttgggagagctttaaagcaatcccaatgctcagtcccaagcagtaatttaagaaggtcatgcagctgccgcctctgctgaatggcagggccatgggaagctttactgatraaggcacaaaatggcaaggggggtgaaatgtacagagggtcctactcattgatcagaagtagcccggagaggctataacagcacagcaagacgctgaccagacccccttctcacttttatgtctcagaacttttctacagtgaatgtcaatgtgtttttttcctccacataacatctgtttcctttttgtctttaacatcacctcacttttcttttgaaaagccacgtctcaccctttgcactctgcatgggtaggatgaagc

SEQ ID NO: 644565 - DNA, 611 bp, Homo sapiens
atcacataatggaatactacccaaatattagacagatttgcataaccccgagaagtaatcttctaaatgaccaatacatgatattccaaatatgttcaaagtgaagataaaccaatggattttacaaaacaaaatatgacaaattatttctttcatatggttgcagatattacattgtaacttagattgaagaaactaccctgtgttgagtttggtatggtattaaagaagactaccttcaagtaatatgaaacatctatacacatattttccttttcaagtacatacatatgagagatttgatttctttatatgcttcaagcaaaaaacaaaacatttcacaacaaattgaatgcagaagcagttatgagaatccagacatcctccattaagttagactytaaagaggtttggataatggtaaagtaatgccactcttaattgtttttttgttttggaaaagaagaattttattttttaaaattatttattatactataaaattattaatgttatatttaaatgaaataatgtgtaaataatttaaagcttcttagctttcatgtgtaatatgggaaattttaacaagttaaatcacacaaaaaacagca

SEQ ID NO: 644566 - DNA, 610 bp, Homo sapiens
ctgagcctaagggtcattggcttcccagggacacagataaagcaagtatggtagttcccttttatctgtgggggataagttctaatatgcccagtggatgcctaaaaccatggatgataccaaactctatatatactaatttctgcacacatttctttttccttatttataattttatggatagaatatttgttcatacactaaatcttagcaacctgagcatgcaattttatttctttattaggtagacaactttttctttttcacttaaagaaaaggcgttatagcttctctttgacatatctgaattaccagcatcagaattcttggtctttgggccattattaagtaaaataagggtgactcaaacatgaacactgcactaccaatacttccacagtcagtctgatatgtgagaaagctactaaatgactaacgggacaggtagcaaattcagcataaatacaccggacaaagggctgattcatatcccrggcggggcatatcaggatggtgtgagattttattaccctactcagaatggtgcacaagttaaaacttatgtattgtttatttgtggaatgtttcatttaatattagtggaccacag

SEQ ID NO: 644567 - DNA, 566 bp, Homo sapiens
tggaatcacaggactaatgaggcaccatgactgctcatatgggacaaactctggtttgttttgccccgggacaggctcctagggagatcaagatgtcaggggccccagtagggcagggatgtggagctgtctccttcaccagctgctgcagcgatgctttatgggatggcaaaagggatagtttgtttcttcaaagccagcctcctccatttccagggtacaacacaacctccagcactgagtcatcagggctgtttagtctcacattttttcccatctcctttttttttctgcacccacaagtgggagagcttcattaagctaattaaaaaggcaccagggagaaagcatgacagaaaaccacttgggctttcttgtgtggcatargtgggagcattggctctgctttccttttctccagtttgggcttcttctggtcctgtggctgtggggtgggggtaaagacagaagcagcagcaaaaggatgaagtgagagaagacagagacatttctcaagcagctgagccaaagcccaggcttccaggccccaaggaagtctccatacc

SEQ ID NO: 644568 - DNA, 526 bp, Homo sapiens
ttgttgaatgggactgtcctgtggattgtaagattttcagtggcattcttgccctccacccattggatgccagtagcacctcccctcccactgtgacaaccaaaaatgcctccagacattccatgtgtcttctagggtgcagaatcacccctagttaagaaccactggctgagtgtggtggcttattcctgaaatcccagcactttggaaggccaaggcaggcagatcgcttgagctcacgagtttgagaccagcctgggcaacatagtgagaccccatctctacaaaacataccaaaacattagttgggcatggtggtgtgtgcctgtagtcccagctactcaggaggytgaagtaagaggatggcttgagcccagtaagcagaggttgcagtgaaccaagattatgccactgcactacagcctgggcgatagagccagaccctgtcaaaaaaaaaaaaaaaaaaaaaaaaaaaaaaagaaccactgatgtaactcattcagaaagtgaccccggtagaatgtaa

SEQ ID NO: 644569 - DNA, 551 bp, Homo sapiens
ttatttctttgtttctttggcaatcttgctagtggtctgtaaatattattgtttttttttgtttgttttttgttttttgttttcagagaaacagatctttggtttattagtataccctattgtatttttttctattttcaattaaattgacttctgcttttatttttgctcttttcctargttctttaagtggaagtttagattattggtttgaaactttttcaaatgtatgcatctagtgctataaatttccctctcagcactgtttagttgtgtcacacaaactttgatatgattttaatttcacgcagtgcaatgtattttttttctcttgagagttcctctttgacccatggattattttgaagtgtgtttttaccttccaagtgtttgcagatttttctctatgctttctatttttttattcctaatttgatttagttggagttagaggatccactctgtatgattacacttctttttaatatgcaagaatttattttatggcacaggacatggtctctattgttatacactttatggttacttga

SEQ ID NO: 644570 - DNA, 295 bp, Homo sapiens
gtccaatatactgatttcctttggagatatatccccagcagtggaattgctagatcaaatgatagttctatttgtagtattttgaggacccttcatattattctccatactagctgtactaatttacatccccaccaacagtgtaggaggattcctctttctctacttcctcacaacatttgttattgcctgtctttttgataaaatacattttaattggrgtgagatgatacctcattgtagttttaattcacatttgtctgatgcacatttttttcatacacctgctggccat

SEQ ID NO: 644571 - DNA, 427 bp, Homo sapiens
attaccagctgtagtggctatgggacaaaactccttcttgagaaaagcagagggaaaagtaaagggctattttcttgcactttagataccagcacagccacgtgaagatagagcaccaagtgggctcttgacatccccaattttagaactgacgcttagacagcatttctggacttgccctgtgccagagaggagaccatgccctgaagggtaatcccaagccagacagtattcgtcacagctgagttaagagacgttgggccttaaggaaatattggtagtattctagtagcactgctcatgtcctgggatrgcagtggctatggggtgaggttcctctgcttttggaaaggggagggaagagtgggaagaatggcattgtgtgctttgggtttcagctcagctacagtacagtagaaaacaaggt

SEQ ID NO: 644572 - DNA, 610 bp, Homo sapiens
aaatacataccttctgtgaaacaagagtaaattcaaattagtgagaaaaacatcaagttcataataaaaaaaataggcaaygcagattcaattcatgcaagaggacagatgatcagcagtgaggtccaacagatccatgttccaggctgggctccatctcccctcactctctgaccattagaaaattattcaatttctctccatatcagttttcccacccataaaatagattcaataacaatatattcataacagagctaaggtaagaattaaaggagaattcatactaaacccatgaccaactgtttcacgtccatgaaaaataaaaaaagctgcaatttatggagcatttcctacaatctagacagttggtcatagtaaatgcccaataaatttaagccttttgttttcattgaaatgataaacttcccttgtattaaaagagactatggttgttaattttagatttcatcttgaggggttactaaatgtccagataggtcttaaaacattatttctgggtatgtctacaagagtgtttccagaaaagctagcatttgaatcagtacactgaggaaagaagatttgcttcttgccaatgtggccaaat

SEQ ID NO: 644573 - DNA, 561 bp, Homo sapiens
aggagaaccgtgttatcagagctgcatttattaatttccatatgtccctcactctgcatactcagcaggggttggaaaggatgattccttttctccctcgcctatttttttctaccacttctggcggtagtgacagggctttgtttgcagtttagatgtctgaaacaatagggtgctgatggcagcagtacttagctagagtggattattctttcccctttccacgcatgagtatcggtggctgggtgaagaaactggccaggtgtaatggacaccaacctggggaatgaaaggaattaagcctgaactcctttccaacgtgccccgtaaatctggtctctgccaacatttccaggctcagctccctgtagcctggccacactggcttgcttcctrcacctccaatacatccagccctttcccacctcagggcctttgcacatgcttttctgcctggaattctccctgccccccacgcactctacctgtctggcctgtactgactttttaagtttctgagaaaatgtcacttcctaagagttaacttctctgtccacccca

SEQ ID NO: 644574 - DNA, 561 bp, Homo sapiens
aggagaaccgtgttatcagagctgcatttattaatttccatatgtccctcactctgcatactcagcaggggttggaaaggatgattccttttctccctcgcctatttttttctaccacttctggcggtagtgacagggctttgtttgcagtttagatgtctgaaacaatagggtgctgatggcagcagtacttagctagagtggattattctttcccctttccacgcatgagtatcggtggctgggtgaagaaactggccaggtgtaatggacaccaacctggggaatgaaaggaattaagcctgaactcctttccaacgtgccccgtaaatctggtctctgccaacatttccaggctcagctccctgtagcctggccacactggcttgcttcctgcacctccaatacatccagccctttcccacctcagggcctttgcacatgcttttctgcctggaattctccctgccccccacrcactctacctgtctggcctgtactgactttttaagtttctgagaaaatgtcacttcctaagagttaacttctctgtccacccca

SEQ ID NO: 644575 - DNA, 567 bp, Homo sapiens
ccgttggtcaaaactcccaagaatgtttctttcctttctcacagttctctgcctgcagcaaaatcagtctcagaaatttctaactagaagacaagaaagaaaaatcactgaaaatgtgaaggtgacaatatctgctcctcctggcacaagcttctcaagggaactaatctcttagcccccacagatgtcagagaattaaaaattgggaggaaagcaaggaggcacctatcaaatcccctcatttttcagttacagaaacaaaaccaagaaagattaaacaatttgcccaagatcattttgcctctagtgcgatgctggccttaaaacccaggaattctgactcctggttcagtgctctttctaaaacccatcactggacaagcctttgttatgaagccactygaagtaatgctgaggaagatgacaccaccatttgtgttttgtgatttgcttattcataaattaatgtttcaggaatcctcatttttacctctttcaggccatggcaagacatcccaaaactgataagcattatctgtgataccaggggccttagtggcaaaaatt

SEQ ID NO: 644576 - DNA, 561 bp, Homo sapiens
cacctgtccatccattcattcattcattcattcatctatccacccacccacccaccatctacccatctagccatccacccatccatctactcactcatcccttctccacccactcatccatccatccacccttccctccatctacccatctacccatccacccatccatctactcactcatcccttctccacccactcatccatccatccacccttccctccatctacccatctacccatccacccatccatctacccactcatctgttctccaccaacccatccatctacttatccctccatctatccatccagccattcacacattcacccactcactcatccattctccacccactcattcattcrcccatctctccatttgcccattcatctgtccatctactcatccctccatctacccatccaaccatccatttatctatccacccacccactcagccattcttcactcatccatccatctgtccatccatctgtccatccatccatccatccatccatccatccatctctccatctacccatccatccatctac

SEQ ID NO: 644577 - DNA, 610 bp, Homo sapiens
caaattttccaaggggtcatttggggttgttggagaaggatccttttgtgattttaatgctaccggaacctctttgaagtctttctgttcttgactgaggctgctggcaggaaaggctatcaggagccccaaataggtcaccatgaggcaaaggagagcmtggccaggctcagaactgtggtttagaggctcctgcagaagggctgaagctggcagcctttcctgtcctggctactgcatcagggtggacatgtaggaacactggctgaggtgcttctacatgacagatggtatcatgaagctcgcaagtgttgaggaatccgtttcagtagcatgcaaaatcaccagttagaatgtgctgggaactatttttccatagcggctgtgtgtatagtgacagaaatcaatggatgaacttcctggttttctctgagcctggcatttggaagcagggcagataacattagatggagcaattctctaggaatcttggacgatgggaggagacattggactttctgcaaatatgctcatgccaagtttggagttaatataattcaaaataaaaaagactgagtttgaattctagtatttttttatttttaatagt

SEQ ID NO: 644578 - DNA, 606 bp, Homo sapiens
aaagcaacaactttgaacatctattctataatttattctaatacaagtgatgaggaactagaagttattaaaaatccaaaataattcaattataaaaataacaaaaagcagagtctgccaaatgcaatataatgaatagtctctaatgacactgaaagatgcagctgtgctgtaacacttttccccgtgtgcccaaaagtgctaagcagagtagtgagcacatatttggtgctaaacaaattattgttgattgatgatagctgccaagtcctgagtcaactgtaacatttaggagagaccatggaattgttcgaaaattatataagataaaagttataaagataaaggtttttaagtgataaacaattgagaggttatattataaatargatgaacagtatgactttatacttacaacttctaaattggaaaaattgatataaataaataacttgatatagaggcagattttttaatatatccccagtattccagtaaatcttggcctataacgaacatcatagtgagctgatgacaaatattggttgaataaatgaataattaaatatgtgacacagatttatactcatttattagatattagaa

SEQ ID NO: 644579 - DNA, 621 bp, Homo sapiens
attggttgaataaatgaataattaaatatgtgacacagatttatactcatttattagatattagaagtgctaaactgaatttaaaggacaagggaataaatacaataatgaggccggttaaataatgtataactgaaagatggaagtgagcagagtgacatggaaggtattgacagagagatggaatcttctagatagatcccacattctagtatcttctggattccattgttgcaatttagaagttatcagtccaattgcctttccttcactgatgctttcccttgtttctctgcttccagttcttctttattgttgacgtcctgcattttatttttatgtgtttaggcataattttcttttaatttatcctgcttcagtttcccttggatttccagttctgaagattgracagtctctaatgcccatacttctactaataatattcaaagcaaccactttgtaaacatcttctaccttataagtcccttcagccatctcagcagaagccaaaaatgaagggatcaccttggaaagatccatggacatgcctcttatctaatgaagtaaagccctgtgacatacacaagacactcacagagttgttgagaatttcatatc

SEQ ID NO: 644580 - DNA, 606 bp, Homo sapiens
atcagtccaattgcctttccttcactgatgctttcccttgtttctctgcttccagttcttctttattgttgacgtcctgcattttatttttatgtgtttaggcataattttcttttaatttatcctgcttcagtttcccttggatttccagttctgaagattggacagtctctaatgcccatacttctactaataatattcaaagcaaccactttgtaaacatcttctaccttataagtcccttcagccatctcagcagaagccaaaaatgaagggatcaccttggaaagatccatggacatgcctcttatctaatgaagtaaagccytgtgacatacacaagacactcacagagttgttgagaatttcatatcaccagaaacactgccagattagactgaaagggctagagagagatgtgatgtgagaaggacttaatcagctgttgctggctttgaagatgaagaggtggtacacaaaggcattctttggcctttagaagctgagtgcaaccttcaacctagagcagcacaagaaaataaggagctcagtcctataaccacagaaactgacttctgccaataacccaaatgagtcggagaatga

SEQ ID NO: 644581 - DNA, 606 bp, Homo sapiens
atcagtccaattgcctttccttcactgatgctttcccttgtttctctgcttccagttcttctttattgttgacgtcctgcattttatttttatgtgtttaggcataattttcttttaatttatcctgcttcagtttcccttggatttccagttctgaagattggacagtctctaatgcccatacttctactaataatattcaaagcaaccactttgtaaacatcttctaccttataagtcccttcagccatctcagcagaagccaaaaatgaagggatcaccttggaaagatccatggacatgcctcttatctaatgaagtaaagccctgtgacatacacaagacactcacagagttgttgagaatttcatatcaccagaaacactgccagmttagactgaaagggctagagagagatgtgatgtgagaaggacttaatcagctgttgctggctttgaagatgaagaggtggtacacaaaggcattctttggcctttagaagctgagtgcaaccttcaacctagagcagcacaagaaaataaggagctcagtcctataaccacagaaactgacttctgccaataacccaaatgagtcggagaatga

SEQ ID NO: 644582 - DNA, 518 bp, Homo sapiens
aaacagtagcatttaattaaaaacaataaaagatcagtttgtaattaagttaacataggtaccaatctaagccaagtattacttttgttttttatacccaaagccwatgttttcaaaatggaaacagcctttggctcttttcatttctctttcctataccttcggaaagttgatcacattgcttcaggtctataagagctgacaactattttaatgattttattcaagaaaccagggatgaatcataagatggacagtttataatacacagacataaaaggaatcttctaaagtcatcttttatagtgttgttcacttatttatatcatggatctggttaatttaacaagttttttaaaattttagctgtgaattcagtatagtgtttagaattattttctgtctttatgcaaatatttgtgcagatgtatatttgtgtagaatctttatttgtggtaatcacaggtaacatatgcacaaaagtaatgtacggattttaaaaagtgcaagcatatagc

SEQ ID NO: 644583 - DNA, 592 bp, Homo sapiens
tgtcactgcctcatattttagagctttaaactttgccaaatccttaaatatttatctcatttgacctataacatcctgagaaaccaaatgtgattgttctttctccttttccccagtaactgagggacaagagtcatggagaggttcaytgtgactgtggacaagtcactcgatgaagtttatctgtaaaaggagaggtcttgtgaggctcctcttcccagcacaagttgaatttgtctagggtcacccatctagggggagactggaggtgggataagacctgagactcctgtctctctcagacctagtgtcttccactcagatggtagcagcttcctagaccgtggagtcctaacaggtaacaagctgacggtgactcagcatgctagctcttgggttaccgaagaaagcaaggacctacgatgcatcggttaaaaagtatcatgcagagaaacttaagctgggtttcccctatacctaaggattaaccacgccccctacctaatggcttatcttaagctgaccttagccacttaaaaaaagacttgtgacaatctgggaagaaaggttcataggagagtgcagctagagt

SEQ ID NO: 644584 - DNA, 547 bp, Homo sapiens
gcaaggccttccttgaagggggcctggaccatgcctttctatgtctaccacagtgatgccaaaggcaaattctgccggtatcccaattctacccatatcctagtttgtgtccagtgggtgttactaaaagtggtgagcagggacctatttgagtgaaatggataggggcctgggaatgataagcccacagatgtcatttccatgcttgccaaatgcttatggaaggacatctttcagtctggcctcatttctttcaaactgrggtctcatttactttctcagaagcaattttaaaaatgggccatggtgtatcaaaagacaggagtcatgctttttatcacagcagtgaggtttggccaaaccaggtcaccagagttcattgttttttcaaagctgatggattgggctctgctgtggtaatcaccagatcacagtaagcttcttgaggtcaaaagtttactcctctcattcagggatcctggctgactcactgactcatctgcagaggcctaggttactaaagtgacctggagatcttttctgtccc

SEQ ID NO: 644585 - DNA, 547 bp, Homo sapiens
gcaaggccttccttgaagggggcctggaccatgcctttctatgtctaccacagtgatgccaaaggcaaattctgccggtatcccaattctacccatatcctagtttgtgtccagtgggtgttactaaaagtggtgagcagggacctatttgagtgaaatggataggggcctgggaatgataagcccacagatgtcatttccatgcttgccaaatgcttatggaaggacatctttcagtctggcctcatttctttcaaactggggtctcatttactttctcagaagcaattttaaaaatgggccatggtgtatcaaaagacaggagtcatgctttttatcacagcagtgaggtttggccaaaccaggtcaccagagttcattgttttttcaaagctgatggattgrgctctgctgtggtaatcaccagatcacagtaagcttcttgaggtcaaaagtttactcctctcattcagggatcctggctgactcactgactcatctgcagaggcctaggttactaaagtgacctggagatcttttctgtccc

SEQ ID NO: 644586 - DNA, 420 bp, Homo sapiens
gagaatcaagttgggagtcaggaaacaaggtgctatggtctgaatgtgtccctcaacacaaaattcatgtgttggaaatttaatccccattgcaatagtgttggaaggtggggtcttttggaaggtgtttagatkatgagggctctgccttcatgaatagattaatcctgttataaaagggcttgatagagagagttttgttcctttttgcttttccaccttgtgccatgtgaaggtgcagcgctgtacccctccaaaggatgcagcattcaaagtgccatcttggaagcagacagcagcccttatcatatgccagagtcttgatcttggacttcctggcctctacagctgtgaaaaataaatttctgttctttatcaattaattaatctgtggtattttgttacaacagcacaaacaga

SEQ ID NO: 644587 - DNA, 420 bp, Homo sapiens
gagaatcaagttgggagtcaggaaacaaggtgctatggtctgaatgtgtccctcaacacaaaattcatgtgttggaaatttaatccccattgcaatagtgttggaaggtggggtcttttggaaggtgtttagatgatgagggctctgccttcatgaatagattaatsctgttataaaagggcttgatagagagagttttgttcctttttgcttttccaccttgtgccatgtgaaggtgcagcgctgtacccctccaaaggatgcagcattcaaagtgccatcttggaagcagacagcagcccttatcatatgccagagtcttgatcttggacttcctggcctctacagctgtgaaaaataaatttctgttctttatcaattaattaatctgtggtattttgttacaacagcacaaacaga

SEQ ID NO: 644588 - DNA, 534 bp, Homo sapiens
gtagaaactgttcaggttccattatcaaaatgagaaaaatttgttggaccaggtggatataacttaaaaaacttcaggctgaaacagttgtaactattagtcaggtggatgaagaaacgttttctatatttgcaccaacacccggtgctatgcatgaggcaagagacttcattgctgaaatccgcaaggatgatcaggagcagcaattagaatttggagcagtgtgtactgccacaataactgaaagcagagatactggtgtaatggtaaaattatatccaaatatgattttggtactgctttataacacacaacttgatcaaygaaatattaaacatcctactgccctaggattagaagttggccaagaaattcaggtgaaatactttggatgtgacccagctgatggaagaatgaggctttctcataaagtgcttcagtcttcagctacaactgttgtcagaactttgaatgacagaagtagtattgtactgggagaacctatttcacagtcatcatctaataattctcagt

SEQ ID NO: 644589 - DNA, 402 bp, Homo sapiens
aatatgttgatttgcttgattataggaaccacttcaatagaaataattatatcaaaacatcatgttgtactccttaatgtaggttaagaaaactaaaatgaacaaaaaaaaatctaggaatacttgtgtttagtaaaccagttttagatttcacccttgtacatttcacccattatctaggaccaattaaacatttggcactgaggaataattcagagcaacaactcctaggggagaactagattgtctggttggtgatcaaaaagaaytaaagcatctctgaaggcaattagctctcaacactgtgaccaaggccctggaggtggggcatgttctttctgccttccacacaccccttcaggctgaacaaggtgttattttttaactgctttgtgaattaca

SEQ ID NO: 644590 - DNA, 541 bp, Homo sapiens
gaaaaaccaaatgagattctttaacaagctgggaggctagactatgattaaaacaaacattttctttattttctttgctcaaaaagtaaaatatattcaataccatgtatttcccatttttgccttargtaaaaaggaaaaaagcaagtaagacccaaactgagtgttcagctgcagtaatctgcttctcttgtgggactgagagcatttactccctccacttctgtaatgaccctattcacaatttataccagtcttatgtttcactgtgtgaccctccaagaccatccatatgacactggaaagttcagagaaaatgtaaacgtaaaataaaggcatattttataagacttagagaatatgaaaaatatctaaaggaaagaaacttgcctagctgtgctgtcatcatgactctgaccgaattacaaaagttgtaaattacacgtataagtcgacgagttgaaagatccaggagtaaaatatggcctcctccagttcctatccaaagagcagtgttcttctgaaggcagagggttttcac

SEQ ID NO: 644591 - DNA, 612 bp, Homo sapiens
tttttcctttctctgtcttgctcctactcttgccatatgagacatctccttgccctttgacattctggtatgattgggaggcttcctgagtcctgtcagatgcagaagccactatgcttccttacagtctgcagaatcattaaccaattaaacctgttttctttatgatcatggagaaaattatgactgcaaagtggatctattaagtrtcttcaaggccttctccctaatgtcttggcaatcagcactcagcttcttttcactcaagtatctgaagcctccttgaatttttccccagaaaatgggcttgtcttcctttaccacattgccagcctgcgacaaagatagctgataatatagaagcaggttcagaagggggtagcagatggagtttgggagagtttggaggacttcgaagacagggagatgagggaaagtttggatctttgtaaagaattgttaaatacttgtgatcagaaggctcataggaaaatagacagtaaggatcagattaagaagctctcagatgaaaaggagggacttactgcaaacaggagccaaggttacttttgttttgctgcagcaaagaacgtggctgcacagtgaccctgc

SEQ ID NO: 644592 - DNA, 401 bp, Homo sapiens
aacacaagcacagaactcaactttctactaaagagtcaaaggctatatttttagctaagaaattatgcttcttacatgataaaaatcatacatgccaaaacttaccatactttattaaacaacataatgcaaggtctgattcaacagaaatattggagtggtgatttttttaaatatgtggaaattatttttttgttttcaaagtattggaaataaccatgatggaactataaattcaaatagtttgagctaagcagatatacttacatgcatgaaaactcattaaacagactcatttgkctgggaatattcattgcaaccctcaaggctagacgtgtttttgtggctcatctcagtcattgcttccctcccattgtatctccattttatcattaaataaa

SEQ ID NO: 644593 - DNA, 519 bp, Homo sapiens
gcatgaagcataaccagcccctgaagtcacatccatggccagaccagctggccgggctgccaacatcttagtagagatccctggaaatcagatgagctggttaggggggtaataaaaaagctggaaagcttcagaaaattccagaggacacatgacacttagcatgaactttccccgagtrggatctgtttggcattgctggttctaaagagtcggtaccaccactcccacctgcccattaccccaccagggaaacactcagggtacagtccacagaaacaatccctgtggaattgaaaagggtgttctcatcccaaaccaagggagggacccagaaaaccactcataaagagcagaggggcctgctgggagagacagggttctgctgctcatttgggtatctgcttcccagcgggaaaggggaccatgcaggatagagcggctaaggggaacctgggctgtcgggccaggagagccggtgctgactcactgttggaggtgagccacaataggaggctt

SEQ ID NO: 644594 - DNA, 554 bp, Homo sapiens
ctaatgctctgtgaccaggaagcctaagggcctggcaccagctgtgcctgcttatagatgaagtggggaagccctggagttcccattggctccatcattccacgggaaagatgcaattaaagtcycccatctgtgagcaaacaagagcatgtcagggctggctatggcatgggcctcagaggagaactggccctcctcacaagcccacagagacactggtgggtgggggacacccctcccagtgccctgcaagagtgtgctgcagtcaacgttgtaggtacaaacatcaaaacaattcaggacaataccataactgcccattattctgaaaaacatcaagacccaaaataaatgcttgcttgcaaatgagtcatacgtacctaagggaaacctccatctacttctgaaatgcacatgaaggatgtagtaagcaatatgaaaattcattttccaaatcacaaaatgaaaatgttatctgtctgactagtgatttaactttaagtaaacagtttatataaaaggccacacaaactgctttttaccatatgagaagc

SEQ ID NO: 644595 - DNA, 282 bp, Homo sapiens
taatgtggatcgaataagaaagaaaaatcatgaattagaagaagaggcaactgggtatggttttcatattctagaacatgttaaccacttattaattgatttarctctaattttacttgactaaaacatagatacaaattcattttatgtttgcattttcataattaaatgaattctattttaaaatgtatttcagaaactcacagcacaactttttagacatttgtgtcatggggttgggagtcagctgagctgctggggcaaggtgaaattttttttgaa

SEQ ID NO: 644596 - DNA, 282 bp, Homo sapiens
taatgtggatcgaataagaaagaaaaatcatgaattagaagaagaggcaactgggtatggttttcatattctagaacatgttaaccacttattaattgatttagctctaattttacttgactaaaacatagatacaaattcattttatgtttgcattttcataattaaatgaattctattttaaaatgtatttcagaaactcacagcacaactttttagacatttgtgtcatggggktgggagtcagctgagctgctggggcaaggtgaaattttttttgaa

SEQ ID NO: 644597 - DNA, 370 bp, Homo sapiens
tcagtaaatgtactaaaaatcttttaactttaagttaaaacagatacattctatagtatgtaaattatatttcaacaaagctgttttaataaaaaaaggaaaaatgtgtttactatgccatcttagaaacatgcctcatttctaggaaataaaaggtagaggtgagagatgatttactttgagaaaagacattgtgtcacctatgaaattttattaggcacaragtcatattttaaggtagatagttctgtactgctgaaataataattttaatgactttatgttgccacatgttaagaccataatataggtataaatggaaatgtttacacctgaaatgagtattttcaaattaaaatttaattgattt

SEQ ID NO: 644598 - DNA, 370 bp, Homo sapiens
tcagtaaatgtactaaaaatcttttaactttaagttaaaacagatacattctatagtatgtaaattatatttcaacaaagctgttttaataaaaaaaggaaaaatgtgtttactatgccatcttagaaacatgcctcatttctaggaaataaaaggtagaggtgagagatgatttactttgagaaaagacattgtgtcacctatgaaattttattaggcacaaagtcatattttaaggtagatagttctgtactgctgaaataataattttaatgactttatgttgccacatgttaagaccataatrtaggtataaatggaaatgtttacacctgaaatgagtattttcaaattaaaatttaattgattt

SEQ ID NO: 644599 - DNA, 580 bp, Homo sapiens
tatcttgttcactcatttaccaggttttggctgtttcccccaaatggggataaatgccacaaaagaagggtgttgtcmgtcatgtgcatcattgcatgtcttgctcctggaacagcatgtgggacatactggttgccaaatgtgaaagggaggcaggagcagatgatttgtgtacaggtatgtggggcccggttcggggatccaggcggagttgagtatgatgcctgataggattgtcatgcccagttgttgcagtttagatgccaaaacctccacccgaggtgaactctgaaacttccccgatagccccactgcagtgcgtgggcttcttccttcctgggctgttttctcacctttgttacaaacagcttggctatactagcatgatggaataagggttgagagaatcatctttgagctggatgacctttgtcctggcacaactggatggtgtttgatctgatgtacccagcactgtcagcagggggatccacttcctatcccatcttcacaaggtgaaggatcaggaatcggtgaagaaaccaagttttctttctcatgaactggagaaacgtaggct

SEQ ID NO: 644600 - DNA, 580 bp, Homo sapiens
tatcttgttcactcatttaccaggttttggctgtttcccccaaatggggataaatgccacaaaagaagggtgttgtccgtcatgtgcatcattgcatgtcttgctcctggaacagcatgtgggacatactggttgccaaatgtgaaagggaggcaggagcagatgatttgtgtacaggtatgtggggcccggttcggggatccaggcggagttgagtatgatgcctgataggattgtcatgcccagttgttgcagtttagatgccaaaacctccacccgaggtgaactctgaaacttccccgatagcccyactgcagtgcgtgggcttcttccttcctgggctgttttctcacctttgttacaaacagcttggctatactagcatgatggaataagggttgagagaatcatctttgagctggatgacctttgtcctggcacaactggatggtgtttgatctgatgtacccagcactgtcagcagggggatccacttcctatcccatcttcacaaggtgaaggatcaggaatcggtgaagaaaccaagttttctttctcatgaactggagaaacgtaggct

SEQ ID NO: 644601 - DNA, 580 bp, Homo sapiens
tatcttgttcactcatttaccaggttttggctgtttcccccaaatggggataaatgccacaaaagaagggtgttgtccgtcatgtgcatcattgcatgtcttgctcctggaacagcatgtgggacatactggttgccaaatgtgaaagggaggcaggagcagatgatttgtgtacaggtatgtggggcccggttcggggatccaggcggagttgagtatgatgcctgataggattgtcatgcccagttgttgcagtttagatgccaaaacctccacccgaggtgaactctgaaacttccccgatagccccactgcagtgcgtgggcttcttccttcctgggctgttttctcacctttgttacaaacagcttggcwatactagcatgatggaataagggttgagagaatcatctttgagctggatgacctttgtcctggcacaactggatggtgtttgatctgatgtacccagcactgtcagcagggggatccacttcctatcccatcttcacaaggtgaaggatcaggaatcggtgaagaaaccaagttttctttctcatgaactggagaaacgtaggct

SEQ ID NO: 644602 - DNA, 587 bp, Homo sapiens
atttttttcaggaactgccctactgtttttttaatagtagctgccccattttacattcccaccaactgcacaagggttccagtttcttctcatccttgccaacacttctctacttctttttcaaaatagtagccatctaaatgggtattaggtggtctctcattatggttttgatttgcatttccctaatgattagtggtgctgaacatcttttcatgtgcttattggccatktgtatatctttacacgatgctatcttttaaaacatttaagaaaaaagtgaattaaaagtattggttaaataaaagtacgagtggttttatcggacatggcaggtctcacggaggatgtgtgccgcagtctggctctggcccacgctggcctgtgaatgagctgcccacgaacctttttccttaatggggttatttccctgactccaccacgcaccatattcccctgcctctgtgtccatttctcagcctacaataaatcctaggtcacctgtaagccccagctcaaaatccccttctccccagaactccagtggggcccgagctgccagcctcccacatccaggccccgtaaga

SEQ ID NO: 644603 - DNA, 427 bp, Homo sapiens
gaattctcataggagcgtgagccgtaccgtgaactgtgtgtgcgagggatctaggttscgtgctccttatgagaatctaatgcctgatgatctgtcactgtcttccatcacctccagatgggactgtctagttgcaggaaaacaagctcagggctcccactgatctacattatggtgagttgtataatatttcattatatattacaagttaataataatagaattaaagtgcacaataaatgtaatgtgcttgaatcatctcaaaaccacccccagcctgattccagtccatggagaaattgtcttccactaaacctggtccctggtgtcaaaagtgttggggacctgctgctctgtcactttgacttgtaaagctctttcctgaactatcttatgaccctttgggctgttcttccatgctatcacg

SEQ ID NO: 644604 - DNA, 552 bp, Homo sapiens
  misc_feature 1, 2, 3, 4, 5, 6, 7, 8, 9, 10, 11, 12, 13, 14, 15, 16, 17,18, 19, 20, 21, 22, 23, 24, 25, 26, 27, 28, 29, 30, 31,32, 33: n = A,T,C or G
nnnnnnnnnnnnnnnnnnnnnnnnnnnnnnnnnaggactacagacatgtgccaccattcctgacttgtttgtctttttgttgttgcattgtaggagttctttatatattctgcatatcaattccttatcagataaatgatttgcaaatatttttccccattctgtcggttgtctttacactttgttgatgtgttctttgatgcacaaaagtttttaattttgatgaaatgcaattaatctgttttttattgctttgctttgatgtcatatccaagaaattatttccaaatscaatgtcatgcaggttttttcccagtaagttttctagtttagttttatgtttaggtctctattccattttgggttaatttctgtagatggcgtaaggtaagggttcaacttaattccttgcatgtgaatatccagtttcccaggaccatttgttgaaaatcctatcttttccctattgcatggtcttagcatccttgccaaagtatacacatgagggtttatttctggaccctctatttgattccattggtttatgtgact

SEQ ID NO: 644605 - DNA, 370 bp, Homo sapiens
gcagcacgttcctatctttcactgtgtgatgtaaaaatctgtgagatgaaaatataaatctatgaggccrtttatcaaagcctcagcattgttaaatcagtgaactgtgcaccagcacatttgttcttatgaagcattgaactggcagtacccagtgactgtcactgcatttgcccaggggacccagccccagtaaggtggaaatacaacttaactagtttccttaagaaagaccacacagcctggccctgcttggtgacgtggagcacgcatcaagtttgttcactctctgttcagttcccctttttctgcgtcaagaagctgttgcccacagaggtggattgaacacccttatttcaaggtgggaaat

SEQ ID NO: 644606 - DNA, 591 bp, Homo sapiens
tatttgtcaatatgcttgagccactatttctttctggccactatttctgcaatttttttktgtgtgtaatctcttactaatctctggaactttacttacacatatgttataccctttgaaattgtttcacaggctcatgataacttttcagttttatctatctcatttctcactgcccttccaattaggtaatgttctcttgtttcctcttcaagttaactgactctttaccccatcatctcgtttctgctgttgagccaatagtgaagttttttgttttatttcaggttttttttttttttttgagatggagtcttgctttgtcgcccaggctggagtgcaatggtgtgatctccgctcaccgcaaccttcacctcctgggttcaagcgattctcctgccccaaccttctgagtagctgggattacaggtgcgtgccaccatgcgaggctaattttgttttgttttgttttttgtatttttagtagagacggggtttcgccatgttggccaagctggtctcagactcctgacctcgtgatctgtctgtctcggcctcccaaagagctaggattacaggcgggagccactg

SEQ ID NO: 644607 - DNA, 591 bp, Homo sapiens
tatttgtcaatatgcttgagccactatttctttctggccactatttctgcaatttttttttgtgtgtaatctcttactaatctctggaactttacttacacatatgttataccctttgaaattgtttcacaggctcatgataacttttcagttttatctatctcatttctcactgcccttccaattaggtaatgttctcttgtttcctcttcaagtyaactgactctttaccccatcatctcgtttctgctgttgagccaatagtgaagttttttgttttatttcaggttttttttttttttttgagatggagtcttgctttgtcgcccaggctggagtgcaatggtgtgatctccgctcaccgcaaccttcacctcctgggttcaagcgattctcctgccccaaccttctgagtagctgggattacaggtgcgtgccaccatgcgaggctaattttgttttgttttgttttttgtatttttagtagagacggggtttcgccatgttggccaagctggtctcagactcctgacctcgtgatctgtctgtctcggcctcccaaagagctaggattacaggcgggagccactg

SEQ ID NO: 644608 - DNA, 350 bp, Homo sapiens
agttgccctgccttttggcaagacctaggttctcwccccaatttcagggatgtcccattcacccccctacccccatccccaatgagaagggacctgttggctggtatgccttcttgctagtgactggctgagctcaccactgcaggtgggtcacacacagcctcataggcaggcacagctggaagggaccagagagacatttagatccactctcttcagctagtaaatgtggaacttgaggctcagagagggacacttcttctgcctttaactgcagccagctcctcatgaacagtgagattgttcctgcatgaatagtgtctgttcctgagtttggaatcctgggctat

SEQ ID NO: 644609 - DNA, 596 bp, Homo sapiens
attaattaaattaagacataatatatctctttatttccagtggacaaataaattattagaactaattccctagggacatatacattaaatacaaaatacgatgctgaaatctagctttcacatacactcttgatttacattctgaaacattcaattcatgtgtagtgctgataataagacagctgtgatttgattagcttgaaaattcccaaataaataatttgaccctcttagtatcatgtaaaataaattagtttttccaattgttaagaaatatcttaatattctgaaatactaattttttctgtagattaatttatagaatcattacataaaacagggaggacattaaagatggctgattagaggcrttttctctacttattttctctactaagaagaacaaaaatagtgagtagatgatcacactttgaatagaccatccaagagaaaaaactggaattccacagagaagtgacaagaaacccctaaagcaaagaagaagcaagcaaggcagcctgctattctgggattggctggaagctaggagagactccttaatgtgtggaaatggtaagtaggagacagagcagtcc

SEQ ID NO: 644610 - DNA, 602 bp, Homo sapiens
ttttcttaatcaatttgcacctttatttttagccacactttttatatgatacttgtttcaaaattctattgacattcctcccctagcatcaagtcctgaatgcttatattctcatttttcactggctgccctgatggcaaggcagatgcttagtccaccatggagaggtgggagtgactttgccctcctgtgcactgatcctcattcttctaggtggagtggctagaatccacacagaagttgagaacggagacctgagttttagttctggttctgttctaccagaaattttgttctcttttatcctaccaagttattgaacttctaagaatcaattttgctcatttataaaattaagcattgatcattataaccttgagtgtctatttcaactctaaatttgatgactctaaaggaattgttctcctgagtcatattacaccactctcatctgtcttcagccaaaatktattattttgcctctcatagtttcttctttttcactttacatactcagaattctgattcttgcctctaagctatttctttcacatttcggcatctgtccctttactgaattcatagaagtgcatttgaagtta

SEQ ID NO: 644611 - DNA, 570 bp, Homo sapiens
atataggggcaaagattgaatgacacaggctgggcattgaattcaatgcttctgtttggaggtatgactttggtctgtgaagaggtaaagggtattcatctgtgttgtcccatagtcctgttgccatcacttctctcctggccagatttcttaggacttcatgacaagtgtttgtgtattttgagtctgtgtgtacacagacctgaggaggcgccaagtatatcaaggctttggacaaattacgaatagatggctattgagcatgcctttaaaacagtaactattttaaaaagtactatttcagacaaatgacaaaagtagattgtatcttaagatgcagcctggaaattcaagacttgtggtgttcaatttatctgtcttctttaattgccttaaggaaraatctgaatctataatcaccacattccttctgggtaaagctgctggtgatggccataatttttataagaatgcaaaaactggcccccttgatgattcaaactacttctggccaaatccttgaccagatagataaaattgtattgtataattttatatccttaatttata

SEQ ID NO: 644612 - DNA, 611 bp, Homo sapiens
acctccaatccccaaactgctttttccccattttataaatgttattattctgtgttgttactcaagtaaaaaacttacaagtctacactttaaacaaaaattaactcaaaattggtaatagatttaaatgtaaaatgcaaaactacaaacctttgagaggaaaacataggagaaaacccacatggccttaggcttggtgatgagtttttatatacaccaaaagcatgaaagaaaaacttgatgttagtcttttaaatttacaaagtctgttctgcagaagacacttaggagaataataaaacaagtaacagactgagaggaaatattttaaaaatacatatctaataaaggacatctatccaaaatatacaaatgactctcatatccaaaatatacaaaaaaaagacaaaattgaacaataaggaaacaactgaatttaaaaagaggcaaaatattttaacagagacctcaaaaagaagatatgcatatgatagataagcagatttttaactgctcactatcactattctgtaggaaatccaaactaaaacaatgagatacaactacacmcctcatagaatagctatgattggaaaaatttacgatacagt

SEQ ID NO: 644613 - DNA, 583 bp, Homo sapiens
ttcataatataaattgaaagtcagtgctactactttgatttctgttgaatgtgtcctaagtagttacaaaaggtgaagccagctggacttcctgggtggagtggggacttggagaacttttctgtcttacaaggggattgtaaaatgtaccaatcagtgcgccaagaggtttataaaatgtagctccaagaggtttataaaatgcaccaatcagcagtctgtaaaatggaccaatcagtgctctgtaaaatggaccaatcagcaggattctaaaagtaaccagttgccaggaggattgaaaaaagggcactctgataggacagaaatggaacatgggwggggataaataagagaataaaagctggccaccagagccagcagtgaccacctgctcaggttccctttcatgctgtggaagctttgttcttttgctcttcacaataaatcttgctgcaagctcactctttgggtctgtaccatccttaagagctttaagactgtgaaggtccaccgcttcattcttgaagtcagcaagaccatgaatccaccagaagaaaccaactccagacacagccacagcata

SEQ ID NO: 644614 - DNA, 361 bp, Homo sapiens
tcaggctgcatgctgacacaacactttaatggtagtaggatagctgagattgggcctcagagtcatccccttttgagatgctggactgtattgacatggaagggatggccagctcagtgggtgttgccttcttcagtagcagtcacatgcaggacgtggactcttgggcaggaaaatggcagaggacaygtaagtacaagtgtagtgttctttgaggagatacttttctgtttctttgagacagggtcttgctctgtcactcaggctggagtgcattagtgctatctcggctcactgcaacctccgcctccagggttcaagtgattctcgtgtctcagcctcccaagcagctgggattaca

SEQ ID NO: 644615 - DNA, 619 bp, Homo sapiens
acctcagttggaaatgcagaaatcactggtcttctgcatcactcacgctgggagctgtagactggaactgttcctatttggccatcttggaaccacccctggaaaaacagtcttgaatcaccaatgctacccctcctctatcccccagcagtggcagtgtggtgtgaagagtgtctctggactccagggaagtgagactacagtatttgtgaggcattgaactcagtgctgccctttgataacagaaaacaaaactggaccaaactcagctgacacccacccatggagggagcatttaaaccagtccttgccagaggacaattgttgatccctgtagtccagacttgagttcctccaagcctcgcctccargggctaaagtactccaggtctctgaataaacttgaaaggcagtctaggccccacagactggaactcctgggtgagtctgagtgctgaactgcacccagagccagtggactggggttgcaggggtatgacctcctgagacaccagctggggcagctaagggaatgctggcatcatttttcccctcatccaggctgagcagctcacagcttcaaaagagacttttaccctctgcttgaggagagaaaagg

SEQ ID NO: 644616 - DNA, 619 bp, Homo sapiens
acctcagttggaaatgcagaaatcactggtcttctgcatcactcacgctgggagctgtagactggaactgttcctatttggccatcttggaaccacccctggaaaaacagtcttgaatcaccaatgctacccctcctctatcccccagcagtggcagtgtggtgtgaagagtgtctctggactccagggaagtgagactacagtatttgtgaggcattgaactcagtgctgccctttgataacagaaaacaaaactggaccaaactcagctgacacccacccatggagggagcatttaaaccagtccttgccagaggacaattgttgatccctgtagtccagacttgagttcctccaagcctcgcctccaagggctaaagtactccaggtctctgaataaacttgaaaggcagtctaggccccacagactggaactcctgggtgagtctgagtgctgaactgcacccagagccagtggactggggttgcaggggtrtgacctcctgagacaccagctggggcagctaagggaatgctggcatcatttttcccctcatccaggctgagcagctcacagcttcaaaagagacttttaccctctgcttgaggagagaaaagg

SEQ ID NO: 644617 - DNA, 406 bp, Homo sapiens
  misc_feature 401, 402, 403, 404, 405, 406: n = A,T,C or G
gtcaacatacagacatgtagaaatatggtgtgtgtgtgtgtgtgtgtgtgtgtgtgtgtgtgtataatttatagcaatgagcctatgcagcatcaaaccttggtttctagataccattctccactaaaaggacttttcctcagaactttccttgatgaaatggatgattcaaggctggggcagggaaaacgcaaaacaaaaccggaacgcctggtgttagaaagttagaaactgctcagaattatggggatatgtcaaaaggacacagaagtcaacttgaataaggctctcactagccaaatctggggcaacttgagcatcaaaataatgacagtaatgaattayaacccattgaatgaaacagaaatctgtgggtccatattgacttaaataagtcaatnnnnnn

SEQ ID NO: 644618 - DNA, 579 bp, Homo sapiens
aagcttacacttctttggcctctgctgccattaatggtggctagcgtgtcaggagagcaagcatagtggttaagagcgarcgcaggctttgcagtcaaagatctgggtttaaaattctgccactcatcagctgtgtgaccttaggcaagctacttaacttctctgagtcttagcttcctcatctgtaagcacatactatacaaatacctcccctctgttgtgaaagctgagtggccagcctagtgcgtggcacttttatgtgcctaagaaaggccactattttcactcttaaaacatgcagctgtgaccctgatctgcctcctaggtgcttctccctcccccatgacaaactcacactcctggatgctcactactgtcatctggtttcccactcggtacattcacttgtttagcttgctatctatatcatcattctaaagaaaagtacttttttctttatataccaaattatgcatactttactcctattccctcccactgtctttaccccaatttgagaaaatactacttccacctccaattcgggcttctaggatcaggagttttaagatcaacttt

SEQ ID NO: 644619 - DNA, 608 bp, Homo sapiens
caaattatcttactactttaattactcatttccccatgacagaggcacatcctgctacaaattcttttggtatactttcactttcctcctcaattattgattatttacatctgccacaatctgttttctccatgataacgctttctagttaacttttcaaccttcacaaaaaataygaaaatcttattctttgagccaaggtcataaatagaaaaagaaaactgctgatgattatgcccagcttttgaattggattttaatctaggctgaaacactggactttgtgtaaagaattcagagctttactaataagaatataggaaaaatatagatagccgatagataatcgatagatattctatctgatgatgtaatctttattgctggtatctattttccgaaacatttaaatctgatgaaatttccaattggctctgatttaggttacaattgaatgctagatatgtaatttccccagtggtcatattcctctgtaaagaaaataagcagaaagtcccctaaatgaccctaccgtggtatctgtaaggtattctgaatatttcatattatggtggctgaatacaatatggcaacaaactgccaagtct

SEQ ID NO: 644620 - DNA, 608 bp, Homo sapiens
caaattatcttactactttaattactcatttccccatgacagaggcacatcctgctacaaattcttttggtatactttcactttcctcctcaattattgattatttacatctgccacaatctgttttctccatgataacgctttctagttaacttttcaaccttcacaaaaaatatgaaaatcttattctttgagccaaggtcataaatagaaaaagaaaactgctgatgattatgcccagcttttgaattggattttaatctaggctgaaacactggactttgtgtaaagaattcaragctttactaataagaatataggaaaaatatagatagccgatagataatcgatagatattctatctgatgatgtaatctttattgctggtatctattttccgaaacatttaaatctgatgaaatttccaattggctctgatttaggttacaattgaatgctagatatgtaatttccccagtggtcatattcctctgtaaagaaaataagcagaaagtcccctaaatgaccctaccgtggtatctgtaaggtattctgaatatttcatattatggtggctgaatacaatatggcaacaaactgccaagtct

SEQ ID NO: 644621 - DNA, 608 bp, Homo sapiens
caaattatcttactactttaattactcatttccccatgacagaggcacatcctgctacaaattcttttggtatactttcactttcctcctcaattattgattatttacatctgccacaatctgttttctccatgataacgctttctagttaacttttcaaccttcacaaaaaatatgaaaatcttattctttgagccaaggtcataaatagaaaaagaaaactgctgatgattatgcccagcttttgaattggattttaatctaggctgaaacactggactttgtgtaaagaattcagagctttactaataagaatataggaaaaatatagatagccgatagataatcgatagatattctatctgatgatgtaatctttattgctggtatctattttccgaaacatttaaatctgatgaaatttccaattggctctgatttaggttacaattgaatgctagatatgtaatttccccagtggtcayattcctctgtaaagaaaataagcagaaagtcccctaaatgaccctaccgtggtatctgtaaggtattctgaatatttcatattatggtggctgaatacaatatggcaacaaactgccaagtct

SEQ ID NO: 644622 - DNA, 608 bp, Homo sapiens
caaattatcttactactttaattactcatttccccatgacagaggcacatcctgctacaaattcttttggtatactttcactttcctcctcaattattgattatttacatctgccacaatctgttttctccatgataacgctttctagttaacttttcaaccttcacaaaaaatatgaaaatcttattctttgagccaaggtcataaatagaaaaagaaaactgctgatgattatgcccagcttttgaattggattttaatctaggctgaaacactggactttgtgtaaagaattcagagctttactaataagaatataggaaaaatatagatagccgatagataatcgatagatattctatctgatgatgtaatctttattgctggtatctattttccgaaacatttaaatctgatgaaatttccaattggctctgatttaggttacaattgaatgctagatatgtaatttccccagtggtcatattcctctgtaaagaaaataagcagaaagtcccctaaatgaccctaccrtggtatctgtaaggtattctgaatatttcatattatggtggctgaatacaatatggcaacaaactgccaagtct

SEQ ID NO: 644623 - DNA, 647 bp, Homo sapiens
cttcaaccatcattggataggatgtaggctaaggaggctgcctgttccctaagggaggtatattccctgacacccacttcaaatgtagtcaaagaggatcatggaaaggaagactctcccagaggacagagacaaggaccatagattctaggagctaaggagacccttctactccagggccatctcaggagaagagtccttgaagcatttgcccagtaagacctgagagttgcaatgacccattgcagtgattgtagtacaccttcaatttgtacactttctaaacaagagtatttactgagatgatcttggcctgatttcgccactgcatattggctaggtagatgggtgggtagggaggttagtaacttgccttttttagttacaggtctctgggtcatcaggggccatagctggatctgatgcaaatatttcacatcatccctagatattagcttaccaaggatcctggactgtgkgcttgatgctatgattggaaggtgtttgagattgtctccttcgaggaaacaggagagggagtgtgtcttacctagagaaagcagagaggaacaaatagttggtagccacaagggcacattgtaatcagcattggtgctactcactaatatctgttcttttttccttct

SEQ ID NO: 644624 - DNA, 622 bp, Homo sapiens
aacgagaaaattttaaaatacttatcatacagtactgtgacagcttgaacagcttagcagaactggtcccctgtgaaattagtgaaagttataaaaactcaatcatttgaaatctctgcaaattgtcctaaaagaatacaacaactgaataaacatctatctaagaaaatctacaaaatcctgtaaaaaagtgggagtcrggtgcatttcaaccaagaccactccctctctccttcctcccagctcagcaagccaaaaactccgcttcaatctggtgcagcgaagagcacagggccttcttccagggaggagtaggatgtcagcttttctcatcttgcccccagctacctgttgctgaggctaagttcctggtgagtgttgttatgaggtgagggttgtcttctaatgcccagctcccactcatgtaatggaggtcctaaccttgagtgcagtgccaatgggaacactgggacactatcaccttgctctagttcataaggttgtggttccatgacagaagaagcaagctgagaagaaaggctactgcctgcctgccacctccacgtagtactcaacttgtaaagagagggtgtcagccagagagaattaattgtgccattgt

SEQ ID NO: 644625 - DNA, 538 bp, Homo sapiens
tccaacgtcatttgtcatttgagaaataaaaattaaaactcgttgagataccactaaatcctaatggaatggttaaaatttaaaaatactgacaataccaagtgttgacaagaatgtggaggaaatggatcttccatacaataatggtggaagtgtataatgttgcaactactttggaaaacagtttgtcagtttctttaaaaattaaacacacatctaccataagattcagttattcctctcctaggaattcatccaaaagaaaacatctgttcatacaaaggctgttacatacgtgttcatctcagctttctttgtaagaactaaaaactgagaacagcccaaatgtccatcaataagttaatggataaacaagctgttctatatccatacagaatagaatgcaaaggaataaacttttgatatacactacaatatggatggactccaaaataattatgctgaacaaaagaaacaagaaaaaagagaatgcctactatataattccatttatatraaattcaaaaaatgtgaacta

SEQ ID NO: 644626 - DNA, 562 bp, Homo sapiens
tcattattaaattggccatctgaaagatttgtcacagtcagagaactccctccaggcatattaattacagcaggtatccttgactctgggatgaatacttagggagtagagtgtagcctgcacttctgttgccactgcccactcagcttttgggccatgctcaatctgcacacatatgtacagaagcctagcgaactagtgaatggcccattctaatgagaattatgagaagtcctttcctaaaagtcattagtatttttaagatattctgaagaattccattgccattgaatatgagtaatgcagttactttccaagagctgatggcaagtgagacctgatatttagttaaagaatccaggccttcaaaaggcctgaaattcatgaaacacattagtttggcacttcccagaatttccctttttgtgttgtatttctaagttatataytggcagttttttaaagtttcttacaggaaatgatttttacaaattaaagctattccatcaattagtattcattttattaaatcccacctgagaaatttcatataaaattaagt

SEQ ID NO: 644627 - DNA, 562 bp, Homo sapiens
tcattattaaattggccatctgaaagatttgtcacagtcagagaactccctccaggcatattaattacagcaggtatccttgactctgggatgaatacttagggagtagagtgtagcctgcacttctgttgccactgcccactcagcttttgggccatgctcaatctgcacacatatgtacagaagcctagcgaactagtgaatggcccattctaatgagaattatgagaagtcctttcctaaaagtcattagtatttttaagatattctgaagaattccattgccattgaatatgagtaatgcagttactttccaagagctgatggcaagtgagacctgatatttagttaaagaatccaggccttcaaaaggcctgaaattcatgaaacacattagtttggcacttcccagaatttccctttttgtgttgtatttctaagttatatactggcagttttttaaagtttcttacaggaaatgatttttacaaattaaagctattccatcaattagtattcattttaytaaatcccacctgagaaatttcatataaaattaagt

SEQ ID NO: 644628 - DNA, 607 bp, Homo sapiens
tacaggctggctattcaaaaacggttccccatcccccacctttgaaatcagtgctgtgttgatattgaaattgaggtacatctcatcttggcagtgccttggttagtttaccacttaraatcaactcatcttgttctacgcttttgccaagggcagtatcacacaacaggtagaaaattaataaatgtatattgataactatacttatcagaatgcctctagtgaatatttagaaagcttactaggcctaaatccaggagctaaaaggtgaaaattgtatttactttcaacatatggacggttactgtcccaacaatgacagtttgtagcttaaaaaaatagcgccaaaattctaggattatatttttctaaagtaaagtcttcaagaagttttaacattttattaattgaattaccagcaagatgaaagcataggaaccttcctttcatctgatattctaggaatctttgaaatgtttgtatttttgctcagtttaatattgtttgaataaatatgaatatttttattaaaataaagattagctctgcagaacaaattcagtgcaaagtacttcaaaacttaaaagataatagggtaatttttatt

SEQ ID NO: 644629 - DNA, 516 bp, Homo sapiens
acagtttttacacaataggcttatgtggccatggaggcagatatgaaagttacaaatgtactcaacaaaatagactggtcctcatgaagttttatctggccgttaagtggccatctaagtgcccaaactgtcaagattagagagcactgttgagccctttccttagccccattctgcagagaaccaatcaaccataacgtggtgggttgattacatagaggcatcagtgatgatttgttctcaaatagacatgtagtctggatatggatctgtatttcctacctgcaatgcttgtatmagtataacaatttgtgaagttgctgaatgccttgtttgccatttatggtatcctgccatttatggtatcttaccaaagaactcattttacagtaaaataggtaagaaaaaggccaacactcataagattcatgggtatgatcatgtactccattagctgacttgatgaaatggtacaatagcctaatgttgactgattcatgttccttactggttgac

SEQ ID NO: 644630 - DNA, 516 bp, Homo sapiens
acagtttttacacaataggcttatgtggccatggaggcagatatgaaagttacaaatgtactcaacaaaatagactggtcctcatgaagttttatctggccgttaagtggccatctaagtgcccaaactgtcaagattagagagcactgttgagccctttccttagccccattctgcagagaaccaatcaaccataacgtggtgggttgattacatagaggcatcagtgatgatttgttctcaaatagacatgtagtctggatatggatctgtatttcctacctgcaatgcttgtataagtataacaatttgtgaagttgctgaatgccttgtttgccatttatggtatcctgccatttatggyatcttaccaaagaactcattttacagtaaaataggtaagaaaaaggccaacactcataagattcatgggtatgatcatgtactccattagctgacttgatgaaatggtacaatagcctaatgttgactgattcatgttccttactggttgac

SEQ ID NO: 644631 - DNA, 516 bp, Homo sapiens
acagtttttacacaataggcttatgtggccatggaggcagatatgaaagttacaaatgtactcaacaaaatagactggtcctcatgaagttttatctggccgttaagtggccatctaagtgcccaaactgtcaagattagagagcactgttgagccctttccttagccccattctgcagagaaccaatcaaccataacgtggtgggttgattacatagaggcatcagtgatgatttgttctcaaatagacatgtagtctggatatggatctgtatttcctacctgcaatgcttgtataagtataacaatttgtgaagttgctgaatgccttgtttgccatttatggtatcctgccatttatggtatcttaccaaagaactcattttacagtaaaataggtaagaaaaaggccaacactcataagattcatgggtatgatcatgtactccattagstgacttgatgaaatggtacaatagcctaatgttgactgattcatgttccttactggttgac

SEQ ID NO: 644632 - DNA, 639 bp, Homo sapiens
gaggtaagatgggggtggctaggacattttcaagtcctgaaagaagctgtgtggcaagtcaactggggcaatgcgagctattctggaatcaccaatcttcaactggacatcagaggatggctactgaatttgaatgatgactcaagtcttctgcagtccattagctataagaccctcaggcaggtgtcttctgaaatatgaagagaaaattaagcatgaaaagtttgttgcatgtcttgtttgtgttataactcagcttgagacaaagtgagytttgtggagtcttaccctctcttccctagtgagcttggaattggatattaaaggaaaaaacaaagagatatttgtcttagagcttagagcactgaacaaaacagagtgtgtgtgggggggcagttaactcttttgtgcttcaaggtagctgttgctatgcattttatatacacatacatgctcatagaaagcagcaaaaacataatattcataataaagtgtatggggaaattgactttatgtatatattgtacccagtagtatagttagaaaaaaaaaaataacgagttcatgttttggccacttcaataagaaatgctttctttctatgtagctcaaggtaacaagatccagatgaaaagaaat

SEQ ID NO: 644633 - DNA, 629 bp, Homo sapiens
tggttgtatccagtggccagagaggtcmggtcacattggtgtaaggtatgtacgcccaggctggaggagccctaggtgaacaaacatcatacatgtgtctagtacttaaatattatgtagaaatatgtatagaaaatagaattagaaaaataaacaaaaatattaacagcagtttttaggtagtgattttacaaagatttttctctttattttgtctaatttttctttaatgaatcattttataatcacaaacattgtaaacttcatgcataaaaacatatttagaagaatgataatgttaaaactaaaagagacttcaggatgatataattcagcaccacctcgatttataaaagttgaaacaagcccacatagatgaaatgacttgcccaaagtcacagagcaagggagtggccaagctatgagttttccaactctttttcttaaaggatcttagctgcacctgatactgccttgcctgaaccaaataagataaatgcctctgattgcaagtcagagcctgtaggtagcagatctttgagtgtgccatatacctgtaaactgtgctctacatctttagagcttggaagtttgttaaaataacaccttgttgacttaaagcagaactc

SEQ ID NO: 644634 - DNA, 629 bp, Homo sapiens
tggttgtatccagtggccagagaggtccggtcacattggtgtaaggtatgtacgcccaggctggaggagccctaggtgaacaaacatcatacatgtgtctagtacttaaatattatgtagaaatatgtatagaaaatagaattagaaaaataaacaaaaatattaacagcagtttttaggtagtsattttacaaagatttttctctttattttgtctaatttttctttaatgaatcattttataatcacaaacattgtaaacttcatgcataaaaacatatttagaagaatgataatgttaaaactaaaagagacttcaggatgatataattcagcaccacctcgatttataaaagttgaaacaagcccacatagatgaaatgacttgcccaaagtcacagagcaagggagtggccaagctatgagttttccaactctttttcttaaaggatcttagctgcacctgatactgccttgcctgaaccaaataagataaatgcctctgattgcaagtcagagcctgtaggtagcagatctttgagtgtgccatatacctgtaaactgtgctctacatctttagagcttggaagtttgttaaaataacaccttgttgacttaaagcagaactc

SEQ ID NO: 644635 - DNA, 629 bp, Homo sapiens
tggttgtatccagtggccagagaggtccggtcacattggtgtaaggtatgtacgcccaggctggaggagccctaggtgaacaaacatcatacatgtgtctagtacttaaatattatgtagaaatatgtatagaaaatagaattagaaaaataaacaaaaatattaacagcagtttttaggtagtgattttacaaagatttttctctttattttgtctaatttttctttaatgaatcattttataatcacaaacattgtaaacttcatgcataaaaacatatttagaagartgataatgttaaaactaaaagagacttcaggatgatataattcagcaccacctcgatttataaaagttgaaacaagcccacatagatgaaatgacttgcccaaagtcacagagcaagggagtggccaagctatgagttttccaactctttttcttaaaggatcttagctgcacctgatactgccttgcctgaaccaaataagataaatgcctctgattgcaagtcagagcctgtaggtagcagatctttgagtgtgccatatacctgtaaactgtgctctacatctttagagcttggaagtttgttaaaataacaccttgttgacttaaagcagaactc

SEQ ID NO: 644636 - DNA, 588 bp, Homo sapiens
gcagatcaccaggtcaggagttcaagatcagcctgaccaatatgctgaaaccccatctgtactaaaaatacaaaaattaaccaggaatgatggcatgcacctataatcccagctactcaggaggctgaggcaggagaatccctcaaacctgggaggtggaggttgcagtgagccaagatcgcaccactgcactccagtytgggtgacagagcaagactctgtctaaaatattaaaaaaaaaaaaaaaaaaaaacacttctcagaggtatgaaagatgacacaaacaaatggaaaaaaaaattccatgctcatggataggaagaatcaatatcattaaatggccaaactgcccaagcaatttgcagattcagtgcattcccatgaagttaccaatacactaagcaaaaagaacaaaagtagagtcatcatgctacccaatgtcaaactatactacaaggctacagtaaccaaaacagcatggtacttgtacaaaaatagacacatagaccaaagaacagaatagagagacccaaaacaatgctgcatacctacagccatctgatcttcaacaaagctgaaaaaaacaag

SEQ ID NO: 644637 - DNA, 579 bp, Homo sapiens
tatggcaaatgatgctgtagtcaggaagaatgaatagatttgaaaaaatacagagaaaaactaaccacagaaagagtcaactcattgttgcctatgggtgtttttgtctccagtttgttttccatagacttcaatgagtgtggatgggtttgagagattatgtactccctagtyacagtgaatctaacaatgaagtaagaaagacatgtggttggcgctgagaaacatggtctctgcttggccatgtgattatgagcaaagcatcctcagcttaaccttctgtagactgggaataattatgttaactacaagttgctctgaagattaaatgagaaaatgtacaccaaatcacttggtttagatagcactactcgtgttgatttttattattattctatttcaattttttaaaattcttgtgttggagtgaataatagtaagaaaaccaaaaaaacttaagtaatacatgatttttgtaaaactgctcctcatgacctttaacatgatcaatgtggctggtagatatccatggatactcaggaggaacaattaagctgacattgataagaagcagcaaat

SEQ ID NO: 644638 - DNA, 566 bp, Homo sapiens
ctaatctaaaaattcaaaatccagcatgttccaaaatccaaaactttttgaggaccaacatgatacctcaggtggaaagctccatacctgacctcatgaaaggttgcagcaaaaatgcaggcacaacacccagtttattcagcatccccaagagaaaaacataattaccttcaggctatgtgtacaaggtgtatatgaaacataaataaatttcatgtttagacttgggtcccatccccaagatatctcattatgtatatgcaaatatttcaaaatctgaacacatctgaaaatcttctggttcaagcatttcrgataagagatatttaatctatatatacttattatataacctaacagttccactactgggcatttacccaaaagaaataaaacaaagacttgttacatgaatattcatagcagcttaatccataatagcctgttactgaacacaactcatacattcatcaacaaatgaatgaataaacaaattgtattatattcatacaatggaatactactcagcaataaaaatgaatgtactactgatacaaatagcatgg

SEQ ID NO: 644639 - DNA, 570 bp, Homo sapiens
agtccttctgacattcaaaagctctgattgccttatacttttagcctctgaaaagttaagttgcccccgttctaaaattcctaaatgttacaatttgaatcagcattcatttcattgttctggttcttgatgaaaaattaaagtgcagaaaaagaaaagacagtgtggatttgtcagatatattttgcaaaagccagcaaaaatgtaaaacatttggctaatcatccattgttttgttcaattagtactgatttgagttgtacaagattttgtaattgaaacrtttattttgaatgaaatcagtggccagttttgcatttctagacaaagaagcatagtgcagtataaaaaacaagcaaacaaagcacactggacagtgtgccaggaggccaaattcaagccctgtcacttcctagcagcatgaccttgctaaatcatttaacttctttgaggctcattattttcatctgatatcctggagctaaatatgataatgcatgtgaaagtactttgaaaactaagacaaatttcacacatttaagaactcaccatcattattaatattataat

SEQ ID NO: 644640 - DNA, 427 bp, Homo sapiens
agatgagtgaatcatggtggagggtctttcccatgctgttctcatgatagtgaatgggtgtcacgaaatctgatgggtttaaaaaatgggagtttctctgcacaagccctctctttgcctgctgcaatccacgtaagatatgacttgctcctccttgccttcagccatgattgtgaggcttcccagccacatggaactatgagttctccattaaacttctttcttttgtaaattgcccagtctcaggtatatctttatcaagcggcattaaaacagacyaatatagtccattatttgcttttaaatcttactatatgtcacttatgtttcgttgctattagaaatcattgggaaaataatatgcaactgtcagaaaagcattagtgattgagaattttggaaacatgatgctctgtcagtatttttt

SEQ ID NO: 644641 - DNA, 607 bp, Homo sapiens
gggagtagaaattagttcaactattttggaaagcagtgtggtgattcctcaaggagcgaaaaacagaacatctattcaacccagcaatcgcattactgggtatatatccaaagcattataaattgttctatcataaaaacacatatacacataggttycttgcagcactactgacaatagcaaagacatagaatcaacctcaatgaccatcagtggaagactggataaagaaaatgtagtacatatgcagctgtaaaaaaagaatgagataaagtttatagcaaaaatgtcaatgaagctagacaccattatccttagcaaattaatgcaggaacagaaaaccaaatacatattcttacaaataagaaagagctaagtcatgagaacacacagacacaaagaggggaacaagagaaacaggggcctacaagagggtggagggtgggaggaggaaaaagagcagaaaaaataactgttggtactaggcttaataatcaggtgataatctgtacatcagactcccatgacatgagtttacctatgtaacaagactggacatgaacctctgaacctagaataaaagttaaaaaaaagaaaaaaaatttta

SEQ ID NO: 644642 - DNA, 469 bp, Homo sapiens
tatgaaagaaaaaagactattggctgagcatgatgactcatgcctgtaattccaacattttggcagggcaagatggaaggattgctggagcccaggaatttgagaccagcctgggcaacatagcaagaccccatctctaaaaaaaaaatggaaaaagatgctggtattactatccaattcatcacagaataaaatgtgcccatattaaggagatccaggtctccaaatgcatagtttttctctagtaggacccacacattycaggattagagaattattcttcatctcaaggtgatgagtaatctgcacatttaatttaaatccatttaattaactatagcatttattataagaaagaatttatatggaactctagattcctaagtcatatagataaaaacaaaatatgtgtgaagagtaaatttttttaatggcccatataatttcactcactttctaaaagatgagc

SEQ ID NO: 644643 - DNA, 589 bp, Homo sapiens
tccttgttccacccatctccagccctaacttttgttttccagaagtagccacttataatccttactgtcgtttcttctggcatttatttccatatttccaaagatcacatttactgtcttttttcttggtttttttttcaattttggatattatttatttactttgttcaatggaagatgaagatttagttctctatgccatccctctgcctcttccctaaacacacacacatgtcatctccccactygccttttaaagcaacagcaccatttttagttaaatcagtattcagtgtcttgcattatataatcaggtaaatattattcaaagatgggccatgcaatatgatattactcattatctttttctacatttttgtagccagtaattccttcctttgtttcgtgttgtcatctgtacagctaatgctagttcttctgcagcttttctaacagagctataaagcacttctcaatatgaacagatacttcaggcaatctttcagattttgttttttcttagagttattcctcctggagccatctgtcctgttcttcctatgccagtcaagattgtttatgctgtagg

SEQ ID NO: 644644 - DNA, 589 bp, Homo sapiens
tccttgttccacccatctccagccctaacttttgttttccagaagtagccacttataatccttactgtcgtttcttctggcatttatttccatatttccaaagatcacatttactgtcttttttcttggtttttttttcaattttggatattatttatttactttgttcaatggaagatgaagatttagttctctatgccatccctctgcctcttccctaaacacacacacatgtcatctccccacttgccttttaaagcaacagcaccatttttagttaaatcartattcagtgtcttgcattatataatcaggtaaatattattcaaagatgggccatgcaatatgatattactcattatctttttctacatttttgtagccagtaattccttcctttgtttcgtgttgtcatctgtacagctaatgctagttcttctgcagcttttctaacagagctataaagcacttctcaatatgaacagatacttcaggcaatctttcagattttgttttttcttagagttattcctcctggagccatctgtcctgttcttcctatgccagtcaagattgtttatgctgtagg

SEQ ID NO: 644645 - DNA, 441 bp, Homo sapiens
aggtctggtggctcatgcctgtaatcccagcactatgggaggccaagyggggcagattgcttgagcccaggagttcaagaccagcctgggcaacatggcaagaccccaactctacaaaaaatacaaaaattagccagatgtggtggcatgcacctgtagttccagctacttgggaggctgaggtgggaggattgcttgggcctgggaggttgaggctgcagtgagccaagatcgcaccactgcactctagcctgggtgacagagccagaacctgtctcaaaaaaaaaaaaaaaaaaaagtgaaaataattatttgtcatacctctttgccttattgacccagatctccgcttaaaacaaacattgttaaagacagcttctttaatattgacccagagatatgctcagcatttataaatatgtgtataaatgtagtagaatt

SEQ ID NO: 644646 - DNA, 592 bp, Homo sapiens
acactgaggtcctagaaggagcctgggtccctgagtgaccacatggagcagccccactccctcttcccttttcatgctgacctgcaggagccagtgacctgagcaagaagagtctttaggggattaagccactgagatttgggagctgttagagcagcaagcatgaattacctgattgatgtgcccrgtttccttatctgtaaaaggaggttatcaacatcattctcagggttgttgtgtcaatgacttatgattcagtgaaaacacaaacccaggatctgacacattctaggtaactgaggtccctccttacagtgtcagcagcagccacagcagcaacagtgcaaggagcactagttaactcccagtgtgcacagtactatgccccagctaagtggaccagacaccagatgggcctagttcatatacagggtctcatgttctatagcatgggggtgctgggagccttaaaaggtgtgcaggactgactgcaaatgctttgtaaaatgaatttttcctataactgcagaccattaaggtgatatctgtaaatagaatgctaagctgaggggtcacacatagtaaaagtgag

SEQ ID NO: 644647 - DNA, 603 bp, Homo sapiens
aacacaaatatgaagactgttaggacctacatatttgccaaagccaggctttaaatttttcttgagcttcctggaagccaaaggaaaaagagaaatgagacaagtctcatcaacagaaagaaaaaagaataccagtccttatgggatctagagctttttctctagaaaaagatgtatggggcttgcttcaaacagaaaaagagtaatacccaccttccccagaatcatatacttagttaaaaaaaaaaaaaaaaacaacagaacaatgagtctgcaaaatgaatagcaacagcaatgctgttgatgagggtcagtacggggacaggggttcttgttaatatgtctgrccagagattgaactagatatcagaaggcaaagcagttggcttccatgcactgtgctaaaagtgcataaaacattttgagagggtgtaagaagcctcatttctgcttatcacttctgtatatctatttgtttcagagcaaaaactggagttcaataaggacaggcccaacttgtcactaactcaccttacagtgcctggcgcaaagtaggccctcaagagattgctcgtgaacatatacaccatggaatactatgca

SEQ ID NO: 644648 - DNA, 581 bp, Homo sapiens
tcagtcatttgggaaatgcaaattcaaacacctgcacacctattcggatggctaaaagtaaaaagtctgagcatagctagtgttggtgtgtatgtgggggtcccagaactgtcatacacagctggcgggaaagtaaaatggagtagtcactttgcagaacagtgtgtggccatttccttaacagttatgcatatataaaaatatatataaatacttaaaaagttagacaggctgagagcacgttggggcaggacccaggacaggggcacagctctgggcagggcagatccaagttttgtggggcctgaagcttgtgtgacttgggtggccctcttcagggaaaataattttcaaatgagaaattcaagattaggtacaaaagtgaatatttaggacaaaccaagtaaccacaaattcctggagctgtggatctccaggttccttttttttttccaagtcatcttgagatatttttctaggaatgctgacatagaaaagcttcctggtgrcatctggcttcctctccctatctcgcacactcagccattccagccttcgtagcccaaatgctgtgcagcact

SEQ ID NO: 644649 - DNA, 485 bp, Homo sapiens
ggctgaggagacagcagcgagctggagggacaggcactggcctcatggttctcacgtgctagtagaggaggcgggtgaccagctgagcaggcacatggcaggttagatggtgggcacagtggggacagaagaggcagggaggggaacacaagagatagggttagggtttggtgacttttgagtagaaggaaagaaagggtggataacagcacaggcagaggtagggggcccatcccggaagaacagcaaggaggccagtgtggccagagcagagtgggcaaaggggaggagagagaccaaagaatgaatggccttgtcatcayggtagagctgttagcacctcatggcatggaatagagaagtggcagaacctggcccatcttctaccaggatccttctggctgtcatgttgaggaaagaccaaagccagttaggagctccttacacaacagtgcaggtgagaggtgagggtggcctggcccagt

SEQ ID NO: 644650 - DNA, 568 bp, Homo sapiens
cccctgcagcgctcaaggcttctcccctgccagagccccaggagcctgagaacttggatccccaaggcagaggaaatggcctccagccacagccascctcccccacccctgctgatgggacagccacagagctgtttaccagaacaaaggcccgagcagctgccttatctagggagagcctggtaagctagtcgggatgatttacagggggctgtcactactgcttcctgcaaaggtcaggacgctaacgttcaacactcttttaaccaccttgctggttcattaagcccttccttctcagcagctctgatgagaaatgcccatcagcttggccagtttggtttcagtctggcttcaatagacctcagatcacagaaccagaaaagagtttgtctccattattgataagatggggatgaacccctggggaccccagcatttcctatcctggactctgtgtccctgctgagcctgacaatagccctgtgaaaccagtcccattatatcccacttttggtgaggagacagaatcaaggaggctccagcattttgtccagaccacaaataa

SEQ ID NO: 644651 - DNA, 568 bp, Homo sapiens
cccctgcagcgctcaaggcttctcccctgccagagccccaggagcctgagaacttggatccccaaggcagaggaaatggcctccagccacagccaccctcccccacccctgctgatgggacagccacagagctgtttaccagaacaaaggcccgagcagctgccttatctagggagagcctggtaagctagtcgggatgatttacagggggctgtcactactgcttcctgcaaaggtcaggacgctaacgttcaacactcttttaaccaccttgctggttcattaagcccttccttctcagcagctctgatgagaaatgcccatcagcttggccagtttggtttcagtctggcttcaatagacctcagatcacagaaccagaaaagagtttgtctccattattgataagatgrggatgaacccctggggaccccagcatttcctatcctggactctgtgtccctgctgagcctgacaatagccctgtgaaaccagtcccattatatcccacttttggtgaggagacagaatcaaggaggctccagcattttgtccagaccacaaataa

SEQ ID NO: 644652 - DNA, 555 bp, Homo sapiens
cctagttgtttccatgctaggaggccatcatgcctgggagatgtgttggtccaggcctggaagtggccccatcatcccgtcacagcccattggccagaatgcagttgcrtggctacacctcggagcaagagagtctgggaaatggagtccacctctttccaggaggaaggcaaggctggtttggtgaacagtcagtagtcctgccattctgtataatgatctgttaccttggagtaagaaagacaccttcctaccctcacagaattaacaagttcaggaagcaggcaggaaggcagacattgactcacaggatgagaaaggctaggaggagagtaaaaaggcaattgtgtgagcctggaggaggggaccctaatgcacgcagggagtgcatgggacttccaggataaagtgacaacgaccctgctctttgaaggttaagtgagagtcagccaggtgaagaatcagggagagcagctgggcagaagcagcaatgggcaagcacagtgggcacggggtctgtgtgtctccttcacaccttagttccaaggcgctcag

SEQ ID NO: 644653 - DNA, 415 bp, Homo sapiens
aagctttagtgagcctccgcctcatctggagggcttgcaaaaaacactgctgagtgggctcagggtccaaggtggagaggctgcccctggtgtagagatagtgggggacttagaatcctggaagggtgaatgagatgggcctcacaagcggactgagtgagaggaggtttgagttaattgggggcaggcaaagctataaccaatgttttaattctaataattattattccaagaggaggaggaccgtataatgtataagatgctggtttgtgctttgatctcctggccctttttaatccctaggccacttgcctcaggggaaggtgaggtctctgsagcagaaagcagaaatctcctgctctcccaccccagataattgatgtggacagggtcgggaaagaggcgttcccctaga

SEQ ID NO: 644654 - DNA, 550 bp, Homo sapiens
agaggaggaactgaaaacataaatagtgagcttactcaaaaggcatggctaatctaagatgatgtattaatctcggtaaaatagactttgtctttcatgccaattatggaataagtggcaagaccttgagtgtcacataaggtagagtgttagaaaggagctctctacataaaagtgtatgcctcagaggtctataaccttagtaaaattacagatgagaaaaaataatgttggcataaggggagaacaaggaaattttagcttttatgtgaaatacagatgaaaaaaaatctcctggaaatttcaagtcacacaaagctgagaatgctaatctatactatctgcaaggtccaagagaaaattaacttaatagtagcctcctgaagaatcaaaggcaaatactgtattctcaaaaaagtagcataaaaaatcaataactkctgggattctaaaaaaattcatgttacaaatgatctaattacttaagatcacaaaacacttcaggaacataagataccactagggagagtgagcagaaacagccaatagt

SEQ ID NO: 644655 - DNA, 549 bp, Homo sapiens
gtcttctaattaaccgaatccaataaagacaaagaaaaaagaataagaaaatatgaagaaagccttcaagaaatctggaattatgttaaatgaccaaacctaagaataaccagcattcctgaggaagaagagaaatctaaacgtttgttaaacatatttgggggaataattgaggaaaacttccccagctttgctagagacctagatccaaatacaagaagcacaaagaacatctgggaaattcatcacaaaaagatcrtcatctaggcacattgtcgtcaggttatctgaagttaagatgaaagaaagagctgtgaaacaaaagcaccaggtaacctataaaggaaaacttaccagattaacagcacatttctcagcagaaaccctgcaagccagaagggattggaaccctatcttcagcctcctcaaacaaaacaattatcagctgagaattttgtattcagcaaaactaagcttcatatatgaagacaagatacagctttttcagacaaacagagaattcaccactaccaagccaccagtgcaaga

SEQ ID NO: 644656 - DNA, 549 bp, Homo sapiens
gtcttctaattaaccgaatccaataaagacaaagaaaaaagaataagaaaatatgaagaaagccttcaagaaatctggaattatgttaaatgaccaaacctaagaataaccagcattcctgaggaagaagagaaatctaaacgtttgttaaacatatttgggggaataattgaggaaaacttccccagctttgctagagacctagatccaaatacaagaagcacaaagaacatctgggaaattcatcacaaaaagatcgtcatctaggcacattgtcgtcaggttatctraagttaagatgaaagaaagagctgtgaaacaaaagcaccaggtaacctataaaggaaaacttaccagattaacagcacatttctcagcagaaaccctgcaagccagaagggattggaaccctatcttcagcctcctcaaacaaaacaattatcagctgagaattttgtattcagcaaaactaagcttcatatatgaagacaagatacagctttttcagacaaacagagaattcaccactaccaagccaccagtgcaaga

SEQ ID NO: 644657 - DNA, 549 bp, Homo sapiens
gtcttctaattaaccgaatccaataaagacaaagaaaaaagaataagaaaatatgaagaaagccttcaagaaatctggaattatgttaaatgaccaaacctaagaataaccagcattcctgaggaagaagagaaatctaaacgtttgttaaacatatttgggggaataattgaggaaaacttccccagctttgctagagacctagatccaaatacaagaagcacaaagaacatctgggaaattcatcacaaaaagatcgtcatctaggcacattgtcgtcaggttatctgaagttaagatgaaagaaagagctgtgaaacaaaagcaccaggtaacctrtaaaggaaaacttaccagattaacagcacatttctcagcagaaaccctgcaagccagaagggattggaaccctatcttcagcctcctcaaacaaaacaattatcagctgagaattttgtattcagcaaaactaagcttcatatatgaagacaagatacagctttttcagacaaacagagaattcaccactaccaagccaccagtgcaaga

SEQ ID NO: 644658 - DNA, 477 bp, Homo sapiens
accaagtctagactccttagtagataaatcttattaggctgagatgtgttttcccctgtttttccacaaktagattacaaatttgcaaacctcagctgctctcattttatgctctcaccaagctaaagctgaagttcatcaatcagtgtgtctaagtgttcactggttatataccattttgtagtttcagctatctttccaacttcctaaatcatcaccttcatttgatcttgtttttttccactatcacttctttattgaccatataaagaatataagtgagttcttattttgttattgttcattttagtctaatttcatcaaaatatcacaatcttttaatttcattttaatttcaaagattaaatgaaacctacatagaaatgtgtgtaagatttgcatttgcattattttggcatcaatttgctatcctccctcatgcacatagagatcatttccacgtacgtgatttcaaac

SEQ ID NO: 644659 - DNA, 477 bp, Homo sapiens
accaagtctagactccttagtagataaatcttattaggctgagatgtgttttcccctgtttttccacaatkagattacaaatttgcaaacctcagctgctctcattttatgctctcaccaagctaaagctgaagttcatcaatcagtgtgtctaagtgttcactggttatataccattttgtagtttcagctatctttccaacttcctaaatcatcaccttcatttgatcttgtttttttccactatcacttctttattgaccatataaagaatataagtgagttcttattttgttattgttcattttagtctaatttcatcaaaatatcacaatcttttaatttcattttaatttcaaagattaaatgaaacctacatagaaatgtgtgtaagatttgcatttgcattattttggcatcaatttgctatcctccctcatgcacatagagatcatttccacgtacgtgatttcaaac

SEQ ID NO: 644660 - DNA, 477 bp, Homo sapiens
accaagtctagactccttagtagataaatcttattaggctgagatgtgttttcccctgtttttccacaattagattacaaatttgcaaacctcagctgctctcattttatgctctcaccaagctaaagctgaagttcatcaatcagtgtgtctaagtgttcactggttatataccattttgtagtttcagctatctttccaacttcctaaatcatcaccttcatttgatcttgtttttttccactatcacttctttattgaccatataaagaatataagtgagttcttattttgttattgttcattttagtctaayttcatcaaaatatcacaatcttttaatttcattttaatttcaaagattaaatgaaacctacatagaaatgtgtgtaagatttgcatttgcattattttggcatcaatttgctatcctccctcatgcacatagagatcatttccacgtacgtgatttcaaac

SEQ ID NO: 644661 - DNA, 546 bp, Homo sapiens
atgctcacaaattcagtgttgatgagagcccatttcatggwtcatagatggtgccttctttctatgtcctcacacagtggaagtcacacaagaactccattgagcttcttttataaaggcactaatcccattcataagggctcggcccccaagacctggtcacctcccaagtgttctgctctccctgatctgtgtcatatacagactctcttggattccttaccaattgcttgagagatcacagtgggtttgtggggaaaaagttttcaagatgatggatctttcccaacttctgcaactgtcagcggtctcccaatctcaccagccccactttgtctttaggaatttattgattattccagctttacttgtcatagtggtgtctatttgcatctgtcctatgtaagtgcatctgtcctctttctccttgcaggtgcttgttttccctcacattttgactcagttcttggcaacctggttgctctaaaaataaagtcatgactttgaagttagtttggttctttcattgttgtcaggttaggaacc

SEQ ID NO: 644662 - DNA, 526 bp, Homo sapiens
gttgatgagagcccatttcatggatcatagatggtgycttctttctatgtcctcacacagtggaagtcacacaagaactccattgagcttcttttataaaggcactaatcccattcataagggctcggcccccaagacctggtcacctcccaagtgttctgctctccctgatctgtgtcatatacagactctcttggattccttaccaattgcttgagagatcacagtgggtttgtggggaaaaagttttcaagatgatggatctttcccaacttctgcaactgtcagcggtctcccaatctcaccagccccactttgtctttaggaatttattgattattccagctttacttgtcatagtggtgtctatttgcatctgtcctatgtaagtgcatctgtcctctttctccttgcaggtgcttgttttccctcacattttgactcagttcttggcaacctggttgctctaaaaataaagtcatgactttgaagttagtttggttctttcattgttgtcaggttagga

SEQ ID NO: 644663 - DNA, 526 bp, Homo sapiens
gttgatgagagcccatttcatggatcatagatggtgccttctttctatgtcctcacacagtggaagtcacacaagaactccattgagcttcttttataaaggcactaatcccattcataagggctcggcccccaagacctggtcacctcccaagtgttctgctctccctgatctgtgtcatatacagactctcttggattccttaccaattgcttgasagatcacagtgggtttgtggggaaaaagttttcaagatgatggatctttcccaacttctgcaactgtcagcggtctcccaatctcaccagccccactttgtctttaggaatttattgattattccagctttacttgtcatagtggtgtctatttgcatctgtcctatgtaagtgcatctgtcctctttctccttgcaggtgcttgttttccctcacattttgactcagttcttggcaacctggttgctctaaaaataaagtcatgactttgaagttagtttggttctttcattgttgtcaggttagga

SEQ ID NO: 644664 - DNA, 546 bp, Homo sapiens
atgctcacaaattcagtgttgatgagagcccatttcatggatcatagatggtgccttctttctatgtcctcacacagtggaagtcacacaagaactccattgagcttcttttataaaggcactaatcccattcataagggctcggcccccaagacctggtcacctcccaagtgttctgctctccctgatctgtgtcatatacagactctcttggattccttaccaattgcttgagagatcacagtgggtttgtggrgaaaaagttttcaagatgatggatctttcccaacttctgcaactgtcagcggtctcccaatctcaccagccccactttgtctttaggaatttattgattattccagctttacttgtcatagtggtgtctatttgcatctgtcctatgtaagtgcatctgtcctctttctccttgcaggtgcttgttttccctcacattttgactcagttcttggcaacctggttgctctaaaaataaagtcatgactttgaagttagtttggttctttcattgttgtcaggttaggaacc

SEQ ID NO: 644665 - DNA, 526 bp, Homo sapiens
gttgatgagagcccatttcatggatcatagatggtgccttctttctatgtcctcacacagtggaagtcacacaagaactccattgagcttcttttataaaggcactaatcccattcataagggctcggcccccaagacctggtcacctcccaagtgttctgctctccctgatctgtgtcatatacagactctcttggattccttaccaattgcttgagagatcacagtgggtttgtggggaaaaagttttcaagatgatggatctttcccaayttctgcaactgtcagcggtctcccaatctcaccagccccactttgtctttaggaatttattgattattccagctttacttgtcatagtggtgtctatttgcatctgtcctatgtaagtgcatctgtcctctttctccttgcaggtgcttgttttccctcacattttgactcagttcttggcaacctggttgctctaaaaataaagtcatgactttgaagttagtttggttctttcattgttgtcaggttagga

SEQ ID NO: 644666 - DNA, 579 bp, Homo sapiens
tatttaatatgaaataggtcacctgaaatgaagtgtttcctgaaaacagcttggatcagcccagttttctaccactgaaccatgcatttggtttaaaaaacacaacaactctggggaatatcggctgcttccaactgtgttgaaggtgttaaagaaaagagcataaaagtaaaaatgatcatctgaggcctttatagtctctgctcaagagactagagtcttccattcttaacgaaacacccaaatatcttaataattgggcaaaatctaaatatcagagagataattttatcttgaagattgttaaattataatggtgattcactaccttgccacgtctctgagtcaaaaattaggtctttgtttaggaatcaatggtactctgcaacttggaaataggaagattttagaagactcaaacactgactttcttgtgtgcaaaaaaaagacrtattgagttaagacaagtctttccttgcaaggatacctctaatgctcatacaccacctcccctaacgttaatatagcttccaggtcagtaaccagtgtcagagagcagcccatgcaactacaaattca

SEQ ID NO: 644667 - DNA, 579 bp, Homo sapiens
tatttaatatgaaataggtcacctgaaatgaagtgtttcctgaaaacagcttggatcagcccagttttctaccactgaaccatgcatttggtttaaaaaacacaacaactctggggaatatcggctgcttccaactgtgttgaaggtgttaaagaaaagagcataaaagtaaaaatgatcatctgaggcctttatagtctctgctcaagagactagagtcttccattcttaacgaaacacccaaatatcttaataattgggcaaaatctaaatatcagagagataattttatcttgaagattgttaaattataatggtgattcactaccttgccacgtctctgagtcaaaaattaggtctttgtttaggaatcaatggtactctgcaacttggaaataggaagattttagaagactcaaacactgactttcttgtgtgcaaaaaaaagacgtattgagwtaagacaagtctttccttgcaaggatacctctaatgctcatacaccacctcccctaacgttaatatagcttccaggtcagtaaccagtgtcagagagcagcccatgcaactacaaattca

SEQ ID NO: 644668 - DNA, 579 bp, Homo sapiens
tatttaatatgaaataggtcacctgaaatgaagtgtttcctgaaaacagcttggatcagcccagttttctaccactgaaccatgcatttggtttaaaaaacacaacaactctggggaatatcggctgcttccaactgtgttgaaggtgttaaagaaaagagcataaaagtaaaaatgatcatctgaggcctttatagtctctgctcaagagactagagtcttccattcttaacgaaacacccaaatatcttaataattgggcaaaatctaaatatcagagagataattttatcttgaagattgttaaattataatggtgattcactaccttgccacgtctctgagtcaaaaattaggtctttgtttaggaatcaatggtactctgcaacttggaaataggaagattttagaagactcaaacactgactttcttgtgtgcaaaaaaaagacgtattgagttaagacaagtctttccttgcaaggatacctctaatgcycatacaccacctcccctaacgttaatatagcttccaggtcagtaaccagtgtcagagagcagcccatgcaactacaaattca

SEQ ID NO: 644669 - DNA, 571 bp, Homo sapiens
accacaggcccctgaagacaatcacaggtctctagactcacagctcatgaccgtcctctgcagacacagcttctccccggatggctgagttttgtcattggctgtgtccttccttgtgcatgacaacaggagacatagaaggtctgtaagcagccctgcaagccaggttctgagcaagccctcctgtgtgrggccctcttacctggacataggtgtgtaaaccaaaaatgaaactctaagctccctaaccaactgaatgaactcctcctctcagccaaggacacaccaaaatcaacctgaaatacaatacagtccatgatcggaacggatgattggacatgccttaacttaccctcttccctttaaaattcaggcagaactgaccagcttttaatatgaagacagagaccttgagactgacaaagaaaactctttatagcaataagataccaatgtgacagataccacgtcctaagagaaatcaaagtattttccccaagatattgttatttaatgtatttaaaaatgcctctgcaaagctggtttttgtgggagaaatctaaattctgta

SEQ ID NO: 644670 - DNA, 571 bp, Homo sapiens
accacaggcccctgaagacaatcacaggtctctagactcacagctcatgaccgtcctctgcagacacagcttctccccggatggctgagttttgtcattggctgtgtccttccttgtgcatgacaacaggagacatagaaggtctgtaagcagccctgcaagccaggttctgagcaagccctcctgtgtggggccctcttacctggacataggtgtgtaaaccaaaaatgaaactctaagctccctaaccaactgaatgaactcctcctctcagccaaggacacaccaaaatcaacctgaaatacaatacagtccatgatcggaacggatgattggayatgccttaacttaccctcttccctttaaaattcaggcagaactgaccagcttttaatatgaagacagagaccttgagactgacaaagaaaactctttatagcaataagataccaatgtgacagataccacgtcctaagagaaatcaaagtattttccccaagatattgttatttaatgtatttaaaaatgcctctgcaaagctggtttttgtgggagaaatctaaattctgta

SEQ ID NO: 644671 - DNA, 571 bp, Homo sapiens
accacaggcccctgaagacaatcacaggtctctagactcacagctcatgaccgtcctctgcagacacagcttctccccggatggctgagttttgtcattggctgtgtccttccttgtgcatgacaacaggagacatagaaggtctgtaagcagccctgcaagccaggttctgagcaagccctcctgtgtggggccctcttacctggacataggtgtgtaaaccaaaaatgaaactctaagctccctaaccaactgaatgaactcctcctctcagccaaggacacaccaaaatcaacctgaaatacaatacagtccatgatcggaacggatgattggacatgccttaacttaccctcttccctttaaaattcaggcagaactgaccagcttttaatatgaagacagagaccttgagactgacaaagaaaactctttatagcaataagataccaatgtgacagataccacgtcctaagagaaatcaaagtattttccccaagatattgttatttaatgtatttaaaaatgcctctgcaaagctggttyttgtgggagaaatctaaattctgta

SEQ ID NO: 644672 - DNA, 554 bp, Homo sapiens
tgctttaatttggagaagtactggtctagaaaacacaaattccaaggagactcaggttcttaagttgatttcttgagtacaaattcttcaaatgcattctccaagattaatttttttttttactttttaaattgacaaagattatacatattcatggctatayggggatgtttcagtacatgtagatggtgatcagatcagggtaattagcatatctatcatctcaaacatttattatttctttgtgttgggaacattcaaactactcctaggtattttaaactacataatatagtattgttaactatagtcatctacagtactatagaacactagaacttattactcctacctagctgtaattttgtatccattaacaaatctcttaccattcctcctttctccctacccttttcagcctgcagtatcctctgttctactttttacttctatgagatcaacttttctttagcttctgcgtgagtgagaacatgtggtgttgaaatttctattcctggcttattttgcttaacataatatcctccagttccatc

SEQ ID NO: 644673 - DNA, 554 bp, Homo sapiens
tgctttaatttggagaagtactggtctagaaaacacaaattccaaggagactcaggttcttaagttgatttcttgagtacaaattcttcaaatgcattctccaagattaatttttttttttactttttaaattgacaaagattatacatattcatggctatatggggatgtttcagtacatgtagatggtgatcagatcagggtaattagcatatctatcatctcaaacatttattatttctttgtgttgggaacattcaaactactcctaggtattttaaactacataatatagtattgttaactatagtcatctacagtactatagaacactagaacttattactcctacctagctgtaattttgtatccattaacaaatctcttacyattcctcctttctccctacccttttcagcctgcagtatcctctgttctactttttacttctatgagatcaacttttctttagcttctgcgtgagtgagaacatgtggtgttgaaatttctattcctggcttattttgcttaacataatatcctccagttccatc

SEQ ID NO: 644674 - DNA, 467 bp, Homo sapiens
cagtctagaataggcacactcatcatcagtctctctcattttctgtcttatctccattccatctacatacagtttttgttttcaccaatgtttttaaataaacaattgtacaagcacgacgacaacagaaacctyccttcccccagtgttgtagtgagcaaggaatatatttaacttcaaataaaagacaagaacaaatgctggataaagctgacagaaagaaatgcaactgtaggtgctctggcaatatagaaatgatacaactaagaaaaatggaagaaaaggaaagagaaagtattcctcagaatgattttactgactgctcatctgtaatgcctgggagtcaaaggatattgtttatagaaatgtaagcatacttaatggcaccaggggaaacaaagttaatatgattaaatcaaattgtgggatgaaaaatcacatagggaggacaagaaagagaatacagc

SEQ ID NO: 644675 - DNA, 547 bp, Homo sapiens
ggctggtaacaaagatgtctagattttaacaagtgtgacttagagcaaatcatcaacaccccccccaacccccccgccgggacctagtawcttcagctatgaaacatatggcttgaactagctgattttttagatttcctatggtttagaaagttccctatattgtttcagaagacaatggtagacaatggtagatggactctactatgtgctatacttatatagtgaaacagtatgtaggtacccttttggaaatcagtgaattgtaaagttatttaactaaattatttaagcttttaaaagaataatactttacttgtaaatgcagtttaaaattttagaaagttgagaaattttagatgcttttcatatctaaaatttcagaaggaaaaacttgattgctgactctcattgcccttatgaaaaccatattcctaaataatttgttaaagaaatacaatactggttaaattcaggtcttacttgaaattttttagtagcaggaccaaaactagtatttagtttctgctagttattaagctgtaga

SEQ ID NO: 644676 - DNA, 547 bp, Homo sapiens
ggctggtaacaaagatgtctagattttaacaagtgtgacttagagcaaatcatcaacaccccccccaacccccccgccgggacctagtaacttcagctatgaaacatatggcttgaactagctgattttttagatttcctatgrtttagaaagttccctatattgtttcagaagacaatggtagacaatggtagatggactctactatgtgctatacttatatagtgaaacagtatgtaggtacccttttggaaatcagtgaattgtaaagttatttaactaaattatttaagcttttaaaagaataatactttacttgtaaatgcagtttaaaattttagaaagttgagaaattttagatgcttttcatatctaaaatttcagaaggaaaaacttgattgctgactctcattgcccttatgaaaaccatattcctaaataatttgttaaagaaatacaatactggttaaattcaggtcttacttgaaattttttagtagcaggaccaaaactagtatttagtttctgctagttattaagctgtaga

SEQ ID NO: 644677 - DNA, 547 bp, Homo sapiens
ggctggtaacaaagatgtctagattttaacaagtgtgacttagagcaaatcatcaacaccccccccaacccccccgccgggacctagtaacttcagctatgaaacatatggcttgaactagctgattttttagatttcctatggtttagaaagttccctatattgtttcagaagacaatggtagacaatggtagatggactctactatgtgctatacttatatagtgaaacagtatgtaggtacccttttggaaatcagtgaattgtaaagttatttaactaaattatttaagcttttaaaagaataatactttacttgtaartgcagtttaaaattttagaaagttgagaaattttagatgcttttcatatctaaaatttcagaaggaaaaacttgattgctgactctcattgcccttatgaaaaccatattcctaaataatttgttaaagaaatacaatactggttaaattcaggtcttacttgaaattttttagtagcaggaccaaaactagtatttagtttctgctagttattaagctgtaga

SEQ ID NO: 644678 - DNA, 438 bp, Homo sapiens
agtaagctcttttaaaatcatatagaaatcacacacttgattttaaaaacaaactatacttgcttgaagaatttrttatttaaatttaggtccttgttccctttcattaatcactccttatactataatactgtcagaattttggataaagtatctttcttcaactaagtggattccttatttgtagaaaaatggttttcccataaacattactgagttcctaattctaacccttaaaagttgtattaattaatctctctattagcatcttaatatctacacagtaattgtacagtacaggtggaaaataacaaaatatatagttggatgaagtgtagcatgctagttaaagcttaggtaacctgagataaaatgacagttgcagcagtactacttagatcagtccctgacattacttttttggcataccagtccttc

SEQ ID NO: 644679 - DNA, 385 bp, Homo sapiens
atctttcagactgggattttgatcaaaatattttgtytggcaatggttgtactgagcacacctttctgcagttattataagacaatcaagggtgattacaccatacttgatcattttcctttgtcagactttactattcccaaattcagacaaatctttatggtgactcatgatactcagactcaatgaaaaactgcttattacttgggtggaaaaataatccgtacagcaaacccccatgacacaaaatttacctatataacaaagtggcacatatgctcctgaacctaaaataagtgtaaaaaaacaaaacaaaacactagattcaaatgggaagagaaaggtctgaagtatctattatgtgttacacaatgtgttagctcca

SEQ ID NO: 644680 - DNA, 592 bp, Homo sapiens
tgtggccaacatttctttattttatttccctttcctctctttcagagactccatttacttctatattaagctatttgaagttctactatacttcactgatgatctgttatgtatttatttatttctcctttctggctgtgttttattttaaataggttttattgctagctcttcaaattcactaaccatttcttctgtaatgtccaatctgttaatctcattcagtgtatttattaacacacacattataactttctccctaaaagtttatttaggtctttattacatatttcatcttcctttaactctttgaacatatataatttagttctaataactcccttagtgtctttgtctgcaaattctagcatattcatctgttcttggaatctatcaattgctatttcttcttatttgggcgtgttttttctacttgtttttgagagstttgtagtatttcattcaatggtaggaattaagaattttaccttgttgcgtgctggatattttgcatttacaaaaatatcctagagctattttctgggggcacattgaaattaagtttgatccttttctgtcttcaaagatttgt

SEQ ID NO: 644681 - DNA, 592 bp, Homo sapiens
tgtggccaacatttctttattttatttccctttcctctctttcagagactccatttacttctatattaagctatttgaagttctactatacttcactgatgatctgttatgtatttatttatttctcctttctggctgtgttttattttaaataggttttattgctagctcttcaaattcactaaccatttcttctgtaatgtccaatctgttaatctcattcagtgtatttattaacacacacattataactttctccctaaaagtttatttaggtctttattacatatttcatcttcctttaactctttgaacatatataatttagttctaataactcccttagtgtctttgtctgcaaattctagcatattcatctgttcttggaatctatcaattgctatttcttcttatttgggcgtgttttttctacttgtttttgagaggtttgtagtatttcattcaatggtaggaattaagaattttaccttgttgcgtgctggatattttgcrtttacaaaaatatcctagagctattttctgggggcacattgaaattaagtttgatccttttctgtcttcaaagatttgt

SEQ ID NO: 644682 - DNA, 591 bp, Homo sapiens
accaagctgtttttggttttgttttgttctagtgtttgttttcgatatttgtatatgaatagttgtggcttttttttctctctgaaagcgcagtcactttactaaggtgtgggtctcttttaatcaatagagtgtggtacagaggtgatcagaacgaatggatcaggagaaggcttcatgagtttgactgaatctaggctttaactgtcgtcttacactttaatttctgcctgggcaaaaatgctgatattaacactcatcctttaatcaggttcaacagggttaataagttgagaacattaaatgagtttatagacatataacactttggaagttaataattactattagtttaatgtcagttatcatcatcatcatcaatttaatctagtataatgaaaactttcattaaaaaagaaaattttcttcaaccattttcctataatttcttcaatattgattacttccatttttcatcctgggattcctctaataacattattaaaaattgctaatatttcacccataatattttcccttattatacaatktatctatcatttatttttaagtatatgggaacttttcaag

SEQ ID NO: 644683 - DNA, 471 bp, Homo sapiens
aatttattaatcttgcataactgaaactttatatctgttacatagcaactctttttttttttttttttgagacaaagtatcactcttttacccacattggagtggagaggcatgatcctagctcactgtaacctcaaactcctgggctcaagcaattctctcgccttaacctcctgagtagctagkattaaagacatgtgccatcacattcagctaacatttaattattatcacttttgctttgtagagatgaagtctcattattttgccagatgctagtgtattaggccatcttgcattgctataaagaaatacctgagactgggtaatttataaacaaaaaaggtttaactagctcccggttctgcaggctgaacaagcatggcatagacattgcttggctttgggggaggcttcagggagcttttgcccatggtgaaaagcaaagcagtagcaggcactttacatggc

SEQ ID NO: 644684 - DNA, 619 bp, Homo sapiens
tttaaattatgagtaaagtcatgatgtaaactcacagactgaattaaaagtgggagagagaatttrctgagataattctaaaggagttggaagagagaaaaatgataagggattattatgaatttgggctcatgtgtctgagtaagtcccatttggagaaattaactgaataagaaagaggtcataggtagaacagaattgaggagcatagtaaaagcaggaaaaagtacggtgtgaggcagaggtattgggtctcacaggtttgtgtgctaactaccaaatgtaggtgtgggcacataatggcaagctttccatgggagagagactggggaagtgtatttagacttgggaagcgatgggcctctattcttggaacttgtatgttggttaactacatctgcaggatattagaaagatctgatattagaaagatattaggcatctagaattaaatacttcacatggcatgacttccttgtttaagaaaacttctatatcttcccatttctcttaaaatccataggctacaagaccctgcatgctctggcctgctgtgccttttcaggctcatcaaatacttcactcacactgaaagccacactgcctgcctcctcatgtt

SEQ ID NO: 644685 - DNA, 619 bp, Homo sapiens
tttaaattatgagtaaagtcatgatgtaaactcacagactgaattaaaagtgggagagagaatttgctgagataattctaaaggagttggaagagagaaaaatgataagggattattatgaatttgggctcatgtgtctgagtaagtcccatttggagaaattaactgaataagaaagaggtcataggtagaacagaattgaggagcatagtaaaagcaggaaaaagtacggtgtgaggcagaggtattgggtctcacaggtttgtgtgctaactaccaaatgtaggtgtgggcacataatggcaagctttccatgggagagagactggggaagtgyatttagacttgggaagcgatgggcctctattcttggaacttgtatgttggttaactacatctgcaggatattagaaagatctgatattagaaagatattaggcatctagaattaaatacttcacatggcatgacttccttgtttaagaaaacttctatatcttcccatttctcttaaaatccataggctacaagaccctgcatgctctggcctgctgtgccttttcaggctcatcaaatacttcactcacactgaaagccacactgcctgcctcctcatgtt

SEQ ID NO: 644686 - DNA, 619 bp, Homo sapiens
tttaaattatgagtaaagtcatgatgtaaactcacagactgaattaaaagtgggagagagaatttgctgagataattctaaaggagttggaagagagaaaaatgataagggattattatgaatttgggctcatgtgtctgagtaagtcccatttggagaaattaactgaataagaaagaggtcataggtagaacagaattgaggagcatagtaaaagcaggaaaaagtacggtgtgaggcagaggtattgggtctcacaggtttgtgtgctaactaccaaatgtaggtgtgggcacataatggcaagctttccatgggagagagactggggaagtgtatttagacttgggaagcgatgggcctctattcttggaacttgtatgttggttaactacatctgcaggatattagaaagatctgatattagaaagatattaggcatctagaattaaatacttcacatggcatgacttccttgtttaagaaaacttctrtatcttcccatttctcttaaaatccataggctacaagaccctgcatgctctggcctgctgtgccttttcaggctcatcaaatacttcactcacactgaaagccacactgcctgcctcctcatgtt

SEQ ID NO: 644687 - DNA, 601 bp, Homo sapiens
  misc_feature 570, 571, 572, 573, 574, 575, 576, 577, 578, 579, 580, 581,582, 583, 584, 585, 586, 587, 588, 589, 590, 591, 592, 593,594, 595, 596, 597, 598, 599, 600, 601: n = A,T,C or G
ttcccctgagaactggaaccaaagatgcccactctcaccatttctattcaacatagtactggaaatcctagccagagtaataagacaagagaaagaaataagggcatctgagttgataaagaggaagttaaactgtcgctgtttgctgatgatatgatcatattcctagaaaactctaaagactactcccaacagctcctagagctgattaatgaattcagcaaagtttcagaatacaaaattaatgtatacaaatcagtagctctgctatacaccaacagcaaccaagctgagaatcaaataaactcaaacacttttataatagtttaaaaaaataaaatacctaggaatctatctaaccaaggaggtgaaagacatatgttggtgaaagaccactatgttggttactgatgaggggcttgtataggtcaaggatactgacctaaaccatttcatagctcagatgatccatatgtcacctgtgttcttagctgaaaacacagaatccacmcttactaggttaaacagaaaagaaatttaataaggatcttaggaagtgcatggaattcnnnnnnnnnnnnnnnnnnnnnnnnnnnnnnnn

SEQ ID NO: 644688 - DNA, 598 bp, Homo sapiens
cttattatggctaacgcttagtttaaaatttgcttggatttaaacaaataagaatttacattttaaacatgtactttttaagacttatttccatgttttaagataaaggaaaatattgttgaattatattttcagtttatagagctgatacatatagagagagatacatgtatacacagcatatacatatatatcattagagctgatatacatgtatgtatgtgtgtttatatatatacacacatacaaaatatgtgtatttgtgcactcacagtgagcgttcaaatgtttgtctcttgatttgtcatttttctgtatctagtgaaagcactatgaccagtttttttaatagtcaaatagatctaatagacgttccacctcaactttatgataayctgcaaacacacatgtgttattttgggtcatacttcaaaaatgattttacatgccgggcatggtggctcacgcctgtaatcccagaactttggaaggccgaggtgggcggatcacctgaggtcaggagtttgagaccagtccggccagcatggtgaaactgcgtctctactaacaatacaaaaattagccgggtatgatggtg

SEQ ID NO: 644689 - DNA, 628 bp, Homo sapiens
gtatttggtggtctgccatttggaagcaacatctcacttattcaacaactctaaaggtaggtacttttatctccattttaaaacaatgaaatacacttacagttacagacaaacttgctcgagtcacatatctattaagtgtcagtcaagattcagattcaagtctgatgttaaagagtgtctgttcccaatcaatacctctgctgcctctttttacaaactgaactgttggagggcatgtacatatgcataagctgtgggccactgggccatgggccagtgtctgatgagacctctttattgacttgtttgtcctggtgggctgtttctctaccaggcaactgtgaatgggctcatcccttctctgtgcgtacatgattgaaaggagrtagccggtttctgtgacatcctcttataacaacctagttttgttcttgagagtgaccagagcaagagaaaagtcaatgaaattttgcagatcttgcaaacctgtggcaataagaaggtattatcctttctgtaccaaggcacaactgattcctaagtgagggggatatgtgttctgagatgttaatgttagtgatagactgttttcaacaccttggtaaacatttcttttgactgttag

SEQ ID NO: 644690 - DNA, 628 bp, Homo sapiens
gtatttggtggtctgccatttggaagcaacatctcacttattcaacaactctaaaggtaggtacttttatctccattttaaaacaatgaaatacacttacagttacagacaaacttgctcgagtcacatatctattaagtgtcagtcaagattcagattcaagtctgatgttaaagagtgtctgttcccaatcaatacctctgctgcctctttttacaaactgaactgttggagggcatgtacatatgcataagctgtgggccactgggccatgggccagtgtctgatgagacctctttattgacttgtttgtcctggtgggctgtttctctaccaggcaactgtgaatgggctcatcccttctctgtgcgtacatgattgaaaggagatagccggtttctgtgacatcctcttataacaacctagttttgttcttgagagtgaccagagcaagagaaaagtcaatgaaattttgcagatcttgcaaacctgtggcaataagaaggtattatcctttctgtaccaaggcacaactgattcctaagygagggggatatgtgttctgagatgttaatgttagtgatagactgttttcaacaccttggtaaacatttcttttgactgttag

SEQ ID NO: 644691 - DNA, 506 bp, Homo sapiens
acagccaccttgaataaaattgaatttggtcatggaagcattctgttagagactatcatacaaactactgtttccatcttttttgctgctgcaaaaaagtgaaattgattagaaatgacattaggtatagtaaaattggcccatgattttatagttgaatttgtggcattgatctacagattaaggagatgtttgtgttctaccgtttttacctgacagccttgtataattatacttgtaacataatgcaaatgagtacttacttgcataccaatacttttacatgtagatttttagaaaattaaacagtgttaaaataaaatttctgggttttttggttttgggttttttgttttgttttgttttttgttttttgtgtttttttttgagatggagtctcactctgtggcccaggctggagtgcggtggtgtgatctcagctgactgcaatttctgcctcctgggttcaarcaattcttctttctcagtctcctgagtagctggga

SEQ ID NO: 644692 - DNA, 551 bp, Homo sapiens
tttgggcttgtgcagactttgttttcataaaaatttggagaccatatatcaaatgacatttggcatggaggacgttagaataaaaagttttattaaaatgcaaaaaaaaaatcctcacaatatactctactgcccatatagcaatataagcaaatgaattaatgtaatcttaggatgtgaattgatttcaatgtttttctttagtattgtagttttaaaatcatcttttagtaaatgtttgaattatttttctgaactctagtgctacatctttggaagtttttacataatattgttattctaaaggatttggtttaagaaataaggtagaaaggcttggtgagtcagattccttctctcctctagtcaaagagaatactcttttccttcatgtgatcttttatcaaattttaaaaataataagtgtaayattaattgcttaaaagtaggtatcaatttcagaaagtgatttagatagggcaggtttttatttttacaatatctaacagatgccttttgacggtatgaccttggacaatcaaagcttcagt

SEQ ID NO: 644693 - DNA, 535 bp, Homo sapiens
tgctgggaacattcaaaatcttctatctatttgagaatatacaataaattattgttgactgtagtcatcccacaatgttagagaacactggaacttattcctcttagctcactgcaatttttrtccattaaccaacgtatccctgtttccctgcacccctactcttcccagtctttagtaaccactattctactttctacttatgtgaaatcaactttgttagcttccacatatgagtgagaacatgtggttatttatctttctgtgactggcttactgcacttaacatgtcttccagactcatccatgttgccatgatgaatgagagtatttcattcttttaaaataactgaatagtattccattatgtatatataccacattttctttgtccattcatctgctgatggatgcacgttgatttcatatcttggttatcgtgaatagttctgaaataaacataggaggtcagatatctcctcaacatactgatttccttttctctgtatgtatacctagtggtgggataactgga

SEQ ID NO: 644694 - DNA, 474 bp, Homo sapiens
ttttctagtttgtgtgcataaaggtattcatagtagtcttgaatgatcttttgtatttctttgctatcagttgtaatatctcttgtttcatttctaatttgagcttatttggatcttctctcttcttttcttggttaatttcactaatagtctatcaattttatcttttcaaagaaccagctttttgtttcatttatctttcatattttgtttcaatttcatttagtcctgctctgttctttgttatttcttttcttcttctgggtttgggttygctttgttcttatttctctagtttcttgaggtgtgaccttagattgttcatttgtgctttttcaaaaatttttatgtaggcattcaatgctatgaactttcctcttagcactgcttttgctgtatctcagaggttttgataggttttatcactattattgttcagttcaaataattattaaatttccaccttgattttat

SEQ ID NO: 644695 - DNA, 595 bp, Homo sapiens
atgaaaatacattaaaatggctataacgtccgatccatgaacttcagtgaactctaaagactcctcaaatatacgcagatgtataggattcttacgtttctcctaatttctactagagaacctgtctcttatctcttcttccccagctgttccttctattcaccccatattaacccaagcatgaagcacagccctaatatttgttaaaaaatccaaaagcttgtgaagttttaatgaaaccctagaacttggaaagtattatatcaaactacagaaagttgaaaatttaatgtttgtctccctcttcttaagggtcctctactcaacctttagactgacaaactcctcacggcttgcctcaatgtcttaaatgcttttcccaccgcttttgtttgttctacttccgattttctgtttttagcmaaccttgatgtttctgggaatgcccatggatagcctagatttcttcttataccctgaaaattaggaaatcaagcaacttttccttatttctaatctactgtaggcatttttttttttttttttttttgagatggagtctcgctctgtcgcccaggctggagtacagtgcagt

SEQ ID NO: 644696 - DNA, 547 bp, Homo sapiens
gaggaatgtttggatgtatatgtatatgtgttcattgcagttttcaactttttgtgttgaaatttttataaaaagaagttggagaaataaaaaacaagaaaacagaaccataagatttttatttaacatttttgattaaaggaattgtattgcaaattatgactttttaatttggcaacatccttttaatggtgttctttctttgtccttctctttctcttcctctctctctccctctcttccctaaagctccattccgacttagacaagggaragggcactgcgaaatacaccctctcaggagatggcgctggcaccgtttttaccattgatgaaaccacaggggacattcatgcaataaggagcctagatagagaagaaaaacctttctacactcttcgtgctcaggctgtggacatagaaaccagaaagcccctggagcctgaatcagaattcatcatcaaagtgcaggatattaatgataatgagccaaagttttgggatggaccttatgttgctactgtcccagaaatgtctcctgtgggtg

SEQ ID NO: 644697 - DNA, 631 bp, Homo sapiens
cattcaagctgttcatttgaagcccacttttgttgtcctttcagagtaaaattttttccagattccctgtacctgttttcacaaccatgacatattcagaaagttttcttcttaacattagttgctaagcaaaatatatttcagtacrcctgctgaaaattgtcagtcaaacacacatggcaagtgtttggtaatctgataacactttaccttaccagccattatccaatattttacaattgatgctaggatatttaactagaacagagtcatgttttttttattgtgtgaaatcaagagatgtgatgaaaagaagtctgaaatctcaacattcccccatttcattagggttcttatttgactctcttaatttctttattggaagcactctgtcatgactggctattttcacaaaagtagaagtagtcctatgaacagtagcaaaatatttctctcaagtaacaaaagaataaaaattgttttgtaaaaacatgtttttctttcattttacataaaaaaaattatacccaaactctattattttgaactttttcattaaatgggttgaatttactttattatttccaaaccaaatgtaagacaacatgcaagaaatacatgccatttgtaa

SEQ ID NO: 644698 - DNA, 493 bp, Homo sapiens
ggaattccctcacagcacaaaaacatgggtaccaactagagtatatggcacaaataaattcgaaatttgacattttaaaagtcatatgaatgagctctctctttagctcaataatgactcctgtccctttaagaagtttattatttaacttatttcttaggcaagtataattaagaaacaaccacycatattgtagaataatcaaggcagaaaaattatatgtatttgtgtgatacagtattatggtaggcagaataatggctcctccaaaagatatccatatcctaaccctggaacctgtgactgttacgttacatggccagggggcatcaaggttactaatcagccgaccttacaaatattattctgaattaatccaggtaggctcaatgtaatcacaattgtccttaagcagaaaggaggaagtcagaagagtcagaatcagggagatggcattgtaagaaagactgactaatcactgctggctttgaaa

SEQ ID NO: 644699 - DNA, 554 bp, Homo sapiens
taatgctctgctgttgttgtcctgatgtttttaataacattatctttggacttgtggtttgtawgtgaagtctgttgggacaaaggagcatgcctgtgaatgaatagaggatatatatgcagtatgtgaatctgtcatttcttgctgccttattttcattgagcatctcgaacacaataagatgttccatgaacacagaattccagtagacccaggatgtgtgggagttcagagagactcaaagtgtgttacttgtactaagtaagcacagagctgacagcccaagtggccattctttccattctcactagaacgtgcttaggttccagaaggatgacatgatgctatgagaaacacttctattctttcatactcatgctactttcctgtattagttacccacctaggctgaaaatgatgacatgggaggaaaaagagagcaaccttgtattagtccattttcacactgctgataaaggcataccagagactgtaatttataaagaaaaagaggtttaatggacccacagttccacagggctggagaggcctta

SEQ ID NO: 644700 - DNA, 548 bp, Homo sapiens
gtccagtctgtggtatttcgttatggcagcctgagcagaccagcaaacctggtcatcaaatggggcgaagagcctttattcagatgtcagctttttcatttgtatccttaaaaggtccatctaactgcctaaaactcaaactcatgatctttttttttttttttccaacttttattaagttctggggttacatatgcaggatgtgcaggtttgttacatgggttaacgtgctgcacagatcaacccatcaccttggtattaagcccagcatccattagctattcttcctgatgccctccctccccagcacccccaatagggcccagtgtgasttgttccccctgacgtgtctgtgtattctcatcattcagctctgttagcctcaccaaactgacacaggaacagaaaaccaaacacggcatgttctcacttataagcggggagtgaacaatgagaacaaactcagattttacactttgctgttcattctcaatttgcagaacctggtttctttccaatattctttttctctgttaatgacactccct

SEQ ID NO: 644701 - DNA, 548 bp, Homo sapiens
gtccagtctgtggtatttcgttatggcagcctgagcagaccagcaaacctggtcatcaaatggggcgaagagcctttattcagatgtcagctttttcatttgtatccttaaaaggtccatctaactgcctaaaactcaaactcatgatctttttttttttttttccaacttttattaagttctggggttacatatgcaggatgtgcaggtttgttacatgggttaacgtgctgcacagatcaacccatcaccttggtattaagcccagcatccattagctattcttcctgatgccctccctccccagcacccccaatagggcccagtgtgacttgttccccctgacgtgtctgtgtattctcatcattcagctctgttagcctcaccaaactgacayaggaacagaaaaccaaacacggcatgttctcacttataagcggggagtgaacaatgagaacaaactcagattttacactttgctgttcattctcaatttgcagaacctggtttctttccaatattctttttctctgttaatgacactccct

SEQ ID NO: 644702 - DNA, 620 bp, Homo sapiens
tgaagttggcacacccagaggagtatatatcctctgtgtagatgttcagagagataggcaggctggtcaactgttccttctgttgggagcarttggaatcagcttagattatatctactgtaatagaaaatattttatatttaggaggtgggaaaggttttggccttcgaaataataagagatattgacaagatataaagcttcattccttactgaagagctgttaaggattagcaaacccaagtctttgtgtgtagagatgaatgaaatttgcattttttttaaaaaaaaataaggtttagaaaacattgtgcaagggaacagccttaatacgtgcagccacttgtccaggaataatacattcaatttttcagtttaaaattccagtatgttctgatccaagggtgcctgttacactctgctgaatttttaagaggtaatttacatctctacaaccaactccaaagcatgacatttcattacatccgctcaaaatgaacagctgctaagtcatcaagttctctcaactttgcttctaaagagaaaagtttagttttagtgcttcagtgaaatacttttttgaaagaatgacttttataaaattcatttgtttattatgg

SEQ ID NO: 644703 - DNA, 488 bp, Homo sapiens
gaattctttccagtcctcttgtcctcctttgtttgccatcagcaagggctatgctgtgattctgtctctgagtgacttggaccactgaccctcagatttccagccttaaaatccaccttccttctcatgcgcctctccgaatcacaccctgactcttccagcctccatgtccagacctagtcagcctctctcactcctgcccctactatctatcatggaataacatccaagaaagacaccttgcatattctttcagtttctgttttgttctcccacatattctcttcaatgctcaggaagcctgccctgtgcttgagagttcagggccggacacaggctcacaggtctccacattgggtccctgtctctggtgcccacagtgagctccttcttggctgagcaggcwtggagactgtaggtttccagatttcctgaaaaataaaagtttacagcgttatctctccccaacctcactaaatgattggcca

SEQ ID NO: 644704 - DNA, 519 bp, Homo sapiens
caacacaaacataatggaaaaacattccatgctcatggattagaagaatcaatattgttaaaatgtccatacttcccaaagcagtctagagattcaaaactattcctatgaaattaccaacatcatttctcattgcattagaaaaaaactgttctaaaattcatatggaaccaaaaaaagaacccaaacagccaaagcaatcataagcaaaacaacaacaaagccaggcatcacattacctaacttcaaactatcctgaaagtcgacagaaaccaaaacagcatggggctggtacaaamatagacacatagataaatgaaacagaacagcgaatctagaaataaagccacacacctacagccaactgatctttgaaaggtggacaaaaatgaacaatggagaaagaacaccctattcaataaatggtgctggaaaattggctagctgtatgcagaagaatgaaactggacacctacttctttctatgtataaaaattaactaaagatggataaaatgct

SEQ ID NO: 644705 - DNA, 537 bp, Homo sapiens
gcttatgggtcaaatccaatgctatctatatttacattatgttttaggcattgcagcatatattcaccatccttttcttcctcatgctctcctccctcagtgatattgggtttagtcayattatgtgctgtggctaacagaatgtgggcacaaatgatactgctttataaactgaggccttacaaagtattgaacatttctacttgccacattgggagttgtaaactgtgccacaaggacacgccctgggagatcactggtccaagaaggagaaacatgaagaacaagcatgaaggcaacctgcagcctgaagcagcactattctgacccattagtaggactatgagcaagaagcaaatgtcattggtattttgtagttgattgttcggtagcattactgtagcaatagctgactaatgcaccttgcaataatagatcaacacagaaaatgtgaattttgtttttctcttggaatctcaacagttctgactaattcaactaatccctaacctttctattttattttgcctattcaag

SEQ ID NO: 644706 - DNA, 500 bp, Homo sapiens
cattatatttatgtaattcaattattctaagcattgaagtcattttgtggcatgctgtagacactcaaaaaatattgccttcrcaccatcctgtaagctttattttatgccaatactttgctgaaacataaatgcttagtgcggtatctaaagcatggaagagctttaagcaattaataatggatagaaaagtaacaagttttacatttccatcttcatagtgtgaccaagttggtttacatgaaatattaatcatcttctagatgctgggcaatttatttcccggtgtaaattcaagtgtttcactcagagttcaatcaattaactgagagtacggcagtctttagcacggtctctacatcccatatattcacatgatgccccctattatgtccccattcacgatctcacttatgtcccctcactgcagcctcactagccttccagccattcctggaaaatcgcaagtctgctccagtctcaggatatttgcattccct

SEQ ID NO: 644707 - DNA, 500 bp, Homo sapiens
cattatatttatgtaattcaattattctaagcattgaagtcattttgtggcatgctgtagacactcaaaaaatattgccttcgcaccatcctgtaagctttattttatgccaatactttgctgaaacataaatgcttagtgcggtatctaaagcatggaagagctttaagcaattaataatggatagaaaagtaacaagttttacatttccatcttcatagtgtgaccaagttggtttacatgaaatattaatcatcttctagatgctgggcaatttatttcccggtgtaaattcaagtgtttcactcagagttcaatcaattaactgagagtayggcagtctttagcacggtctctacatcccatatattcacatgatgccccctattatgtccccattcacgatctcacttatgtcccctcactgcagcctcactagccttccagccattcctggaaaatcgcaagtctgctccagtctcaggatatttgcattccct

SEQ ID NO: 644708 - DNA, 500 bp, Homo sapiens
cattatatttatgtaattcaattattctaagcattgaagtcattttgtggcatgctgtagacactcaaaaaatattgccttcgcaccatcctgtaagctttattttatgccaatactttgctgaaacataaatgcttagtgcggtatctaaagcatggaagagctttaagcaattaataatggatagaaaagtaacaagttttacatttccatcttcatagtgtgaccaagttggtttacatgaaatattaatcatcttctagatgctgggcaatttatttcccggtgtaaattcaagtgtttcactcagagttcaatcaattaactgagagtacggcagtctttagcacggtctctacatcccatatattcacatgatgccccctattatgtccccattcacgatctcacttatgtcccctcactgcagcctcactagccttccagccattcctggaaaatcgcaagyctgctccagtctcaggatatttgcattccct

SEQ ID NO: 644709 - DNA, 498 bp, Homo sapiens
aaacaaataacttgattaaaaaacaagaaaaggatctaaacagacgtttctcaaaagaagccataccaatggccaacaggtatatgaaaaaaatgttcaacatcacttaataatcaaggaaatgcaaactaaaaccacaatgagatatcaactcatacctgttagtacaaaaaagatgaaagatggcaaggatgtggagaaaagggaagatgtttacactgttggtgggaatgtatattcacatagccattatggaaaacagcatcgaggttctttaaaagctaaaaatagtactaccatattatccagcagtttcactactaggtatatatccaaaggaartgaaatcagtgtgtcaaaaagatatttgcactcccatgttcattatagcattatttaaaatagcaaagatacagaatcaacctaagtgttcatcaacaatgaatggataaagaaaatgtggtacacacacacacacacacacacacacacactcac

SEQ ID NO: 644710 - DNA, 498 bp, Homo sapiens
aaacaaataacttgattaaaaaacaagaaaaggatctaaacagacgtttctcaaaagaagccataccaatggccaacaggtatatgaaaaaaatgttcaacatcacttaataatcaaggaaatgcaaactaaaaccacaatgagatatcaactcatacctgttagtacaaaaaagatgaaagatggcaaggatgtggagaaaagggaagatgtttacactgttggtgggaatgtatattcacatagccattatggaaaacagcatcgaggttctttaaaagctaaaaatagtactaccatattatccagcagtttcactactaggtatatatccaaaggaaatgaaatcagtgtgtcaaaaagatatttgcactcccatgttcattatagcattatttamaatagcaaagatacagaatcaacctaagtgttcatcaacaatgaatggataaagaaaatgtggtacacacacacacacacacacacacacacactcac

SEQ ID NO: 644711 - DNA, 574 bp, Homo sapiens
actaaatgactctttattctttaaagtaatgtatgacatgcctgtgactgaagatttaacagatctagaaccagtggacaagtataacgattgttgctggggaggctgaaaaatgaattttgttatggagccatgttctctctcagtgatagctcaatgggatttctcacctacctagaaatcagaaactaagaactttgatttattaaaaaaatttaaaaataartgagggaatacaaatcaaaataatgtaaactcaggggatatgattattttaagtcttataaggaaaaaaatcagaattattctttataaaaccagcgtattttattccactcaaatgaaaattaccttctgattattttgctttcgaaatgtcttatattaccaacgcaagcacctggttcaggcccttgatatccatgccttaataaccctccttctgccatttaacactcacaatcttgaagatatcttctcttcatgtttttctccctttttaaagaattaattcataggtcctacttgctcagcatgttcgctgtagcatccctagtgccttgggtattcttgc

SEQ ID NO: 644712 - DNA, 574 bp, Homo sapiens
actaaatgactctttattctttaaagtaatgtatgacatgcctgtgactgaagatttaacagatctagaaccagtggacaagtataacgattgttgctggggaggctgaaaaatgaattttgttatggagccatgttctctctcagtgatagctcaatgggatttctcacctacctagaaatcagaaactaagaactttgatttattaaaaaaatttaaaaataaatgagggaatacaaatcaaaataatgtaaactcaggggatatgattattttaagtcttataaggaaaaaaatcagaattattctttataaaaccagcgtattttattccactcaaatgaaaattaccttctgattattttgctttcraaatgtcttatattaccaacgcaagcacctggttcaggcccttgatatccatgccttaataaccctccttctgccatttaacactcacaatcttgaagatatcttctcttcatgtttttctccctttttaaagaattaattcataggtcctacttgctcagcatgttcgctgtagcatccctagtgccttgggtattcttgc

SEQ ID NO: 644713 - DNA, 611 bp, Homo sapiens
ggtagacagacttgggttaccccagcctatgaccttgctcaagttatttcatctcacggaatcattttctcacctgtaaaattaggattaacaactccttcttttcaatattgtaataagaactaaataatatatatgtaaaattcttgatagagctctttcataagacactcaataaaatgaaagctataagtattagaaaaatggattttttttttttttaaattgagacagagtcttgctctgtcacccaggctggagtgcagtggcacgatcttggctcactgtaacctccacctcctgggttgaagcaattctcatgcctcagcctcccaagaagctgagattacaggcatgttccaccactctggctaatttttggatttttagtagagacagggttgygccattttggccaggctggtcttgaactcctggcctcaggcgatctgcctgcctcagcctcctaaattgcaggtattacaggagcaagctacgccgcctggccaaaaatagaaaaatattgatatgttaaatgaagaagcagagtacagaaatagtatttacagctatttaagatatgtaaggtaagttgaaaatgagaataactg

SEQ ID NO: 644714 - DNA, 590 bp, Homo sapiens
catcacgggcgcacatcctcaagattggcaaaataaactttctwaaaaatctgagagctgtctcagattttcagggttcacacatgtaatgtaggatgtcaatgtttataaaacagacattattctatctactattagaaatatgctgccaattaaccttacactttctcaacaaaataaaaaatgttgatgaggtacaaataatatatctaagcttaaatagtgttacaagttttaatatgcctacttttcaatttttcaatactatttttactaatttaacactttaagtgaataactaaaacatgaataagtgtttacaaggggtgcacatgtttcctccagcctctgcctatccccagctttcatcccaactgtcttgatggtggctctaagcatttctcctttctctatgccaagatctctcccagaaacaaacccaaatcttactatatgttatggcacgctatgatgatgagcagcgatgagcagccgaagcctcaaggaagggatgcttttgtaaaacaagacttgtagaatataacgtgtgaaagtaaagcccatggcagagctccctcctcagcacacgg

SEQ ID NO: 644715 - DNA, 619 bp, Homo sapiens
tcaatataggagtcagtgaacttctgcactttctggtcacaggtctgttggtttctcaaattgtatccatttatgccattaagaagagtgatttagcagcattgttgatgctgtctgggtacggtcattcttttgcagtgaggacaagaaattggaagtcagtcacccatgtgagtggaagatgaaagaaaccatgtctctcttgcgggagcacagctgaagatgaataagggaagctgtaattgcccatgaggatgagagtcaggactatgagggaagaaatgtttaggagtgagcaatggggcagagaagaagaatcacttgatggtgacggaattagggtgatggctgctgagtcatgaattstgcccagatttagacagtgactctttgcggtctttgccccttcttcatttcttaagtttgacaggttctttaaaaactcatttcccctaacttataaatgattgggagggcttatgttatgaagtataatttgcaaaagcaagtggtgttatagttaatgtggatacctccttttggacaacaaaaaggatcctcttatttttttcttctataaggtacagtggtattggccaagcaagggattggggggcag

SEQ ID NO: 644716 - DNA, 524 bp, Homo sapiens
ttcatcaccacgataagatctagagtatgcatagaacttttctccaaataattttaatcctctttaacaaaaatacaacatatgaaaacataattggtaaaattaatgaattaggaaaccatttccttcttggaaagagcttttcagaagagactctcttaaatagtgaaattatctgaagcatttaaaatatgactcaaatgttaaaaaatgttattagcatgacagtttaaagcatttacatacatgtaacatagggtacacttgtgaaagggaaggtaaccattgtaatcacattagtaatcaacctaaaacaatgtttggagaaagtaggctgcacctaatgttccaagatttttgctgactgagaagcrccacaggaaatatggtaataaactcttccccaacattctagttgagatgagatttgcaaaacaatagggagcgctggtcatcaaggtgaattcttagacatctcttgaccaagtcattttcttcaatgaatcaggtaacactgcagacaa

SEQ ID NO: 644717 - DNA, 499 bp, Homo sapiens
tcatgtttctattcactatcctgtaggtatacctggcagttttgctacagagtgactcaggattaaactmcaaatatcctcaatatagattagtcatagggaagggccagtgactgacaataggcacaagagaagcactaggctttttggttttaaataaataatatactctgagttgaagcaattaaatcttcctccaaatacaactttctacctagatattaaagaaacagaataacagttgagttttgtagaatctgatatatttctctcagattttttctccttcagaggtacacacacatatgcttattttaagtcaatcatcctacaattgctcaagttaaaaccatatagcagaaaacatttggaatttcaattagatatgtcaagattgaagcaactgggtcaattgcttgctgaacaatcatgaacatgacactgatcctattttttatgttataaaacaaatataataataaaaagtgtcttagaattc

SEQ ID NO: 644718 - DNA, 616 bp, Homo sapiens
gttcaaacacctctgacattatcatcttcaacaaattccagctctataatattaatagcagccaagattaattaatgcttgctttgtaccagacactgttctgaacattttatatgtacaaactcatttaattctcacacagccccwtctgatagagactaccctaatgttttcccccattttacgtatggggaagctgaggctcagtgtcgttaaagaagttgtccaaggttttctcttattctacaggttgtctcttcactttgttgattgtttcctttgctgtgcaaaagatttttagtttaatatagtctgattggtctatttttgttattattgtctgtgcttttgaagtcttacacattaaaatctttgtcctgaaacatttctccttgttttcttttaatgatttacagatttagttcttacatttatgtctttaacccatccatcttgatttttttatatggtgagagataagggtctagtttcattcttctacaaaaattttgagcgaatggaagtagagagtagaattgtattagaggctggaaagggaagtggggatgggagaatggggagaaattggttaatgaatataaaattacagctatat

SEQ ID NO: 644719 - DNA, 600 bp, Homo sapiens
tgatcaaattgtttaattcttgctgtacagtaggcaccattatagtggctaccttggagagagggcaaattaatggaagaatacaggatggggttccagtgtgttggaaatgctccatttcttgacagaggtggtgttcactttacattggttgtccccaaactttttggcaccagggaccagatttgtggaagacaactttgccacagatcaaaggagtgaagagatggttttgggggatgcaactgttccacctcagatcaaaggagtgaagacatggttttgggggatgcaactgttccacctcagatcatcaggctttagattctcataaggagcacacagtttagatccttcgcaggtgcagttcacaatgagcttgcgctcctatgagaatctaatctgatctaacaggaggcagagctcagacagtaatactcctggccctccgctcacatcctgctgtgtggccaggctcctaacaggtcatggatcagtactggtctgcaacatgagggttggggaaccctgttttacgtaactyactgaactatacactactggtcttagctcaagatgctaatattttgccagtcacaa

SEQ ID NO: 644720 - DNA, 579 bp, Homo sapiens
ggacaaaaaaaatcagagcaagaattttaggctaggagcttctggtgcagaaaaggaggggaggtgaatgtcttcacaagagttatcttcaaatgatattctatccagacaagtaaaaagaatacgcttacatgtacgtgtggtaatatmatatttatatttgatatatggataatatagaaataaaatgtttatgaaattatagaaaatatatgatttcttgctctgttggctaaatacccatttgtagaaaaacagaataagacttttccttttggaagcttagtagctttgtgaagtgctaaattttgtaaaatgttttatctcataaatcaatgtggttttccatgattgtatctcttttgttgcattcctgatagtaacattttgacacctacacacacatgtgcctgtgtctgttattttatgtgaaacagattttttaacagtgagctatagaattggaaaattatatgcctatattcttaaatttgatttgggtagaaaattactggaagcagagtctatcatttccagctagactaatggttattaatgcataatattgaagaaatgggg

SEQ ID NO: 644721 - DNA, 579 bp, Homo sapiens
ggacaaaaaaaatcagagcaagaattttaggctaggagcttctggtgcagaaaaggaggggaggtgaatgtcttcacaagagttatcttcaaatgatattctatccagacaagtaaaaagaatacgcttacatgtacgtgtggtaatataatatttatatttgatatatggataatatagaaataaaatgtttatgaaattatagaaaatatatgatttcytgctctgttggctaaatacccatttgtagaaaaacagaataagacttttccttttggaagcttagtagctttgtgaagtgctaaattttgtaaaatgttttatctcataaatcaatgtggttttccatgattgtatctcttttgttgcattcctgatagtaacattttgacacctacacacacatgtgcctgtgtctgttattttatgtgaaacagattttttaacagtgagctatagaattggaaaattatatgcctatattcttaaatttgatttgggtagaaaattactggaagcagagtctatcatttccagctagactaatggttattaatgcataatattgaagaaatgggg

SEQ ID NO: 644722 - DNA, 517 bp, Homo sapiens
cgggtgaggtgtaggctgcagaatgatgctagaggtgggagaggagccaaattttggaagggccttgagtgccatgccatttatattgtctgaatctgttgaaatttggagaacaagagtatgggaagtgagaaacacatatattcaggatttgaaatattttatttaatgacttttttttttgagacaaagagtctcgctctgtcacacaggctggagggcagtggtgcaatctcggctcactggaacctctgcttcctgggtttaagtgactctcctgcctcagactcccgcatagctgggactacaggcacgcatcaccacacctggctratttttgtatttttagtagagtcggggtttcaacacgttggccaggctggtcttgaactcctgacctcaagtgatccacctgccttgacctcccaaagtgttggggttacaggcatgagccactgtgcccggcctatttaatgacttctgaaaagagtaagaactgattcccttcaggattggg

SEQ ID NO: 644723 - DNA, 548 bp, Homo sapiens
atcatattcaggccaaaactgttagtctcaaaagaagaaagtaaaacttaycaatgtattcattttagtagaaagaacatgttacatatgtataaatttcagtatctattcatattcttgtgcttgtttcattttctcttagtgtttgtcaatgtacatgcttttgtacaataaatttttcaaaaagaatttttttaagacgaaagtttctgcctaactttctgcctcttagctagtatatgtgtgtgatgataaattattactggacagaccatcctagcacatgagatattagcttttctgattgaaccatctgacatgatattcactcctaaaaattctggttctaagaccctcgcagattttcatgctaataattttctgtgtctgcacacctgcaaaattggacctaaaattgttcttaaaaacgtaactcaaagattggcaaacaccttaaagattaatcatgctttctttatattttaaaaacaatttatattgctcctaactcagaaccattgaaatagtgggcagccagtcaatattat

SEQ ID NO: 644724 - DNA, 522 bp, Homo sapiens
ggactacttcccctttgaccttcaacatgttttgcctcagcttttgtgccagaagtcgagcagatgccagcatcgtgcttcttgtaaagcctccagaaccatgagctaaataaacctcttttctttgtaaatgatccagcctcaggtattcctttatagcaacacaaaatagrctaagacacctttggaagaagaaaaggaagaaggtatgggccaagggagaagttggtctgtgatgcagtctcaacaaaggatctaaggggagctccaatttggaatagtgtggcagattctattttcctaaaacacctgccataacatcttctatactacatgctgttcttacaatgtgactgtgacactcctcctataaaaaaggaaggtctatatctactttccttagaacaggataagttttcttgattatttcaaccaacagaaaataacaaaagcaatgctatgtggctttaaaggccatagagcctctgagttgtttgcttattcttgaagtattctgctgtc

SEQ ID NO: 644725 - DNA, 571 bp, Homo sapiens
cttcttgtaaagcctccagaaccatgagctaaataaacctcttttctttgtaaatgatccagcctcaggtattcctttatagcaacacaaaatagactaagacacctttggaagaagaaaaggaagaaggtatgggccaagggagaagttggtctgtgatgcagtctcaacaaaggatctaaggggagctccaatttggaatagtgtggcagattctattttcctaaaacacctgccataacatcttctatactacatgctgttcttacaatgtgactgtgacactcctcctataaaaaaggaaggtctatatctactttccttagaacaggataagttttcttgattayttcaaccaacagaaaataacaaaagcaatgctatgtggctttaaaggccatagagcctctgagttgtttgcttattcttgaagtattctgctgtcatagaagcaatctgactggcctgagaccaccatgctatgagaaagaccaaactagctcatatggaaataccagactagcacatggcaaggccctgagattacataaagagagagatgcctagccaa

SEQ ID NO: 644726 - DNA, 633 bp, Homo sapiens
gagggctccaatttcttcacattcttgccaatgcttgttcttttttattttagccattttaggggggtgtaaagtgggatctcattgtgattttgatttgcattttccctaattatttgacatgtttttaaaaactagttatttaattaacactaaataaattattaatataaaatattaatatttattttcagtgaatgaaacatgaaagatggccaatttcatctgcacacagaagagcattccagtgctctgataaaatgtttaaaaatcacaatgtgaaagctaagtaaccattccatttaaaaatgtaattttaaatttagaaactgcatatttaaaatacagtgccactagatgttatatataatattgcatataattggatatgcaatataacccccacccctggaccatggtctctgcaacattttaaaggttctatgsatcaactgatctcttaaaactgagtccgtgttcttaaccacaatgctaatttaattaagtaagccagacatttgattaacatttccatctcattcaccaaaacttctcctacattggactatattttagagcactgtattttctccctgtttctgccattcacctttaattgaaattcagcatatt

SEQ ID NO: 644727 - DNA, 583 bp, Homo sapiens
tggggcttaaaacctaggtgagggatgatagaggcagcaaaccaccatggcacacgtatacctatgtaacaaacctgcacatgtatccggaacttaaaaaaatttttaaaaaatcatttcacattccaaaaaaaaggactcaggtatagaataatgaatatgggatgaaaatatgccatgtctttcatcccttttgttgtttctttgatttggccatgaaatttattgtttggagtctccccagttcctaatctaagtttggaaagaatcacatgcctaatgaaagcatcaaactggagaatcccctcctattctgggaactggcgagctggtgttcagctgtgtgtgtactgctgtttatagaccactggcttgtctccaacagtcgagtctagacttggtccattactttgcttctgagacaaccttctggccaagaaattgcatatcaamtccaaactcttagctattcagagctttgttcttctggaagaaacaggatggaaaatatttgagataacttaggatttccaaatataaccacttcctttgctggagggggctagagaatgggagtaacaat

SEQ ID NO: 644728 - DNA, 637 bp, Homo sapiens
ttaattagcttgattatggtcatcatttgacaatgtgtatatatatcaaaacatgatattgtataccttaaatatgaacaatttttatctgtcaagcatactgcaataaagctgggggaaaaaacgggaaaaaaatgtcaagccttaggccccacccagacatgctgagtcagaatttgcatttccccaggaaaggagttccctgaggaatttgcaagttccccaggagagtcattracttgagcaatatttcaggggtggttcttgaccctggctagcagtagaatcactctgagggctttctaattaccagttgctgaactccacgtgagaccaaataaaccagactctctgaggatagcgctcaggcatagtgtttaaaaatctccccaggtgactctcatttgcagtcaaggctcagaagcaccaaacagaataatctgtacctctgctggcatatagtgctttctgccttgcattgtcattataattatctgtgtacatgacttatttcctccattgaccatcagttccctgagggcagagactgtgtttcatttattcatgatgcataaaaaagttaagctcctactatgtgaaaaacaatgggctaggcactggggatacatgtgcagcc

SEQ ID NO: 644729 - DNA, 637 bp, Homo sapiens
ttaattagcttgattatggtcatcatttgacaatgtgtatatatatcaaaacatgatattgtataccttaaatatgaacaatttttatctgtcaagcatactgcaataaagctgggggaaaaaacgggaaaaaaatgtcaagccttaggccccacccagacatgctgagtcagaatttgcatttccccaggaaaggagttccctgaggaatttgcaagttccccaggagagtcattgacttgagcaatatttcaggggtggttcttgaccctggctagcagtagaatcactctgagggctttctaattaccagttgctgaactccacgtgagaccaaataaaccagactctctgaggatagcgctcagrcatagtgtttaaaaatctccccaggtgactctcatttgcagtcaaggctcagaagcaccaaacagaataatctgtacctctgctggcatatagtgctttctgccttgcattgtcattataattatctgtgtacatgacttatttcctccattgaccatcagttccctgagggcagagactgtgtttcatttattcatgatgcataaaaaagttaagctcctactatgtgaaaaacaatgggctaggcactggggatacatgtgcagcc

SEQ ID NO: 644730 - DNA, 567 bp, Homo sapiens
agaataatctgtacctctgctggcatatagtgctttctgccttgcattgtcattataattatctgtgtacatgacttatttcctccattgaccatcagttccctgagggcagagactgtgtttcatttattcatgatgcataaaaaagttaagctcctactatgtgaaaaacaatgggctaggcactggggrtacatgtgcagcctctgctgtcaaaaacagtcctgtggtcatggagttcacaatttagaaggagaaacagacatacaaattaagtgattaaaatgtgagaataggagtctacctggaaatatgaacagggaaccaccaggctctggaggagagcaacgtgaccctcctgggaaattcagggagggtttcacaggaaggcagccttggagctgcccttgcagggtaagtaagatgcctgcacaggtagagaagacaaggagaggaaactcctaaggaaaggagcaggttgcacataagcagatacatatgggtaaaatgatgaatatacaaaactgttatcccagaattatttatcatcacaacatattgtaaaca

SEQ ID NO: 644731 - DNA, 567 bp, Homo sapiens
taaattgtatatcacatcaaaaagtgatctctcatagttctcatgtatttttcattgtacttagttcaatactataaacctygaataacaccacaggacccttatgaaatggctctactgatgctggaggacttaagcagagaaaagacatgacattacaagaaaaagttgaattgcttgatatgtactacgggttgaggtctgcagctgcagtttcctgcagttgtctgcagctgcagacagatgatttgccttgtaagcagacagagtattaatacaatgcagtagtataaatatattttctcttccttataatttccttcataaccttttctttagtttcttaactgtaataatttggtatataatacatacaacataaaaaatacacgttaattgactgtttatggtatcagtaaggcttccagtctacagtaggctattagtagttaagttttgggggagtcagaagttatacatggatttgacactttaggggtgattggtgtcccttagccttcacgttgttcaagggtcaactatgtaagtgtgtgtctgtatgtgtgt

SEQ ID NO: 644732 - DNA, 567 bp, Homo sapiens
taaattgtatatcacatcaaaaagtgatctctcatagttctcatgtatttttcattgtacttagttcaatactataaaccttgaataacaccacaggacccttatgaaatggctctactgatgctggaggacttaagcagagaaaagacatgacattacaagaaaaagttgaattgcttgatatgtactacgggttgaggtctgcagctgcagttkcctgcagttgtctgcagctgcagacagatgatttgccttgtaagcagacagagtattaatacaatgcagtagtataaatatattttctcttccttataatttccttcataaccttttctttagtttcttaactgtaataatttggtatataatacatacaacataaaaaatacacgttaattgactgtttatggtatcagtaaggcttccagtctacagtaggctattagtagttaagttttgggggagtcagaagttatacatggatttgacactttaggggtgattggtgtcccttagccttcacgttgttcaagggtcaactatgtaagtgtgtgtctgtatgtgtgt

SEQ ID NO: 644733 - DNA, 531 bp, Homo sapiens
tgagtcttaccctgactaggaagcaactaaaacttcagtaattatttttcaatgttcagattaagtcttctccagagttgaaaagaacttcaagtcattggtttagctctggtgcagcatttgaggtctggtgctcactataagtgttccccagaacagaacttaactgcaggccagcagttaaattctgacattaaatagtaaaagtttaatgccacaaaataatatcttcacaagataaaagtggtgactgtctccttaaatccacaagcattaacataaacacacaatgattgtgaaaaatcaggaaaatatgataccactgtaatgccaaaggtccttgccttagccacaccaaagaattggtgtggcagctgcccgtgagaagtgacagagacacagactgatagagaaagctgtaggctttattcrgcagagtgaaagcataaagcttccacagcgtggaaggggtctcgaacgggtagacagagttagattatgcagttgccttttaaactctttgaggtggga

SEQ ID NO: 644734 - DNA, 631 bp, Homo sapiens
ctaagtatttccagagatttgtggacatacatgcctttaatacagtaattttcttaattttattcaagttgtttttattcatgtagatggttcattcttttatatgtgtttaagtcaactttacagctttccccagtgatcattttgagtttatcaaaataaaataaaatrcagccattagtaaacatttacttatattttgggatgaaattttaaaatttaattttattgtggtaagaccacaacatgaaatctatcttcttaacaaaattttagctgtaccataaaatattaactataagtacattgttgtatagtagatatccagcagctattaatcttgagtaactgagactttcaccagttgattagtaatgcccttataatgcttttacttttaattattttgaggacctctatactgtttcatcagaagctgcatcattatgcatttcctctaacagtgtacacaagtttctatttcttcatgtgttgtctaacaactgttctttggttttttgatattagctgttctaacagtattaggtgatgtcacattttggttttgaatctcattctttgatgattagtgacattaagcatctatttatatacttgttggccatttgta

SEQ ID NO: 644735 - DNA, 631 bp, Homo sapiens
ctaagtatttccagagatttgtggacatacatgcctttaatacagtaattttcttaattttattcaagttgtttttattcatgtagatggttcattcttttatatgtgtttaagtcaactttacagctttccccagtgatcattttgagtttatcaaaataaaataaaatgcagccattagtaaacatttacttatattttgggatgaaattttaaaatttaattttattgtggtaagaccacaacatgaaatctatcttcttaacaaaattttagctgtaccataaaatattaactataagtacattgttgtatagtagatatccagcagctattaatcttgagtaactgagactttcaccagttgattagtaatgcccttataatgcttttacttttaattattttgaggacctctatactktttcatcagaagctgcatcattatgcatttcctctaacagtgtacacaagtttctatttcttcatgtgttgtctaacaactgttctttggttttttgatattagctgttctaacagtattaggtgatgtcacattttggttttgaatctcattctttgatgattagtgacattaagcatctatttatatacttgttggccatttgta

SEQ ID NO: 644736 - DNA, 511 bp, Homo sapiens
gcagaaaaagaattcagaaggtcgattattaagctactcaagaaggcaccagagaaaggtgacttccaacttaaagaaataaaaaaaaaggtacagaacacaaatagaaaaaatctccagtgaaatcgacagcataaataaaaagaaataacaacttctggaaatgaaggacacactgaggaaaatgcaaaacgcactggaaaatctcagcaatagaatcaaacaagtagaagaaagaacttcagagctccatgacaagactttcaaattaacacaatccaacaaagacaaagaaagaagaaaaaaaaaaaamaaaacaaaacaaaaaatgaacaacgctccaggaagttttggactatgttaagtgttcaaacctaagaataatgtgtattcctgaaggaaaaagagaggtttgaaagtttggaaaatatatttgagaaaataattgaggaaaacaagactagccttgctagaaatctagacatccatttacaagaagcccaaagaacat

SEQ ID NO: 644737 - DNA, 553 bp, Homo sapiens
tctgtaatccagctacttgggagtctacggcatgagaatctcttgaacccaggaggtggagcttgctgtgagccgagatcacgccactgcactccagcctgggtgacagagtgaaaccctgtctcacaaacaaacaaacacagacttacattccagctcaccgcctagaatttgagccrcttggttgcctgggtgtggtcactcatagccagttttttttctgcaggattttcagtcaatgcatcatcggagcgactcaacatgggtgaaatcgagacgttggatgactactgagcacctgccagtggactggccatccctctcctgtctgccgactatggagtctccacctttggacacaacacttactcaccatttactctttatcactctgcaacaaatcacagaaccgatcatctcaggctttttcttctggccctttgtgtccaagattctttaatccatttttgttggtgaacatctcagactatagataagtggactggaccctgtgtcttgggggtggcagttgggattactccccaacaaggct

SEQ ID NO: 644738 - DNA, 559 bp, Homo sapiens
tttgtcctgtgaaggtcttgagtttagctccttagcctccacccacaaagcttcagaatctagcacatgtcttaagagagaagggggctttgtgtatttgacgtgggatcctcttctagtgggactttgattcctaagaaccacaagaccacagattttactctgccctgtttaggtgttgcagacttagccctccagctttctattctatgacagatgtcaacaaatttctcctggggaaaggcagatgtgtgtttgaggctcccctaaataatgatctgtcatgttagggttcacaaccataaccaactccgctttctctcttttccccagctgagcccttctgcttaggttatgcctaatgttcaggccatgctcagaattgacaaattctcccagtgcagaaagtgattgayctttgtcatctctcctaacaagttgaactttatctagttcttgttatttgcacaattttctgatgtggaattacaattttggacataaacattattagttattgttgagaatcatggtctcgatatttagaacaatttatcaa

SEQ ID NO: 644739 - DNA, 506 bp, Homo sapiens
agggcatcaaccccatattttccattgtcactgttctagtagagtttctctgcgtgcactctgcctctgtggcaggcttctacgtaggcatccaggctttctaatacattctcggaaatctaagtggaagctgccaarcctccttcactttagcattctgtgcacctgcaggattgacaccacgttgaagccgcgaagacttatggtaccaaggcttacggcactaaggcttatggcttgcatactctagagtggtggccagagctgtgcttggggccctttgagccatggctagaattagagcagtgggaatgcaaggagcagcctcccagggtgagacagggcagtggtaccctgggcctgggccatgtaaccattatcttcttctaggaatctgggcctgtgatgggaggagctgtcccaaaaacttttgaaatgccttcaatgcattttttttcattttcttggatattagtatctggctgtcttttagtcatgtgaatctc

SEQ ID NO: 644740 - DNA, 553 bp, Homo sapiens
atgacatgtcattgtaagataatgtccttcatttatccagaatgataatccaagttctacttcaaaagtgatacagaaaattacatgaaggtaaaaacaaaacaaaaaccaatactttgaaagttcagttttctatgtaatcgaaaaacctaataaagacaccaagacaacatagaacacagaatattatctgatgagttgtttgttttgaatgaggaggatcattgtggacaggaggcaggactagattatagctyccacttggacagacacagcagcatgtgaagtcttgcatcataaacttttgctccagacctacggctggaataaatcaggaaaggcaagagaacccacagacccactgaaggaagcagattgctcctgcaggacctgacaccccaaataccggctggtgtccatgactgagagacctacagatagttcacatcacaggactctgtgcagaaaccccctagtaccagcccagagcctggtagacctgctaggtggctagttccagaagagagataacaataactaacagcttagctct

SEQ ID NO: 644741 - DNA, 553 bp, Homo sapiens
atgacatgtcattgtaagataatgtccttcatttatccagaatgataatccaagttctacttcaaaagtgatacagaaaattacatgaaggtaaaaacaaaacaaaaaccaatactttgaaagttcagttttctatgtaatcgaaaaacctaataaagacaccaagacaacatagaacacagaatattatctgatgagttgtttgttttgaatgaggaggatcattgtggacaggaggcaggactagattatagcttccacttggacagacacagcagcatgtgaagtcttgcatcataaacttttgctccagacctacrgctggaataaatcaggaaaggcaagagaacccacagacccactgaaggaagcagattgctcctgcaggacctgacaccccaaataccggctggtgtccatgactgagagacctacagatagttcacatcacaggactctgtgcagaaaccccctagtaccagcccagagcctggtagacctgctaggtggctagttccagaagagagataacaataactaacagcttagctct

SEQ ID NO: 644742 - DNA, 553 bp, Homo sapiens
atgacatgtcattgtaagataatgtccttcatttatccagaatgataatccaagttctacttcaaaagtgatacagaaaattacatgaaggtaaaaacaaaacaaaaaccaatactttgaaagttcagttttctatgtaatcgaaaaacctaataaagacaccaagacaacatagaacacagaatattatctgatgagttgtttgttttgaatgaggaggatcattgtggacaggaggcaggactagattatagcttccacttggacagacacagcagcatgtgaagtcttgcatcataaacttttgctccagacctacggctggaataaatcaggaaaggcaagagaacccacagacccacwgaaggaagcagattgctcctgcaggacctgacaccccaaataccggctggtgtccatgactgagagacctacagatagttcacatcacaggactctgtgcagaaaccccctagtaccagcccagagcctggtagacctgctaggtggctagttccagaagagagataacaataactaacagcttagctct

SEQ ID NO: 644743 - DNA, 587 bp, Homo sapiens
ctgaaatgataattcaaattttgagatttttaagagtacctaaaatagtttttagaaaggcattggattgtttatagattcaaacatagaacttcattgcacaactcctgtgggtggaagtggaagatttcttcctgatctattcctgatatgttctataagaaagaaaatggaaagtgcgtgtgtgtatgtgtatgtgtgtgaggtatctcaagatacttctccagctttggcttctaataaaacaccagttgttggctttcaacatcacagacaatcagaagcctagaagcccacaggaactaagaaaactgwtagagaagctgaccaatgaagttaccgttttttcctggatagtcagttctcttccttatacagctgactttttcgctggaccagtctattacattattggttcttctaactcagacttagtgaatcagccaaaggaaaagaaataatttctgcaaaggggaaaccattaatactgatcttggaaaacttttttttaagagttagctttgcctgctttatattttacattttcattttttgttttcttcagctcagagttggactggattcag

SEQ ID NO: 644744 - DNA, 607 bp, Homo sapiens
agcattaatttggaaataattgtcatgttaatggaagattgtctatttactaaaccaaggacctagcatcccctctgaaacagcatattacttctaatttctgcttctacccattaataataatgaaacagtattttgttcatttttccccctatttattcaggttctttatgaaacaatacatcacttcttaattctattttatcagttagcagtaatgattggctgatttttttcttgcattcagcatgatattcagaagcattaggagtaggaacatcatttagatacagcccctgacttcaaaaagctaaaaatccagaagagaaaataagacatgttcacacatcattataatgtagggtagatcttgatgccaccatgagagagccaccattgacacyaggttcccgaggagccaggtcacctctgcttgggtgaaggggaaagcaggaaaatgtattctgactttacaaagctttagagaaataaagtctggagttcattaaaaactgttcaaatctttgggcaaggaaaagcatataagctgcaagggaaaaataagcaatttccttaaagccccccaaacaatcattgtttaaccaca

SEQ ID NO: 644745 - DNA, 574 bp, Homo sapiens
aaaaaaagacaaaacacagttactaagctgggtctgatgatggtcctcatctgccagaaataaaaatatgtttgctgtgcaaaggagggcaaggagaaatacatttggaactcaggagagtcacaaatacatttttgcccaatagtactggtcgatggaaaactgaaattgtaacaacataattaacaaaaggatggggccaagtgcagtggctcacacctgtaatcacaacactttgggaggccgaggtgggcggatcacctgaagtcaggggttagagaccagcctggccaacatagcgaaaccgcatctctactaaaaaaaaaaaaaaaaaaaaaaaaaaaattagctgggcgtggtgggcacctgtaatgccagttactcaggtggctggggcaggagaatctcttgaacctgggagctggagtttgcagtgagcygggatcgtgccactgcactccagcttgggcaacagagcaagactctgtcaaagaaaaaaaaaaatagaaaaggatggaaaggagtaacatttggcaggaatgaaattttggcctgatccacctgttaaataacc

SEQ ID NO: 644746 - DNA, 622 bp, Homo sapiens
ttcaagtcctaattcccagtacctgtgaatgggaccttatctggaaacagggtctttacagagataatcgagttcagatgaagttatattagattagggcggcccagtrtccaatgactagtgtccttatatgaagagggagacttgaagacatagagacaaagggacacaaagagataggagagaaggccatgtgatgacagaggcagagaccaagtgatatgagaacaggccagggaaggccaaggattgccagcagccaacagaagctaggaagaggaaggaagtatccctgcctagcacaaacccgctgacagcctcggtctgcccttttcctccaaagtcctgcccaggctcctcttggattgaagagtcctgagcccagccttgaactgataactgcagccagggagtgaaatgtgctgatttgctgccccaggagccgatggggtcagccctgtctaaagaacaggagctcagcacaggggaaagggcaactccccaaaggaaaactgaggtgctattaccagaagcagaagagctgccacttaaacaagcaaaataacccatgtccccacacccttcagtaccaggcccatcaatcaccttctaagcttacata

SEQ ID NO: 644747 - DNA, 622 bp, Homo sapiens
ttcaagtcctaattcccagtacctgtgaatgggaccttatctggaaacagggtctttacagagataatcgagttcagatgaagttatattagattagggcggcccagtatccaatgactagtgtccttatatgaagagggagacttgaagacatagagacaaagggacacaaagagataggagagaaggccatgtgatgacagaggcagagaccaagtgatatgagracaggccagggaaggccaaggattgccagcagccaacagaagctaggaagaggaaggaagtatccctgcctagcacaaacccgctgacagcctcggtctgcccttttcctccaaagtcctgcccaggctcctcttggattgaagagtcctgagcccagccttgaactgataactgcagccagggagtgaaatgtgctgatttgctgccccaggagccgatggggtcagccctgtctaaagaacaggagctcagcacaggggaaagggcaactccccaaaggaaaactgaggtgctattaccagaagcagaagagctgccacttaaacaagcaaaataacccatgtccccacacccttcagtaccaggcccatcaatcaccttctaagcttacata

SEQ ID NO: 644748 - DNA, 576 bp, Homo sapiens
agtaactgcattatctaagaacttgcttcacatggaaattctcaggccttgtctgagacctactgaatcagaaactctaggggttaagcctagacatctgtgttttaacaaactcctcagatgattttactaaatgctaaagttttacaagtacaaatttaaagttaagtcttaatcaatttctgtattaaggcagaggacacagaccaaatgcctacaaggataatgaaagttttataaatgagtgagtataaaggaaacaggtatgaaacgagaaggagtggtggggactgtgggaaagtccatgctcagcctcaagggtaaactgctattctgcactctgagttcttgtcactgtccccaggccaaatctttacattttctaagagattctggataattgagttttgatgtgacatttacccattaytaatcttgtagaggctacacaaaatatatctgtcagccaaacctgtggacagtgcttgctttagggtgtcatccagggcatcacagatgcttcaggtttattggtggggaccccaggcaagggtcaaaataggaggagagacagtt

SEQ ID NO: 644749 - DNA, 658 bp, Homo sapiens
ttacagcaattaggttgctcactgatttctgatattaacgtatcagaatgtgattctcaaattagtatcatagcttggtacccaaggtcagagaatgtgctgcttttccaatgcaaaaatccctatctaaataagtccatcttagggcacatgagattagcacctattgtcctgtcaactcatttagtttaagtgtgagatttgttgatccctcatctgggtaaaggtagtcagtgaatcctactgyctcccttcaagacagcctctgaggcagtaatcaggttagaaatactgaatccatgattcttcctaacaagagcctccaaatattctcagcaaagacatcctaaatttaagcagatatgcttttcatttggataaaattggaaatggtgtaataccttgagagaatggttttcctaagacgttaccatgttaaaaaagtccccatgtctatagaaaatgcaaaaccctgaaatatctaatcaactaactgtactcatgaaatgcataatattcatgcagatataagcagtggtttatttctaaggttgcttaacgaatacaagtcagcaatttaagttctcaaatagaaaagaaaatgtgcttgaaaccttttaaggcaatggtattttgtactaacaaaaacatttcatat

SEQ ID NO: 644750 - DNA, 500 bp, Homo sapiens
gcacgccaaccacgccataaagacaaattataaggagggctcaaaacaaagaagtgaagatggccgggcacggtggttcgtgcctgtaatcccagcactttgggaggccgaggcggacggatcacctgaggtcaggagctcaagaccggcctggccaacatggtgaaaccccctctctactaaaaatacaaaaattagccgggagtggtggcacacacctgtagtcccagctactcaggaggctgaggcaggtgaatagcttgaaccagggaggcagaggttgtggtgagctgtgacagcgccactgtactccagcttgggtgacagagtgagactctgtctcaaaaaaataaaaaaaaaattaataaataaaagaagtgaagacttgtggctagaycatttattggaagtacaaaagtatgcctgattcggcaaatgggacatctgtagccatataaagaatagtcagaactattttgatttgtaatttctaccattat

SEQ ID NO: 644751 - DNA, 554 bp, Homo sapiens
cctggctgtcaactctgaagagagcagcagttctcccagcacagtgctgcagctctgctaagggacagactgcctcctcaagtgggtccctgacccctgtgctgcctgatggggaaggggaagacacctcatacaggagagtgccagctggcatctggcgggtgcccctctgggatgaagcttccagagaaaagaacaggcagcaacatttgctgttctgcagcctctgctggtaatacccaggcaaacagggtctggagtggacctccagcaaactccaacagacctgcagcagaggggcctgactcttagaagaaaaactaacaaacagaaaggaagagcatcaacatcaacaaaaaagacgtccatgcagaaaccccatctgaaggtcgccaacatcaaagttcaaaggtagataaatccaygaagacggggagaaaacagagcagaaaggctgaaaaatccaaaagcagaaggcctcttctcctccaaaggatcacaactgctttccagcaagggaacaaaactgaacagagaacgagtttgatgaattg

SEQ ID NO: 644752 - DNA, 598 bp, Homo sapiens
cattaacttacttccttgtcaatttttggatttcctttgactttgttcaaactgattttaggtcttcttcctctctgcaggacagtgagctggacaacattgcttcattatttcagctgcttgtgaaggaggtaagttaaaagccttccaggcttggttsctttctctacaaggagcctgcttactccttcttagtgggaagtctgtttcgtgggtcaataatggattctgttttcctggagtttagtcaattgccacaggtgcgggcagtttggaccttgatgtcagtgcttttatgctctgattctagctggtgagcttgcctgtttcttactttgtaatcttagattgtggagttaagagatacacatatatctaggaggctcatgaaaacactcatgcttatttgtgaccagttggtagtacacgacagacatttctccagcccccacaagtatcaagacactagggagctgcatgggtccttacaaaatcttcttacccagctcgacccagaaaagcatgttgcttacttgtcttgccgctctacgtcttctgctaaaccctctaagtagccagtggtttgctagtttcatgc

SEQ ID NO: 644753 - DNA, 590 bp, Homo sapiens
aaggcactttctggcaggcccccaggtttttaatggatttacagggtcaaatatggaggtagctttctttaagtcaccatttaatgcagaaaaatgttgatttcctttccccctttgacatcctgggcagggctaacaagatgatgggttaacagtgcaacttagggttttcagatttctcgaacagctgtgcagagccgaatctatakgacatgtcctgggaaagcctcctgagctgggaggagctgaagtctttgttgccagggacactatttgtgtccttcctgttctatgatgcctaacaaagagctctaactcagggtgctgcactgatgcagactggatgctcacagaattgccagacttcataaaagggggctcagtacattggtcctcaattttacatgcttagcttagtgaacaagaaagtaagggacatcttcagggatcagaatatgcggaaaaaattaaaggctacagggaaacttgcaaaggttggcaagaaagacttgttccctcatatggatggaagaaaaacagaggtatgtgtaaaccaaaaatctggaattcaggtcttccacataacagcg

SEQ ID NO: 644754 - DNA, 546 bp, Homo sapiens
aatcctgaaataaatgtaagaaatgaaataatcaagttagatatcaaagtaaagttgttatttggtgggtgagggggctccaggatcattttgcagaacaagctgtaactattgtcagctcaccaatagatcttccactgcattacacaaatacaagctcctttgttctcccaccaaaaattccacttctaaggartttgtgccctacgtggagcgcacaaatatacaatcagtgtggtcacaacgtgtgggctcccttggggagaagggttaggatagagaaagaagaatttgtaaaagagaacctgtaataaaaacccaaatgatacagagcccttgaaatgtttagttcactaacttgtaagggcaactgataaatttcttcctgctactgatgattgttgggcctcttcttttgctttgtaatatcctatacaaacaatgtgatgatctggtccctgtttacccctttaggcttatttcttgcatttccctgccctatcacttacccacattttcttaagtctgtgcctttgcacacacagt

SEQ ID NO: 644755 - DNA, 561 bp, Homo sapiens
ccactattcctgtttctaaagtgctgtggggttcaatgttaatataccatttatcacattatactagaatcatgtgcatgtctgtctaacccaatgattcttaagggggagatgaagaactgtcctccaggggacatctggcaatgtgtgaagccattttttttattatcacaactgcctggggtacagagtgctaccagcatctagygggtaagtcaggaatgctcctcaacatcctacaatgcagaggacagccccaaaacaaagaatcatcaggcccaaaatatcaacagtgcagaggttgagaaatcatagtctaacttgttagattatgagcacctttagtgcaagaattatcatattcatctttgtaattccagtatctggcatgcacagcaagagcgctgtaagttatctgtagactcaacagacctcaatttaaaggtaatggaagagccagtaaagactttacagaaagcaacatgatctgtgtttagggaaaatgactgataccaaaatgatgtattggaacagtttctagtatcttacaaaatttaaaat

SEQ ID NO: 644756 - DNA, 618 bp, Homo sapiens
cagtgttctggacagtgtctggtacatggttatctatgatcattttttaagaagagctgatgtcctctcttcattcttcctggttcctccactataaagttctacttttctcatggttcaacctgactgcaggatacctggacacttctctggtagaaggaggtggggagaggccatgcaaaaaatgtgaagaagataatggctattttataatccaagataagaagctcctccattaggtaactgaaaacgaactccgtatcattttaatgtggctcaaagagcttgttcaatgataataaatggagctatgtgaaaaaaaaatcataagaagacattttgaatgctataaaatacaatcaagtgacattgccaaaatatgtcttgatagcyaatggaattttatttaataccaacattaaaagcttcttatggtttatgaagtaaatttcaataatatagccctgtaagtgtctagtatgtagctgaaatccttttccatgtgattggttttgggccactttgtttacaataagagtttatgacagtaatataaaaattggaatctgctctaaaaatgacagcccatgattccaaaccaggtactttttgaatggc

SEQ ID NO: 644757 - DNA, 594 bp, Homo sapiens
caaaaatcattccatgccaaaagaccaagtttaatatttttttcataattcatcttggcctgaggctacaacaagtcctattgttatatactctgcctctagagaatgaggctgctaacagaccttggaatggtgcctggcacacaggctcaagaaatatttgttgaatgaattgtaattaacacctcctgttgtggggatacataaaagatgttacatgaaaaatgccatctaacatgcagcaacaaatctcttcccattaagcagtaaatctacttaacaatgatatatttttggcaaggcatctgcctctgaatgatcctatagtactgaaaattctttttaaactgaaatatttttcaagatattatattattgaccttatgaaagcttttttaacatatgaaattggggttatytggctatgagtttgtgaggcataaaaatgatatgacagaagaattacagatttgtttttgcatttccatgcctaaatgtaactaatacaatgttagtttcacaaggtaatgtgcaatgttttaaatgcatttacctctccaaaatattagaattcttcactcaaagctaacagtg

SEQ ID NO: 644758 - DNA, 446 bp, Homo sapiens
atgactaaaattatacccattgaacagcccctcccaattttcgtctccctctaacccctggtaaccaccattttactttctgatttgatgagttttactgttttagacwcctgatattagtggattcatgcaatatttgtccttctgtgactggcttatttcacttagtgtaatgtcctcaagattcatccatgttgtagtatatgacgggattttttttaaggatacataatatttggttgtatgtatattaccacatttattttatccattcaactgtcctggacatttaggtggttgttagtgtcttgactgctgtgacaaaataagtacttttaaaagtctcacatttgcaagttcaatttgaacctttttttagtctgcttgtacttctcttatcaagcaagaaagcacttttctgctttttgtattactagtaacagtgg

SEQ ID NO: 644759 - DNA, 459 bp, Homo sapiens
catgactaaaattatacccattgaacagcccctcccaattttcgtctccctctaacccctggtaaccaccattttactttctgatttgatgagttttactgttttagacacctgatattagtggattcatgcaatatttgtccttctgtgactggcttatttcayttagtgtaatgtcctcaagattcatccatgttgtagtatatgacgggattttttttaaggatacataatatttggttgtatgtatattaccacatttattttatccattcaactgtcctggacatttaggtggttgttagtgtcttgactgctgtgacaaaataagtacttttaaaagtctcacatttgcaagttcaatttgaacctttttttagtctgcttgtacttctcttatcaagcaagaaagcacttttctgctttttgtattactagtaacagtggagattaaatatc

SEQ ID NO: 644760 - DNA, 596 bp, Homo sapiens
aaggtttgaaactatgcactgattatattattattgttacaacatatggaacattttataatattaactaaactcctactatctatacaaacttgtaataaaacagtaccattgtgatacacacatatagtgtatatgtgtcacatacatatttataatggaaatcaagcaaaagccaaataactatccaagtatatatccactttcatctctaataaaagtggaatttcatatcactacaaaggatatatttttcagtaagttgtgctagaacttgggagaaaaattgtgaaatttgagagaattaattcaaataaatattctgacatactattataaatttaattttccaagaatatttctggagtatagtcaacaatgtactacaaaagttgttaaattttgcacagtttttgtcttttcaaaccattttactcttttttttaattggaggaaatcacatggagaaataattatgcacaacagtaatcatcttggcatgtattttaataataatatcttttttctcttttttatatttaygttctatttcttggtactaaaaactcatcaattaagtggcactttggagagtg

SEQ ID NO: 644761 - DNA, 596 bp, Homo sapiens
aaggtttgaaactatgcactgattatattattattgttacaacatatggaacattttataatattaactaaactcctactatctatacaaacttgtaataaaacagtaccattgtgatacacacatatagtgtatatgtgtcacatacatatttataatggaaatcaagcaaaagccaaataactatccaagtatatatccactttcatctctaataaaagtggaatttcatatcactacaaaggatatatttttcagtaagttgtgctagaacttgggagaaaaattgtgaaatttgagagaattaattcaaataaatattctgacatactattataaatttaattttccaagaatatttctggagtatagtcaacaatgtactacaaaagttgttaaattttgcacagtttttgtcttttcaaaccattttactcttttttttaattggaggaaatcacatggagaaataattatgcacaacagtaatcatcttggcatgtattttaataataatatcttttttctcttttttatatttatgttmtatttcttggtactaaaaactcatcaattaagtggcactttggagagtg

SEQ ID NO: 644762 - DNA, 390 bp, Homo sapiens
tacactgaatctattttgtagtcttttattcctcaccccctttccaccctttctcctcgagtccctaaagtccattgtatcatttttatgcctttgcatcctatagcttagctcccacgtatgaatgaraacataggatgttaggtttttcattcctgagtcacttagcttatgataagagtctccaatcccatccaggttgctgtgaatgccattaattaatgtctttttatgtctgagtactattccatcttacatatctaccacagtttctttatccactcattgattgatgggcatttgggctggttccatatttttgcaattgtgcaattattaactatttcaaattgccatctccaatgtcagctctaatctgttgtgtcagaa

SEQ ID NO: 644763 - DNA, 285 bp, Homo sapiens
agtgttaaattagtaaaaatagtattgaaaaattgaaaagtaggcatattaaaacttgtaacactatttaagcttagatatattatttgtacctcatcaacattttttattttgttgagaaagtgtaaggttaattggcagcatatttctaatagtagatagaataatgtctgttttataaayattgacatcctacattacatgtgtgaaccctgaaaatctgagacagctctcagattttttagaaagtttattttgccaatcttgaggatgtgcgcccgtgac

SEQ ID NO: 644764 - DNA, 285 bp, Homo sapiens
agtgttaaattagtaaaaatagtattgaaaaattgaaaagtaggcatattaaaacttgtaacactatttaagcttagatatattatttgtacctcatcaacattttttattttgttgagaaagtgtaaggttaattggcagcatatttctaatagtagatagaataatgtctgttttataaacrttgacatcctacattacatgtgtgaaccctgaaaatctgagacagctctcagattttttagaaagtttattttgccaatcttgaggatgtgcgcccgtgac

SEQ ID NO: 644765 - DNA, 581 bp, Homo sapiens
tcccagtttcctctttcccaggtccagcagcatctcaaggacatctacaagagggatacctaatttcaggggtctctgaattatatgtgggaaaccatcgtctaaaaaagtaattttatccttattcatgcaaccagacccacactcatagaacttttctttaaggggagtgtcttgcagatgtataaatgagtgttaacatctttaaaagcgaaactgaacaattccctggcatttgaattccctccttccttcccaaccctctccttttcattttctcatttattattaaaaacacttttaaaggatctccatgcttcatatttatctactataattcctccttctcggtgttgcagggatggggaaagaggattttttaaaaacacaataaaaagcaattgggagaaacagggccagtggtgttggggtgggtagtggaattgtgatttttgactccagtagacaatgatgctgsatatatggggtttgatttctctctggctcctcagttgggattgatgaagtttggctagaatcagggagttgaagagaggttgacaaatggtctttcactcttc

SEQ ID NO: 644766 - DNA, 523 bp, Homo sapiens
gcctgccttggcctcctaaagtgtcatgaaccaccatgcccagcctacaaagcaatgttctaggaaaaactacagttactctttgattatgtaattgctggagaagaaaarcatggcatttctaaaatgatgaactatattacttatattttaatatctcataaagtttgaaatagacatttcaaacataaacatgtataaaaatttttataaattaaaaatataaaatcaaaaacattataaaattattttattataaaattattatagaatcaaaaacattataaatttaaacaacttttttaaaaatttattttgggatttcccatggagtgatggagaataatgagccttgggagagctatggcagctctcatactccttcctgggccaacttttttaggaaatgggagaaatataccctgttcaatgtttattgtgggtcagaatatttttgaagctatagttgttgatttgcttcaaactttaaaaaatttattataaaattatgggatgtaaaaaa

SEQ ID NO: 644767 - DNA, 523 bp, Homo sapiens
gcctgccttggcctcctaaagtgtcatgaaccaccatgcccagcctacaaagcaatgttctaggaaaaactacagttactctttgattatgtaattgctggagaagaaaagcatggcatttctaaaatgatgaactatattacttatattttaatatctcataaagtttgaaatagacatttcaaacataaacatgtataaaaawttttataaattaaaaatataaaatcaaaaacattataaaattattttattataaaattattatagaatcaaaaacattataaatttaaacaacttttttaaaaatttattttgggatttcccatggagtgatggagaataatgagccttgggagagctatggcagctctcatactccttcctgggccaacttttttaggaaatgggagaaatataccctgttcaatgtttattgtgggtcagaatatttttgaagctatagttgttgatttgcttcaaactttaaaaaatttattataaaattatgggatgtaaaaaa

SEQ ID NO: 644768 - DNA, 625 bp, Homo sapiens
aagctgtgcttcaatacctagggcttctttcctggaatggatctgagaatctgggattgggtggctaatatctcatctctagaagggagaaagaactgggtggtgatggctttgtattttctactggcgttcactacagartaggtgaatggaatgggctgctatgatccagacattagggaggacaggtttgtgatacattagaaaacttgaatgagcccttctatgattctctcttccctctttctgcttccctttctgaatcaccatccccaggttgtggaattagcaaatctattatgtgagcaatagcaaacttacaggagcccttggctccatctatctccctgtttgtgtcagttcattctggatgcttttagtctgtggtcttcattcactctttttatggggaagtaaaaggagtgggacagattatgagaacagctgggtcctcccagttgctggggtggttattttaagctttgtttaatgtgtccagagacccagatggcatttttaactaagctgctttattaaatcttgtgataaagcatagtgatgtttattgaaaaggcagacacacatcagcaacattatgcgtgaaacttgctctaagaattttcta

SEQ ID NO: 644769 - DNA, 596 bp, Homo sapiens
acagaatatggaacactgtacagactatataaaaaaacttaatttattctgagaaaaatgggaaacaaatattttaagcactgtcttgataaggttaaaattgtatttagaaggattactgggtgttacatggaaaatgaattgtttcttctttgtcagagcttgaaaaggagttatcagattattgtggtgtctaaaactatttacatgagatattattattaaaaagaaggtaagcacacttgagaagtttaaccttcccaaagtaagcattttggaaaaatgaatgcaagcatgtctagagatcaaaacaaacayacactctctctttttcccccgccttgttttattcaaggctaaatgatatgtatgcccatgggtaataaggtcaccaggttaaaagagcaatatgacaattatgaaatgttagatcacagctactacaaaccggagcccattagcccatagtgcaggaaagttatcactgtaactggcttttcctgtgtccttatcaatgcagtgcacaaagtatctcacccttagttttttctctaagatctatgtagtgtttatgcctatctaacctcaccaggcac

SEQ ID NO: 644770 - DNA, 432 bp, Homo sapiens
cctgcagtggcctgcaaggttctacrtggcgcaggtttggcatccactgtgacctcatcccattcactgtctgcccctcctacaccaggcagcttgcctaccacctcattgtcctcaagtgagccaagcacagccccagggcctttgcacctgcagttctctctgtctggaatgacttcttccacccttcaccatcctcaggtctgtgcccagcgtgaagccctccttggccatccagccccagccctccctgtggcccactcggcctgcttccttccccaccacgcctcctctgagtgctcattccctgctggctggcctcctctactgccgtctaagacccatgaagaagggatttggcctgtttgttttctgctcagagcacccatggccttgtacagacgctggatgttgaatgtgttcaataaatat

SEQ ID NO: 644771 - DNA, 605 bp, Homo sapiens
gaactaccatatgattcaggaatcccactgctgggtgtatacccaaaagaaaggaaatctgtacatggaagagatatctgcacttccatgtttattgcagcactattcataatagccaagatttgaaaacaacttagtgtccatcagtagatgaatggataaagaaagtgtggtatatatacacaatggagtaccattcagccataaaaaaagaatgagatcctgtcatttgcaacaacatggttggaactggaagccattactttgagtgaaataagccaatcacagaaagacaaactgacatgttctcactcaatggtggaagctaaaccttcaaacaattgtactyatggagataaagagtagaatgatggttaccaggggtttggaagggtagtgaagaaaggttaacatgtataaaaatatatttagatataatgaataagatctagtatttgatagcacaacagggtgactgcagccagaagtagtttgctgtacattttagaataaccgagaaagtacaattggaatgtttgtaacacaaagaaattatgaacacttgaggtgacagatatcccatttaccctgatgtgattagtaca

SEQ ID NO: 644772 - DNA, 579 bp, Homo sapiens
cttggcaaaaaaattttggctaggtacccaaatgcaactgcaagaaaaataaaaaattaacaagtatgatcagttaaactatagagcttctgcccagccaaagaaattatcaacagagtaaacagacaacctacagaatgggagaaaatattctcaaagtatgcacccaacaaaggtctaatatccagaatctaagaggaacttaaacaaatcaacaagttaaaaaacaaacaaaaaaaattgtcaaaggacaygaacaatcacttctcaaaagaagacatacaagtggccaacaaacgtatgaaaaaatgcctatcatcaccaatcatcagagaaatgcaaatcaaaaccacaaggagataccatcttatactagtcaggaagtcaactattaaaaagtcagaaaaacaacagatgttggcaaggcttcagagaaaggaaatatttatacacagttcagccactgtggaaagcagcttggaaatttctcaaagaacttaaaaaagaactaccattcatcccagcaatcccattactgggaatatacccaaaggaaatagattatcataccaaaaagat

SEQ ID NO: 644773 - DNA, 557 bp, Homo sapiens
aaccttttcagttaaattgattttaacaatggagctcttaaaggaaatttttccagatattttattaccarattttagccaagacaaacaatatttctggtttttaaacttctttatcagaggtaacctcccacaggaaaccagttaagtcctaaggttatgacttaaccatggttgcaagagatgtctccaaagtaagcagtttttgcaagatctagaattaccacaaaggtggctcagggaatagaaaattcaagataggacattggaagttgtccaggaaggggaaaagaatcagtaagtggcaaaagtcacacaaatatcaaaccagaaaggactcattctcaaagccaggaatcaaacccaagccaccacagtgaaagacttagctcctgagctacagcttgggatgcctgccatttctcttcccagaaggaatctaaaggagttttttgactttgcaaaggatttcaactctcaagataatatttaaagctagccaagacattattatgtgttcttctttaacttaaccatttttccagttgtttagaata

SEQ ID NO: 644774 - DNA, 601 bp, Homo sapiens
tgccaactccaacacccacccagtacccatgttcttattcatttatgcattcattgcaccattttgaaatcctgtgacaaggcaatcagcaactgtgctacataccatggcccaaagactgcaaagtccacaggagctcttggtctaatagggaaaataggcttataaaataccaggaaaaccatgcaaggagagaatggtgaagaacagacagagaaaggggatgctcagaaaagagaagtctgccttaaatgtcgggaagggatttaaaaccatgatgtaggataagaagttcaccaggaagggaaagggaaggatgcatctgaaggtagaagcaaagatattgaaatgatcttgactaacccagcactctgcattcttaaaagactaatgttaatcagtccactctcctttatagtttttcmatcaaatggtttggaatattcagctcctcttaattataaccaaggactaagtttattagtttataatttttatttctattgcatacaaatacatttaattatgtattatgtacatttatcttttgatataaatggcctgattttatatatatgatcctgtagcctctttctttttc

SEQ ID NO: 644775 - DNA, 452 bp, Homo sapiens
ttgtgaggacagcaccaagccatgagggatstgcccccatgacccaaacactcaaacacctaccaccaggccccacctccaacgtgggccccacctccaacatgagatttggacgggacatctaaactatatcagattacatgtgataaaatagggagtggtggagactgtggcaaactcgaatgctcttatggctttacttggaagtgatcattgctcagctttggtcagttcctgccaaacagcagtgggggtgtattagcccattttcacactcctataaagaaattcctgagactggtaatttataaaagaaaaacgtttcattgactcacagttccacatggcaggggaggcctcaggaaacttacaatcatggcagaaagtgaaggggaagcaggcagcttcttcacatggcggcaggagggagaagtgcaagtgcaggaaaaaac

SEQ ID NO: 644776 - DNA, 575 bp, Homo sapiens
tatttctctctttttcagacacttctgcattctacagtcatccaagcatgatgtcatgggagtccagataggcatgtatttgggtcaaggctgctggtttaactacagagagctttctgtctgtctatcagcctgtctttgtctctctctatctgtctcgacagtggctcaaagcagcagagacttagagactcaatctcatgagctgaagcagattttcctttggcatttttattcctgctgcataactcagtgagcccctaaaattatggcaacagactcttttcaaattaaaacataccctacattaaagcttctcccacctcagtgtacgtaagagacaccagggtcctggttaaaaatgcagattttcagattccacctgagactactgaatcagaatatccaagagtgaaattcagaaatctgctttttcaaacaaacttttgagatgattctgaggtagttggtcaggcaacccctttgtggaaaacaytccttatctgatgccctcccagtgatgtgaaggttcgatagcatttccctattttggttgggaaataaacatatcctgg

SEQ ID NO: 644777 - DNA, 603 bp, Homo sapiens
  misc_feature 543: n = A,T,C or G
tttgttctttcattaaggcttaaattttttagagcagtttaaggttcaaagcaaaattgacaggaagatatagaaattccttctgcctccacaaatgcacagcctcccccactatcaacatcccccactggagttttccatttgttaccattgataagcctacatgaactcatccttatcaccagagttcatagtttacattacaatttacatttggtggtatatgttctatgggtttggacataggtacaatgcatagtatcagctctactcgtttcactgccctaaaaatcctctgtactctgtcttttcactcctccctccccctcaacccctggcagccactaatctttttactgtcttcatagtttcccctttccyagaacatgaatcacacagtatgcagtctttacaggtgggcttctgtcacttagtaatatgtatttaaggtttctccatgttgaactggtttttgttacttacaaacatgacctaagcaaagcagatggggaaacatctcttccctgttcccttcctcaacantgtttatcttccctcctttcttgatgtggtgtccggggaccaggtcacccacttaaaccc

SEQ ID NO: 644778 - DNA, 565 bp, Homo sapiens
aatgttgggaggtggggcctaatgggaagttagataatggggccctcatgaatggattaatgctgctataaaaaggacttgcaggagtgtatttgccttcttctgctcttctgccatgtaaagacacagtgcttgtccatcttycacttgcccttccatctgctgtcatgtcaggatgcagtaagaagatcctcaccggatgccagcaccttgatcttgaacttatagcctccagaactgtgggaaacaaatttctgttcttattgaattacctagtctgtggtattctgctatagcagcaccaaatggactaagacgcctggttaacattcatcatctgttcatctgcttacatccctgtggatatggaccacttgtctgagccaggccagtaatctgcatatccattcagacagtatagaagtgatagcctaggtgccttcctgagggctagactgagcctgtcctgattcttttccctttccattagctctgtgcttacgagttcccaacattcttcagatccaaggctttcatgaatttatagtggagaaagaatcgtacc

SEQ ID NO: 644779 - DNA, 565 bp, Homo sapiens
aatgttgggaggtggggcctaatgggaagttagataatggggccctcatgaatggattaatgctgctataaaaaggacttgcaggagtgtatttgccttcttctgctcttctgccatgtaaagacacagtgcttgtccatctttcacttgcccttccatctgctgtcatgtcaggatgcagtaagaagatcctcaccggatgccagcaccttgatcttgaacttatagcctccagaactgtgrgaaacaaatttctgttcttattgaattacctagtctgtggtattctgctatagcagcaccaaatggactaagacgcctggttaacattcatcatctgttcatctgcttacatccctgtggatatggaccacttgtctgagccaggccagtaatctgcatatccattcagacagtatagaagtgatagcctaggtgccttcctgagggctagactgagcctgtcctgattcttttccctttccattagctctgtgcttacgagttcccaacattcttcagatccaaggctttcatgaatttatagtggagaaagaatcgtacc

SEQ ID NO: 644780 - DNA, 565 bp, Homo sapiens
aatgttgggaggtggggcctaatgggaagttagataatggggccctcatgaatggattaatgctgctataaaaaggacttgcaggagtgtatttgccttcttctgctcttctgccatgtaaagacacagtgcttgtccatctttcacttgcccttccatctgctgtcatgtcaggatgcagtaagaagatcctcaccggatgccagcaccttgatcttgaacttatagcctccagaactgtgggaaacaaatttctgttcttattgaattacctagtctgtggtattctgctatagcagcaccaaatggactaagacgcctggttaacattcatcatctgttcatctgctyacatccctgtggatatggaccacttgtctgagccaggccagtaatctgcatatccattcagacagtatagaagtgatagcctaggtgccttcctgagggctagactgagcctgtcctgattcttttccctttccattagctctgtgcttacgagttcccaacattcttcagatccaaggctttcatgaatttatagtggagaaagaatcgtacc

SEQ ID NO: 644781 - DNA, 565 bp, Homo sapiens
aatgttgggaggtggggcctaatgggaagttagataatggggccctcatgaatggattaatgctgctataaaaaggacttgcaggagtgtatttgccttcttctgctcttctgccatgtaaagacacagtgcttgtccatctttcacttgcccttccatctgctgtcatgtcaggatgcagtaagaagatcctcaccggatgccagcaccttgatcttgaacttatagcctccagaactgtgggaaacaaatttctgttcttattgaattacctagtctgtggtattctgctatagcagcaccaaatggactaagacgcctggttaacattcatcatctgttcatctgcttacatccctgtggatatggaccacttgtctgagccaggccagtaatctgcatatccattcagacagtatagaagtgatagcctaggtgccttcctgagggctagrctgagcctgtcctgattcttttccctttccattagctctgtgcttacgagttcccaacattcttcagatccaaggctttcatgaatttatagtggagaaagaatcgtacc

SEQ ID NO: 644782 - DNA, 621 bp, Homo sapiens
aattattgcaaaaattagaagtgtcagcatctccagatgagaaggaaccagaacaagaattccagcaccatgaagaatatgaatgtagtgacaacaccggaggatcacactagttctccagcaatgatccctgaccaaaatagaactcagaaatgacagataaagaattcaaaccgtggattgcaagaaagctcgatgaagtcaaaggaaaggttgaaaatcaacattaaaaaaacttctrtagcaatccagataatggaggaaaagataaacatcttaatagtaaatcaactagagcttatggaactgaacaactcacttaaggaattccaaaatataattgacagctttatcaatagcctggaccatgtagaggaaagaatttccgagcattcagagcaatcattcaaaataaatcagtcagacagaaataaaaataatttttaaaaatgaacacagtcttcagaaaatatgggattctgtaaagtggtcaaacctaccaattaattaacattcctaagaaagacgaagaaaaagaaaacatcctggaaaacatatttgaggaaataattcaagaaaattaagaacattttcctaattttgctagagaggtaaacatcc

SEQ ID NO: 644783 - DNA, 568 bp, Homo sapiens
atatatctggaatatggatttatagagcatgggcaatagaagactctgttgacacatggaaccagaatgtggcggaggcagctctgccccagkaagcaggggacttggtcccagttgcccaccttcccttagctgtgggatgtcttggatttgtctcttcatctctctgagctggtttccttatttaagaaatggaagcgaatcaatgctaacttttttcagctctgagatacatgtttcagagagacaattttgcaggagtaatttacatgtagtcttttcaaactttgctatataaaaatgagaaattatagccaagagcatccctacacagaaacttatttttaacttaaaatatgcatcagtgggtcccaagataagcttttgctctgggcagccaaccaatctgaattctaggcctgcctctgttagcagccagccatatgatcacatgtaaatgagctaacatctatctctagactttagcaaagcacaggctctggactccaatcaccttggctacagtccaagtgtaagcactgaccagctatgtgaccttgagtacgtt

SEQ ID NO: 644784 - DNA, 554 bp, Homo sapiens
tactaaactattaaaataaattaaataattaaaataatcaaattagttttcttactaaaatgttttaaaaaaaaaacaataacaataatacccaaatgatwgtttcaattgtttcattaaatcaatggtcattgactaataaactgaaatgtcagtgattcggaaaattttttttttttttttttgacacagtcttcacttttgtcacccaggctggaaagcactggtgcaatcttggctcactgcaacctccacttcacaggttcaagcaattctcctgcctcagcctcccgagtagttggaattataggcatgtgctaccacgcccggctaatttttgtatttttggtagagatggggtttcgccatgttctacaggctggtctcgaactcctgacctcatgtgatctgcccacctcggccttaaaaagtgctggcattacaggtgtgagtcactgcgtctggcctccagtggatctcttaagcaactggtgccactgtgccacttcctccagaacttgccaagattcacagtgtggaatggaaactagctg

SEQ ID NO: 644785 - DNA, 554 bp, Homo sapiens
tactaaactattaaaataaattaaataattaaaataatcaaattagttttcttactaaaatgttttaaaaaaaaaacaataacaataatacccaaatgattgtttcaattgtttcattaaatcaatggtcattgactaataaactgaaatgtcagtgattcggaaaattttttttttttttttttgacacagtcttcactyttgtcacccaggctggaaagcactggtgcaatcttggctcactgcaacctccacttcacaggttcaagcaattctcctgcctcagcctcccgagtagttggaattataggcatgtgctaccacgcccggctaatttttgtatttttggtagagatggggtttcgccatgttctacaggctggtctcgaactcctgacctcatgtgatctgcccacctcggccttaaaaagtgctggcattacaggtgtgagtcactgcgtctggcctccagtggatctcttaagcaactggtgccactgtgccacttcctccagaacttgccaagattcacagtgtggaatggaaactagctg

SEQ ID NO: 644786 - DNA, 554 bp, Homo sapiens
tactaaactattaaaataaattaaataattaaaataatcaaattagttttcttactaaaatgttttaaaaaaaaaacaataacaataatacccaaatgattgtttcaattgtttcattaaatcaatggtcattgactaataaactgaaatgtcagtgattcggaaaattttttttttttttttttgacacagtcttcacttttgtcacccaggctggaaagcactggtgcaatcttggctcactgcaacctccacttcacaggttcaagcaattctcctgcctcagcctcccgagtagttggrattataggcatgtgctaccacgcccggctaatttttgtatttttggtagagatggggtttcgccatgttctacaggctggtctcgaactcctgacctcatgtgatctgcccacctcggccttaaaaagtgctggcattacaggtgtgagtcactgcgtctggcctccagtggatctcttaagcaactggtgccactgtgccacttcctccagaacttgccaagattcacagtgtggaatggaaactagctg

SEQ ID NO: 644787 - DNA, 554 bp, Homo sapiens
tactaaactattaaaataaattaaataattaaaataatcaaattagttttcttactaaaatgttttaaaaaaaaaacaataacaataatacccaaatgattgtttcaattgtttcattaaatcaatggtcattgactaataaactgaaatgtcagtgattcggaaaattttttttttttttttttgacacagtcttcacttttgtcacccaggctggaaagcactggtgcaatcttggctcactgcaacctccacttcacaggttcaagcaattctcctgcctcagcctcccgagtagttggaattataggcatgtgctaccacgcccggctaatttttgtatttttggtagagatggggtttcgccatgttctacaggctggtctcraactcctgacctcatgtgatctgcccacctcggccttaaaaagtgctggcattacaggtgtgagtcactgcgtctggcctccagtggatctcttaagcaactggtgccactgtgccacttcctccagaacttgccaagattcacagtgtggaatggaaactagctg

SEQ ID NO: 644788 - DNA, 349 bp, Homo sapiens
caaggtggaggcaaaggcaccaggcaagagagagacagaatggccccaggcatagaacccaccaaggaagaagacccaagtgtcctgagctctgtgccacctgtcattctgtgaacatgctgtttccagagccttggaaggcaaggcacaagggtccagctgtttgcagtctcccccagctgtgccttggagagtactcagcttccagtgagttcttagagaatggttttggcagagccaacttgggctatgacattgaacaaccctktttcatcctgggcttcagttccccatccccaggataaaagggtgaggctcagcaattgcatcttatgtctttccagagctg

SEQ ID NO: 644789 - DNA, 530 bp, Homo sapiens
ggattcttgggctttcataaacactagtgtgtctcttttattatggattatctccatggatttcaggttgaactatacaaagtatttgtgtttatagaaaccttcctgaaagatttagaacatggggctggtttcagccagatctttgttataatttatttgccttcatcaggcaaggaagtaggttcaatattggctgtgctataaaacaagagaaaggtatttccctgtatgtaacactttttaaaagcagtgtagaataaacmcacatatgaagaaaactaggctgcaaaattctgcaaaggggtctgatgagatttgtcttttagcacaatccttaaaaactctgggaggcaagttctcttaaaatagaaatttttaaaatcagaagaatttacacttacattcttatattctacagatggcacggataggtatttaaaaaatatagtgtctccgggaataagaaggaaaagaggtgctaatggatttttgcttgcctctgaattttacttactttctccatacta

SEQ ID NO: 644790 - DNA, 530 bp, Homo sapiens
ggattcttgggctttcataaacactagtgtgtctcttttattatggattatctccatggatttcaggttgaactatacaaagtatttgtgtttatagaaaccttcctgaaagatttagaacatggggctggtttcagccagatctttgttataatttatttgccttcatcaggcaaggaagtaggttcaatattggctgtgctataaaacaagagaaaggtatttccctgtatgtaacactttttaaaagcagtgtagaataaacacacatatgaagaaaactaggctgcaaaattctgcaaaggggtctgatgagatttgtcttttagcacaatccttaaaaactctgggaggcaagttctcttaaaatagaaatttttaaaatcagaagaatttacacttacattcttatattctacagatggcayggataggtatttaaaaaatatagtgtctccgggaataagaaggaaaagaggtgctaatggatttttgcttgcctctgaattttacttactttctccatacta

SEQ ID NO: 644791 - DNA, 607 bp, Homo sapiens
atgtgccttgtggttaaacaatgattgtttggggggctttaaggaaattgcttatttttcccttgcagcttatatgcttttccttgcccaaagatttgaacagtttttaatgaactccagactttatttctctaaagctttgtaaagtcagaatacattttcctgctttccccttcacccaagcagaggtgacctggctcctcgggaacctggtgtcaatggtggctctctcatggtggcatcaagatctaccctacattataatgatgtgtgaacatgtcttattttctcttctggatttttagctttttgaagtcaggggctgtatctaaatgatgttccyactcctaatgcttctgaatatcatgctgaatgcaagaaaaaaatcagccaatcattactgctaactgataaaatagaattaagaagtgatgtattgtttcataaagaacctgaataaatagggggaaaaatgaacaaaatactgtttcattattattaatgggtagaagcagaaattagaagtaatatgctgtttcagaggggatgctaggtccttggtttagtaaatagacaatcttccattaacatgacaattatttccaaa

SEQ ID NO: 644792 - DNA, 558 bp, Homo sapiens
aaaaccttatatttagatctaaactttccaaacctgtctaaayatcaaaatttcttgttaaattaatccttacatattacaactgtggatgcaaagacaggttgaggaactatgatatacctattggtatttaaggaactactaagggccactttcatcaaggcactaactggtaagaaccctcttcctgtcttttggtatagtttagaatctttgtataatgggttaatgttctttctataattggcttcactttgtttcttaatgctgtctctcatcactgatcagctgaaatgatttgtaattccttgatgttttccctagtttaccaaatgccttcctagccattcagctaattcaactgattcttcaaggcacagttcaaacatagcaaactcataaatcttccttagcaaaatgggtctatcaattccttctgttttcgtggagtattctttgccatacttttagcacagtgtttgtcatagtataccatgattatttgcacatctgtctcccccagtaccatgtgggtcatttgaagtcaggtcttttaaa

SEQ ID NO: 644793 - DNA, 545 bp, Homo sapiens
gaggtttttgagagactttgtactggaccaggggtaagaatttataaaaaatgctttaaaagcaaacaaacaaacaaacaaacaaacaaacaaacaacacggggcagagtagctcatscaagtaatcccagaactttgggatgccaaattgggaggattgcttgagcccaggatttcgagaccagtctaggtaacatagtgagaccctgcccctacaaaaaataaaaaaattggctgggtgtggtggtgcatgcctgtagtcctagctactctagaggttgaggtgggaggatcacttgagcctgggaggtccaggcgtcagtgagcggtgatcataccactgcactccagcttgggcaacggagtgagacctttctcaagaaaaaaaaaatgtttttaagaaaaagaatattttatttgctgaaaagagaaaaaattttctggggaagacattttagaaacaatctttcttgtaaaaattagtttgctttatttacttgaactttgaaaggccataaacacagtccttgtatacttgcaactca

SEQ ID NO: 644794 - DNA, 583 bp, Homo sapiens
tttctgctactatagctacgtattgtttcagtattctttggtataatttggctaagactttattttaacatgtgtttaaatctactctcagatttaggatttcactgatatttttcctaattcctttgacttaatttgtaaaatctaaagtgcatgtatatctttacctggcatcctcttccactgccattttaaactctgggatgatatagatttgataggtttctatttaatttgccaaatagtatttttaaaaattcaattcaatcttaattcagttctaccaagttcacatttttgaacatctgctattgagtagtgttactgaattatgattgttactttatcttctagggttatagtatatttattgtcctctgtgatatttgtttttgctaatgtatttggaatkttttactaattattttttcaatcctgaaatattcacagagactcatacttcgtaattcaattctttttttttttttttttttgagatggagtttcactcttgttgcccaagctggagtgcaatggcactatctcagcccactgcaacctctgccttcaggtttcaagcgat

SEQ ID NO: 644795 - DNA, 583 bp, Homo sapiens
tttctgctactatagctacgtattgtttcagtattctttggtataatttggctaagactttattttaacatgtgtttaaatctactctcagatttaggatttcactgatatttttcctaattcctttgacttaatttgtaaaatctaaagtgcatgtatatctttacctggcatcctcttccactgccattttaaactctgggatgatatagatttgataggtttctatttaatttgccaaatagtatttttaaaaattcaattcaatcttaattcagttctaccaagttcacatttttgaacatctgctattgagtagtgttactgaattatgattgttactttatcttctagggttatagtatatttattgtcctctgtgatatttgtttttgctaatgtatttggaatgttttactaattattttttcaatcctgaaatattcacagagactcatacttcgtawttcaattctttttttttttttttttttgagatggagtttcactcttgttgcccaagctggagtgcaatggcactatctcagcccactgcaacctctgccttcaggtttcaagcgat

SEQ ID NO: 644796 - DNA, 598 bp, Homo sapiens
tatgtggtcaatttttatgcaccacagccaacctactgaatcagaaacactgtgacaggacccagtgatctctttcaacaaccttcaggtgattctgaaacatacttaagtttgaggaccactgatctgggcaaatgaatcttccttatccacatgttttaaaagtcattcttataatgttttatttaaatctgctgaaacaaaagttcattctcaattatattttagaaacaacccaaggtaatatatctttgagggtagatgaatagaaattacttgggagcaaatatyctactttattgtacctttcctcatttaaagtttgtttcttcttttgggatctccatttatgcaagtatatatgagattcccataaattccacagttgtggttttttttcattgtagtattcaaatgaccatcaagctcaaattcttatagatacttatctattgactaggttacaagagttttccccctgtaacctcaacctttccattttatttctcattgttcaagtctttgattgtgattatgcttaaaaaaactgagaggccattgttttggactgagatcctgcactaggatcccatagaac

SEQ ID NO: 644797 - DNA, 561 bp, Homo sapiens
tttatttaatggatttttatttacatgcattgttaagctaaaacaaacaaagaaaacaagaaagcaacaccctgatttcccaacatgataattagagcatagagaaattcaaagatcctcctttcctctctcttgtcttttttgctgtgtggttattaggcctatagcatagtcaagatgttactctaaagcagacttcatcaggaaataaggaatttgctatattttgcaaaggactatcataagtatttcaaattgtttttctatagtgcacaaatgacagcacatttgatgcttttcttgccagaccatacgtacatatcacaaattatcacatacatcggatatatgcttgtccgagacaaaaataggaatgggaaagagaagtttttactattcctttgatgtaaatcctaaaccagactgacattagttatattggctaaaagcttcctgaatctgctgcaataaaaaaattgtttgctaacataggacttgatgaycaacacagtgattgagtcaaaaactgagtcaaggctgggcacggtggctcacacctgt

SEQ ID NO: 644798 - DNA, 571 bp, Homo sapiens
agatgaggagttggggcatctcacacaagggtcaccagggggtgtaagacaagaaacaaatcaaattggcaacctgcatgccatggcctgatcttgtgttttgttttctggctaagaaagaaaaatgtttctmaattatagttttgtttctctccctacccatcatatcacagaaattaaaggaattggtaaaataaaagttctgaaagatttatagccacagtttaagaccatgatacctcagaaagatcagaaacatttgttattttctggaagaaataaaatgccaatgcaaatcactttcaaatgcaaatcctaagcaaacataattctggttaatgcatgaaaggtgtgttctgctaagctcctttgattctccaggaagattgatggcataattatactctggagagaagggttaagaaactgtgttgaaacttattaaatatgacatgcaatgacttttcgattttgtttggaaagtgtgcttaaaaataattacattttaaatggaatttataaatatcttataccacttaaatgaacggtagaggattctgctgcagcacaa

SEQ ID NO: 644799 - DNA, 571 bp, Homo sapiens
agatgaggagttggggcatctcacacaagggtcaccagggggtgtaagacaagaaacaaatcaaattggcaacctgcatgccatggcctgatcttgtgttttgttttctggctaagaaagaaaaatgtttctcaattatagttttgtttctctccctacccatcatatcacagaaattaaaggaattggtaaaatawaagttctgaaagatttatagccacagtttaagaccatgatacctcagaaagatcagaaacatttgttattttctggaagaaataaaatgccaatgcaaatcactttcaaatgcaaatcctaagcaaacataattctggttaatgcatgaaaggtgtgttctgctaagctcctttgattctccaggaagattgatggcataattatactctggagagaagggttaagaaactgtgttgaaacttattaaatatgacatgcaatgacttttcgattttgtttggaaagtgtgcttaaaaataattacattttaaatggaatttataaatatcttataccacttaaatgaacggtagaggattctgctgcagcacaa

SEQ ID NO: 644800 - DNA, 582 bp, Homo sapiens
atggccctaccttttgagtcaactttgatagagatgggaggaagtttatcagttaggaattatgaggttagcaattcctacttaacatatcatgtcctttgttattgtactgccaaatattcagaatgtctaatgacatagaatgtgctttaaattctgtgagggcgttctactgaactatattatagccctccatcatgtcatatttaatctttacatttttctcttctattgtatcctgtttagtaaaaactaagctccatcttatcctgtggccgtagagctcaatcaacctggatggcatactatttccctatctagaccctgctagattaatttccaaagtgctgaagtcctcttctctagcttttgccattggccgggaatctgctgtgaatgaattgctcttccacaacaagatggcattgtgcctaattacaataaatattggtttcaagggttctgctctgtacaaccrttgggctttctatcctgatatgcactgacctgtggccaagctaggtacatctttcagaacctttgacttggaaaaaatcatctttgttagagccagtatcttct

SEQ ID NO: 644801 - DNA, 576 bp, Homo sapiens
ttttcagcagtaagaggggaaatcatgtgttgaggttgaggggaatgaggataagggtggggatctgaggagggtgtggtgggaacagctgctgtgtggaatgggaagaccagccaagtaggaatgagtaatagggctgctgagcagctctgaaggttcagctgacatcggaaatcataaatttgtagcagagtcaatcagcatggttattcaattttctcaggaactcttggcagcccaggaggaggaggagagcaaacagatggtaggactgatttggtaatgggattggcaaggcagctgcgagagaaggttaaagaagggaagaaatcaattgcacccatgaaagtgtgttgaaaatgrtttatcagggggatcaaaattagggagagaaggaagtcaagccaggaaggattagacactgccaattcagggaagagtgaagccatggaggtcattagcctttgaagcttaagaggaggttttgtgagcatgagtgagtgggataggtgatgagagaggaaaatttcacaattttagatattacagtagagcatttttttgtttcaaaacagc

SEQ ID NO: 644802 - DNA, 566 bp, Homo sapiens
gaatcaaaacaggtgaagagtcagaaagggcccctataggagcaagagggagaccagcccagagaacaaaggagttatctggaagaaagggttggtggatgctgggccctgactgcccagtgttcctctggtgcttatctcatcccctcctggttctcaaagcaatctcgccatcaaggagtttccatggtgacggcagtcattcttgatccctcccaccgtccagctgattttcggaggcatctggtgagagtggggagggggtcggaaaagaataacgcattggatttttgccaccctctgtctcttggtgtccttctgagggggasagagcaggggcaaggctggcagtggtgtaggctggggtgggggatgaaggcatttgtgatacccttcacctcctgtgttctcctgagtcccatgactagcatggcagccgattattcttactactcattcctgattgtctttttgttcttttccttcccattgtttaagcctctgttctgaaatgtaccctctgatgcaggctgcagggagaagatgtctcagagcagccaggaatt

SEQ ID NO: 644803 - DNA, 445 bp, Homo sapiens
attgtacacactctgtttttcctggggtcaaatggaacccaatataattctaggcaattaatacctgttacaatagagtttgaccataatatggtcatgtcctgtgcaccagtactacaattattcaagaaggttatgtgactatttgtttgcacttacaattagtgataacttcataattagggataatcttctaaccactgcagtgtagacagctgagtgttatggtcaggagacaggctgaagttaattcacaagaaaatgtttagcttcttgaaggcaaggatgatagctttttattttctgtgccttttgcacccagaacactggttggcacttkggaggcagagaatttggaggcagagaatttggaagaggaaagcatggtgggcagggtgaagaaggaggaagaaaaggaaggaaggaagaaagggaggaaagaaag

SEQ ID NO: 644804 - DNA, 581 bp, Homo sapiens
cagatagcataccaacctgatgaaaaacaagaagggagagaaatagacataaccataaataatatgggcaatttaatggcctttgtttctgaatctgtcatcacatctttatggacaaaggaaggaaaaataatctttccaaatgatcacttactcattcctagraaaagtaatgccttccacagaataaattagaaaagctaaatttacttggattcctttagaaggtaattttttttttttttgccacgtaatgcatcagtaaattttgagtatgaatcaactcttctgatattgttaaatgtgtttgcacgaatacacccttagtgaaagagaggaaaagtggtgagagagagagagaggaaaaatacatttgtcacatcctgaagaagctgtattttaaattcatgtttaattcatatgggaaaaatgcatatttgcactttaaatatatatatcatgagttttatagcacagacataatttctatagagtaagatcccaggtaatgcagataatttcttcaattttaagtattttctgtgtcaaatatcaatacttgatcacatttttgtatggtg

SEQ ID NO: 644805 - DNA, 335 bp, Homo sapiens
tccaaaatggggaggggaactcctgtgcgggagtgctcagctctcaagggaagacagtcattaacctgtctaaactctatgttaatagaaccttctcgataattgctttcattaagtgtggttaatgtgaacagtacaagttatagcaagatttgcagaagaacaaagtaaatatttaagactttatttcaggatgcagttgggtcgaggcaaggagaagattagtagaagctgtmtctgatggtatctgaggttgaaacacagtgaacctcttggcagaagtgccagtcatttctcatcagtggttcacagaatcctaactctggggaggcaga

SEQ ID NO: 644806 - DNA, 600 bp, Homo sapiens
ctgtgtgataccaaggagtccatccctcttcagtgccctgaatacaaaacggttgtggagagcctggagtgatctcaatcaccactgggtgtcgctcttggactcaaaattgtgtggtacctccagctctgtagatttcctttcctcagccttgcttctcggcagtgagcgtggacagtctcaatttccagtatgtgtcccctgccttctttttttgtttttgtttttttgagaaagagtctcgcggtgtaacccaggttgaagtgcagtggtgcgatcttggctcactgcaacctccacctcgcgggttcaagtgattctcctacctcagcctccctagtagctgggattacaggtgcctgccgccatgcccggctaatttttgtatttttagtacagatggggttttaccatgttagccagctggtctcgaactctgacctcaggtgatcygcccggctcagcctcccaaagtgctgggattacaggcatgagccaccgcacctggcctccctacattcttaaaattcttggcagcaacacttggagtcatcagacagcattcattcaggcctttgctttcaggtggaaggtgcttgt

SEQ ID NO: 644807 - DNA, 482 bp, Homo sapiens
gctgttcgaatgtgatggaagggaattcagcaaaggatcagaagggactcactcgcatccacttctcccagccacggtccactgctcatcccccaggctgtgagaggacgtggatccatggtgttaacacacactgcaggaggcgccccttgcarctgtctctgaactaagaatatttccactatgaaactcacaacagatccaaatgctgttagagtctgcatgaagtgccagaaggagtgaaaccacctttgcaaaaatcatgacagtgacaaaaaatctgacataggaaaattatgatggtgaaagaaatctgacctaactgactccatcttgcttccaacctccaagctgtccttgtccattcctgggtgtaggctgaactaactttgggagggatttagtttatagtttaactttcaaacaaagatgttaacggcccctccccaaaacaaaattcctccttgcttggggaccagact

SEQ ID NO: 644808 - DNA, 606 bp, Homo sapiens
ttgtttaatgtaagcttaataaatggtattttagtgtaccaaagaagcatagggtaaatacttaacctattttttgaaaacttaaattgtataaaatatctgaagcattcattttgtatgtaaaaatagtggtcttaacttgctatacaagcttacaaatgtttattttctatgtaatttttttcatttttgccagtagaaaagtgtttgggaaagtaaatttgaattttttataagttaatttgagagttcaaattttagacaatcatgaactttttcctttgtctttttatatgtaaatagcctttcattcagctaatgattattaggaagatgtgctagaatgtagatgccttgttcagctgtctgaaaaacgaaactgaaagaaaaaaagcaaaaaataagttgcttgacacatagaccccaagctcctagctctctcctatctttcatgcctctaccatttacttaccctctgttctctctccccttccctctgtctttcatccacaccagacacaggctgctttcaacttacracctcatctatccatgctaaagggtattaccaatcacatttatggtggagtattaaagtgattcacc

SEQ ID NO: 644809 - DNA, 646 bp, Homo sapiens
ttattacctgtgccctcttctacaacaactgactcaaagtctctggagaaatggtcaaaactctgcatttttttcatgtttcccagctgatccttatgtgcattaaagtttaagaacatgtgctccaacacctcacaggctttttagtaaagtcatttccccatctatatttgcaggactctctccttcagactcagttctaataattatatagttgatgatgattattacaataacaacataactctgaggcacaggcattagttatgttgcttgaagtaacatatctagtaactgatgatataaggattagaaccacttttgagctaaagattgggcaggcaggtcaactgagtaaaaggatactaagctttactcacaactctcctttataatgacagggcattgcaactggtccagactcctgtgtctccattaagtcatgcctaattatgagacttcactcctgactctaaagagctccccttggtcttaaacatgtgcctcaccttttctgtaycccagggttgctcatggcttagtttcaagctgggatactcctatcttgctctatcagtctgcacaccagcccatatccactcttgtcacacaatacccctgacatacacacatacaaatacagaat

SEQ ID NO: 644810 - DNA, 482 bp, Homo sapiens
acgttgtgcctctttcttggttgtaggaggggccaaatgcagcaatttttccttccttagaaggaatatctcaacagaccccacaccgcagaacccctagaaattttaccgatgtagaatgtccctgaattttagtcagatttacttcccatcctctggcatgcaaatgtctcaccgataagtccactgtgtttgctacttcttgctcactggatccaaccagcataatgtcatcaatgtaatgaacaagtgtgatatcttgaggaagsaaaaagtgattggatctctctaaataacgttatgacacaaagccagagagttgacatacccctgaggtaggacagtaaatgtatattgctggccttgccagctgaagactaattgcttctggtgggtcttatggataggaatgaggaaaaaggtatttgtcaagtcaatggctgaatacctggtaccaggagatgtgttaatttgctcatgca

SEQ ID NO: 644811 - DNA, 581 bp, Homo sapiens
taccatagtttctgcgtatattcttccattgacagacacctaggctgattccacatcttggctattacgacgaacaggggagtgcagctacgtctttgaggaactgctttaatttcctttggatatattcccagaagagggactgctgggtcatatggtagttccatttttaattttttgaggaacctccatagtgttttccatagtggctgtactaatttacattcccaccaacagtgtgcaagggttttattttctccatactctcaccaacacttctctttcatctttttgagagaaaattaaactttaactgggaatcctatattttatctagtaactctatttaatgataatcttgctttagcttagctacacagtaacctatgtggagtatttaaaatcgtcttactgataaagaaactgagattyagtggcacttaataacttgtccaaaatcacgttggtaatgaagggcagagcaggattcagaattgagcctcatgaatacctcttgtccctgcactactagtgagcctcagtttcccttctggcccaggaaaccaatcatcctcacagaa

SEQ ID NO: 644812 - DNA, 604 bp, Homo sapiens
ggccacagaggcagccttggaaacaagcaccagaaaattcatagcccaggcctttctggatctgtctgccaggaattgtactgaatctgcctccctcccacccctgcaatatcttccagcagaattcagagggccctggagaagccaatggtacctgctgaaggggttgacaatcgatgctgggtagaagggataccccacatgggaagatgagaaagtgacctttgggatcccaagtgtaccacttcctgggaagaggctataggatacaagacatgaaaaacaaacaccagacttccttctcaccagtgtgtaaaggaatgtatttgtcctcttttctccctctagattctgaccttcaagaagtctgyctctttgatagatcttctctgtctggctttactggggtcaccttccttacatggtaagtcatgagtgtgagtcttctagaaggaaagaggtggtcagtgtgggctggagaggtcagggcagatgcacacgcttggtcctagggcctgtgtctgcttcaggacacagtggggatgaggagaggagaaagcacaagtgggaggctcacagtaagtatgtttgtatggaggtggtg

SEQ ID NO: 644813 - DNA, 537 bp, Homo sapiens
tggcaggttgtccaagatcacatggctagaaagtcagtatttgaactcaagaaatcttgccccagggactgtaccctaatgtcatgctgccactcagatcttaggtgccaccaattttctcccaagcaaccccttcctgggaagaaagcacatcactaggctaacagccaatctgtgcactgggaagactacctttgaggggcttccactgctgttttcttacaagtataatggcactatttgacttttaaaaccaagaccatgcattgttttgacaaaacagagaagaaaagaaacaaaaagaaaaataagaatgcagaatatgggccaacaggactatcagcaaactacatggatacaacagacattgggaatgtgccaagcttctgaatgaggaagggaggggcattatgaacatggcaagaccacaccataaggaggcaagaasctggggtttatgatctgccactaattaacagtgtcaccttcaacaaggggaacgatatgggcttctgtttttccatttataagataagc

SEQ ID NO: 644814 - DNA, 621 bp, Homo sapiens
aagccagcactttgattttagacttcccagtctccagaaccatgagaaataaatgtctgttgtgtaagccacccagtctatgattttttgttctagcatcccaagtggactgatataccaaccctgaactactattccatgccttctcagtagagctctgaacccaaatccttattaaagctaagacagccttttgtttgcatatgccagtgcatgtgtgagctgaattatctgtatgcactccaactgggccaatgtgtgatggcctgcagggtggagatggtgattataggarttaaaaagaaattatttaggcagatagtgaggttaaggaagtcctcgataaggtttcccttttaatgaaaagcaacccccaaatcatttcttctctaacaaagagcagcctgtaaaatcgagctgctgacataggaaagcttacacaggtgaatgcctgcagctgtgccaataggaaaagactaccttaggcatgttcaacatggtggctccatcttccctcttccttgccaaccacatgtacagtaaggagcagacaacagagcactggccaagtagaaaacccatttgcttaataagaagattagggtggggtggccagctcct

SEQ ID NO: 644815 - DNA, 558 bp, Homo sapiens
catcttacctctcagttcttttaaaagttgtaagataaattgattctaagaatatatacaggctcccagcactttgggaggccaaagtaggtataccacttgagccaaggagttcaaaaccagactgggcaagatagtgagaccctgtccctacaaaaaataaaaattagctgggtgtggtggcacatgcctatggtcccaactactcaagaggctgaggtagaattgcttgagaccaggaggtcaaggctggagtgagctgtgattgcaccactgcactccagcctaggcgacagaacaagattctgtctcaaaaaaataataaatacataaaatggyaatgaaagaaatctactgagtccaaagattagtccaagagattatgaattacaaagagaggtaatcagatgtcatattcattgctcaaaatatttcataaataaagcatctaaaatatatgggggaatgagttaattgtcttaggagagatggtttaccattatcacaccttagtacagtcccatgaaaatcacatttgacttttaagagctccattaa

SEQ ID NO: 644816 - DNA, 609 bp, Homo sapiens
agatcttcgtcaggactatcagattattgtaatgctgcacttataacaaaaaacttagatttagccacgcaaaaaaaaaaaaaaaaaagaaaatagagtgcaagataaaaaaacacacctgattaactgatagtacgacccttccaatattctttgagatatccatgctatggttccattgaaacaatttcttacctaaaattatgtccctcgtcatgatattttctacttaaaatggaggaattctcataactgtgatctaaccgtcataatgaggctaaaaaggaaatcaaactgctcttgctttgcattctcttcagtagctcctttaccctttatttcaactccagcagataaaatagagatactatttgtcacccaacccctccttatcagttcagtgagggtgaatgagttaatgtcgtgaaagcacttgagttctccaaaacaaagatgttgtgataatattactacagtactttgtgattacaagttagctttgtaaataattaccaatgtgccatatccartcgtgttctatcttggcctaggagtgttaggatttaccctcatttataagtaagcctgttaagcactatggatgttgag

SEQ ID NO: 644817 - DNA, 529 bp, Homo sapiens
gctcttgagtcatctggtacaatcatcctcttcctcaactcattagctgaagtcaagacctgtgcacaatgcagttagmtaatttgtttattcattgtatgcttatgtaaatggattgaaatctttcctcgacatcattatctgccagaaaataggggccgcatacttagcaagtgttttcaatcatgttttaactagtaataaatcttttgcttgatttatctgaaaattgtctgcttgctctccttcctgttgcccttatcttgtaacacttcataagcttcctccaatagtaataacaatagttaatattaagtgaacactcactctggacctgtcagtcactgttctaagtgatttagctcaaaacctaggaggtaggctttattatcacctcattctgcaggtgaggaaactaaggcacaacttgctcaagtttatgcagcccaaatagcagagccaggattcaaatcccaggctaattgattacagacctactttgctaaatgcctcagtttataaagaaaat

SEQ ID NO: 644818 - DNA, 529 bp, Homo sapiens
gctcttgagtcatctggtacaatcatcctcttcctcaactcattagctgaagtcaagacctgtgcacaatgcagttagctaatttgtttattcattgtatgcttatgtaaatggmttgaaatctttcctcgacatcattatctgccagaaaataggggccgcatacttagcaagtgttttcaatcatgttttaactagtaataaatcttttgcttgatttatctgaaaattgtctgcttgctctccttcctgttgcccttatcttgtaacacttcataagcttcctccaatagtaataacaatagttaatattaagtgaacactcactctggacctgtcagtcactgttctaagtgatttagctcaaaacctaggaggtaggctttattatcacctcattctgcaggtgaggaaactaaggcacaacttgctcaagtttatgcagcccaaatagcagagccaggattcaaatcccaggctaattgattacagacctactttgctaaatgcctcagtttataaagaaaat

SEQ ID NO: 644819 - DNA, 547 bp, Homo sapiens
  misc_feature 421: n = A,T,C or G
atcttccaattaaatctcagcctttcagtgggcctgtgtctgacctgtgactttcacaaatgattcttcttgtgtaatttttcctcctccttttagatgaggcaagaaaactagatggggctagagtgagagaagtgcatttcttctacagctctggaacaagtctctgaaaaatctttccccatgagaagtagacctttgttatagggaaggctctaggcaggcacttttcacaatacttactcttcccttccctctgccagagccataaggggaatctttctcagatcttcacgagaactcrctgggtttcctggagggaaaagtcataaaagtgtttgtggagtacgccctaaaactaatggctcccaggaaatattctcacatcaagtccatgtggcagccttcagaaatccatcanaatgcccatttaagtatttctatctgtttaaggcttcagtagcttctgttccaggaaagcaaattttgctgtggctctttagagttgcttgcctctctaggtttcagggtggtgttttgcccccca

SEQ ID NO: 644820 - DNA, 617 bp, Homo sapiens
cagctccttctcatcctccacctctctctggctttctgcagccctgggtttcattctcctcctctctctgattgttgtctctctccctggyagggccactgcatccccttccagcattctgtccttgatccttggctcttttttgtggcactcatttcccagataccccatctatgctcatcaactcattttttccatactgatgattctggatcatttctccttggccctgactttgccaccaggcacatatttctgagtgacgtacaggcacctccaacttagtgagcagaagcctccatgagccctcagcctttctgacccctcttactcctgctgagtcagctcctcctcagccatattctctcagtcactcacccaggtgcagaaacataggttccttatggagttttctatttttacctctattttacccacaaaccctgctagtcctccctgccatatgcctggcttattttaaggaaacacatgttgagtgaatggatgtctcctggtcttgtttctttctttccattctatcgcaaccaccttcattcccactatcattaccttgagctcattctggtaactgcagcctggcaatggtttcccttcat

SEQ ID NO: 644821 - DNA, 648 bp, Homo sapiens
tttgctctttattttatttttgctcttcattttcaatactcttcctctagcctatttccaatatttgaaaactacatatatgctcatctgatttctaagactatgtatcagattagtctctggaccctctgacaagtcatagagagtaatacaatgagtttaatcatgttttcatgatttctaatattggaaataggctagagggaaagaacagcagaaagaaatatatcatccccaaattcctttatacatacatacacacagatgaatggaatataacctagcctaatttttctcaagtggcagaattaattcatgtggaagctgaagatgagacatagggktcctatttcttatatctcttttgggaataaatagtacattgttttaggctgagtattaaaatctttttatatctctgtggcaagacattgctcatatctatcttacatacaacaaagcatttcttgcacttctcttgagaagtagatgtattagaaagcacatagatgaaggaaaatttataaatccacttttataaagctatttcaatataagtggcaagtcatcaataataagataataatagctatgataacaaatgttttacatttgtttaaacaaatttattttttattcatcatgtgc

SEQ ID NO: 644822 - DNA, 648 bp, Homo sapiens
tttgctctttattttatttttgctcttcattttcaatactcttcctctagcctatttccaatatttgaaaactacatatatgctcatctgatttctaagactatgtatcagattagtctctggaccctctgacaagtcatagagagtaatacaatgagtttaatcatgttttcatgatttctaatattggaaataggctagagggaaagaacagcagaaagaaatatatcatccccaaattcctttatacatacatacacacagatgaatggaatataacctagcctaatttttctcaagtggcagaattaattcatgtggaagctgaagatgagacataggggtcctatttcttatatctcttttgggaataaatagtacattgttttaggctgagtattaaaatctttttatatctctgtggcaagacattgctcatatctatcttayatacaacaaagcatttcttgcacttctcttgagaagtagatgtattagaaagcacatagatgaaggaaaatttataaatccacttttataaagctatttcaatataagtggcaagtcatcaataataagataataatagctatgataacaaatgttttacatttgtttaaacaaatttattttttattcatcatgtgc

SEQ ID NO: 644823 - DNA, 638 bp, Homo sapiens
ttgttgtcaaaaatgttttgttgaaatatgtacttacaattatgattcttatctttgaaaagcgtgaaaattgagggtgcccaatcttcagagtgtggtctttagttgtaggcatatcatttgacttaatcagttggtattgtgtttttcttaatatcaaaatgtgttttttatttttgacacacastagaaacttaagaatataaccaggtattttgtataaaaaaatgagttcataattaaaaaacacttttagcaatttctttgacaatttctcaaaatgttgttgaaacttggttttgtttcttctcagtagatttaaatatacctttgattatgtaatttacaatatacatttagcctttaagttaattttcacttttgaaagtacctgaacatttgaaaggaaatatgttttattttcaaattcaaggtcccaaaagctagataatctcatcgatgttgagtgctccctcatgactactgcttttgacagtcttttgatctgtgacttttcttgtttcattcctcaagcatgttgcagtgtctcttgtcacaatgaagcttactcccacatagaatggcactactttaagtatctttgttttttctttacttttttgttttgttttggcatt

SEQ ID NO: 644824 - DNA, 638 bp, Homo sapiens
ttgttgtcaaaaatgttttgttgaaatatgtacttacaattatgattcttatctttgaaaagcgtgaaaattgagggtgcccaatcttcagagtgtggtctttagttgtaggcatatcatttgacttaatcagttggtattgtgtttttcttaatatcaaaatgtgttttttatttttgacacacagtagaaacttaakaatataaccaggtattttgtataaaaaaatgagttcataattaaaaaacacttttagcaatttctttgacaatttctcaaaatgttgttgaaacttggttttgtttcttctcagtagatttaaatatacctttgattatgtaatttacaatatacatttagcctttaagttaattttcacttttgaaagtacctgaacatttgaaaggaaatatgttttattttcaaattcaaggtcccaaaagctagataatctcatcgatgttgagtgctccctcatgactactgcttttgacagtcttttgatctgtgacttttcttgtttcattcctcaagcatgttgcagtgtctcttgtcacaatgaagcttactcccacatagaatggcactactttaagtatctttgttttttctttacttttttgttttgttttggcatt

SEQ ID NO: 644825 - DNA, 516 bp, Homo sapiens
gtgtcacttttagaatgctggaatctatggaaatgaggtgatttgcattttaaaattggtttgattagaacatttggtttgtttggacaaaaatataaaattactagatattttacttgtaactgccaggacttgaaggagttaatcccaaagaggaagagtctatatgtactttgctctaaaactttaccacccacttcctaaaggtcctctccttcccaacaccgtacttggggaggagrggggtaaaaagtcccgtttccactgaccgtccttcatgcagttctgacagttgagttagctacattcagagccggttcagctgggagtaccccgtggcaattcctcagtctgctgcacgtccaaacccaaaccccgctcactacttaattaaccagccaagtaatgcaacagaggcttagaatccccaacctgccagagtgttccattcgctcgctcgcctgctccggtgtggggctctgtgcctctccctccccctttactgtgtgtgaactc

SEQ ID NO: 644826 - DNA, 606 bp, Homo sapiens
aatccaggtaatagagtatttaatttcctgtcactaaaaccagattctagaaatgtaatcatctaaatagaatgagaggagaggcagccagatccaacagaaattggactggagaagaaggggaaaaaaaaaacaaytgaaatctcccttctggcttcttttaaaacaatgggtcctttgtcaggcaaagagctttttgaacacactaagatatctttagccttaaaagaagtatcttctcttgtacctgtatcctaaagaaaatctattttcataacaatctgggaacggctgaaagagtttcataattgttctgaaacttggggatggctgaaacatttacattggtactgagctcctcacatggggtttatctagtgggtttaagattaaattggtgatgaagctgaatttaaaatccacctttcccccaagaaaatatgagagtactatgatcagcttcctgggcctttctcattagaggcttctgtgctgacagtggaacatctctgaggtggttgagatttggggtagatttcaaaaggtacaatttacagaccagaacatgtgctaaataggcaaacctgtcctttctcaatcaccttg

SEQ ID NO: 644827 - DNA, 606 bp, Homo sapiens
aatccaggtaatagagtatttaatttcctgtcactaaaaccagattctagaaatgtaatcatctaaatagaatgagaggagaggcagccagatccaacagaaattggactggagaagaaggggaaaaaaaaaacaattgaaatctcccttctggcttcttttaaaacaatgggtcctttgtcaggcaaagagctttttgaacacactaagatatctttagccttaaaagaagtatcttctcttgtacctgtakcctaaagaaaatctattttcataacaatctgggaacggctgaaagagtttcataattgttctgaaacttggggatggctgaaacatttacattggtactgagctcctcacatggggtttatctagtgggtttaagattaaattggtgatgaagctgaatttaaaatccacctttcccccaagaaaatatgagagtactatgatcagcttcctgggcctttctcattagaggcttctgtgctgacagtggaacatctctgaggtggttgagatttggggtagatttcaaaaggtacaatttacagaccagaacatgtgctaaataggcaaacctgtcctttctcaatcaccttg

SEQ ID NO: 644828 - DNA, 682 bp, Homo sapiens
agggtgtttgaaattagcaggaaatcttagaatggtttcccctttgtcacagccagaagtttcagattgtggtcatcagatgaacgctttaaatgagaaaaagactgattagcataattcttaaaggtctgaactctacactcacagatggcctctgagaggatggatggtacagaaaggagattaggataaatctaattagtttgggggtgttctcatttctcaagtggtgagcgatggagaagaagtgatggatggacagatggagataatgaagccccattaaagycttttttgattctcattctccatgatggagcacattatcccattaatgtttctgtgagctaacacagccaaagtttggcgctgtcacctcgaaaatgaattcgaattgcctgcccagctccttacatgtgtccacaggagttaaatgagcctgaaaactgtattcctgctgagaagcccatcctggcagcatgggctggaagccctcccctttgggaatgggccttcctcctggctggtttctaacagcactcaggccagagtcccatagcttttctgctccggggttctacaactagaatttcctctgaaatgggctgtggcttgcacgtatttccagggtactgagacagaccgctgctgttctcttcagtggaggtgacagctacaagtg

SEQ ID NO: 644829 - DNA, 682 bp, Homo sapiens
agggtgtttgaaattagcaggaaatcttagaatggtttcccctttgtcacagccagaagtttcagattgtggtcatcagatgaacgctttaaatgagaaaaagactgattagcataattcttaaaggtctgaactctacactcacagatggcctctgagaggatggatggtacagaaaggagattaggataaatctaattagtttgggggtgttctcatttctcaagtggtgagcgatggagaagaagtgatggatggacagatggagataatgaagccccattaaagccttttttgattctcattctccatgatggagcacattatcccattaatgtttctgtgagctaacacagccaaagtttggcgctgtcacctcgaaaatgaattcgaattgccygcccagctccttacatgtgtccacaggagttaaatgagcctgaaaactgtattcctgctgagaagcccatcctggcagcatgggctggaagccctcccctttgggaatgggccttcctcctggctggtttctaacagcactcaggccagagtcccatagcttttctgctccggggttctacaactagaatttcctctgaaatgggctgtggcttgcacgtatttccagggtactgagacagaccgctgctgttctcttcagtggaggtgacagctacaagtg

SEQ ID NO: 644830 - DNA, 527 bp, Homo sapiens
taggattgctttgttcttgttacagatgaagaagtagaatgtcagtggattacagtgaacagtccaagctacaaaatgtgttgcaactggaatttgcattccatgtgtctggttccttctctatgtacaggaatgaatcaggagagcacactggctctaccttcttccactctgacttctcagctttaatccctggagttccagggtggtatggactgaatgtgtgtgcccccaccacttccccaaaattcattaacaccacaatccagttaagatatttgttagtagggccttcgcrgaggtgattagggttagatgaggtcatgaaggtggagccccaggatggatttgtgcccttataaggacatgaaggaccagagctctttctctccaccatgtgaggatacctcaagaaggtgaaccagaagcagggtcctaaccaacaccccgaccatgttagcgccctgatattggacttccagcctccagagccatgagaaataaatgtttctgtttaacccgtttag

SEQ ID NO: 644831 - DNA, 519 bp, Homo sapiens
ccgaatcacttctgcttctaacctgcatcaggaggcctcatatctgagctcaggatcccttccctgcgggcccactgaggtctgtaagtgagggctggagagtggggtataggtaccagtcagtttgcygccccggacaaggggatctgtctcattcctatatggcgttgggatgatccactattgtgccagcaccatccaccttgtctggagatacaggtcatcttctgatcatttatcatggcccttgtccttgaataattattgactttgagtcagaagaacctgcgcaggcctgaaaatggatgtgccctttcttttcctctgtctcacttgtcttgggcagatttatgtcttaggagaagtttccctcggttctatttttggtcttctgaacactgtggccctgtgttccttcccaccctgactctgtccagcaccaactctgtaatttctgaatctctgtggatgcctctatccgtccctgaggaggcctctattagtctacttgcaatgctt

SEQ ID NO: 644832 - DNA, 519 bp, Homo sapiens
ccgaatcacttctgcttctaacctgcatcaggaggcctcatatctgagctcaggatcccttccctgcgggcccactgaggtctgtaagtgagggctggagagtggggtataggtaccagtcagtttgctgccccggacaaggggatctgtctcattcctatatggcgttgggatgatccactattgtgccagcaccatccaccttgtctggagatacaggtcatcttctgatcatttatcatggcccttgtccttgaayaattattgactttgagtcagaagaacctgcgcaggcctgaaaatggatgtgccctttcttttcctctgtctcacttgtcttgggcagatttatgtcttaggagaagtttccctcggttctatttttggtcttctgaacactgtggccctgtgttccttcccaccctgactctgtccagcaccaactctgtaatttctgaatctctgtggatgcctctatccgtccctgaggaggcctctattagtctacttgcaatgctt

SEQ ID NO: 644833 - DNA, 519 bp, Homo sapiens
ccgaatcacttctgcttctaacctgcatcaggaggcctcatatctgagctcaggatcccttccctgcgggcccactgaggtctgtaagtgagggctggagagtggggtataggtaccagtcagtttgctgccccggacaaggggatctgtctcattcctatatggcgttgggatgatccactattgtgccagcaccatccaccttgtctggagatacaggtcatcttctgatcatttatcatggcccttgtccttgaataattattgactttgagtcagaagaacctgcgcaggcctgaaaatggatgtgccctttcttttcctctgtctcrcttgtcttgggcagatttatgtcttaggagaagtttccctcggttctatttttggtcttctgaacactgtggccctgtgttccttcccaccctgactctgtccagcaccaactctgtaatttctgaatctctgtggatgcctctatccgtccctgaggaggcctctattagtctacttgcaatgctt

SEQ ID NO: 644834 - DNA, 559 bp, Homo sapiens
gggtaaaataagtacaaaggtttggaggtaggaaaagcttgataaattagagaaacagaagtggtagattgtccaaggatagagataaagtgggagttttttttttttgtttttkttttttgtttttttaatagagatgggtttcagtgtgttggccagggttgtcttgaactcctggcctcaagcagttctgtctcagcctcttaaagtgctgggattacaggtgtgagccaccgtgcctggcttgggagattgttttgagaagtcatcacccaagagccttatataccagttggtggaggtatttgatttatttcacattgttttaaaaatattggggtaacatataaaaattgaaattttttcataaaaatcaagacttctagcttctctgaaaaaactagatggtctgataacttcagattctccctcccatatggaatctttcatttggagctggattggagctgcccctttaggcagcccccatgttctctggtttgccagtacccttcacttatatcatgtatgcccacatctgaatgtctggcctgtgttg

SEQ ID NO: 644835 - DNA, 559 bp, Homo sapiens
gggtaaaataagtacaaaggtttggaggtaggaaaagcttgataaattagagaaacagaagtggtagattgtccaaggatagagataaagtgggagttttttttttttgttttttttttttgtttttttaatagagatgggtttcagtgtgttggccagggttgtcttgaactcctggcctcaagcagttctgtctcagcctcttaaagtgctgggattacaggtgtgagccaccgtgcctggcttgggagattgttttgagaagtcatcacccaagagccttatataccagttggtggaggtatttgatttatttcacattgttttaaaaatattggggtaacatataaaaattgaaattttttcataaaaatcmagacttctagcttctctgaaaaaactagatggtctgataacttcagattctccctcccatatggaatctttcatttggagctggattggagctgcccctttaggcagcccccatgttctctggtttgccagtacccttcacttatatcatgtatgcccacatctgaatgtctggcctgtgttg

SEQ ID NO: 644836 - DNA, 646 bp, Homo sapiens
ctgtccacattaagattttctattttcatgttgtaaaagattataataaaccaagttgatatgaaacatggctggcagttatagtcattatagagtctggtagtcaggtatcaatactttggggaaagaaagctatattgtctattaaacctatataaaacaataattactaacatttaaaggttgtacattatgtttaccttatctaaaagatgttgatacagtgctatgtatgcactaacaactataaaaagcttgctgctgctaagaaaaaaaaagccacagatycattctttttcaagtctgaataaacaaaattactagaggttacattgaggtttcgaataaaacactgcttgtaataaaacaagtgaccttgtcttctgcctgcagatccctgggaatctcatcacagagggtggagaagatgggggagaggtcttgtaggagatcaggatttgagcatctagggtttctggctattttcctttccttcatgtttgaaaatttattgagattatttaaaattttgtatataaatatcaatatcattttgaaaatattgttatataatggaagatttttgtagcatctatgctagctaaattgaaatatttttgctctcatcttttattatctaatgtaa

SEQ ID NO: 644837 - DNA, 509 bp, Homo sapiens
tgtgcctgtaatcccaactacttgggaggctgaggcaggagaatcgcttgaacccgggagacggaggttgcagtcagctgagatcatgccactgcactccagcctgagtgacagagcaagactccatatataaaaaaacaaaaawaattattcagaccctaaagcccacagactaaatgtatggctctgggcagaagcttttagccttcttaaatctcaatactttgatatataataagaaaaatctacctgatgatgcttttatgtggatgttaaactaaatttactattttttaatctataaactactttttaatatacaaatgtgtacagagacttaaaatctgagtattgatacataaaatataagataatatccatttaaattatgaatgaaggaaggatagggctgggaaaataaattgggccagaaaaattactgtaggcatgtttgtgcttgctatacatttgcttccaagcttccttgttattactgacctaagggaatt

SEQ ID NO: 644838 - DNA, 628 bp, Homo sapiens
tttgtattgaaatgattagacattaaagcatcttgttcataaaattttgataatcttcttttagccatttcttcaaagtcacttctatttttgtcaaatttcacctgtcagggggggtttttagcttctgacctcagtattgtttcagtggytgagattaaacagcattctgacttgtacacagacaagtaactgtgctaatatccagtgaaattgaaaatggacaggaaatctttatacagctaaggaacaaataaatgataagagaattaatccagcattattgttcagaaaattaaacacttgagcagattaacaaaacacattataaaatttggattatttgtgaagagttgcaacatttggggaatgtttttattaaatgaatcttttattttactggatgctaatgaaaacaaactcattattttttatttggggtacgagtgttttttggtgacatggatgaattatatagttgtgaattttgagattgtagtggacccgtcacccgagtagtgtacgttgtacctaatatgtaattttctatcccatacccccaacctctttcttctgaatcttcaaagtccattatatcacactgtctgcctctcaagctcatattatt

SEQ ID NO: 644839 - DNA, 628 bp, Homo sapiens
tttgtattgaaatgattagacattaaagcatcttgttcataaaattttgataatcttcttttagccatttcttcaaagtcacttctatttttgtcaaatttcacctgtcagggggggtttttagcttctgacctcagtattgtttcagtggttgagattaaacagcattctgacttgtacacagacaagtaactgtgctaatatccagtgaaattgaaaatggacaggaaatctttatacagctaaggaacaaataaatgataagagaattaatccagcattattgttcagaaaattaaacacttgagcagattaacaaaacacattataaaatttggattatttgtgaagagttgcaacatttggggaatgtttttattaaatgaatcttttattttactggatgctaatgaaaacaaactcattattttttatttggggtacgagtgttttttggtgacatggatgaattatatagttgtgaattttgagattgtagtggacccgtcacccgagtagtgtacgttgtacctaatatgtaattttctatcccatacccccamcctctttcttctgaatcttcaaagtccattatatcacactgtctgcctctcaagctcatattatt

SEQ ID NO: 644840 - DNA, 637 bp, Homo sapiens
ggttacatataagtaggtaagatgcacagtgaaattcagtccatctatcttttgatgggytattcgaagtagtagtattaaggatcatttggtgaaattacttgttcattacattgtaatgggaagttagaagccaatatgtaagtagataatttcttttacaatatattttcttttcaagtttagatttatatgcttattaactttatccttcatatcaaattaaatttgttattgaatgccttatgtaataatcatgtagcttagttacaatgctcaatcttctgtcataaggtatatttgtatacttaagaatgaaattaattacacgttataaacatcacagtggaaaatattagttggattattaatctacaccatttacattctatgaaacatatttagggccagattctattagtacttttaaaaattttacatgatccttgacattgattatgattaaagacagaccaaagggaggaaaggggtgttatatcacttatgaggaagacacttaacatcttttcgcttgagttcacaacataatttagatgaaacactgttggccttggtaattaggaaaataataaaggcaaggagttggctttatcacattgtgtgaactgacccaaca

SEQ ID NO: 644841 - DNA, 637 bp, Homo sapiens
ggttacatataagtaggtaagatgcacagtgaaattcagtccatctatcttttgatgggctattcgaagtagtagtattaaggatcatttggtgaaattacttgttcattacattgtaatgggaagttagaagccaatatgtaagtagataatttcttttacaatatattttcttttcaagtttagatttatatgcttattaactttatccttcatatcaaattaaatttgttattgaatgccttatgtaataatcatgtagcttagttacaatgctcaatcttctgtcataaggtatatttgtatacttaagaatgaaattaattacacgttataaacatcacagtggaaaatattagttggattattaatctacaccatttacattctatgaaacatatttagggccagattctattagtacttttaaaaattttacatgatccttgacattgattatgattaaagacagaccaaagggaggaaaggggtgttatatcacttatgaggaagacacttaacatcttttcgcttgagttcacaacataatttagatgaaacactgttggccttggtaattaggaaaataataaaggcraggagttggctttatcacattgtgtgaactgacccaaca

SEQ ID NO: 644842 - DNA, 614 bp, Homo sapiens
caccatatccacctattttttcattttttgtagagatggagtcttgctttgttgcccaggctggtcttgaactcctggcctgaagtgatcctcccactttggcatcccaaagttgggattacaggcatgagccaccaggcccaggascagttgtgtttatattctgtctcagatgttgatgggcagaacaataaagaactctttataacatttattgcatgctaactctgtggcaagcactgggatgaaagctttccatgtattatctaatttaatcctcacaaacccttattgaaaagcttttgtcattatccccattttaaagatgaggaaactaaggtttatagggattagagggattatatcacctcacacagctgataagtagtgaagctgggctgtcaaatgctgtctgataccttagcttgtgctctaaactcagttgtacaaaatcatggaacatgatagggaggacactgattttcctttgatgtctaagtaaaatagtaaaaggtataccccagccattaaaccactctgagtaacttttttctattcttattattttaccatgagtctgtttttcatacatgcccttgaactattagaatccc

SEQ ID NO: 644843 - DNA, 614 bp, Homo sapiens
caccatatccacctattttttcattttttgtagagatggagtcttgctttgttgcccaggctggtcttgaactcctggcctgaagtgatcctcccactttggcatcccaaagttgggattacaggcatgagccaccaggcccaggagcagttgtgtttatattctgtctcagatgttgatgggcagaacaataaagaactctttatracatttattgcatgctaactctgtggcaagcactgggatgaaagctttccatgtattatctaatttaatcctcacaaacccttattgaaaagcttttgtcattatccccattttaaagatgaggaaactaaggtttatagggattagagggattatatcacctcacacagctgataagtagtgaagctgggctgtcaaatgctgtctgataccttagcttgtgctctaaactcagttgtacaaaatcatggaacatgatagggaggacactgattttcctttgatgtctaagtaaaatagtaaaaggtataccccagccattaaaccactctgagtaacttttttctattcttattattttaccatgagtctgtttttcatacatgcccttgaactattagaatccc

SEQ ID NO: 644844 - DNA, 614 bp, Homo sapiens
caccatatccacctattttttcattttttgtagagatggagtcttgctttgttgcccaggctggtcttgaactcctggcctgaagtgatcctcccactttggcatcccaaagttgggattacaggcatgagccaccaggcccaggagcagttgtgtttatattctgtctcagatgttgatgggcagaacaataaagaactctttataacatttattgcatgctaactctgtggcaagcactgggatgaaagctttccatgtattatctaatttaatcctcacaaacccttattgaaaagcttttgtcattatccccattttaaagatgaggaaactaaggtttatagggattagagggattatatcacctcacacagctgrtaagtagtgaagctgggctgtcaaatgctgtctgataccttagcttgtgctctaaactcagttgtacaaaatcatggaacatgatagggaggacactgattttcctttgatgtctaagtaaaatagtaaaaggtataccccagccattaaaccactctgagtaacttttttctattcttattattttaccatgagtctgtttttcatacatgcccttgaactattagaatccc

SEQ ID NO: 644845 - DNA, 644 bp, Homo sapiens
tgatctgagtgtttaaaaaataagcatctctgaccttgaggatctactccagtggtactaaatttgtaaattctggatttcgttagacaactatgtacaatattatatgatagtgtgtttctctaatgtaactgacattacaggacagttcttaaaagctgtcagtgatactttattgcctattcattcaacaaatatgtaatgaatgtatatcatgtgccaattactattttagggatacattgataaaaataatgttcttctaggaatgtacaatgacattagcctctaaagagtattgagagtatcttggttacaaatgactaaccagacttctcccaataactgagaaacaaattttaccattgatttatttttcttatagtaaacattaaakagcatctcacaaataatattccatataataaacagtaaattcttaaaatttacatatgtaacatttgtgactttagctctctggaaatgaccaaaggcttttaagaagtagtagatttgtagtttaaggcacaaatgagcccctcaggggtggggtgtgcattcaagaaaacagatccagccaggggaccaaaatgttcagcccaaagtggctttgcttttctaaacccatggtaactaatgcagta

SEQ ID NO: 644846 - DNA, 587 bp, Homo sapiens
gttgcctgttttactttccttccattkcctgcctcgattcctttctcttcgtctattttgcccatccttgctctaacaatgtttctcaattcagaaggcaaacacgtaacacaaaaggaaacgcttctaaaatttccaaagattttgtgtggaaaatatgtaagttccctattttctgaattaggatatgtagctcaaatattttgaatacgaaattaagaacaacttgtaaggcacgtgcaacaaagaaaaggggctaataattctaaagcacattaaaacatggaaataccactatgtacttctcaaatagaatatttggcagcactttttactcttttgaaggttttttgtacagagtaaaacatcaagcgtaaaataagtaatttccattattctcaaacatcaacattttcaataaatgaatgaattctttttctactttcgtcaccctaactttgggaatttatccattacattttaatgaagtgctatggtttttgccttcgtttttttacttaaatttcacaatatagtaactttagagatttttaactcccaagtgacaagcatgtaagctgacactg

SEQ ID NO: 644847 - DNA, 587 bp, Homo sapiens
gttgcctgttttactttccttccatttcctgcctcgattcctttctcttcgtctattttgcccatccttgctmtaacaatgtttctcaattcagaaggcaaacacgtaacacaaaaggaaacgcttctaaaatttccaaagattttgtgtggaaaatatgtaagttccctattttctgaattaggatatgtagctcaaatattttgaatacgaaattaagaacaacttgtaaggcacgtgcaacaaagaaaaggggctaataattctaaagcacattaaaacatggaaataccactatgtacttctcaaatagaatatttggcagcactttttactcttttgaaggttttttgtacagagtaaaacatcaagcgtaaaataagtaatttccattattctcaaacatcaacattttcaataaatgaatgaattctttttctactttcgtcaccctaactttgggaatttatccattacattttaatgaagtgctatggtttttgccttcgtttttttacttaaatttcacaatatagtaactttagagatttttaactcccaagtgacaagcatgtaagctgacactg

SEQ ID NO: 644848 - DNA, 525 bp, Homo sapiens
tttcattatgatcagacaagactcttcttgaccaaagactgaactcaatttctagtcaatgtcttagataacaagggccctcatccattattagactttgaggtcttttcccyccatcattgagcttcagctcagcaatcttacggccatttacaaggtgactgatgagccttcatcataaaacaagatgaaagcaacttgcctacatgcacgtcttcaaaaccaaccaaatgaaccaattacagaacaaaaccagtttagtgtgaggatcaaaatgtgataatgttttgttgagcacagagataggcacatagtgggttgcttgtttatttgctttagtatgaataataattattatggatattatcaggattcctaaaaagagtcatttaactattatgggaacaatataatatactagatgccctttcctcaaggttatgcaacctacatgggaaaataactaaaacaaatgagtagcttctgcaattaaggatcctgagaatgacttccctgcttgatttg

SEQ ID NO: 644849 - DNA, 525 bp, Homo sapiens
tttcattatgatcagacaagactcttcttgaccaaagactgaactcaatttctagtcaatgtcttagataacaagggccctcatccattattagactttgaggtcttttccctccatcattgagcttcagctcagcaatcttacggccatttacaaggtgactgatgagccttcatcataaaacaagatgaaagcaacttgcctacatgcacgtcttcaaaaccaaccaamtgaaccaattacagaacaaaaccagtttagtgtgaggatcaaaatgtgataatgttttgttgagcacagagataggcacatagtgggttgcttgtttatttgctttagtatgaataataattattatggatattatcaggattcctaaaaagagtcatttaactattatgggaacaatataatatactagatgccctttcctcaaggttatgcaacctacatgggaaaataactaaaacaaatgagtagcttctgcaattaaggatcctgagaatgacttccctgcttgatttg

SEQ ID NO: 644850 - DNA, 525 bp, Homo sapiens
tttcattatgatcagacaagactcttcttgaccaaagactgaactcaatttctagtcaatgtcttagataacaagggccctcatccattattagactttgaggtcttttccctccatcattgagcttcagctcagcaatcttacggccatttacaaggtgactgatgagccttcatcataaaacaagatgaaagcaacttgcctacatgcacgtcttcaaaaccaaccaaatgaaccaattacagaacaaaaccagtttagtgtgaggatcaaaatgtgataatgttttgttgagcacagagataggcacatagtgggttgcttgtttatttgctytagtatgaataataattattatggatattatcaggattcctaaaaagagtcatttaactattatgggaacaatataatatactagatgccctttcctcaaggttatgcaacctacatgggaaaataactaaaacaaatgagtagcttctgcaattaaggatcctgagaatgacttccctgcttgatttg

SEQ ID NO: 644851 - DNA, 525 bp, Homo sapiens
tttcattatgatcagacaagactcttcttgaccaaagactgaactcaatttctagtcaatgtcttagataacaagggccctcatccattattagactttgaggtcttttccctccatcattgagcttcagctcagcaatcttacggccatttacaaggtgactgatgagccttcatcataaaacaagatgaaagcaacttgcctacatgcacgtcttcaaaaccaaccaaatgaaccaattacagaacaaaaccagtttagtgtgaggatcaaaatgtgataatgttttgttgagcacagagataggcacatagtgggttgcttgtttatttgctttagtatgaataataattattatggatattatcaggattsctaaaaagagtcatttaactattatgggaacaatataatatactagatgccctttcctcaaggttatgcaacctacatgggaaaataactaaaacaaatgagtagcttctgcaattaaggatcctgagaatgacttccctgcttgatttg

SEQ ID NO: 644852 - DNA, 656 bp, Homo sapiens
ccggccatttacacttcttttgtggtggaatgtcatcagttaaggtggggcagggcatattcacttcttttgtgattctttagttacttcaggccatctgggcatatacgtgcaggtcacaggggatgcgatggcttggcttgggctcagaggcctgacacctatgtagacactcaacactctttttaacttgctcagtccctgatgaccatgtcagaccaccaccactgcttccactatgcggtcaccaacatgacccaacaggtttcaccactccatgcaaggctgctactcttgccatcatctctgccacctgatgcaggtagtctttcccctactcaagctctgaggccccacaccaggccgtctgctctgcccctctttgcagatgtcctagttattctgtttggggtctaatactaaccatttccccccataaacacacacacatacacatacatacacagtgcatatgcctctcttttttgaacttagctggttgattttttttttttttagacaccagtattaattgacaatctggtgactttaggatttaattataaagaaagaaggaaaggctttttttwaaaaaaaaatccaatctaaacacttttagctgaagaaattcagtacttttatgtttattgaaatta

SEQ ID NO: 644853 - DNA, 535 bp, Homo sapiens
aattaataccaattcttcacactatttcaaaaaaaaaaaaatagaagagcaaggaacattttctaactcattttgtgagggcactattatactgataccaaaactagacaaagacaccacgagaaaaggaaattatagactagtatctcttatgaatatggaccaaaaaaacttcctcaccaaaatgccaccaaactgaatccaaaaacattaaaaaatgaaaagaattatgtaccataatcaagtgggatttatctcaggaaagaaaggttrgctcaacatctgaaaatccattaatatagcaaatgaataaaaaaaattatataagcatctcaatatatgcagaaaaaacatttggcaaaatccaatactctttcatgataaaaacattcaacaaagtagaaaaagaagggaatttcctcaacctagtaatgggtgtctatgaaaatatctcagctaacacaacatactaaatggttaaagactgaaagcttgcctcccaagagcaggaacaagacaaggaagcctattcttg

SEQ ID NO: 644854 - DNA, 604 bp, Homo sapiens
gtcttttacacacactgaagatcatgtgaagaaagagagaagatggtcatctatacaccaagttaaacgaccctcagaagaaaccaaccctatggacaacttgatcttgaacttctagctttcagacctgtgagaaaataaattgctgttgtttaaatttaaaaaaacagtcttttaaatcatgtatgaaacaaagtgttgttacaaaccattgttataatagtactagcttttgtaattgcctatttgtccatctttactgagatctttatttcttcatatggctttgagttactgagtagtgtccttttatttcaacctgaagaactcccttgagtgtttctcttagggtatgtctagaagtaacagattaccttagctttcgttaatctgggaatgttrtaattctccttcacttttgaaggacaatttttaccaaatatagaatttggggttgatatttttatttattttagcactttgaatatatcagcccactgccttttggtctccagtatttatgatgagactctctttttttaatctcataatttactatttattatttttaaatgtttctagagatatacagtaattaaacata

SEQ ID NO: 644855 - DNA, 569 bp, Homo sapiens
gggtgctgtatatactgtgtactcttacttcccctggatccatgttattaactagtgtggggtaaacaagagagagagaacaagcactggtgtccaytgggcaactatttgcacacacttgtatctctcctatgagatgcccaaagagcagagatcttgtgtttctcttctttgaatgccgcatctgctagaatagtacctgatacacagtacatgctatttgaaggcatcacaccaaaatccagataaaattcttcggatgaattcagtgctgattattttccttttctgatattttatttctccactgtgagtgacgaaaactagtatcctattcaagaattattttaagagtgtagttagaatgaaatgatcaaaaatgaattcaagactgatggtcttaatcggggcacatttcataaacaagagcaaataaaatctccatggcaattttaatattttttctcctattgttaaaaattgtggcatgtcttaataggcatgcatagatgcaataagtgctcatatgtatgcaaagcttgctctgataattatatattactgagtca

SEQ ID NO: 644856 - DNA, 520 bp, Homo sapiens
gtcttagctctaaatttgtctagaaatataaaacatagatccaataaatattgcataaatgcaagtctccagtgctaaaagtctcaataaatgttactcaaattttttatttattctggctattttgttgttcattagcatttctttctactattaaaatggtaaagaaaaagctaaattctactgaytttttcctacccttacagctttagtaaagtattattttgagtcactataatcacagaatagaccaaaatgaatttttaaaaaagtctgctcaggtaactactcttgattacagttttacattttgttcatttgttggaattgaaaacaggtttatctggtcaaaatccagatggcctgaatcttctcttctactcctgtctctcagccttgatgttccttcaccccaaaataacccatgttattggtttcttgtgtatccttcacagataccctcaaataatttttggaagaaggtgggtataaacagaaaaattaaatcactgtgtgaggc

SEQ ID NO: 644857 - DNA, 635 bp, Homo sapiens
agctgacattttaactataccagaagctacatatgcagtatctcatgtagtttttcagcaaccttccaggttagacactactataatctccagtttaccaatgtggacactgaggtcagaagagagtaagtgacctgcaaatgtcactcagccggtcagtggcagagacaartctcatggccagtggacggcacagctcctcttatgctcatcctgtgacaattgctctgcaatgggagccagccatggcagccagcggagatgctgctgaggaagacaagcttgcattatcaatgcctgtcatcagaagacagaagggacgctcttcccactgctcagtggccgagggctgcctctcctatcttgagtgtttatgctgcgtatctgcaatcaggagaaagaagcagggtgaggttacttgaactttagtttggagagggaggcagagactaattagataaatgtgtaaaatgccaagcttctgacaccttttcctttcccttgccctcttctctctcaagctcagaagtagctgatgaggggtagtttggtgggggaaagaatcattccttatcattttcttcaatcagctcctgaattgtcctaatcatcttctctgttattgtcctaataac

SEQ ID NO: 644858 - DNA, 635 bp, Homo sapiens
agctgacattttaactataccagaagctacatatgcagtatctcatgtagtttttcagcaaccttccaggttagacactactataatctccagtttaccaatgtggacactgaggtcagaagagagtaagtgacctgcaaatgtcactcagccggtcagtggcagagacaagtctcatggccagtggacggcacagctcctcttatgctcatcctgtgacaattgctctgcaatgggagccagccatggcagccagcggagatgctgctgaggaagacaagcttgcattatcaatgcctgtcatcagaagacagaagggacgctcttcccactgctcagtggccgagggctgcctctcctatcttgagtgtttatgctgcrtatctgcaatcaggagaaagaagcagggtgaggttacttgaactttagtttggagagggaggcagagactaattagataaatgtgtaaaatgccaagcttctgacaccttttcctttcccttgccctcttctctctcaagctcagaagtagctgatgaggggtagtttggtgggggaaagaatcattccttatcattttcttcaatcagctcctgaattgtcctaatcatcttctctgttattgtcctaataac

SEQ ID NO: 644859 - DNA, 548 bp, Homo sapiens
aaataacatcttgacttcattatgacatgttccagattaaaaagcaccattacatacaatcatacacccaatcaattttcaagcacctagaaaaattgtgttcytgaataaaaatcaccttagagaaatataaaaattcagggcaatcctaaatacaaggtcactctgttgtctttggtgcttttttatataacctgaagagaaaatcatggaaaggcagagatttggcagcaaagtatatgcactctgatgtttgcagagagagagagagaatgttatgtcacttttattccctgctttccaaagcagccctataacacaacgccaggcaacttctccaggctggcttaacattctccctggataactttcaaagaaatccactatgaacctgggaaaacgtcagtccctacagaaatacagaaaggaacagtcatcccataccaccaaaaggagggaaagtttatctgcaacctaaaccaagtggcagtcaatggcaagtaaaaaagaaagagggctgtaattctgactccttgaattagacagag

SEQ ID NO: 644860 - DNA, 548 bp, Homo sapiens
aaataacatcttgacttcattatgacatgttccagattaaaaagcaccattacatacaatcatacacccaatcaattttcaagcacctagaaaaattgtgttcctgaataaaaatcacyttagagaaatataaaaattcagggcaatcctaaatacaaggtcactctgttgtctttggtgcttttttatataacctgaagagaaaatcatggaaaggcagagatttggcagcaaagtatatgcactctgatgtttgcagagagagagagagaatgttatgtcacttttattccctgctttccaaagcagccctataacacaacgccaggcaacttctccaggctggcttaacattctccctggataactttcaaagaaatccactatgaacctgggaaaacgtcagtccctacagaaatacagaaaggaacagtcatcccataccaccaaaaggagggaaagtttatctgcaacctaaaccaagtggcagtcaatggcaagtaaaaaagaaagagggctgtaattctgactccttgaattagacagag

SEQ ID NO: 644861 - DNA, 548 bp, Homo sapiens
aaataacatcttgacttcattatgacatgttccagattaaaaagcaccattacatacaatcatacacccaatcaattttcaagcacctagaaaaattgtgttcctgaataaaaatcaccttagagaaatataaaaattcagggcaatcytaaatacaaggtcactctgttgtctttggtgcttttttatataacctgaagagaaaatcatggaaaggcagagatttggcagcaaagtatatgcactctgatgtttgcagagagagagagagaatgttatgtcacttttattccctgctttccaaagcagccctataacacaacgccaggcaacttctccaggctggcttaacattctccctggataactttcaaagaaatccactatgaacctgggaaaacgtcagtccctacagaaatacagaaaggaacagtcatcccataccaccaaaaggagggaaagtttatctgcaacctaaaccaagtggcagtcaatggcaagtaaaaaagaaagagggctgtaattctgactccttgaattagacagag

SEQ ID NO: 644862 - DNA, 548 bp, Homo sapiens
aaataacatcttgacttcattatgacatgttccagattaaaaagcaccattacatacaatcatacacccaatcaattttcaagcacctagaaaaattgtgttcctgaataaaaatcaccttagagaaatataaaaattcagggcaatcctaaatacaaggtcactctgttgtctttggtgcttttttatataacctgaagagaaaatcatggaaaggcagagatttggcagcaaagtatatgcactctgatgtttgcagagagagagagagaatgttatgtcacttttattccctgctttccaaagcagccctataacacaacgccaggcaacttctccaggctggcttaacattctccctggataactttcaaagaaatccactatgaacctgggaaaacgtcagtccctacagaaatacagaaaggaacagtcatcccataccaccaaaaggagggaaagtttatctgcaacytaaaccaagtggcagtcaatggcaagtaaaaaagaaagagggctgtaattctgactccttgaattagacagag

SEQ ID NO: 644863 - DNA, 498 bp, Homo sapiens
ctggttcaccagtaacatcagtttagccctaaatattgtcataagttctctgacaggctcatgtgatttaagctggtgctctgtcaagactagacttaggcrttttatcctttttatgacattatgtatgttgaagagaatatatgaatatattttatatatatgaatatatataaaaccttcattatcacattattctcaatccagcattttttcagcccctgatttcatattagttcagcattcttatatctttacagattttcatctaagactgcatttttattgttttatataatcagcccccctaagatcaacatgtccacattttttggcaaagacaaaggctactgatttcaggaccattattttcctttttcaaaagcacaaacccaaactgagaaataaatcaagagaaattctcctcttttctatgctaatttagaagtcgagtctttatttcttttcaaacccaaagagaatcagacatacaatatg

SEQ ID NO: 644864 - DNA, 639 bp, Homo sapiens
tataaaaaatttaaaaatcattttcacatttgcactagccagatttcaagcatttgttaggcacatgtggctagtggctatatattggactgcccagaactggagcatttccatcattacagaaagttctattgraaagtactggtcaagatagatattttaaaactccaagtaaaataaatagcacaataaagggaaaattcacatgtaggtctctataagctactttgcattactccgtttaaaataagaggcatgtgatcagtagtaagtcttgacctacttttcaataactgtaattaattttccttcaactgaaattccctagaattacatttactatccttaaccatgaaataaccattgaaaaatgcccaaatctgcttatataaaaaaggtacatactttctaaatttatctgtattatcaaggccatactattgtttgtctcaattttattaaaacatcccccaaaaaagtcaattttggggccctacgccatagcacaggaggtgataaactgcttttgctaggtctggcccaaaagaagaggctgcggtgatcatttaaggtctatttacattgtgcctgaactttccatttagtctgtatacaggcattttatatatgacttctgta

SEQ ID NO: 644865 - DNA, 639 bp, Homo sapiens
tataaaaaatttaaaaatcattttcacatttgcactagccagatttcaagcatttgttaggcacatgtggctagtggctatatattggactgcccagaactggagcatttccatcattacagaaagttctattgaaaagtactggtcaagatagatattttaaaactccaagtaaaataaatagcacaataaagggaaaattcacatgtaggtctctataagctactttgcattactccgtttaaaataagaggcatgtgatcagtagtaagtcttgacctacttttcaataactgtaattaattttccttcaactgaaattccctagaattacatttactatccttaaccatgaaataaccattgaaaaatgcccaaatctgcttatataaaaaaggtacatactttctaaatttatctgtattatcaaggccatactattgtttgtctcaattttattaaaacatcccccaaaaaartcaattttggggccctacgccatagcacaggaggtgataaactgcttttgctaggtctggcccaaaagaagaggctgcggtgatcatttaaggtctatttacattgtgcctgaactttccatttagtctgtatacaggcattttatatatgacttctgta

SEQ ID NO: 644866 - DNA, 594 bp, Homo sapiens
caaaaaccaacatcataggcgaacccagaccaagtcatggagttaaactactttttgttttatttcatcactctgtattttcttctctgcatttggataagtaagcatcccattaaacatttctcttttttttgagatggagtctcgctctgtcacccaggctggagtgcagtgatgcgatctcctctcactgcaacctctgccttctgggttcaagtgattctcctgcttcagcctcccaagtagttgggattataggtgtgtgccaccacatcagctaatttttgtattwtcagtagagatggggtttcaccatgttggccaggctggtcttgaactcccaacctccagtgatctgcctgcctcggcctcccaaagtgctgggagtataggcataagccacgatgcctggcccgttaaacatttcttttaaaacattttaattgtttatatctttttatcttttctatgtcgcttttgaataataagcatgcactcgttgctaaattctaagctattttatttaaataaaaaatgtagaatgacttcattcatttcacactaaaatctaagcatttagagatgacaaactct

SEQ ID NO: 644867 - DNA, 595 bp, Homo sapiens
cctggcagtttttaaagttgattaatagtgttgtccaaactttagtaaatagttyggtaatttgcatatgccaatcatggtgttttgtcctaaccatgtacctattctgtactttgaattccttaataatgttctctaaatagactgcctctttccctaacattattttaaaataaactttatataatgaacatcatagggaattcagtgtcatttgccttaaaaatgaaaactatagtgtgcacctgtaatcccagctactcaggaggctgaggtgggaggatctcttgagaccaggaggtttgtggctgcagtgagctgtgattgcaccactgcactccagaccaggtgacagagtgagagagcctatctcaaaaaaaaaaaaaaaaaaaaaagagtacaacatttgacatagggaggtggcatttataaacccatttcttgtgagttagtttactgtggatcaggcttctcagaaattggtcagcttcgggattacttttgataggaaagcactactgcctagaaaacaggcctctggcatcagcctttcaaagccacacattcagtaagcatcaagtttgactgtgttgtt

SEQ ID NO: 644868 - DNA, 595 bp, Homo sapiens
cctggcagtttttaaagttgattaatagtgttgtccaaactttagtaaatagtttggtaatttgcatatgccaatcatggtgttttgtcctaaccatgtacctattctgtactttgaattccttaataatgttctctaaatagactgcctctttccctaacattattttaaaataaactttatataatgaacatcatagggarttcagtgtcatttgccttaaaaatgaaaactatagtgtgcacctgtaatcccagctactcaggaggctgaggtgggaggatctcttgagaccaggaggtttgtggctgcagtgagctgtgattgcaccactgcactccagaccaggtgacagagtgagagagcctatctcaaaaaaaaaaaaaaaaaaaaaagagtacaacatttgacatagggaggtggcatttataaacccatttcttgtgagttagtttactgtggatcaggcttctcagaaattggtcagcttcgggattacttttgataggaaagcactactgcctagaaaacaggcctctggcatcagcctttcaaagccacacattcagtaagcatcaagtttgactgtgttgtt

SEQ ID NO: 644869 - DNA, 605 bp, Homo sapiens
acattaagcttggccgggcatggtggctcacgcctgtaatcccaacactttgggaggccgaggcgggtggatcatctgaggtcaggagtttgacaccagcctggccaacatggtgaaacccatctctactaaaagtacaaaattagccagctgtggtggtgcaatgcatgtaatctcagctgcttgggaggctgaaacaggagaatcgcttgaacccgggaggtggaggttgcagtgcgccaagattgmgccattgcactccagcctgggcaacaagagctaaactccatctcaaaacaaacgagcacaggaagagaccccactctctggctgcttgacatagatgaaatcattcctcactgcccttctagaaaataacagatcacgagagagctaagactaaaccaggtgactttggtttgcctgtacccattttctttcttataaattcatgcccttctcttcccgcatttttagaacattcttagtaatttctccacataagcaaccctgatttttttttcagctttgaaattgtctgcaggggcttctttaagctgcacttgctttgtcctctacaaaaccacattctgttaaaagaacca

SEQ ID NO: 644870 - DNA, 605 bp, Homo sapiens
acattaagcttggccgggcatggtggctcacgcctgtaatcccaacactttgggaggccgaggcgggtggatcatctgaggtcaggagtttgacaccagcctggccaacatggtgaaacccatctctactaaaagtacaaaattagccagctgtggtggtgcaatgcatgtaatctcagctgcttgggaggctgaaacaggagaatcgcttgaacccgggaggtggaggttgcagtgcgccaagattgcgccattgcactccagcctgggcaacaagagckaaactccatctcaaaacaaacgagcacaggaagagaccccactctctggctgcttgacatagatgaaatcattcctcactgcccttctagaaaataacagatcacgagagagctaagactaaaccaggtgactttggtttgcctgtacccattttctttcttataaattcatgcccttctcttcccgcatttttagaacattcttagtaatttctccacataagcaaccctgatttttttttcagctttgaaattgtctgcaggggcttctttaagctgcacttgctttgtcctctacaaaaccacattctgttaaaagaacca

SEQ ID NO: 644871 - DNA, 611 bp, Homo sapiens
actaacatatgaaattccaatctaccatggtttttaccattctagaaaaaacaagtttgtgtcaacaaaatgcccctgtgaactgttccttgctttcacttattcgtttatttatttttgcttacaatgttcttatattttacgttatactggtatccaagggcagttataatttggctttaaatgttctgctgaattaaaggacctggacttaagtatctaaaaataaatagtcaaacatttacttttataagtgtaaccatttacattctcattggacttttgttgtcatttctcatgattaaataccttgtcaactattcccagtgaaatgtatacaaaggtgcccttgaaaggtttcaatcatatcatgttttttggcctgaaagctcctccccagcccccactccttacctccccaggagaccgtgaaagcagccttctagccccaccggccatgggatttgggttacgaacgttacgttttgttgaaaatggccccaaccattgataattaaagctatttgtgacacgtgtagcttataatgattaaatcrtctacagtcagaagcacaaatatcctgcacctgtaaagactttatttcctaaag

SEQ ID NO: 644872 - DNA, 612 bp, Homo sapiens
gtttttattttgagatgaggtcttgcactgtcacataggctgaagtgcagtgaaggcacaagccaccaaacctggctttttttttattttttataaaatagccaggggtcttactatgttgcccaggcttagttaggtttttaatgacttcctttaaaagtaaaaactttccagttaaccatttatatcatttttataaatttaatgccagttaagactagtaagacattctagtaccaaagaaacgtcaggttaggttaataaatattggcagttaatgaactggcgcatctgaatcctaatcctttgtaagtgattccaatataattttaaaaaatttaaaaatgttcaaacattcataaaagatgacagtcakaatgaactccaatcaccaatattctaaaatataagatttctgtcactccaagtaatcttaaatacatattattcagattgctttacattctcttaaatattgataataatgcttacttaagatgatacaataaatatgcttaagataatataatgtttaggccaggcgtggtggctcacgcctgtaatcccagcactttgggaggccgaggcaggtggatcacgaggtcaggagac

SEQ ID NO: 644873 - DNA, 580 bp, Homo sapiens
taactaggttttatgtttaattaattgggcaataaaacatctcaaaaactgagatttgagaatttcatagtatttggaaccttggacttttttttctttttgatattgcacctactgggaacctgccccactctacggttatgatccttcactccattagaaaacagaaaacatgtttataaatcatttgcccttgtgaggatgagctaattattctcttagtgtgaatggatttcagacattttattatgtataccagctgtgtacatataagactttatctctrtgcaatggttctctttgacctcattaaaagaatactaatcatcaagaagtagagtggaaaaaagagtgagacagggaaagcagtcctgattttccctgttcagagtgctgatcctgctaatcacctgaatggcatttagctctttggggtttgagggaagaactctataacaaaagtttcttgtgaccttcttcctgccttttcacttgaatgaaaactgtatcacatttttgacagtaagtataatctcaatattttatatttttgtcttgaaaacatacatataatttatat

SEQ ID NO: 644874 - DNA, 586 bp, Homo sapiens
gcagttccccctttgccttctcctatgattgtaagtttcctgaggcttccccagaagcagaagccactatgcttcctatacagcctgcagaacaatgagccaattacagctcttttctttataaattacccagtctcaygtatttctttatagcaatgaaaaaagtggactaacacagctagaaataccatatagcttccaccttgcttatgggaaaaattcttcttgaaaacctgagacttcacataagaagtctgactacttgatgttatctcgctgtagaggtcctgatgcactggacatgtcaattgtgagtgaaacttccttggaccagcccctctgacagctgactatcagtaggtgatttcaactgatgccataagaagcagaattgtccagcagttaactgcctaaatttctgaacctcaaaatcttgaggtatagtaaaatagctattactttaagctaccaagttttgtggtacacaactagactatgagagatcacaagatctgatgagaaagaatgatgaatcaaatgtgtcttaagttgatctttaagttattattgaatgagtaaataacca

SEQ ID NO: 644875 - DNA, 558 bp, Homo sapiens
accctaagccctggacctcctgtgctggatgatgagtcagccctggctggtctggatcctggggaaacagtctgaataaatcgaaatggacaagtggcttttaataacttacccgtttcccataataaaaataacagtgtccataacaaaagagtaatgttgatgtatcaaggaataaattaccttgtctgccaataggacttayggtgctttgccatgatgtttttcccaagtttaaaatagaaatggttggtggtgagttgtatgatgccatctgacattcatcaacactgaatggcttctctattttcctgaccccaacatgtatcccagtgagagaaacagactgccctgattatccactgaattccaaaaagtgatcatccgaggctcacctggtgttttcagtgagaagtttctttggaagaaggcttgtgtgtggtttctcactctgtgtgtgccgcagaggtctggatccaagtgccaggaagcctaggtcatttgtcatgggctagtgacctttggcaagcccttcaccccctggccctggtatcttag

SEQ ID NO: 644876 - DNA, 611 bp, Homo sapiens
ggattgtcatagagcaacatttggaaaggactgtaaataatcagaattttgtcctcaggaataaaaaggacttgctctcccaccatttgtaaaataatttaacgttcattgtctctgttcttattttctgtctgaaatatttatatctctggttctttcttaacttcaaaacctaaatgtggcacttgagatatttagctagtcaggatgaaccagggagaatatgacccaaaaaagatttcatggagaagaacatttcagtaacrggttgctctggctgagaggtattttcttacctcaaaagtcagggatactgaaacaccctttccattccatcaattcagagaagaggggatggtgtggctttaagacaggaaggtgcagaagaccttgtaaaaaagtgaatgagcaccacctctccagcatttgtgtacgtcagcagtttctcaaatagaaacagaaatagaacctttgaaatatggaagaggcagacacaaaagcttccatcactgccaagtaagaagaattttaagttcttggggcttcagcccagttataaggaagctcacatgtgctagatggatgagagcaacttcagatgagagccagga

SEQ ID NO: 644877 - DNA, 619 bp, Homo sapiens
atgactgataaatcaccataatacactgaatttctgattgtagttgaatctattcgtggaggttgtattctattccatttaattatcttttcattgagatgccagcataacacgttagtagttatggaggcattgtggcatttataaattgtggtcaaaaacacaacacataaaatttatcatgtcaactattttttaaatgtacagtagtgttaactatatgcacatcaatgtgcaacatatctgtataacttttcatcttgcaaaatgggaactctagatccattgaacaactccctgtggcctccctttagaccaagcttstccaacctgtgcagcccaggatggctatgaatgcagaccaacacaaattcgtaaactttcttaaaacataatgagatttaatatttatgcatggaccttttttttaagcttatcagctatcattagtgttagtgtattttatgtgtggactaagacaactcttcttctttcaatgtagcccagggaaactaaaagattggatacccctgcttcagattctgatgaccatcattctaccttctgtttctatgggcttgactactttggatacctcaaataagtgaaatgatgcatt

SEQ ID NO: 644878 - DNA, 619 bp, Homo sapiens
atgactgataaatcaccataatacactgaatttctgattgtagttgaatctattcgtggaggttgtattctattccatttaattatcttttcattgagatgccagcataacacgttagtagttatggaggcattgtggcatttataaattgtggtcaaaaacacaacacataaaatttatcatgtcaactattttttaaatgtacagtagtgttaactatatgcacatcaatgtgcaacatatctgtataacttttcatcttgcaaaatgggaactctagatccattgaacaactccctgtggcctccctttagaccaagcttgtccaacctgtgcagcccaggatggctatgaatgcagmccaacacaaattcgtaaactttcttaaaacataatgagatttaatatttatgcatggaccttttttttaagcttatcagctatcattagtgttagtgtattttatgtgtggactaagacaactcttcttctttcaatgtagcccagggaaactaaaagattggatacccctgcttcagattctgatgaccatcattctaccttctgtttctatgggcttgactactttggatacctcaaataagtgaaatgatgcatt

SEQ ID NO: 644879 - DNA, 619 bp, Homo sapiens
atgactgataaatcaccataatacactgaatttctgattgtagttgaatctattcgtggaggttgtattctattccatttaattatcttttcattgagatgccagcataacacgttagtagttatggaggcattgtggcatttataaattgtggtcaaaaacacaacacataaaatttatcatgtcaactattttttaaatgtacagtagtgttaactatatgcacatcaatgtgcaacatatctgtataacttttcatcttgcaaaatgggaactctagatccattgaacaactccctgtggcctccctttagaccaagcttgtccaacctgtgcagcccaggatggctatgaatgcagaccaacacaaattcgtaaactttcttaaaacataatgagatttaatatttatgcatggaccttttttttaagcttatcagctatcattagtgttagtgtattttatgtgtggactaagacaaytcttcttctttcaatgtagcccagggaaactaaaagattggatacccctgcttcagattctgatgaccatcattctaccttctgtttctatgggcttgactactttggatacctcaaataagtgaaatgatgcatt

SEQ ID NO: 644880 - DNA, 619 bp, Homo sapiens
atgactgataaatcaccataatacactgaatttctgattgtagttgaatctattcgtggaggttgtattctattccatttaattatcttttcattgagatgccagcataacacgttagtagttatggaggcattgtggcatttataaattgtggtcaaaaacacaacacataaaatttatcatgtcaactattttttaaatgtacagtagtgttaactatatgcacatcaatgtgcaacatatctgtataacttttcatcttgcaaaatgggaactctagatccattgaacaactccctgtggcctccctttagaccaagcttgtccaacctgtgcagcccaggatggctatgaatgcagaccaacacaaattcgtaaactttcttaaaacataatgagatttaatatttatgcatggaccttttttttaagcttatcagctatcattagtgttagtgtattttatgtgtggactaagacaactcttcttctttcaatgtwgcccagggaaactaaaagattggatacccctgcttcagattctgatgaccatcattctaccttctgtttctatgggcttgactactttggatacctcaaataagtgaaatgatgcatt

SEQ ID NO: 644881 - DNA, 571 bp, Homo sapiens
actcatttgagccactgtctcacttccaataggaygaatttaggtattggtttagacactatatgccaactatgcctgtgtgatgaatgggctaaggaagtgggagtgtggtcattccccttcttttatacccatagcaaagtgttaaaagtagattgtaggttttagtcagtaaaatctagtagtggtttctgattacatgaaagtcacagtcactgcagttgagaatatttaatatatttgtgaatgtaatccattggcttaaccagtaacaaaaactagccttatcactaatctgaatctcaacatgaccaaaacccaattttttatctcaatttaccccacgttaaccctcttctaatattgaaaacctccaccctccacatctctcttttccattcaaacaccaagtcctctactgtcttccttggtaacaacatcttctaggtaaaatatttgggaatacagtagtatccaattaacatggaatatctacattaataaaaaatgaaaggcgaaactttggggtaatcatgtaatgcatgatctcatttggtttatttattaagat

SEQ ID NO: 644882 - DNA, 583 bp, Homo sapiens
tatcaaagaccatttatcaattagctgccttacttcagcagtcctgtggagttctgctattgtatcacagagccctctagtggtcacaagactaatttcatcatgaatgcaaactaaaatagaaaatattaaaatattgcatatttttttttacctctgaatgagccttttcttcagcctgtaaaacaataaaaagaaagactttaactataaaaactattttcaattaattccacaagtataaatgaatacaataatcatgatgtactttttattatctactatgagaagaatagaatgaaatacattaagttattcaattgaaatagtacaagcaagttactttagaattttatataaatgtttcttaatatataaaccataaggtattcttaaaatataggtcatttgatccataatattcctttaagcaaaagacrgaattaaaagactctaagatgtaaatcataagcaacataaaccaaatagttataaaattatactctaaaaaagatgggtgcatgtaaacttaaaatattgaagtatctttcatacagattgtaggaaacagactccataaaat

SEQ ID NO: 644883 - DNA, 637 bp, Homo sapiens
tcaaacaaatacacattcagagatgataacactaactccatagtaaaacaatcgcccatgcagaaacccagaggagattagtttgtcctctccagctgacctatgctgggggacaaaaggactttcaaaaattattttgaatatgtttggatttctttctttaatttctttggaaattaaatttrcttggaaacagtgctataaagagttgatgtctccaaaggtgattttttttgttttatataaataaggttttgcttttgctagttgagcgcagttctaggcttttcgcccttagctcacacacaccccttctgcctgcttggactttaatggctcaagacagccttgagctcactgggaaaagaaaatgactgttaaaaattatccttgaaattggttatttggcaacattcttaattgtatggaaattcattaaggcatatttcatatataattagctcaaggttgttgattctacaggctttatggatttaaatctgattgataataaagtaaacaagagagtcgaatttaaagcgtggctctctcgggttaggacgagcttaatacagtgtacaaggaatttgaaagatctaggatatgtgtcttaatcaacgttaagtagaatggataa

SEQ ID NO: 644884 - DNA, 598 bp, Homo sapiens
actctgtcccctgtatttgtggtatatcagtttggcttttgtaatagacagacctgaaatagtggtgtcttgaacaaaatagaagtgtatttctctctcaagtgcagtcccagaagtcatgcaagtacagcagttctgtagtgccaggatcctggactccttctagctttttgctcaatcacagctgcctcagctccagttctcctaacacattccagtcagcagggacaagaagagaacagaaaggcacatcctctccctttgagaacacaatctagaagttgcacacagcaaccttgctaatatsttattggctagaattccatcatatgtatacaccaattgcacaagaggcccagctaaaaattctgcttccatagaaacaggagagaggagataccagggaacaactggctgtttctgccacagacccaactctaaaaagtcatttgtgacaagccttcctcttgtctcctcaattcaactccaactattaatactttctagcactttgtataatttcagggctcctgttctacctgaactgcatcctcatttttgagggactaagtcactggccactctaaagagggcaagc

SEQ ID NO: 644885 - DNA, 598 bp, Homo sapiens
actctgtcccctgtatttgtggtatatcagtttggcttttgtaatagacagacctgaaatagtggtgtcttgaacaaaatagaagtgtatttctctctcaagtgcagtcccagaagtcatgcaagtacagcagttctgtagtgccaggatcctggactccttctagctttttgctcaatcacagctgcctcagctccagttctcctaacacattccagtcagcagggacaagaagagaacagaaaggcacatcctctccctttgagaacacaatctagaagttgcacacagcaaccttgctaatatcttattggctagaattccatcatatgtatacaccaattgcacaagaggcccagctaaaaattctgcttccatagaaacaggagagaggagataccagggaacaactggctgtttctgccacagacccaactctaaaaagtcatttgtgacaagccttcctcttgtctcctcaattcaactccaactattaatactttctagcactttgtataatttcagggctcctgttctacctgaactgcatcctcatttttgaggractaagtcactggccactctaaagagggcaagc

SEQ ID NO: 644886 - DNA, 534 bp, Homo sapiens
acttttccaatttctgttctctattctcattgtcttggcttgagtcctgtgcttacccctgaatcaatgacacctaktgccagggaaggagggagctcctcccagagatggaaaggaactggcttatttaccagctgaagtgggcccagaaattgagaagttaccacagtgcctgccaaaagactaaagtgtggttggttgtatagtggggtctgaaggcaagttttgacttaggatagagcttatgatgatatattgaacaaaatctaaatatgacacaatgtacatgaactattcctagaaattttttattacttatttaaattagtaatattttacttttcagagtatttgcacaaagatgaatttcatctgcttcttactaccatttagaggggtggccaggaaatatatttctattttatactctttttattataatttactatgtgggccattcctataatgcatttgccaagtatctgcaaaataatatagttatttattatcatcctataacaatattgttttatt

SEQ ID NO: 644887 - DNA, 534 bp, Homo sapiens
acttttccaatttctgttctctattctcattgtcttggcttgagtcctgtgcttacccctgaatcaatgacacctagtgccagggaaggagggagctcctcccagagatggaaaggaactggcttatttaccagctgaagtgggcccagaaattgagaagttaccacagtgcctgccaaaagactaaagtgtggttggttgtatagtggggtctgaaggcaagttttgacttakgatagagcttatgatgatatattgaacaaaatctaaatatgacacaatgtacatgaactattcctagaaattttttattacttatttaaattagtaatattttacttttcagagtatttgcacaaagatgaatttcatctgcttcttactaccatttagaggggtggccaggaaatatatttctattttatactctttttattataatttactatgtgggccattcctataatgcatttgccaagtatctgcaaaataatatagttatttattatcatcctataacaatattgttttatt

SEQ ID NO: 644888 - DNA, 623 bp, Homo sapiens
tttagggttcagtaggagattttattttgtattgctctagtttcaattgaggtttcccttagccctttgtttttaaatatctcttactctgaaatgatctgcccttgcaaccatttataagcattccagattyagtacagcttccaataaagggaagtcacttagcggaaaagtgaccaagcgtttctgctttcttacaaaagctctgtggtctccatagcatcattttgtgtcatcttaaaatgacttgtagccaggcagcagatgtcatctattctaacagcaaaagctttttgcaatgctcaaccattcctgtttttaaccttaattttaatccttcagtaccaactgttaaagagaaaaaaaatacaaaacgtaagtttcccaggactaggcttttcctgagtcacttcagcatgggtcaggggctcatacaccaaactcctaaccattcatggaagtcggtgcccctactccagccacttgcataccttctaggcatctaatgtagggagagtagcccagtagtcagggcagccctgttgattcctgagtttgaaacctggctgttcatgtatgacaaccagtaagttattaaaaccttactgagcctcatttgtttc

SEQ ID NO: 644889 - DNA, 623 bp, Homo sapiens
tttagggttcagtaggagattttattttgtattgctctagtttcaattgaggtttcccttagccctttgtttttaaatatctcttactctgaaatgatctgcccttgcaaccatttataagcattccagatttagtacagcttccaataaagggaagtcacttagcggaaaagtgaccaagcgtttctgctttcttacaaaagctctgtggtctccatagcatcattttgtgtcatcttaaaatgacttgtagccaggcagcagatgtcatctattctaacagcaaaagctttttgcaatgctcaaccattcctgtttttaaccttaattttaatccttcagtaccaactgttaaagagaaaaaaaatacaaaacgtaagtttcccaggactaggcttttcctgagtcacttcagcatgggtcaggggctcatacaccaaactcctaaccattcatggaagtcggtgcccctactccagccacttgcataccttctaggcatctaatgtagggagagtagcccagtagtcagggcagccctgttgattcctgagtttgaaacctggctgttcatgtatgacaaccagtaagttaytaaaaccttactgagcctcatttgtttc

SEQ ID NO: 644890 - DNA, 518 bp, Homo sapiens
actccttcatgggcttgttgcgacaataaaatgagataatatatttcaaatgttaaagagtgctacataaatgtcaagtaggaaaaaaatgaattccacagtactgacttccagtgagcacttatgaatcctattaattaaaaaggcttagacaacttcatgacatttaactgcactatagataattcacgtatatggtccttgagaatctgagctgttctgggaaatatgataaaaatgcatgatatctgccaggaagattgcagtcttttgagagaaactactttaaaccaaaagcatgctttgtccgggtcttagagagcaggcagggtgagatkcgctttgcagatcacacaccagctcggccatttcctgatgctcagacgaggacttttcttcaaggaatggggctgactttcattacattgcacttccctgttctcagggaacacaactggatctgcagcagatagctcctcacatttaggaaacagaatcggctttttaaatgttttgtt

SEQ ID NO: 644891 - DNA, 450 bp, Homo sapiens
gaattcttcctctatgggactattttcttaagggcatcacttggtgtgaatgtggttcctaatgagctgatactcctctaggaggtcaagttgaaagatcaagttgaaagatagtatgagagtgtctctgttgacattggtttgaggttatctctgacactgggggattgctgtagcctgagctttgtaaaattccattaaatggtagttttacaaattgccattagctttcctatcatatgcagtgcttaatggaaaagagctggactagaggccccaaaactctttatactggctgagctgctaacccaccaagtgttgtctccaaagtcaagcccccttataccctcagggggcaaaacatctagagttgggggacacaggagtyagaagcaactgcttcagagtttccatggagggggtcaactgccctccctggaattgtaacct

SEQ ID NO: 644892 - DNA, 611 bp, Homo sapiens
cacctgcttaattacagatgttgctcaggccactcaacctctccctgcctgtaaygatggcccttctagccgcgacactaccaggccaactagaaacacctggctctgcctggagaagaacctattttgcttttatttttaatttttttaaacataaatcaaaccagcgtcttttggatttaacattcacttcctgtactgcatgaggccttcgtcagccttctttgttttagaaatgatggggtttttttttgacttaagaaaaaaataccctctgtgatttgtttcccttgaatcaatctgtcttttggacttaatttaaatcagacttaccctccctcccttccactatttttatgctgaacttatattgtatatcatgggtcatatgtccctatgatccagctttaaaataagtgtatggccagtgcctttcagcccctgggcacccttcactgactttgtctttgccattttttcccccaatgggggaaagattttgtaaatatcttaaattttgtattattttcttgcatttctttatgattttagcacctaaatgtatgctttcccaagtaatgtattgttttgttttacctgcttttgagctt

SEQ ID NO: 644893 - DNA, 611 bp, Homo sapiens
cacctgcttaattacagatgttgctcaggccactcaacctctccctgcctgtaacgatggcccttctagccgcgacactaccaggccaactagaaacacctggctctgcctggagaagaacctattttgcttttatttttaatttttttaaacataaatcaaaccagcgtcttttggatttaacattcacttcctgtactgcatgaggccttcgtcagccttctttgttttagaaatgatggggtttttttttgacttaagaaaaaaataccctctgtgatttgtttcccttgaatcaatctgtcttttggacttaatttaaatcagacttaccctccctcccttccactatttttatgctgaacttatattgtatatcatgggtcatatgtccctatgatccagctttaaaataagtgtatggccagtgcctttcagcccctgggcacccttcactgactttgtctttgccattttttcccccartgggggaaagattttgtaaatatcttaaattttgtattattttcttgcatttctttatgattttagcacctaaatgtatgctttcccaagtaatgtattgttttgttttacctgcttttgagctt

SEQ ID NO: 644894 - DNA, 486 bp, Homo sapiens
gtttacctaaaggagatgacctagccttggaagctacattgcgtccctgctattgattctatttgtcaaggccaacacaaaagccatcccaggttcaaggsgggtggaggggacaaagattccaccttttgatgcagcgatgtcaaggttctttaagagcaagtaggagaagaaattctatggttgttcttttggaagaaacaatctgccacattgaggcacccagggcctagcaagagtggaatgctgttatcacacccagcttggcctgaaggccaaggagaggaaatagtgacagctgaaccaatgaaagagagcaaactgataggagctataatcctgaaggtaaagccactggctgaccacagtatcaagggcagggagaatgtggggtaagaaatactccaacatctctattctctgactctgatctcctgtagatgccttccatcaagaaactataggacaaaatgggcttcatgaggt

SEQ ID NO: 644895 - DNA, 535 bp, Homo sapiens
taaaaatagtttctaaaagggcttacacagtggctacctccctagcaagaaacagaatgtataaatggaacatgcatctaattgtcagaccccatcctcagttcttttgtgtaatatgaaaaagaaatgttttaaagcagtcaagatatttagctctaaaaattagccagtaagaagctacttggataaagttaagtacgttttttttttctttttacaaacctccctttgaaataaaccagacagaggttcctttcacttccatgggagttttcagcaaaaggagaatggaagacttcataagctctaaacagccttggaggccattcatagacttcctagcattctctgccatttcccagtgctaacggccctgaatgtagcttctcactatcgttattgtccctcttgggcactagcctggcagctgagctctctgaagcttatagcctttggagtatgggaagaagttaccaacagacacartcacaggctgcacagagaagagatgagccaggaactgggggcagtggga

SEQ ID NO: 644896 - DNA, 583 bp, Homo sapiens
tatatatttgaaacaaaggctcactctgttgcccagtctggagtgcagtggtacgatcttggctcactgcaacctccacctaccaggttcaagcaattcttcctcagcctccctaatagctgggattacaggcatgcgctatcatgcctggctaatttttgtatttttagtagagatggggtttcaccatgtcagccaggctggtcttgaactcctgacctcaagtgatctgctgcctcagcctgccaaagtgctgggattacaggcatgagccactgygcccagcctagacaaaaatatattcttaataataaagaaatttaagaagccagtatttaagaagccaatttaaaacattaacctcttcttaagtttatattttaccatgcagactacttttgattatggtctaacagaaacagtaggaaatttggcagcctttatattttgactctagttaagatactgcttgtttcaattttttttaaaggacaaaaagtcacctattctggacgctgaaaacttatcactcacatctggccctgtttatcttgaagcagtacagaagagtaatatgacttct

SEQ ID NO: 644897 - DNA, 583 bp, Homo sapiens
tatatatttgaaacaaaggctcactctgttgcccagtctggagtgcagtggtacgatcttggctcactgcaacctccacctaccaggttcaagcaattcttcctcagcctccctaatagctgggattacaggcatgcgctatcatgcctggctaatttttgtatttttagtagagatggggtttcaccatgtcagccaggctggtcttgaactcctgacctcaagtgatctgctgcctcagcctgccaaagtgctgggattacaggcatgagccactgcgcccagcctagwcaaaaatatattcttaataataaagaaatttaagaagccagtatttaagaagccaatttaaaacattaacctcttcttaagtttatattttaccatgcagactacttttgattatggtctaacagaaacagtaggaaatttggcagcctttatattttgactctagttaagatactgcttgtttcaattttttttaaaggacaaaaagtcacctattctggacgctgaaaacttatcactcacatctggccctgtttatcttgaagcagtacagaagagtaatatgacttct

SEQ ID NO: 644898 - DNA, 618 bp, Homo sapiens
aacagtgatgagagacacttgccagttctgctgctttagaaatgtttcagtaagaaagtatagaatttcatttctgcttttatktaaagaagtttttaatatctgtgttatgtacctttttttccctctcctgatttcattgcactgaagcacattttaatgaaagccttagaaatgctgaatcactgtgcctttctcatggatccctagactgggggtagaggtggaaatggaaattcccaaatataggttgcaaggccaagctccacatttatgtctgaagaaatttcgtaaatgttcaatgttgatcaatctttattactttatagctgtgaaagttaacatgtttattaactcttccagaattggtgagtgtaaaagcagattgtgcaaaccacctctttgcatcctaatgtttctgaatgccttaatgtttctttgtcaaacaatgttgaaaaatcttttttatctgcatagagtgatgtataaccagttgtccaaactgtgccattttttaaagtagaagtgggcactcctaataattatgccaggttagtaggcataaaccaaggtagtctagagcaggcagggagttttgacaccttggatccaaatgct

SEQ ID NO: 644899 - DNA, 618 bp, Homo sapiens
aacagtgatgagagacacttgccagttctgctgctttagaaatgtttcagtaagaaagtatagaatttcatttctgcttttatgtaaagaagtttttaatatctgtgttatgtacctttttttccctctcctgatttcattgcactgaagcacattttaatgaaagccttagaaatgctgaatcactgtgcctttctcatggatccctagactgggggtagaggtggaaatggaaattcccaaatataggttgcaaggccaagctccacatttatgtctgaagaaatttcgtaaatgttcaatgttgatcaatctttattactttatagctgtgaaagttaacatgtttattaactcttccagaattggtgagtgtaaaagcagattgtgcaaaccacctctttgcatsctaatgtttctgaatgccttaatgtttctttgtcaaacaatgttgaaaaatcttttttatctgcatagagtgatgtataaccagttgtccaaactgtgccattttttaaagtagaagtgggcactcctaataattatgccaggttagtaggcataaaccaaggtagtctagagcaggcagggagttttgacaccttggatccaaatgct

SEQ ID NO: 644900 - DNA, 605 bp, Homo sapiens
cctggtttaaatcccctgggctaagtgtaaatcaagcaacttggagctctgctcttacaaggagaaatgttgggggattccagaaacaccagggtcattttacctcttaatagtttctccaagccatactggttcagaagcaaagacctcatagttccatgaaaaatttgtttttcctcaaaactaaaagaaatgaagccctaagggtctcatttcacaaaattctcccctagtccagaagtgaaatatcaaagagttggaggtactcacagctaactttctacccagtcagggttctgcayatggtgtccctgggagaggacacccagcctgtgctctactcttccagtactcaggggctcagtctctaaggtagtactaagtactactgccccaaatagaatgagctgccttagtactggcattctatttgggcagattattgctaggaggttcttccttaaacacattaacatctgcctcccagaaacctctgtgtattgttttgaattccatccttggaagccacacagaataagtctccctcttctatacagcagtcctttcccatttctatagtcagccaccaaacctctgggtctttg

SEQ ID NO: 644901 - DNA, 501 bp, Homo sapiens
attttccatcattgctctttctcctgtgaaggagctacttgaacatctcttttctgtttgccctaagtctagttagcaaggaagtgtgagcacctgcatccctggcaggctcacccaagagtgtgaaaatccacaggacgttatttcagttcggtaacaaattctcttagaaaaatgaattttcaagatagttctcttgccagaccaatgaaatccatatagcttgagagacagacactctccttggaagacagacactttccttggaaaacagagaatacaaagaaaattagtttttctaacacttaattcatgtatataccagtttgttctctctctctctctctctctctctmtatatatatatatatatatagagagagagagagagagagagatatttatacatttttatatacaaatataaaagtttaaatttttccttgcctcttgtttagtgtagtcattttgataggataaatcccattgtggattttgatt

SEQ ID NO: 644902 - DNA, 588 bp, Homo sapiens
tctgcttctcactcatagtagagcatgtaagtggataattactacagagtgcagctccatggacttaagaaagaggtaaagaagtgaccccttcagaaagyattgtaggacactgatgtaaaggcatgattcattttcactgccttagggcgtgtgatacaagaaagagcactgttttcttctgctggctggtaaggttgggctctgcttgtgggaatgagacagggctgtgaaccatctgtgatgggcaggtaagatgaaggctgacatttcaagaatattcctaatgaaatcaaacctttaatttggaaaaataactgtataaagtgattttaagcattgaggcgatgttaggtgtgtcaggatgaatactcctctgttcaaacttcctgaccctcctcctcccataattttttttttaactttcctgttcctcctcctaaaatagtctccaggaaaaatgatggcattgatctattttagaaagcatggcattgttccatcatactcccataaacttatttttaattatgaaaatcttctagatcaatcttgctttccctgtggctttagtaagctttttcttcc

SEQ ID NO: 644903 - DNA, 552 bp, Homo sapiens
aagccaaactataattagctctgtggccttcgacaagtcacttaatctcccaagtaggctcttctttttcaagctaggtctttgattctaggtgtggytcagtcagacccaagagtgaatcctggggtcatctttgatgtttcattacctctttatcagccctccccactcctcagacagcctatacaaatttgttaatttttcattcacaatattttctgtaggcattgcttttttttctatccctaattttagtttaagatcttaccaagtatcaagtcatcattttgagggtcctatcagtgggcccttggttaaggaagaggaacaaagagacagagcccaaataacaagttaaggggttgcccttgaggcagtgaaggtgtgcaggattgacttgagagaaagagtgactgaatctcaggagagccccagttcagcccatagtctcagtccaaccctggctctgaggtccagtggataatatattggaagaaaggaaaggaaaaagagacagaaaagagaagtaaaggtcaaagcagggaaagaaac

SEQ ID NO: 644904 - DNA, 552 bp, Homo sapiens
acaagattgtcttgtggtaggacatagaaatatgctccaaaactttaatatgaaagagccttatggcactaagcaacttggatggaaggtggtggttgagttgaggaaggaaggraggagaaccatcttctaaccagaacagttccactttcatctcctttaaatatatgtttgtgttctgcacaatattacatatggaaaaaataagtttggagatcacagaaacccatcaaactacacaagcatctaggatatcttatgtgaaaaagtttatctaaatccaaaatctaactaaaatagcagcgcaagctctatgcaataaatattctccaggcctgaaacaagcagatggagtactcattgccaatcagctttttatttttttcccagtttttgctaactataaatgtattctgatttgcaaccactgcttaagggagacattgcgtcttgccacatttcatttgtagaattactttaaccaacagtgcctgacatttactttaaacaaataaaacctatttttgtatcacatagaatttgaaatttggg

SEQ ID NO: 644905 - DNA, 408 bp, Homo sapiens
gtacttttatcattattttatgttacaggtaaagacactgagacaaagaaagatatagcaacctgcccaaggttttacacatagcaagtggcagaaatggggtttgattcctgactcaccacacccaagagcagcactgtccaatagaactttctgcaacgatgaaaattctctacctgttgtcggatatggtagccactagccacatggagctattgggcacttgaaatgtggctagtgccacatttattattaattgaattcaatttacatttaaattgccacttaaatagtggcaatttaatcaytggacggcacagttctggagactgtaaacttggcctttgtgctttgttaaagcttcagctgcttttctacagtattttgtctttccaaaacgggaagggt

SEQ ID NO: 644906 - DNA, 550 bp, Homo sapiens
gtgctaataattgttcaaagcacatgagatggtatagtagcgaaccaaagatcccagccgtcatagagctaagttaaacagtaaatarcaaaaacaacatataagtaagttatttgtatattggaaggtgataaatcattttgtgaaaaagaaaaatatagggaagttgaaggggtcaggagtgctgagggcaggcgtatttagacatttcacacagtgggtagaatggtcttcactaagaagatgacttccctgcaaaccttaaaggagtgtgaaggttcgttacacaaataccttgggaataatataccagatagaagagccaatttaaaggttctaaggtgaaacatgcctagaatattcgagaaagaatgaggaggccaatgcatcttgggcctgaatgatctcagttggaggtgaaataggataaagccagagcagtaacaggggaagcgagctcatgggccttgctgaccagtgttaagaaataagcttttgcacagagtgaaatgggaagttattcccaaggcttgaaagcagaggaatgatg

SEQ ID NO: 644907 - DNA, 654 bp, Homo sapiens
attatatcattgaattctattatgtaatagaaaaaatattagaaaaaatcaataatactgtcaatagcatatcaaaaacaagaaaagcaataactaccatttactgagacctcagcatgcaccagaaactaaacttgaaaactttatgaaatgcaatatcttcatttattatcacaaataatcttgtgaaagaagttttcttcttatgcccaatgttacagatacagatattgaagtgcagtttgattaaaaatgcaatctaaaacctatacctaataaatggtggagccaggattaaactctggaccacttctttagcattctactatgtgttcatggaaataaataaaataagggcatataactggctggtgaaagaggtggatttctttcctaggwgttgaagaaaatgatttcccctctccctatgtctccctttcctcatctctccttccttcctttccaaacatatgttattgttcatataatagagctatggtttataatttttgagcatatgttttgtttaaaatttaatctgggatgaaaatatcaggaatcccaaattagaatgaaggaagtaaggttccaatctcagaggtagactttagacaggtaccaaataattcagtaattaagataaacaatatttaa

SEQ ID NO: 644908 - DNA, 660 bp, Homo sapiens
acctttctgtgggaggcaagaactgcagtaacttctgtctgcatgttggcatgcttgactttcagcttttagatcattgataaaaatcacgttgtcttttcccaggaagactttctattttaacctcctstcaagaaagttctcaggggctcatttctagcctcttcaaaatgttcactctgcaaggcggcaaatttttctttaaaatatttcctaatatgccatgttgtctgctcagcccgggatgtgataactcattaagaactgcagctggcagtgccactgggggaaaacacagctacagtctctgaatccacgcagagagagctcacaagcccataccggcaactttatcactctcctggaccttaacaaccaatcccccccctcaccttcctaatcaaatgtgctattatttggccactgcaagtacttatattttattaacctacctgggagtgtcttgcaagactgctaatactgtaatccattttttttttaattgtgtgcccaagagctttgagcaatggagagattttttttccccatttgctaaagcaaataaaatcacagtgggccagattcccctaatgtctactaaactcgctagaaaaatcttacctggggagccctagatttatagcatcatatttacccaac

SEQ ID NO: 644909 - DNA, 517 bp, Homo sapiens
caaagcatatactttctccagaagcaaagctgctaatatgttctctgcatctgctcctggaaacayagcgtttctatatcctctctttggtgagctgcagctatgagtgatccctaatgagcttataagtaaattatgtctttaatttatgcatcaatataataggatcttccccttgatttttaatgtaacgatcacttttcaggagatgtagaaagaggcacagaatgagtcagtggcttaaggttttaatctgtattttctcatgatgctaccttaggcaattatttaaattccctgagccttgtctcctcccaccaataacatcagggcacactgataactatgagataataaaacttacatttattacatgcctaacatgaatcataaatttaaatgcctcctttattaaatcacagatacctataacacaggtatgattactatcttcattttccacgtgagaaaacagtggttagcaattttagggaggcagtataatacagtggtgatg

SEQ ID NO: 644910 - DNA, 517 bp, Homo sapiens
caaagcatatactttctccagaagcaaagctgctaatatgttctctgcatctgctcctggaaacacagcgtttctatatcctctctttggtgagctgcagctatgagtgatccctaatgagcttataagtaaattatgtctttaatttatgcatcaatataataggatcttccccytgatttttaatgtaacgatcacttttcaggagatgtagaaagaggcacagaatgagtcagtggcttaaggttttaatctgtattttctcatgatgctaccttaggcaattatttaaattccctgagccttgtctcctcccaccaataacatcagggcacactgataactatgagataataaaacttacatttattacatgcctaacatgaatcataaatttaaatgcctcctttattaaatcacagatacctataacacaggtatgattactatcttcattttccacgtgagaaaacagtggttagcaattttagggaggcagtataatacagtggtgatg

SEQ ID NO: 644911 - DNA, 517 bp, Homo sapiens
caaagcatatactttctccagaagcaaagctgctaatatgttctctgcatctgctcctggaaacacagcgtttctatatcctctctttggtgagctgcagctatgagtgatccctaatgagcttataagtaaattatgtctttaatttatgcatcaatataataggatcttccccttgatttttaatgtaacgrtcacttttcaggagatgtagaaagaggcacagaatgagtcagtggcttaaggttttaatctgtattttctcatgatgctaccttaggcaattatttaaattccctgagccttgtctcctcccaccaataacatcagggcacactgataactatgagataataaaacttacatttattacatgcctaacatgaatcataaatttaaatgcctcctttattaaatcacagatacctataacacaggtatgattactatcttcattttccacgtgagaaaacagtggttagcaattttagggaggcagtataatacagtggtgatg

SEQ ID NO: 644912 - DNA, 517 bp, Homo sapiens
caaagcatatactttctccagaagcaaagctgctaatatgttctctgcatctgctcctggaaacacagcgtttctatatcctctctttggtgagctgcagctatgagtgatccctaatgagcttataagtaaattatgtctttaatttatgcatcaatataataggatcttccccttgatttttaatgtaacgatcacttttcaggagatgtagaaagaggcacagaatgagtcagtggcttaaggttttaatctgtattttctcatgakgctaccttaggcaattatttaaattccctgagccttgtctcctcccaccaataacatcagggcacactgataactatgagataataaaacttacatttattacatgcctaacatgaatcataaatttaaatgcctcctttattaaatcacagatacctataacacaggtatgattactatcttcattttccacgtgagaaaacagtggttagcaattttagggaggcagtataatacagtggtgatg

SEQ ID NO: 644913 - DNA, 629 bp, Homo sapiens
agcagtcccactactgtgtattcacacaaaggaagaagagtcattatctgaaaacgacatgcattgcaacacaattcacaattgcaaagatgtggaaccaacttaagtgcccatcaactaatgagtggatgaagaaaatatagtataaatacaccatggaatactactcagccataaaaaggaataaaataatgtctttgcagtaacttgattggagcagaaagccattattttaagtgaaataacacaggacttaaccaaaaaccatatattctcacttataagtcagagctaagctactagtacacaaaggcatacagagtgatgtaatggacttaagagactcagaagggagaggttaggaggggtgtagggataaaaaaacattaagtacaatgtacactacctgggtgatgggtgcaccaaaatctcacaattagccactatataattcatccatgwaacaaaaaaccacttgtaccccaaaagctatgtaaataaaatatatatatttttaaaaatttaaaaagaaccaacttaagtgcccattgactaatgggtggataaagaaaatgtgatacatatacacacaatggagtactattcagccataaaaaagaatgagatct

SEQ ID NO: 644914 - DNA, 608 bp, Homo sapiens
aggtttcacattttaaggtctcccacctctgttattatagtggtggactgttttcttaattcatgccaccagtgtgtggccactcttcctgtgaccctcagaacctaatctatttcataaggacttctactaatggactgtgttttctttcattwctgtacagtccactgtttccaagagacagagtccttttctttaaatgtgaagcagtcacttttagaagttgtatttggcagggactttatgagatcagtcacctctgggtattcccacacacttctgtgccttctttcttctcaatttacagtgataatattatacttactacagattattatcaggatggaactttttttattctgggagtggatagatgctagaggtacttgaaatatacaaccacaagaagattttcctcccaagtcttcttcccatgtgggcttgctagctggcttagccctttggccacatttagaacagataaggaatttgcaagattttctgtctcctcatttagatgaaaatgtagtttttatcttttaaaaaaatagttttgatgctctggttggttttctaaatgagaagttaaaaaagtaaaaaattaaatt

SEQ ID NO: 644915 - DNA, 608 bp, Homo sapiens
aggtttcacattttaaggtctcccacctctgttattatagtggtggactgttttcttaattcatgccaccagtgtgtggccactcttcctgtgaccctcagaacctaatctatttcataaggacttctactaatggactgtgttttctttcattactgtacagtccactgtttccaagagacagagtccttttctttaaatgtgaagcagtcacttttagaagttgtatttggcagggactttatgagatcagtcacctctgggtattcccacacacttytgtgccttctttcttctcaatttacagtgataatattatacttactacagattattatcaggatggaactttttttattctgggagtggatagatgctagaggtacttgaaatatacaaccacaagaagattttcctcccaagtcttcttcccatgtgggcttgctagctggcttagccctttggccacatttagaacagataaggaatttgcaagattttctgtctcctcatttagatgaaaatgtagtttttatcttttaaaaaaatagttttgatgctctggttggttttctaaatgagaagttaaaaaagtaaaaaattaaatt

SEQ ID NO: 644916 - DNA, 608 bp, Homo sapiens
aggtttcacattttaaggtctcccacctctgttattatagtggtggactgttttcttaattcatgccaccagtgtgtggccactcttcctgtgaccctcagaacctaatctatttcataaggacttctactaatggactgtgttttctttcattactgtacagtccactgtttccaagagacagagtccttttctttaaatgtgaagcagtcacttttagaagttgtatttggcagggactttatgagatcagtcacctctgggtattcccacacacttctgtgccttctttcttctcaatttacagtgataatattatacttactacagattattatcaggatggaactttttttattctgggagtggatagatgctagaggtacttgaaatatacaaccacaagaagattttcctcccaagtcttcttcccatgtgggcttgctagctggcttagccctttggccacatttagaacagataaggaatttgcaagattttctgtctcctcatttagatgaaaatgtagtttttatcttttaaaaaaatagttttgatgctctrgttggttttctaaatgagaagttaaaaaagtaaaaaattaaatt

SEQ ID NO: 644917 - DNA, 619 bp, Homo sapiens
aaaagtcatatcaatgtcaggtgaagatggaagggtagcatcatatcagctcccaaatttgggtgattatattattgcaataggataaaataaaatcatttctagttttgatattacataacaagtcctctataaatactagtgtacaggtttttgtgttaacataaatttttatttcttttgggcaaatatatagatgtggaattactgggtagcatgstaagtttatgattatgtctcctagaaactgctagactatttgcctaagtgccggcaccattttgcatgtccaccagcgatgcaaggtagttcaatttctaagcatctgtactagtacttagtattttactactactactactgccattactactattattttgtattcaaggcactataataggtgtgtagtgatatcacattgtagttttaatttgcatttctccagtgaccagcgatgtttagttccctcatatgtgtttatttgccaccgatataattcttggtgatttgtctatttaaatgttttgttgatttgtaaaaattatgttatttctcaaaattgaaggtttaagaagttttcatatattcaaaagataaatggtttatcagatatata

SEQ ID NO: 644918 - DNA, 436 bp, Homo sapiens
tggaaagtaatccaatggaatagaatctaacgcaataaaatcgactcagatagagtagaatgcaatggaatggagtgcagtgcaatggaatggaatggaatggaatgcaatggaatggaatggaatggaatggaatggaatggaatggaatggaatgggatggaawggtatggaatggatagtaatggactggagtgaaatggactggaaaggaatggactcaaattgaaacggctcgaaaggaatggagtcaaatggaatggtctggaatggaatgaacacgaatgtaatgcaatccaatagaatggaatcgaatggcatggaatataaagaaatggaatcgaagagaatggaaacaaatggaatggaattgaatggaatggaattgaatggaatgggaacgaatggagtgaaattgcatgcagtagaagagaat

SEQ ID NO: 644919 - DNA, 436 bp, Homo sapiens
tggaaagtaatccaatggaatagaatctaacgcaataaaatcgactcagatagagtagaatgcaatggaatggagtgcagtgcaatggaatggaatggaatggaatgcaatggaatggaatggaatggaatggaatggaatggaatggaatggaatgggatggaaaggtatggaatggatagtaatggactggagtgaaatggactggaaaggaatggactcaaattgaaasggctcgaaaggaatggagtcaaatggaatggtctggaatggaatgaacacgaatgtaatgcaatccaatagaatggaatcgaatggcatggaatataaagaaatggaatcgaagagaatggaaacaaatggaatggaattgaatggaatggaattgaatggaatgggaacgaatggagtgaaattgcatgcagtagaagagaat

SEQ ID NO: 644920 - DNA, 528 bp, Homo sapiens
gtaatggaatgcaaaaaaatggaatccaaaatcattgactggaaaggctgggtgtcgacaggaattgactccaatggaatggaatcgaatggaatggaagtgaatagaatcgaactaaatcgaatggaatggaattgataggaacggaatggaaaggaatgcaatgatttggcatggaatggaatcgaatggcatcgaaaggaatggaatggaatgcaatggaatggaatgtattagaatgtaatgaactttaatggaatgtactcgaatggattcgactggaatggaatgttctggaagtgaatgcaccccaatggaatggattcgaaaggaatggaatcgaaaggaatggaatataatggaatggaattaaatggaaatgaatcaaattgaatagcacggaattgaattgaatggaatcgaatgcaatggaatctaatgaaacggaatggaaaggaatggaatggaatggaatgggctggartggaatggaatcgatacgaatggaatggaatcgaactgaagaga

SEQ ID NO: 644921 - DNA, 657 bp, Homo sapiens
atccacccagcccaggataacaccccaggctcattactgtgaccaaggcttttgttttctggaaacagataaaacaaagtatccctaaacttgttttaaatttttcaaaatatcccttcttctcatcaaattgcatacaaataaggcaactaacacctcttttttcccctaaaatatttatttattatgaaaataagatttaaaaaaaaaggctgggtgcagtgactcacgcttgtaatcccagcactttgggaggccaaagcgggtggatggcttgaggtcaggagttcgagaccagactgaccaacatggtgaaaccccatctctactaaaaacacaaaaattagctgggcgtggtgttgggcattggtaatcttagctagttgggaggctgaggcaggagaatcacttgaacctgggaggcggaggttgcagtgagccgagaycacgccactgcactccagcctgggcgacagagcgagacttcatctcaaataaaaaaagaaaaagaatttgaaaatcgtcactctgtcacactttgccatctagataaagaaaacctgatagaaacaacattctgatttagttagaagcactccctgtgatgggatactggcaaagttactcatctaattttgctccacaatgttttagaca

SEQ ID NO: 644922 - DNA, 570 bp, Homo sapiens
tttcctttgctgcacaaaagctttttaactggatgtgacccaatttctccttttttgttctggttgactgtgcttttggggtattagccaagaaatctttgcccagtccattgtccttgagaatttccccaatgttttcttttagtaattttatagtttgaggtcttagatttaggtctttaatccactttgattggatttttgtgtatggtaagagacaacagtctagtttcattcctctgcttatgaatatccaattttcccagcaccatgtattaaagagactatcttttcccaaatacattttcttgccacttttgtgaaaaatgagttcaatgtaggtgtatgggtttatttctgggttctctgctttgttctattgatctasgtgtctgctttttataccagtgccatgctgcttgggttactatagttcagtagtataatttgaacccaggtaacatgattcttctagttttatacattttgttttagataacttttgctattctgagtcttttgtggttccatataaattttagaattgtttttttctatttctgtgaagac

SEQ ID NO: 644923 - DNA, 570 bp, Homo sapiens
tttcctttgctgcacaaaagctttttaactggatgtgacccaatttctccttttttgttctggttgactgtgcttttggggtattagccaagaaatctttgcccagtccattgtccttgagaatttccccaatgttttcttttagtaattttatagtttgaggtcttagatttaggtctttaatccactttgattggatttttgtgtatggtaagagacaacagtctagtttcattcctctgcttatgaatatccaattttcccagcaccatgtattaaagagactatcttttcccaaatacattttcttgccacttttgtgaaaaatgagttcaatgtaggtgtatgggtttatttctgggttctctgctttgttctattgatctaggtgtctgctttttataccagtgccatgctgcttgggttactatagttcagtagtataatttgaacccaggtaacatgattcttctagttttatacmttttgttttagataacttttgctattctgagtcttttgtggttccatataaattttagaattgtttttttctatttctgtgaagac

SEQ ID NO: 644924 - DNA, 323 bp, Homo sapiens
gaattctgccattcaaatgtatgctttatgagcasagagacttcacatgttttgttcatttctctatctcagggtctagagcaatgcctggcatgtagcaattactcaatacatatttgttaaataaatgaaaaattattgccatatgataggttatagtaatataatgttaatgtgagattttatatatatatgttgtaacataatatattaatatgattgctaatatatgtcatctcatcacaccaatcctataaaataagccttatgatctttgtctaagccatatggaaactgaaactcaggaagtttgataaatcact

SEQ ID NO: 644925 - DNA, 564 bp, Homo sapiens
caccagcacgcccagctaatgtttgtatttttagtagagatggagtttttgccatgttggccaggctggtctcaaactcctgacctcaggtgatccacccaccttggactcccaaagtgcttggattacaggtgagaggcactgtgcccggctgcattctatatattttagctgtttgctttgttttttccttcttctctcccactgaaatgaaagctggcaagaattttcttttctgcttattgttatagcccttgtcccagaaaagcctataatatgtaattgagtgaacaataataataatgcacattgggttcttattctrtgccaggcactctgctcacttatacattattttatttaatccttacaacaaccttactaaatgggttggacacatcagtccaacctttgccttgtcttcccgtggtcttcttccccatgtctctctgtgtcttctctattgctagacaggggtaatagacaaggttcacacagaacaatgcaacttactgtagatatttcaagcagaaataaattaacacaagggattgctaatttggc

SEQ ID NO: 644926 - DNA, 533 bp, Homo sapiens
attgctttaaaccatcatacatatttggcaaaataatgagaagaatatgatgtttaccccaatatttatcacttcttgtgctcttccttaattcttgatgttcctcgtctcctcccctgccccttatttcaccttaatttctgaaggacatttttatgaataatagaatttagrgttgatgattcttttgcagaaatttaaaaatgctcttgttccttctggtagccttagtttctgtggagaaatccacagtgattggaattgttgttcccctttatgttatgtgtctttttcttctggctgctttcaagatttttccttcatctttagttttcaaattgtattatgagaaatctggggattaatttctttgaggttattatgtttagtgtttgccgaggacagaacggaaagtgtggtggccgtttgccttcgattgtggcaaccatgccctcaggtcagaggattcacttgccccagttttaacacctgcctagcctctgctgcaatgaggcaggattgcctgggggctg

SEQ ID NO: 644927 - DNA, 533 bp, Homo sapiens
attgctttaaaccatcatacatatttggcaaaataatgagaagaatatgatgtttaccccaatatttatcacttcttgtgctcttccttaattcttgatgttcctcgtctcctcccctgccccttatttcaccttaatttctgaaggacatttttatgaataatagaatttagggttgatgattcttttgcagaaatttaaaaatgctcttgttccttctggtagccttagtttctgtggagaaatccacagtgattggaattgttgttcccctttatgttatgtgtctttttcttctggctgctttcaagatttttccttcrtctttagttttcaaattgtattatgagaaatctggggattaatttctttgaggttattatgtttagtgtttgccgaggacagaacggaaagtgtggtggccgtttgccttcgattgtggcaaccatgccctcaggtcagaggattcacttgccccagttttaacacctgcctagcctctgctgcaatgaggcaggattgcctgggggctg

SEQ ID NO: 644928 - DNA, 521 bp, Homo sapiens
aaacttataaaggtgtgtgtatacacaatttgtatatacagagaaataattgatcctaaggctgaggttggaaatatataacatgaacctggagcatcttatagttccataatgtaaagaagctgtgagaaaataattaaatcattggaggtgtggaaagggacacaggagacaactgaaagagctcccactagccaaacctgaagtaatttgagaaactgaaataaataaaataatactggattataaaccaaagtatgaggtaaatatccatgagcccatactgatgtaaacaaatgattgaataaatatataaattgggaaagcattcaackatcttccttgcagaatattaatttatgtagatagtcttctctcaaaaaggggaagcataaatcctcaccacttaagtataggctacacataatgaaaaaagaatgagaagctttacaaatactttacaaacctgataaatgcgacctcaaccaggtattaagggtcaacatgaacagtgataaaat

SEQ ID NO: 644929 - DNA, 584 bp, Homo sapiens
cattttttaagttagcatataatgtatgaatcaaagaaataaaaagtgtaaacaatctaatggaagattgaaaaacacataaaaagtaatgtacagaatatctataagtgacaaataaacatataaaaatgctcaatattgccagcaacatttccagtaatcaaggaaatgaaaattgacaacctaataacatttcatactaaaatggcaaaaacttataaatctggcaatatcaagcactgacaagaatatggaacaaagtaaaacaccatccattagtattagagatctattaatagatctaatacattgatacaactatttggaaagcagtttggctttatcctcagctttgctacccaatgcatttataacatgcagatataaaagtgaayatttgataaatacttttactctgattctttatatttaattattttattttaaaaagtttattgttgaggcttattaaatttattttctaatccaataatgactttttacctatcgtttgaaaaatattcctatagagaagctcatgtgttaccctggaaataggtatgaaaattcaaaattttttataa

SEQ ID NO: 644930 - DNA, 572 bp, Homo sapiens
gcaaatctgctgattacttatgaaagcaagggaaaaaacatttgcaattacagtcaaaattaaagttattttctaatcttctcatcttttttaaggaatgagaaactttaaatatggtcaacgtagcacattttaagtgtcaaacttactgaatttttctatgccgattgaataataatcttctataaaacagtaagcattctagagattttaaaaaatcatttgacctgtttaatatgagttgaaaaattcctcctgtgtaagtaccattgcataatgctgtatgctgagctattaagatatatttagtaattccattagaactgcaccattgagcagggcagagcatatggaaagaagttggtgaaaaactgattaaacatttatatcaagtacattttgatttaactcacataaataattcatttttatgttttctttctttcaaaataaacctttttgacacctgctgtgctaaaaataatgctagcatggctgtaataaagaaagacttaaagcgcacagcaatgacatcatctgtacccakgcagatactaaattatcagcacata

SEQ ID NO: 644931 - DNA, 512 bp, Homo sapiens
ggataagaaaacattaaaaaataaaatctcaccattaatcttcagagatatcttcttcaaaaatgatacatctacaaaacaagaaaggttgctataggaaaagattattcagagaacaaaaaagaacttttgtaaattaaaactacaatagtaaaaactttttaaactgaaaaaggaaaattggaaaattataggaaaatcttccagaaagtagaaggagaaaactaaagggatgaaaatagaaaataaaattagggcccaatttaggtccaagatgcaaattataggagttccacaaagagaaaagaaagaaaacagagaggaaaaaaatcatcaaagaaataattcaagaaaattttccagaactggaggctaagcatttccagattgaaggagcccattgaatatctagtggatgaaaacagactaaatcacmtcgtgacaaaatttcagaaactaaagacaaaaaggaaaggcttctagaaagggggaatagtcaaaaaccagaattg

SEQ ID NO: 644932 - DNA, 551 bp, Homo sapiens
ttgtgttggagcctctggaagcatttagtttggcaagaaatgccaggtcaacttttgccctataggaatccctttcataggcaattaaaacaatgcccaccctttgggactctgagtgatctcaaaagattcattaaaagtccacaaatggaaggagatcagaggaccatcctctcactgactgaattaagcaggtagcccctcaaataacgggctgacttttctagaaacgtggacaattctgaaacrgcggaaaatggttttgcttcttggctgttttctcagtctgcctttgtacaattcactattcacgttagcctgagcagtgtctgtagctagttcaaagggagctggtgtcaaaggaaaatattagttcagccttaaaaatcctatcacttcagtccagtggggtcccttatacgtaagatttgtgggcctgctttggatacaacaacatgtaaacatcagctgtcagcaagaagctggcagccaaaaaggctggtttcctttccccctcagtcatcttcgtgttcgccctgccaacagaatgt

SEQ ID NO: 644933 - DNA, 414 bp, Homo sapiens
taatttcaggactgggtgtcagttgtccctattcatgttgcttagcttggttctaaaaatttagtctttcaaaagtatgagaaaaattttgcaagtaaataatttagaaagcatgattctctctctctctctctctctctctctctctccattttaaaaattgtgataaaatacacgyaacataaaatttgctatttaaactattttaagtgtacaattttgtggcattaagtaacattgaacattgttatacaatgcatcatctcataaaacagctggactttattgataactgcagagtcagatatcttagcaatgaaatatgcctcaaggatataagtcttagagtaagagtctagcacgggtatttatatggctcatcatatcaaaacggtgaacaacatagctaacatc

SEQ ID NO: 644934 - DNA, 414 bp, Homo sapiens
taatttcaggactgggtgtcagttgtccctattcatgttgcttagcttggttctaaaaatttagtctttcaaaagtatgagaaaaattttgcaagtaaataatttagaaagcatgattctctctctctctctctctctctctctctctccattttaaaaattgtgataaaatacacgtarcataaaatttgctatttaaactattttaagtgtacaattttgtggcattaagtaacattgaacattgttatacaatgcatcatctcataaaacagctggactttattgataactgcagagtcagatatcttagcaatgaaatatgcctcaaggatataagtcttagagtaagagtctagcacgggtatttatatggctcatcatatcaaaacggtgaacaacatagctaacatc

SEQ ID NO: 644935 - DNA, 414 bp, Homo sapiens
taatttcaggactgggtgtcagttgtccctattcatgttgcttagcttggttctaaaaatttagtctttcaaaagtatgagaaaaattttgcaagtaaataatttagaaagcatgattctctctctctctctctctctctctctctctccattttaaaaattgtgataaaatacacgtaacataaaatttgctatttaaactattttaagtgtacaattttgtggcattaagtaacattgaacattgttatacaatgcatcatctcataaaacagctggactttattgataactgcagagycagatatcttagcaatgaaatatgcctcaaggatataagtcttagagtaagagtctagcacgggtatttatatggctcatcatatcaaaacggtgaacaacatagctaacatc

SEQ ID NO: 644936 - DNA, 589 bp, Homo sapiens
aattaattttaaaagcacagatttctagctcctataggtatcaaaacattttaattgctttgataatttgttttccactatcatacaatctctggagagttggaaactaaaatatcagtggcacatagatgaaacaaacaagcaagatatagaataaaaatgtgatttgcgaagagataaatatgcacattacattcagatttgtgttaataaataacatttaagatatgwatctatctagacaagcacataaaggcagttatcttgcattattgcacagcatgactgtagtgctaagaagacttagatgaatttaagattgtatctaaacttcaaagtaccatatagatttgagagttgtataagcttcttacgtgtacttacttattgtatacagcatttttttaatcttgacaatcttgtgcactttcattaagtgtcatatttttcttttctcccctctccataaaacattacaatatcacatatactactgaaatccttagcaatagaaggccttagttaatctacaaagaaaactttcagaacttctggtttattcctatttatatatcaagaatatattcaa

SEQ ID NO: 644937 - DNA, 629 bp, Homo sapiens
cttaatacattatatattcaataaatacatatcaaatagttactatcatcatcatcatcatcatyatcattgtcattcctgttatgtgtaaggcttttgggaggcactggaccatcagcagtgaacattatggacaagcaaccactgattagttttctttcactgtagattagttggcattttaaaaaattttgtaagtagaattgtacaatgtggactttttgtatatggcatctttcaatctacatagcgactttgagattcatccatgtttttgcatatctatagctcacttatattgttactgttatggtcatttatattgttatcctattatatggatatacctcattttatttattgttcacttcttgattaatacttgtatatacgattttcttgtttttgctactgtgaataaagcttcaataagcatttctgtacaagcctttgcataaaggtacattttcatttatttttggcaaatacttaggaatggaactcctggaatatttaatgaataatgtatctagctttgagagggaagtggtcagtttcccaaagtgtttgttccattttactttctcatcaacaagtgtataggagttcaacctctttcacctctcagc

SEQ ID NO: 644938 - DNA, 552 bp, Homo sapiens
tggtacctggccttcatgtctacattatttctttctcttagcttctcatatagataggtaaatgacaaatacatatgtattaacatgttgatttctttctactgtttcaaggcagcataaatgctgagtgttgagtaaaaaagacacaaagaactcccacactccaagttcagagtgacacagtaagccaccagcaattggttcgggtcatctacttatttgtagggtttactaaaagggaccaatttaaaactgactccatkattgacttccttcttacacacataacacttttccaaattccaatataaaaaaatggaatgagaatggacagggctttcagtcctgttaggaagagtgaggtttgtggtggtgacttcccatggggagagggaaggagtgattctcctcctctaaggcaagggaatagtactccaagagatttggatgtctgcaagatgggtaatagcacacatcattcttcaattgagaatctgttttgggctggtcattaacatttggagacccaggctgagagttgaagtggaagcc

SEQ ID NO: 644939 - DNA, 561 bp, Homo sapiens
gaacatgtggactggtgcacggctgtaagggccgccttgctggagctctccagcaagctctccatggtctgccagcatagaagctatgttgtgggcccccagggcatccaagacttccctgtaagcatatgtggtcaggctgggccctgggagtggccaacagaccaaggagtgctcaggtcagaccagccccatctgatgtgcaagaccattctgcagagatcaggtcaaatagttyccctagggctaaagtctcttatgagagcaatttgagcctagagggatggctgttcctggctatgctccactacagacacccctgcaccaaaccacctgtgctccacatcagctggctagctgccccaccactttgcttgtctcctgggggctctaccccagagagatgtgggtcagcaattgctcagtgcaatcagcccaggatggaggatctgtgccatggacctaagctaggggttccctgtctggcgatgagcagtggggttgtgtgggacccgggggagatggaccagcctcctttccttgggtcaactgcaacttgtt

SEQ ID NO: 644940 - DNA, 590 bp, Homo sapiens
ataatacttatctcacatgaaatttttcagtaaatggargaaggagtgaatgctctcccaaaatgttttgtcaaattaatataaacctgataccaaacaaggacagacactagaaaggaaataataagccaatctcattcatgaacaaagatgaaaaaaattctcaacaaaatattagtaatatcaagggcaataatataatttaaaagattatatataataataaagtaaaatttattccaagaatacgaggttggtttaccatgataaaatgtattaatataatacatcatcatcacaatagcaggttaaaagagaaaaatatcatttcaataatatgcaaaataatacatttgataaaatttaacatgtattcatgaattgaaaaaaagactctcagtaaactaaaaatagaatgtgcttttttttcacctgttgtgttttcttttacctgaaaaagggcatgcacaaaaaaataaaagcaagcatctgactcatggtacaattatatcaagcattcaagtataaaataagttggctactatcagcatttctattcaccattatttagaagtctaggccagcacaat

SEQ ID NO: 644941 - DNA, 612 bp, Homo sapiens
tgctatataatgataaaaagatcaattcagcaagagtatataacaattgtaagcacgtatgcacccaatactggagtacccagatatatraagcaaatatcgttagagctaaagagggagatagaccccactaaaataatagctggaagctttatagatcccatttccagcattggaaagatcatccagatagaaaatcaacaaagaaatatgggatttaatctgtactatagatcaaatggacctaatagatattaatagaacattttatccaatggctacagaatacacatccttctcctcagcacatggataattctcaaggatagaccatgtgttaggccacaaaacaaatcttttaaaaattcaaaaatattgaaattacatcaagtatcttctctgaccacagtggattaaaactagaaatcaataacaagaggaactttggaaactatacaaacacatggaaattaaacaatatgctcctgaataagcaggggtcaatgaagaaatttaaagggaaatttaaaaatttcttgaagcaaatgaaaatggaaacacaatataccaaaacctatgcaatacagcaaaagcagtactaagaagaaagtt

SEQ ID NO: 644942 - DNA, 591 bp, Homo sapiens
cttctagctgaactatagagttatgcagtgtctggaagcagaatggagggggaagctaattaacatagttcttacatsaccaatggaaattctttatttgccctcaggatctacattgctgtgtctactcaacactgttaaatatgacaaggtcagtaaccctgtttttgtaacaatgaatgtgaacaaacttggacctcacacacattgtcattgtttaacagggtcaactgagttaactgggagcattatgcatgtatagtgccaagaaggccccatcaacagtcaagtatataatgttaacatattagcataagtagtggagcaacagatggccaagctagagcaagtcagattaacccgaagattctgcactaactgttgagccataagagggctttatatctcaacacaggaaacactggacagggacatgggagaccagtgttctagtcttacctctgccagttccttcctaaaggctcaatttccacagcagtaggatgagcaatctgaccagaggacatggaaacccctttttgcttgcaaagctatgattctaatgcagtctacaggataaatgcattgcct

SEQ ID NO: 644943 - DNA, 591 bp, Homo sapiens
cttctagctgaactatagagttatgcagtgtctggaagcagaatggagggggaagctaattaacatagttcttacatgaccaatggaaattctttatttgccctcaggatctacattgctgtgtctactcaacactgttaaatatgacaaggtcagtaaccctgtttttgtaacaatgaatgtgaacaaactyggacctcacacacattgtcattgtttaacagggtcaactgagttaactgggagcattatgcatgtatagtgccaagaaggccccatcaacagtcaagtatataatgttaacatattagcataagtagtggagcaacagatggccaagctagagcaagtcagattaacccgaagattctgcactaactgttgagccataagagggctttatatctcaacacaggaaacactggacagggacatgggagaccagtgttctagtcttacctctgccagttccttcctaaaggctcaatttccacagcagtaggatgagcaatctgaccagaggacatggaaacccctttttgcttgcaaagctatgattctaatgcagtctacaggataaatgcattgcct

SEQ ID NO: 644944 - DNA, 591 bp, Homo sapiens
cttctagctgaactatagagttatgcagtgtctggaagcagaatggagggggaagctaattaacatagttcttacatgaccaatggaaattctttatttgccctcaggatctacattgctgtgtctactcaacactgttaaatatgacaaggtcagtaaccctgtttttgtaacaatgaatgtgaacaaacttggacctcacacacattgtcattgtttaacagggtcaactgagttaactgggagcattatgcatgtatagtgccaagaaggccccatcaacagtcamgtatataatgttaacatattagcataagtagtggagcaacagatggccaagctagagcaagtcagattaacccgaagattctgcactaactgttgagccataagagggctttatatctcaacacaggaaacactggacagggacatgggagaccagtgttctagtcttacctctgccagttccttcctaaaggctcaatttccacagcagtaggatgagcaatctgaccagaggacatggaaacccctttttgcttgcaaagctatgattctaatgcagtctacaggataaatgcattgcct

SEQ ID NO: 644945 - DNA, 559 bp, Homo sapiens
ttctgttgaaatgggctttagtaaaaaccacctgagctttggtgtcttaagtcctgactgcctttttttactagttgtgtagcttcggttaaattaacttctagctcaacttaactataaaaaggayatgctgatatctacatgtttttatttttttataaatcaatagaaataaaacatacatgttatctgatacacagcagacgttttatcagcattaacagtgataacgctattagtgattacttttacacagggtcctattgctgattgcaatttccaagaactctgatggtgacataattaataaaatagataaccccagactttaaattatgtcttcttagatttattatacgtcagatttggaagatctaagacatacctgtgatttttaagaatattaatacaccaagattatgtttgaaaataaacgagttaccagatatccccttttttgcataattgcaagtgatacgtctgcctctgagcatcatgtttgattgatattggtagtctgatgatacaattaaattaaaaatgttattttataagagtg

SEQ ID NO: 644946 - DNA, 559 bp, Homo sapiens
ttctgttgaaatgggctttagtaaaaaccacctgagctttggtgtcttaagtcctgactgcctttttttactagttgtgtagcttcggttaaattaacttctagctcaacttaactataaaaaggacatgctgatatctacatgtttttatttttttataaatcaatagaaataaaacatacatgttatctgatacacagcagacgttttatcagcattaacagtgataacgctattagtgattacttttayacagggtcctattgctgattgcaatttccaagaactctgatggtgacataattaataaaatagataaccccagactttaaattatgtcttcttagatttattatacgtcagatttggaagatctaagacatacctgtgatttttaagaatattaatacaccaagattatgtttgaaaataaacgagttaccagatatccccttttttgcataattgcaagtgatacgtctgcctctgagcatcatgtttgattgatattggtagtctgatgatacaattaaattaaaaatgttattttataagagtg

SEQ ID NO: 644947 - DNA, 552 bp, Homo sapiens
taggggacagatgtgtaaggtaaaaatttaatagagtttagaaatcgcttcagaaagtaccatcactctatacgggcaataagcccagttcttcctccagcgttttaagagattactattttgkttgagcatcagatgaattagtttaggcttaaaggcatgaaaaaatacatttaaaaatgtattagtatcacaggaaagagactgaacaatgaggggcatgtgtatgaaaatagaccaaataatgatctattaataagtttcatgccatgttccctccaggacataaactgagtgaaataaggggtgagattactagcaattaatttttaacaaattaatcagagtatgttcaactctgctgttctttcatccaatacaatggtcctcaaccaggcattatttagttcctctgaggacattttgcaatgtctagagacattgtgccatagttgagaaactctgataaaagaatgccataatatgggaaaaacgttttcctcactcctcatcatacatagtttcccctacagtctgaaacctatattaaat

SEQ ID NO: 644948 - DNA, 551 bp, Homo sapiens
caccctgaaaactgattttctatgtttcatagcagcttctagccattacagaaagacaaggaaatgaaactaaaagcagccatattggaaaggaagaatactggcttaaaaggcagatgacataatcatcttcatggagctctgatggaatcatcagcaaagctgttgagtttagcaaggttgcaagatacaaaatcaatatactaaaatcaattacatctctatatactcggaacaaacggtcatacattgaaattaatcaagagtaaatactctaaatagtgtaaaaatatgaaatacttggggttaaatatgacaaatatgtaaaactactgtacattaaaaactatgaaacattgctgagaaaaattaaaagatacccaaaaaatagataatttttttcatggctcagaagactcaatattgttaagatgtcaagtctctaaaaattgmatttataaagttagtacaattccaatcaaaattcagccagttattttggggaaactcaaaagctgattctaaaattcacatggaaatgcaaagaaata

SEQ ID NO: 644949 - DNA, 268 bp, Homo sapiens
tccaagcttttgaaggcatggtcattttttaaatatattttcttgtgaatagttgttgtacatctttagactgtaagtcgatctttcaagccctactttccttgtaaagctctgagcatgtttatcatgactgagtagtgaytcacaggaacgtaggacccactgtctattttcttatgattcttaccaaaaatatcacatatgtggctaaatatcgtatgagataaaatatttttcaaagacctttgccctgtacattatacttaaa

SEQ ID NO: 644950 - DNA, 519 bp, Homo sapiens
atttccggtgctcttcattcttttgtgtccatccatatatccatcaggtataatttttctgactaaaagactacttttaacaattttttttttgatggagtctcgctctgttgcccaggctggagtgcagtggtgtgatctcagcttactgcaacctccatctcccgggttcaagcaattctcctgcctcagcctcctgagtagctgggactacaggtgcgcgccaccatgcccagctaattttttgtatttttagtagagatgaggtttcattatattggccaggatgatctcaatctcttgacctcgtgatccaccctcctcggcctcccaaagtgctgggattacaagcgtaagccaccacaccaggccaatactttttatattgttctgcagatgatgaattmtttcaggttttttaatctgtgacaaagtccctgttttgctttttttttttttgaaagatatttcacagggcatagaattttaggttgacttttcagtgttaaaagatggtgc

SEQ ID NO: 644951 - DNA, 371 bp, Homo sapiens
cgaggccagcctggccaacatggcaaaaccccactctacaaaaaataaaaaaaattagccaggcatggtggcatgcgcctgtaatcccagctacctagaaggctgaggcacaagaattgcttgggcctgggaggcggaggttgcagtcagccgagatagcacgaatgcactccagcctggatgacagagaagaccctgtctcaacaacaacaacaaaacaaacaaacaaacaaamaaaaacagagaaaataaatcacaaagaaatttagaaaatatttctagttttatgataatgaaaactcagcatgtttaatgggaaagttacagctttaaatatttgtattagataaacaaaacataaaaatctaagc

SEQ ID NO: 644952 - DNA, 584 bp, Homo sapiens
agtagtgcagatggtgccctaggagctgatgagcttcctgtttattcagtaagcgttgcaggaaatacaaagaaatgtcaggtgaccaaatgttctggggtcaccagagaagttcttaacattcccttactaatggaaatgagaaaaatctgtagattttcagctatctgaggaacaatttttgtctttaaataatcctctcccctcttctaattactaaaagtgcaaccaacaggtagcaaaagtgatatttgagctycatccttcttttcttctgtccccgtaccctcaccttctagtgaaattactcagagactatgaagaatagggattggaagaaattgagagctcatggtggcaggatagcccacagaccatatgtgtctctgaataagggagaatttgataagtagaataagccatcagaaaaaaaaattttcaaatagtgattcctcttcaaaacattttacatattttctctaatataattattagaataaaatcattgaaatttagtattaattgaaacctctcatcagatttttatattgtgttacattgtgttatattgtgttcaagacaca

SEQ ID NO: 644953 - DNA, 593 bp, Homo sapiens
  misc_feature 95: n = A,T,C or G
tatctcaatagacacagaaaaagcatttgacaaatccagcattcctttatgattaaaaccatcagcaaaataggcatagaagagacataccttanactaataaaaggcatctatgacaaacccgcagcccacattgtactgaatggggaaaagttggaagccttccctctgagaactggaacaagacaaggatgcccactttcaccatttatttttactgtagyactggaaattctaactagagcaatcaaacaagaaaaagaaataaagggcacccagtcaaactgtcactgtttgctgatgacatgattgtatacctggaaatatcctaaagattcatccaaaaagctcccagaactggtaaatgaatttagcaaagtttcaggatacaaaattaacgtacacaaatcagtagctctgctatacaccaacagcgatcaagctgagaatcaaatcaagaactcaacccctttaacgatagctgcaaacaaaaacaaaaacaaaaaacaacaacagcaaaaacaaacaaaaaaacttaggaatatagctaaccaaggaggtaaaagacttctacgaggaaaattacaaaacac

SEQ ID NO: 644954 - DNA, 593 bp, Homo sapiens
  misc_feature 95: n = A,T,C or G
tatctcaatagacacagaaaaagcatttgacaaatccagcattcctttatgattaaaaccatcagcaaaataggcatagaagagacataccttanactaataaaaggcatctatgacaaacccgcagcccacattgtactgaatggggaaaagttggaagccttccctctgagaactggaacaagacaaggatgcccactttcaccatttatttttactgtagcactggaaattctaactagagcaatcaaacaagaaaaagaaataaagggcacccagtcaaactgtcactgtttsctgatgacatgattgtatacctggaaatatcctaaagattcatccaaaaagctcccagaactggtaaatgaatttagcaaagtttcaggatacaaaattaacgtacacaaatcagtagctctgctatacaccaacagcgatcaagctgagaatcaaatcaagaactcaacccctttaacgatagctgcaaacaaaaacaaaaacaaaaaacaacaacagcaaaaacaaacaaaaaaacttaggaatatagctaaccaaggaggtaaaagacttctacgaggaaaattacaaaacac

SEQ ID NO: 644955 - DNA, 584 bp, Homo sapiens
ttgggccagtggcaggcctcggcagagctattaaataataattactagaatgacttttgttagattctcactgaatctgacttgtcagaattttgtcatcaaaacataatgccaaggcctggtgcggtggtgcaccccagctctttgggaggccaaggctggtggataacctgaggccaggagttcaagaccaggctggacaacatggtgaaaccccatctctactaaaaatacaaaattagccaggtgtgatggtgcacacctgtaattccatctactcagaggctgaggcaggagaatcgcttgaaccccaggaggtggaggttgcagcgagccgagatcgcaccattgcactccagcctgggcaacacgggtgaaactttgtctcaaaaaaccaaaaccaaaaacaaaacaaaaacataatgccaaaagcctctgttatgataatcatgggaagaggaaaacaacatttcctaatgggagatttcttagttctcttagacactagagaatgatkactgatgaagattactgagctgagctagaaacaaggcctacatcaaatcctgtggcttccaggggtt

SEQ ID NO: 644956 - DNA, 660 bp, Homo sapiens
gctgcttgggccaggatggtagcagtggaggtgatgtgaattggttgtattctagatatattttaaaactacagttagcagaatttctcagtagacaaaatatggagtgtaaatgaagcagatgttataagaatagctttaagctttccaaattgtggaactggaagtatgaaattacatataagtgaacttacaaaggaatgctttgartgcaggaggtttttgttgtttgttgttttttggttgggaggaaggggaagatcagaaattcagtttgacatctgatataatgttagatatagaaaataatagcattttgtttgcaaaattaaagaataatccagagagaaaatacaaaaaagagaagaaaataaacttccctatatttctattacccaggcattagagtggagagtatataatgagtgacagaaagtgttctctggtgtatcaccaatggttttgcaggtttaaaagtatatcaggtaggaggagtgacatcagccaagatggcaaattgggaagtctcagcacacattttccccataaggacactgagttaacaatcatatagagacaaaaacatcttatgaagactccagaaaccagttaaaagactgtagccaccacaggcaagcccaaaagctgagaacagccaca

SEQ ID NO: 644957 - DNA, 621 bp, Homo sapiens
tgtaggacttccagtcctgtgttaaatagaagtggtgagagtgactgagtatgatgcattggattttgaaatagaaatagacacttagtaaaaaaaacaaaaactgggaaaattctaataaagcctatagtttagttaatagtattataccagtgttcatctcttagttttcataattatactgtagttatwtaagattttaatgctagaggaagcttggtaaagagtatatgggaaccccgcactatttttgtaactcctctgtaaatcataaatgatctcaaaataagttttttaatatctgaaggaaaataaaagcatacagagtaaatacattgggagtcctgaaatatctttctaggcaaataaggcatactttcacttttcattagttaattacccatagtaagtgtccaccacctctgccactctggtatataaagtcctagagggcaactggccagacatcacattaaagaagcactatggcactggactgagtcaattctgaatttcagctttggggatttctcagggcaaagttgtttaatatctctgaaatatgaaaatatctttccaggattgttgtgaatattaaataaggtcatggctccataaagc

SEQ ID NO: 644958 - DNA, 597 bp, Homo sapiens
  misc_feature 283, 343: n = A,T,C or G
tcttcatagaacctggatttcatatctatgtcacacactctgccatttggctttttaattccttccgtccgccggatgctgctgtccgtcctcacccctgtgtttctctataggatacctaacctctccccgggggacttcggtctctcacgaccgccccatgatttcctgctgatggtgtccttgggagggaaactgctctaagggacaagctgttttgcagaattactttaacctctcagtcactgtgttacccyctcggtgggccccaggcctgtggctntccgggctcccagacattcctgtcctccaagggctctgcttctcagctgcatttcctggngttctttgagcttccagtgtggacctttcgcccacagctcagctctataaccttacatcttctgggaagattttctttttaattattcagaacgacatcttcaggactccttagaagctgccttgtctgacagtgcttcatgattcactcctcagtttcttttgtaattcctgtgtgtccagtagttcatacacatttcatatttatgacaaagctatggttttctggcaaatttagtttacaaagcagctcac

SEQ ID NO: 644959 - DNA, 566 bp, Homo sapiens
cctttcaaccaggactttaaatacttgcctagtggaaccctagggatgtcgagaaattactttggaggttgctactctacaggaaggagtgaagatcatgatatctacaactagaacacctctactggcatgtaacttatacattgrgattctgaatgtttcgatttgaaatagcagaaaatgatttaaaatgcacagccttgtagatgaatgtgtgtctctaagtcctagctgccttctctaacatgagttattaactttataacctgtgatacctcagtgccccaacacagattcctatccctcaatattacccagggactggagtctactcctggaccccagttttatgtttgagactctactccatgttgatatttgcctgcatgaatctaagcacagttaatactttttaactctcatgcccatgatctgccaaaatgaaatgagatgtatatctttcttcattggacgttttttagtgccacctgcttgtctggatgaatgtcacattctgtctatcattgaactcatgaataggtaaaacttgttcctggatgtttctc

SEQ ID NO: 644960 - DNA, 566 bp, Homo sapiens
cctttcaaccaggactttaaatacttgcctagtggaaccctagggatgtcgagaaattactttggaggttgctactctacaggaaggagtgaagatcatgatatctacaactagaacacctctactggcatgtaacttatacattgagattctgaatgtttcgatttgaaatagcagaaaatgatttaaaatgcacagccttgtagatgaatgtrtgtctctaagtcctagctgccttctctaacatgagttattaactttataacctgtgatacctcagtgccccaacacagattcctatccctcaatattacccagggactggagtctactcctggaccccagttttatgtttgagactctactccatgttgatatttgcctgcatgaatctaagcacagttaatactttttaactctcatgcccatgatctgccaaaatgaaatgagatgtatatctttcttcattggacgttttttagtgccacctgcttgtctggatgaatgtcacattctgtctatcattgaactcatgaataggtaaaacttgttcctggatgtttctc

SEQ ID NO: 644961 - DNA, 566 bp, Homo sapiens
cctttcaaccaggactttaaatacttgcctagtggaaccctagggatgtcgagaaattactttggaggttgctactctacaggaaggagtgaagatcatgatatctacaactagaacacctctactggcatgtaacttatacattgagattctgaatgtttcgatttgaaatagcagaaaatgatttaaaatgcacagccttgtagatgaatgtgtgtctctaagtcctagctgccttctytaacatgagttattaactttataacctgtgatacctcagtgccccaacacagattcctatccctcaatattacccagggactggagtctactcctggaccccagttttatgtttgagactctactccatgttgatatttgcctgcatgaatctaagcacagttaatactttttaactctcatgcccatgatctgccaaaatgaaatgagatgtatatctttcttcattggacgttttttagtgccacctgcttgtctggatgaatgtcacattctgtctatcattgaactcatgaataggtaaaacttgttcctggatgtttctc

SEQ ID NO: 644962 - DNA, 566 bp, Homo sapiens
cctttcaaccaggactttaaatacttgcctagtggaaccctagggatgtcgagaaattactttggaggttgctactctacaggaaggagtgaagatcatgatatctacaactagaacacctctactggcatgtaacttatacattgagattctgaatgtttcgatttgaaatagcagaaaatgatttaaaatgcacagccttgtagatgaatgtgtgtctctaagtcctagctgccttctctaacatgagttattaactttataacctgtgatacctcagtgccccaacacagattcctatccctcaatattacccagggactggagtctactcctggaccccagttttatgtttgagactctactccrtgttgatatttgcctgcatgaatctaagcacagttaatactttttaactctcatgcccatgatctgccaaaatgaaatgagatgtatatctttcttcattggacgttttttagtgccacctgcttgtctggatgaatgtcacattctgtctatcattgaactcatgaataggtaaaacttgttcctggatgtttctc

SEQ ID NO: 644963 - DNA, 614 bp, Homo sapiens
tttctaaattttccaaaagtataattattttcattttatatgtcataaatcctggttaggttgttaaatgcataaaagtcttgagagttatatattcttagcagattgtttctttkaacataaagtgatgttcctatttcttttgtatttttggttcctatgtactagacatttcaactctttattttcaaaatttctctagccttagattttagttgtcacttttattaactccatatagctagttcttttttaatcttatttaatgctctgttttaataggtgaatttagtaattttacttttattgtattactgatatattggaccttgaccgaatctccaagtagttgttgtagcctttacttccacagtctgtacagatataccaatacaccatttcctgggctaatattttcatttgcacatctcctattgtttattatccaagcttcatataatatatatacacttctcaatacaatggctttgtccagtgtttgcatagaataaaattatgtttcatccacaaaactcatacaatgtttttcacaaaattaagtaggggagaaatctagagttatttttcatatacattattaaatgggatgacct

SEQ ID NO: 644964 - DNA, 580 bp, Homo sapiens
ttaaatgatcaataatagagataaatatgtcttttatttctacctaaaattttatttcttacaaaccttgctttctggttttaagtacatatacctgggtacatataacaactagtatttttgtttcrttttaagtatttatatactttacacataattcatgtacattgtcttctaaatctcaatacattattttctaagctgtaacttaaaagttatgtatgtactagacacttatataacatttttggctttaatattttccaatgggaggacattcaggttattatgtttttttctgttaattataaacagaaataaagaattgtatatctgtttattctcatattttaattttctataagatcagaatttctaaatcaggtttgatgaggttaagctacagtaagaaagaaatttgaaattccctgtgtaaaccataaggattaatttgtagctcacactctttggtcagcatgaagcattgctgcttattcttataaataacttcaatattcagtcaggtattgcaaaagacaccatctgagacaatgatgagaactgatctgagaaagaaaga

SEQ ID NO: 644965 - DNA, 515 bp, Homo sapiens
catgtataagagtttttgccactcctttttttcaaaaggtgaagcttaattcctctccatttgcatgcaggttaaatttactgcctagcacctaatgaatagaatatggcataagtaaagctgtatgacttttaaggtcacttcacagtatgtatagcttccacttgactaattctctttgacgcactgctgatatgtcatgagaacattcaakcagctcatagagagacctacactgaaaggaaatgacgtctcccatcaacaaccagcactgacttgtcagccatgtgagtgagccgccttggcagaagatcctctcctctcagtcaagctttcagatggctaaagctctgttctaaatcttgacagcaacctcatgacagactttaagtcagaaccactgaactaatctcctcctgaattaccctcccatggaaatggtagagatcataattatatttttagttcaaaatggtgactataattaataacaatatattatattcttgaacatc

SEQ ID NO: 644966 - DNA, 462 bp, Homo sapiens
aaaatatttccacaaatgttactctaaccaccatgcatgtcctttaaaataacattggcatatagtcatatctatatataattagggctagtgtttctgtgtgccatgttgaataatccaataccaaaagtagtatatagggaatgtactataaatgtattttcaaatagaatataatttttttgaaatatgtacaatgtaaccaagaaaacagatggagctcttagtgagttgatgaaaactaaattgcaaaaattatttttcaaagatacaaaatttctgtcaggaaggggtaactgaagttataataaacattcatattttatgttacaaagaaggaatctatacaaatgtcacattaataatctaaggaaaastggtgggaaacaaaatataagcaatttgtaaatctttttttttttttttttcaaaatgggatgtatttgataaaagaaaaactta

SEQ ID NO: 644967 - DNA, 629 bp, Homo sapiens
atcattttattgctactatgctctgagcaagagtcactataaagtcatggagacaagcatataggccagcccaaagcgacaggagcaagagactcataggacagagatggaggtttctcccaggctaacagattaccatattagaatagagataaaggcaaggttatagatacatagtaagactggttcattctagaaccttaagggtgaatggagtatgccctattcaggataataggaaagtaaaaaggcatactttcttggtttgtttttcctttttttttccctctcttctctcctcacagatgcataattttgcctccacaacacaggacaagctcctcggatccatctcccaaaactgggaaaagtatgattgcctcacaccttaaaacaaacaaacaaaaaactagttttcctttgtaatattattcrgcgtagaaatgaacggggaggaatttacaaaagtcagtcttggaactcagtgcccctgtgcaggaaatccttaaattagctgcctcagtcttttataaccaagatcaggacaaggaacacagagctaaagaaaaggagaaatgcagaaagaagaggcaggtttgattactggctgctctgtcagcccaccagcc

SEQ ID NO: 644968 - DNA, 346 bp, Homo sapiens
taggataaagttaaagatttaaccaagttgtgggagttatgtgaagatgaatttgtgaaagaaactctgtgtgttatgtaatcatattggctaaagttaaaggggtattatttattcataaaytgaacatcaaaataaaagtacaacatagttttcttagagcattgttctgctctttaagagaaaattgtaaagggttgtaaaaggtatatgagaatctcaccttatggtcaaactgattaagatggaataggtttgtctatgagattttattaagaactggatttgacatcaatattacacaaatgcaaagataaaaatcaggccttctttgggctgtatttgc

SEQ ID NO: 644969 - DNA, 641 bp, Homo sapiens
caaacactaaattaggtgttgttatgaaggtgttttgtagatgtgactaacatctctaatcagttgacattaagtaaaggagattatcctcaataatctgggtgggtatgatccaatcagtcgaaaggccttaagaacagaactgaggctttcctgaagaagaaaatctatctgtggactgctgcttcagctcctgccctagaatgttcagcctccccttttctaatggtcttctgccttgcagatttcaggtttgtctagctactcagtgctttgctttgtctctctctctctctctgtctcttgctctctctccctctctgtgtatatatgtatacatacatatgcatataaatatatacatatatgttagcacatacatatatgtgtagcacacacatcacatacatgtataaacatatgtcatatatactacatatataatattggctctgcttctgtagtgaaaccctggctgatacagtagccaatttctttccagaattattatatcaatagtttataagaatgtcttactcagcatattctaactcagcacartactaatgttgagtattattattccttagaaatgaggatctattgaccttttttaatggggtattttaaccgagaaatgc

SEQ ID NO: 644970 - DNA, 590 bp, Homo sapiens
attatttgactttggtaaggaaactacacacccatatttgtgccgattacaaggtggtcccacctggtttagcatttgtgccgatttttcatattgtaataaggcattgttattcattgttgcatgataacagggccaagattggttggcagatctccagttcttatagttttggctgtggccttgtctaatagtgtctcaaacgtttgtgtagtgaatatagtttttacttcaatgtgtgtttaaatctgaaagatgcccagaaatatcacatatttttcagacacaaaaacatttgtatctaaacacttcagatacgaaacayttgtatctatatctatatctgtatctatatctatatatcatctcctttcctacaacaacatgcacattgtacaccaactagtaatgtctcatagtctgtgagagcctgaggttaccagcccacaagttagtggagtcagttggaaatatgggaaattatagtgtatgtatacatgcaatatatttagaacttttcagtatctttggtattaaaaaaatcctacaataaacctttttgggatcaatgacctaacaaaaatgaaaaa

SEQ ID NO: 644971 - DNA, 590 bp, Homo sapiens
attatttgactttggtaaggaaactacacacccatatttgtgccgattacaaggtggtcccacctggtttagcatttgtgccgatttttcatattgtaataaggcattgttattcattgttgcatgataacagggccaagattggttggcagatctccagttcttatagttttggctgtggccttgtctaatagtgtctcaaacgtttgtgtagtgaatatagtttttacttcaatgtgtgtttaaatctgaaagatgcccagaaatatcacatatttttcagacacaaaaacatttgtatctaaacacttcagatacgaaacatttgtatctatatctatatctgtatctatatctatatatcatctccttycctacaacaacatgcacattgtacaccaactagtaatgtctcatagtctgtgagagcctgaggttaccagcccacaagttagtggagtcagttggaaatatgggaaattatagtgtatgtatacatgcaatatatttagaacttttcagtatctttggtattaaaaaaatcctacaataaacctttttgggatcaatgacctaacaaaaatgaaaaa

SEQ ID NO: 644972 - DNA, 546 bp, Homo sapiens
agtggtgtgatcttggctcactgcaacctccatcctgggttcaagcgattctcctgcctcagcctcccaagtagctgggattatagacatgcaccaccatgcctggctaatttttgtatttttagtagagagtattttgtattttagtttcgccatgttggccaggctggtctggaactcctggcytcatgtgatccacccgcctcagcctcgcaaagtgctgggattacatatgtgagccactgtgcctgtcctaagcactgtgctttttaatccccaacttgtgaaatggaaaacatttccctccatttaacaaccatgggaaactcagaattaggtgtttaaccagcatcatatggctagtgggataaaatacagatctattttgagaagtatacattcacctcagtacactgatttttcacttttttgaccattgtttcattctacatgtctgtagattatgtcccttatgtcaatgctgttgattcaaggtggagttcatatggcaacgaggccacatcatcagcacactatgttgaaagg

SEQ ID NO: 644973 - DNA, 582 bp, Homo sapiens
tctcactgctgtactaatagcagagattaaaacaacaggaatgttaatgcttaactgtatgtaatggaagaaaatttactgctttaacttcttcgtaacttggattgactggcagttagccaccttttttatatcagtatggatacagagatgaaaataaaacccagtattcaaaagtatcatttatctatattttcattttacctttaaaatattaaaataaaatacatttacttccagagcattagaaaatacataatgtacaaggaatcagaagaaaaagcctagaatatgatagcaacatttttggtgtacctcttttagttttctccctgtaaaaatattgtcatattggaaatacattttctattctggtttttttctacttagatttttctcatgtaattaattattcttcaaatacatacattttaatcactgtataatattttctgtgcgaacgatttataatttacttaatctctaacctactgatagacatagacrttgtcaggcctctgagcccaagctaagccatcatatcccctgtgacctgcacatatacatccagatggcctgaag

SEQ ID NO: 644974 - DNA, 588 bp, Homo sapiens
atggcaagttctagaaatagttttggaataactatagctaattattgaatgttgaaaacatagattstaattgtggaaagttttagtcacaagatatcttaaagttgaagacaaggaaatcttttatttgtaatgatgtgtcttgcacatggtagtcattctatgcagctatttgagtggaattgattgtaaatgaagacaaaaatactacacaggctatcttcatgcataaaaatcagttttctgctagtgtgctatcattctgtttcatatcactgcttcattctattcaaaatatttttttattctagaaagaaactaaatcataaaaagaaaaaataatcattgaaagagtagattctgctttattttttggatagaatgatattatcaccatatctagtgataattttagcctttcttcatagaatgtaatttgttgaaaatgtagcctccaattgaagtatttctgattacaatgtacatgtttctatgtaatttggtatctttcattatttctgtgtatacttgaaaaacaatttctttaaagttttcatttcttttgagttgcttgattgatttttatag

SEQ ID NO: 644975 - DNA, 552 bp, Homo sapiens
tcaacttcattccagatacagcctgacaaggaaccagctatgtaaaagatagcagatgtctagaactttcttctacattgattagttggtatacccagagtgatgtgaaacatctccagtgtttcccaaactccagggtctaatattttctcctaacctcttttacccaagtcatatttaaaagttttctttctgtcaaattttaaatttataattttttagttggacagttttaagyatgttaaaatattataataactcacttttagacttttagaattttttttattccttgtaactttacagctgacacaatggccattattattactttgatttttaaccctgtttttagaagacatggtttttacgtagtgtgatcgtaggttgtactctgtattgtaactcagatttttttcacttaagattaaatcctaaaatattttcctaattcatggtatagtcttgataatgttaatagcagcaaaatcattttccattaagtgaacataactccttaaccattgcctattgtgggacatgtccatagct

SEQ ID NO: 644976 - DNA, 554 bp, Homo sapiens
ttgtcatatgattgtacaagctttggtataagtctcaataattttgtaatttgtcacaaatcttctgtgggaagagtcttctgttcttccaaaggaaaatggataatcagtataaaaacaggcaacagtcatgtaaagagtcaaggctccctgggctggacacagtggctcacacctgtaatctcagtactttggkaggccaagacaggcggaccgcttgagcccaggagttcaagaccagcctgggcaagccaacatagtgagattccttctctacaaaaaaaagaaaggaaaaaagaaaaacctcaggttcctaaaggaaaattttatctgatccccattgcaaagttttgttttattccaatgttccactgtagatatgctgatttggtgggcctgggaaatttatctgtaggtgtaaaattacctcttgtgaatcccaaacttggaatccactagccttggtttcagagattggtcacagcttttgtatgtctgtaatccatatagtcaagttgtgccgtctggatttgaaataatcagagagaggaatg

SEQ ID NO: 644977 - DNA, 554 bp, Homo sapiens
ttgtcatatgattgtacaagctttggtataagtctcaataattttgtaatttgtcacaaatcttctgtgggaagagtcttctgttcttccaaaggaaaatggataatcagtataaaaacaggcaacagtcatgtaaagagtcaaggctccctgggctggacacagtggctcacacctgtaatctcagtactttggtagrccaagacaggcggaccgcttgagcccaggagttcaagaccagcctgggcaagccaacatagtgagattccttctctacaaaaaaaagaaaggaaaaaagaaaaacctcaggttcctaaaggaaaattttatctgatccccattgcaaagttttgttttattccaatgttccactgtagatatgctgatttggtgggcctgggaaatttatctgtaggtgtaaaattacctcttgtgaatcccaaacttggaatccactagccttggtttcagagattggtcacagcttttgtatgtctgtaatccatatagtcaagttgtgccgtctggatttgaaataatcagagagaggaatg

SEQ ID NO: 644978 - DNA, 554 bp, Homo sapiens
ttgtcatatgattgtacaagctttggtataagtctcaataattttgtaatttgtcacaaatcttctgtgggaagagtcttctgttcttccaaaggaaaatggataatcagtataaaaacaggcaacagtcatgtaaagagtcaaggctccctgggctggacacagtggctcacacctgtaatctcagtactttggtaggccaagacaggcggaccgcttgagcccaggagttcaagaycagcctgggcaagccaacatagtgagattccttctctacaaaaaaaagaaaggaaaaaagaaaaacctcaggttcctaaaggaaaattttatctgatccccattgcaaagttttgttttattccaatgttccactgtagatatgctgatttggtgggcctgggaaatttatctgtaggtgtaaaattacctcttgtgaatcccaaacttggaatccactagccttggtttcagagattggtcacagcttttgtatgtctgtaatccatatagtcaagttgtgccgtctggatttgaaataatcagagagaggaatg

SEQ ID NO: 644979 - DNA, 534 bp, Homo sapiens
tccaatgtgtataaaacatttccaaatggctcattccttcttattaagtaaaaattcctgtattaggagctcttgtttttggctcttaaattggattaataaagtcctgaatttggtgggaaattccaaartccaatcatcaaaaacatgttggaggagttatgtcttatttttttcttgtcaaatacatatattcttgaaacatgtaaaagaaaaatatattgcttttctcattctgctattcaaaatgggaatttgggcatttggtctgacattcatcaaatatttactatgtgctatctacgttccgggttttattctagcaggtacagtggaaaacttagtaaacatggtcctctcaggtaaagaaggttagatgagagaaaacagacattaaacaaatttttacaaataattcgtgaaatgattacagttgtgcaaaatgttaagaagtaccatgcatgcatgtagcctaatgagagagagagggccagatcagggaaaagaccctgaagaattttatttacactgaga

SEQ ID NO: 644980 - DNA, 527 bp, Homo sapiens
tccggactgggaggcgcccttcgaccagtgcgcatgcgccctgggcctgtgcccgccccaggaagagcgctcccgcgaactgcggcggtggtggctgggccaccagagggaagcgggtgtggcccaggcagcgggggctgggacagacctggaaaggaggaagcggggaaggaaggttgtcctgtcgggctgggggctcccgggaatccggaggccagcagtggaaccgcaaggctctacagggcagatctgcctcccgkgctgtctcagctacgccgagtcgttggctcagggcggaggattttcctattggccgcgttatttgaatggaatggaggataggtcgtgaagtaggtgctgctggttgatctttctaaggaactcagatgaacttgggcatgtcagaattaataaccttttaaaagtggggtctgtgtggccgagggttttaatggtaagttcttgaggtgaccacctattgacaagggttgacctgctgtaattgctgtggcttcctgccaaccccc

SEQ ID NO: 644981 - DNA, 406 bp, Homo sapiens
cacactgtgttccacaatggttgaactaattcaccttcccactgatcatcagagaaatgcaaatagaaaccagaatgagataccatctcatgccagtgagaatggtgattattaaaaaggcaagaaacaacagatgctggtgaggttgcagagaaaaaggtgctcttttctgtagagaggttagggaaagcatcttggggaatgggtatctgaggaatcacctgggcgcaaggtcaggttttggaccaygtgaacatctgggaaagaatattctaggacaagagatgtaaaaagcagagatcctgagacaaaggtcctacttgaagcacatcatgggtaacagggagaccagtgtggctgagcagagagggttgggggagtggttagaggtgaaagagggatagcc

SEQ ID NO: 644982 - DNA, 607 bp, Homo sapiens
tcaagtgtctccctgaattgaatttgagtgtgaacctggttccctcaattataaactagagtccttgagtaagtcacacttcctctcaaaatttacagcctcatctataaaactgagacaatgatactgacctcaggttgctgtaaatattaagtgacatgatacatgaaaagctcttagtaaaatgctaggcatgagagcagtactgaatacagcaatagtagcagccgcmgttgctgttattgttcagtgtgacaataaagccagtgcaaaaagaccagatattgtagttaatcatcttgtagaatgaaagtgagtcttatacctcccctataaacttaaaaccttttacttgagtgatataaaaaacaaaaaatgaaagcaggtctttgttaccctaacatgttggtaatctgaaccacttgccatgatccatctcaaactctgaattcacacttgctttccgatcccggctgtatgtacttgatattcattcttgttcttatgatcttcattggtctctgaccttcagcacaatttatatagctttgacctttagcttcccaagtttactatgatgagatgctgactttggtattcccatttc

SEQ ID NO: 644983 - DNA, 533 bp, Homo sapiens
gcggggacaaaaatgatagtcttcacgtttcctaaatttaggtgggagtagacaaacaagtacaatacagcaaagtaaatgctaagggagatctagctcatatggtatcaaaagtatgcataaggtaatgaatgaggacgtaccataaaatttagcaagatggaagatgtggagatgaaacctcagttgcagtgaattaaggaaaaactggaagttgaagtagtttggactatttctttcaaggagtttttctaaaaaggaagaaaagagatatggaaccctggctgtaggaagtttgtagttagtttattttatttttttttagatgggatggtgtagtgtagtatgtttatacctcaggagggataatctagtacagatccatatgctgagcatacagaaaactgaagaaataactgcatgaggacagggctccagtgggacagaagggagggtctacaggacatgagtggatggttttgccctagttaagaayaaggaggtattatccatgggaaaatgcagctgggcca

SEQ ID NO: 644984 - DNA, 554 bp, Homo sapiens
actgttaaaagtaaatttttttaatactttcatcagtcatttggtaatttatagttatgaaaattatccagataatcattagacacttcttgaaatgaaattgttatgaaagttgtgcatagtgttattgagtcaaaattgttcaaggtctaaaccattgcaaacttatctgaaatattgaaatataactgcggtcctggactaattgtgtccaaggccatccatcccactttatgtgattttctcctttagtgtgtcaaggccaaatatcaaactggttcccatatgctgtccttcagggtttcctgaggacacatggaactcattggtcctgacctttgcttgtatcctccattagttaatgaagttaaaaacaaaaacttactctaatgaatactgagcagatgtaggagtgtgagcgttcttgcaaacaaactgaaaactatcyaggagtacatttgtatggcaaaactatttgatgtttctttacctttcactccgataaagttcaaggtgcttctgaaaagagcctatgggttcccgagagaaacctt

SEQ ID NO: 644985 - DNA, 474 bp, Homo sapiens
tgattggctttcagtaggagcaggaagagttcattctaagtagcagaaagaaaatggagctatggacaccaaggaaggtaggataatagatcaggtggtgagaagacaaagtaataagagaatgttggagtgttaaaaagagaggcaatggtataaaacaggaggaagctgcaagatgaggggtagagaagaataagttttaaaatagtcaytctcataatttaaagtcaaaaaaataacctagtagcttaatattcagattcctgtggcctactcatgagtgagactgcagcagttatggatcacacttggagaaactttgagttaataagaatgaaatgaggcaatgggagataccctcctctaggcaggagaaacataagatccacaaattctaaggagtgtggtcctctacagggacttgggataaaaaggaatagtcaggtgtgtggatttcatttccaggcaagaaga

SEQ ID NO: 644986 - DNA, 288 bp, Homo sapiens
atttcaaataagttgaaataaaacttcttaatcaaaaaagataagggaggagagtggcaattcaaaggtgaaaagatgggagaagagaaaatgaacaggagagcccagtatggtggctcatgcctgaatgmcagcaactccggaggctaaggcaggatgatagcttgagcccaacaattcaagaccagcctaagcaacatagcaagaccccatcgatttaattaattcattcattaaaatgaacagaagaaagggtagaatctagggatataacaagataccagtgaa

SEQ ID NO: 644987 - DNA, 632 bp, Homo sapiens
cttgtaattgggcttctgctttggaatattttctaaatttctaggcataaactaggaggaaagcagtttaccctagaatggggctaagtctgcctatggaggggactagattgcraaaaccttgagttctaggcctaatatgatacaaacttgctatttgactgtcacaaagtcatatttattctgtagaccttggggtcctcacctttagaacactgtacttattattaataacttagcaggcttggacataagttgtaaagggttctcagcaccatggactattcccacaagtcaactggtctgctgcttgagagcagcagctaaaactggagggagtttgtccacttcaaacacacagactcaaccagtggagcagggtcagccccgacgtgaaaggatgctggccagggaaggcagggactcagaaccacaaccagaacccaagccaagaggacctgggttcaggacaagtctcagttttcggggttgggggggcactgaaaagacagactgagggaaactgaggctgaaagtcaaggatatggactgaatcaatatagctgttaggatgtggctaggagaccctggggttacttctagcttaccagttctggagacagaagtatcaa

SEQ ID NO: 644988 - DNA, 632 bp, Homo sapiens
cttgtaattgggcttctgctttggaatattttctaaatttctaggcataaactaggaggaaagcagtttaccctagaatggggctaagtctgcctatggaggggactagattgcgaaaaccttgagttctaggcctaatatgatacaaacttgctatttgactgtcacaaagtcatatttattctgtagaccttggggtcctcacctttagaacactgtacttattattaataacttagcaggcttggacataagttgtawagggttctcagcaccatggactattcccacaagtcaactggtctgctgcttgagagcagcagctaaaactggagggagtttgtccacttcaaacacacagactcaaccagtggagcagggtcagccccgacgtgaaaggatgctggccagggaaggcagggactcagaaccacaaccagaacccaagccaagaggacctgggttcaggacaagtctcagttttcggggttgggggggcactgaaaagacagactgagggaaactgaggctgaaagtcaaggatatggactgaatcaatatagctgttaggatgtggctaggagaccctggggttacttctagcttaccagttctggagacagaagtatcaa

SEQ ID NO: 644989 - DNA, 641 bp, Homo sapiens
aatatcccaatttttctgggttttaataatttaatttttaatagtttttatattttatattttattctttttaactgtatttttgtctatttgtacacatctaatctccaacagcacagccaggggctccaaggatggccgatgaggaacagtgtctgaagtagtgtttcccaaagagtcacccctctggctatgtgcaaatccatggttcagactccagactgtggaatcaaagtttctgggtatgragccaaggaatcttcatctttttcaagtccttatctctacccttgtccaacccagcaattaacatttatcctaaacattgaaaccttcccttctaaagggaaaataaagagaagtcccagtttggccagtggctacctctatacacatggggcaaactgcatcactacttagaggatcattttctcaactctgtaatgatggatttagattaactgtgttagattctttcaatgctaaaagattgtttctcagttctttttttctaaaatgggaataatacctttgttctgcctatgtaataactataggatacatgaaagtcaaatgagttaatgttcactaaagctttattttgttactatttgacaattttgttggttttcatcccttag

SEQ ID NO: 644990 - DNA, 641 bp, Homo sapiens
aatatcccaatttttctgggttttaataatttaatttttaatagtttttatattttatattttattctttttaactgtatttttgtctatttgtacacatctaatctccaacagcacagccaggggctccaaggatggccgatgaggaacagtgtctgaagtagtgtttcccaaagagtcacccctctggctatgtgcaaatccatggttcagactccagactgtggaatcaaagtttctgggtatggagccaaggaatcttcatctttttcaagtccttatctctacccttgtccaacccagcaattaacatttatcctaaacattgaaaccttcccttctaaagggaaaataaagagaagtcccagtttggccagtggctacctctatacacatggggcaaactgcatcactacttagaggatcattttctcaactctgtaatgatggatttagattaactgtgttagattctttcaatgctaaaagattgtttctcagttctttttttctaaaatgggaataatacctttgttctgcctatgtaataactataggatacatgaaagtcaaatgagttaatgttcactaaagctttattwtgttactatttgacaattttgttggttttcatcccttag

SEQ ID NO: 644991 - DNA, 562 bp, Homo sapiens
tgtttccaattccactgtctatctgaataatatttcatggtgtgtgtgtgtgtgtatctcaaaattaattggcacaatgtacattatttgggtgatggttacatgaaagctctgtaagactgagttggacatcaaattggaattttaaaaaatgtatcctaatcagtctgcagggtggcagcattatacatacatatgtgtatatatataatatatatgtattatattttatatgtttgttttccttatccaatcatccattgaygggcattaagttgataccatatctttgctattgtggagctgtgataaacatatgagttcaggtatctttttgatataatgatttcttttcctttgcatagataccccacagtgaaattactggatcaaatggtagttctatttttagttctatgagaaatctccatactgaacaatgaaacaatttatgatcgatttccatctgaaagtgtatcttgaagctgttcctatatactccctcgttgtggcctttcttggcctaggccaagataaaatttcctttgctcactcatttgct

SEQ ID NO: 644992 - DNA, 498 bp, Homo sapiens
ataataagtgttagtatctttccttaagaaatttatagcccagctacaatttattatttttttctttggttttattgactaacctaaactgtgctgagccctttgccaaacaagttaatcttccaaatatttttaaattgtttattgtcagcttttccgttgcctcctcttattatctttcctatttggcaatacaattttaatttttttaatcattggctttgaaaaaaactttgctaataggactggttcagagtatttagccttcatgtcatcccctttcgaaagaaaatttctcaattrgattggaaaatttaattccttgcctgtatgttttccaaaacaaggactatttccatttactttcctgtgaagctgaatataattccagtttctcacaatttgctactcactgttctcctggggaaatgaatgattcatctgacttgtgtctttgggagagggaatcaagcatgtccaactcagatattttctctt

SEQ ID NO: 644993 - DNA, 565 bp, Homo sapiens
atttttttgtaatttgtatcttttaataatttattgtagctaaattttttaaatataaatagaaacaataaaaagacaaatacagttttgtcttttaaatctcctggtagaaagaatatccctttacataacaccattatggtattagagtattctgaatataactatgtattacatatataattgagattttttcattactttcatatgttttatgttattaattagtagccttgtgcttcagcttaaattttttcctgtagcattttctgtaagaaaggcctattggtaatagactacttatgcatttgtttgtctggggaagtttatgactcccttwtttatgaaggatagatttttttaggtaaagtattcttggttgccagtttttgtttttttgcttttcttcagcactttgattatatcaacccattctctcttagcctgtaggatttctactgataaatcagcagattaaactgtattgtgacttctttgaatatgatgtttcttatctgttactgctttctgaattctttatttgactttgaattttagataattt

SEQ ID NO: 644994 - DNA, 546 bp, Homo sapiens
taccttacaattaactcaacattttcaggtaaaaataaatacatcattgcttattacaatcaacaatttgagggactttgctcataacagttggstgaagacagttcttcttggtactttgtaaatcaaaaataaaatgctaagccccaaaactgaccaaatggatcttccttttggtcaaggggaccctagagattgtgactttgttttaatttcttcttctgattataccagaccctatcaattataacaattacatacttattcaatattttcaactggtataacaagtacttcgtgtgggaatagaaaaaagatacagttccaactctgaaagggctcagagttgaatagctatagcagagaacagaaactgcaacactttctataagtgttctcattgtaccatgtacagtgggctgaggacagagagtacagagggtagatacccaattcaatttttaccttttcttccaataatatgtaatactccctgatcaagatggttttaaagaacactctgagatggaagtggtgctacacttt

SEQ ID NO: 644995 - DNA, 633 bp, Homo sapiens
tttgcatacagatcatctggaagatcttgttaaaatgcagatgttgattcttggcctctagggtgaagcttgagagtttgcatttctaataagctttatgaagaagccatgccactggtctacagacctaacttgattattaagggattaacacaaaactgacagattagaaatttcctaactctgcttccaattctattttaatattagaccactgtatatttcacttaataaatatttattgagcatctgcaatgtgcaaggtctgctttagctggctgggaattcagccgtaatttttttcccartgccttttaggctttagttcaaaaaagcaggtctccacttcaagacctctctgcaacaattctaatacagctttgacgttaaattaagagcaaggattttggaaattagaaagatggctctgccatttaatagccttgctactttgggtagattaactaaactctgagcctcagtttccacatctatgaaggatgaaaggatatatttgtaaatcattcataccatgagtaataaacgtcaattggtatttttcttgccccaattgtgtcgttcactaagccacagggtgaaactgaacctgtgggcacagacacacttacagtt

SEQ ID NO: 644996 - DNA, 611 bp, Homo sapiens
tctcaagagtgaggcctactgtaaactatgaactttgggtaataatgatgtgtcaatgtaggtttgtctgtaacacacgcacaaccatagagtgtttatagtggatgaggctatgtatggatggaggtggtggggtgtgtgggaacactgtactttctgtttaacyttgctgtgagccaaaattcctctaaaaaataagttctatttaaaagaaactttcaaatgtgatgaataacattaatgtatccatccaaaaagctcaaccaacgccaagcaaaatacatacaaagagatcgacacctagacatgtcatagtcaaactgtttacagatgaaaatcttaaaagcagaaaaagaaaactaacttatcacatataagacacttacagaaaacaaatagcaaaatgacagaagtaaattcaaccatgtcaacaattacattaagtgtaaatgggtaaaacattccaataacaactcagagattgtcagactcaattagcagcaagatcaaacccaatgctgtctaaagacacacattttatattcaaagacctctataggttaaaagtcaaatgatgaaaatatgtatcatgcaaatagtaaccataagac

SEQ ID NO: 644997 - DNA, 489 bp, Homo sapiens
tttggcccatttagggctttttaaaatcttaatatttaaaaagaattctacaaacacttcagaaatatgttctcaacagaacaggctatcaattcagtttgatcaatagttatttattatgtacttacttttggtagattctgtgttgttcatttatgtcacacagcatcatccaatacaatgcttayaggaatcccatgagacatgctctgtcctcaccctcatgttataagaagtgagagggcaagtaacctgatcaaagtcacacatctcgcatgtaacaaggcctgaccttgaaccatagtcagttttacatcaacatgcaggcatttaattagtactaaacttcctgcttctatcttgcactgttaactatccattaacctaacaccaaacattttgctctaccacgctcttcggcttttccatgaataggctcataacccaggatagagatgctcttcctgaaaagaatgtcaaaaaactaat

SEQ ID NO: 644998 - DNA, 642 bp, Homo sapiens
aatcactggccactggtgatcgcctcaacctttggcccctctcccttccccagcggttggrggtagttggttcccctggcagccagtccttatcctgagggtatccaggagccccccaggagtcacctcattggaacaaaagatgctcctatcactccagaaattccaagggatttcagagctctgtgtcagaagttcctatcactcaggaaattacaaaggttttgggctctgggtcaggaactgagggcaaagaccaaatacatatttcttcttatatcacgatatcacagtcagtgacaccaacagaggctgcgctcagtggggcaacctctcctcctccgcagccccagcctcctccctgactctgccaggcagctagctccagccaggtcctccaacactccccttgtcctggagggccagcctggggcctggcaacgcccagctgttcaacatgaagttgccccaggacccccaggatcaccctggaggggcccccatcaggagacgcaagacccctgggccagggctgagagggcctgttcacttgctgagctgctgatgggcaggtgacggcctatcctgcagcagttagagggcagctagggagacgtgggctcctacctttctctccctgca

SEQ ID NO: 644999 - DNA, 602 bp, Homo sapiens
caaactctccaacacccaaaggagaatgttcaatagcaaaaaggatagatattttttcttaaatgcagtaattgtccaaaattgtagtaaattttgtttcattatatataagggaccacaaatttctcatacaagattttctttttcttraatttttgaattagccttctctttttttatatataggaaaaaaattatttcttcactatgtcattaacataatcccaccctttagagacagaaagtattgactagactgcacatcatttaagaaaatttagtacataaaaaaaccataaaaacttaaaggcaaattaaaaatatagacgataatgaattaatatccttattaaatgaagctcatttataaaaaatatggaaaattgacaatgcatatacataggcaatttataaaagaagatatatgcatggccaataagcatatgaaaaggtattcaacctcatcaacaaagtgttacttctcaccttctgaatgggcaaactttttaatcattgttgaagaaagtagttaagtaggcactctgctgatgagaatgcaacatattaaaatctgttatgaaatatgtatttcatatacatag

SEQ ID NO: 645000 - DNA, 583 bp, Homo sapiens
agggagggaaacatcacacactgggcctcgcaaggggtcagggggaaggggagggagagcattaggacaaatacctagtgcttgcagggcttaaaacctagatgacaggttaacaggtgcagcaaaccaccatggcacatgtatacctatgtaacaaacctacacgttytgcacatgtatcccagaactaaaagtaaaaaaaaaaaaaaaaaaaaaattaaagacattatatgttagaatgccaaaaaactggcacaaattttttaaatacattggaaactgatgtaggaagaaattaatgtaaactggaaaggtcagtgaaagcttcctggagatataagcgcagttctgaagtacgtgccggatttgaacaagcagagaaaaagaaaaagggtgacacatagatgccgagcagataggtcactgtgcctggctagtatttatactcctatcgctttactccattaccacgagtgctgaagctaccattcccacagtctccatcagttcctaccttctccctctttaattaggcttcagagcaggcttcccaataagctaggtgttcactgcaaatagccca

SEQ ID NO: 645001 - DNA, 583 bp, Homo sapiens
ggaatccattaatatttagtctatatttttttctttgtgtttgatctgttatagaaaacaaactgtaatgttgttaaataaaatgaatgcaattgagtgtacgcaggtatggacattctcctaccatcacatcttatctgtcattcacatgaggataaaataatgtctcctgctttaaaagaaaatttccaaagtgctgaaacaattttacacaattcatggtgaatgtaaaaataacctacaatagggtcttatgccaaattaggcagcactttagagaagcagggaataaaggctcaaagtgagagggagctgggaagggagcattctcctccttgtcagaataattggttcattaaatggaaggaaagaaggggaagagataaaatgggaggagagttcccactattaaatatgtattgcacaaggtctctctcaacttgctttgcagcatcacagctaatgtacacagaccctaataagcaacaaagtgaatagggagctggactcccaattgttcagttctgttttttccartgataaagaggagggtgcactggtttccctaatcccagggatcagg

SEQ ID NO: 645002 - DNA, 369 bp, Homo sapiens
ttctagccatcccaagaatgttggcaggcttgtccatatgtttggaggtgcaattataatggttcctgggtttcaagctccagtctccatctcccctcagatgcttgctttcccataaggttccatctgactactggaatatcaggggatttccataaagacaagactttgatcttggcaaccctttggtaaatagccagggttctcaatctttgtgcagcaccaaggtatttttaagatgtctgttagtttmgtctcagtgttgtaattccatctaaataaacaatgaggctatctgctggagaaaaggctgaatctaagagcaatgccgccagcatgccctcttcccagaataactccacgctagcc

SEQ ID NO: 645003 - DNA, 369 bp, Homo sapiens
ttctagccatcccaagaatgttggcaggcttgtccatatgtttggaggtgcaattataatggttcctgggtttcaagctccagtctccatctcccctcagatgcttgctttcccataaggttccatctgactactggaatatcaggggatttccataaagacaagactttgatcttggcaaccctttggtaaatagccagggttctcaatctttgtgcagcaccaaggtatttttaagatgtctgttagtttcgtctcagtgttgtaattccatctaaataaacaatgaggctatctgctggagaaaaggctgaatctaagagcaatgcygccagcatgccctcttcccagaataactccacgctagcc

SEQ ID NO: 645004 - DNA, 567 bp, Homo sapiens
actgcagacaataaaaaaaaaaacaaagacaaaaatagyaaagacaaaaaacagaggaaaaaaaggaacattacattcaaataagcagcagcgagacaattggctgccttctgaaaagaaacaatcaaatgcaaatatcttcaatatgctgaaagaaaataactgcctccagaattacatacttagtaaaaataatctccaataattaaagcaaaataaagacactttcagagaaaaatagctgaaacagtttttcacaagcagaccaacacaaaaggaaattctaaatgatgtttctccggcagaaggaccatgattacatatggaaattcagagacatagcagaaataaagagtaagatagcagcacatatgttgataaatctaaattaacattaactacataaaatatatgcctagtcttctggggtttaaaactattaatacttagacctaataaatgataacagcatatatatagaatgagactaaatggaataaaagtattccaacatccatatattgtgcaggaagaggataacggtatcaattattactatgtttaata

SEQ ID NO: 645005 - DNA, 567 bp, Homo sapiens
actgcagacaataaaaaaaaaaacaaagacaaaaatagcaaagacaaaaaacagaggaaaaaaaggaacattacattcaaataagcagcagcgagacaattggctgccttctgaaaagaaacaatcaaatgcaaatatcttcaatatgctgaaagaaaataactgcctccagaattacatacttagtaaaaataatctccaataattaaagcaaaataaagacactttcagagaaaaatagctgaaacagtttttcacaagcagaccaacacaaaaggaaattctaaatgatgtttctcmggcagaaggaccatgattacatatggaaattcagagacatagcagaaataaagagtaagatagcagcacatatgttgataaatctaaattaacattaactacataaaatatatgcctagtcttctggggtttaaaactattaatacttagacctaataaatgataacagcatatatatagaatgagactaaatggaataaaagtattccaacatccatatattgtgcaggaagaggataacggtatcaattattactatgtttaata

SEQ ID NO: 645006 - DNA, 567 bp, Homo sapiens
actgcagacaataaaaaaaaaaacaaagacaaaaatagcaaagacaaaaaacagaggaaaaaaaggaacattacattcaaataagcagcagcgagacaattggctgccttctgaaaagaaacaatcaaatgcaaatatcttcaatatgctgaaagaaaataactgcctccagaattacatacttagtaaaaataatctccaataattaaagcaaaataaagacactttcagagaaaaatagctgaaacagtttttcacaagcagaccaacacaaaaggaaattctaaatgatgtttctccggcagaaggaccatgattacatatggaaattcagagacatagcagaaataaagagtaagatagcagcacatatgttgataaatctaaattaacattaactacataaaatatatgyctagtcttctggggtttaaaactattaatacttagacctaataaatgataacagcatatatatagaatgagactaaatggaataaaagtattccaacatccatatattgtgcaggaagaggataacggtatcaattattactatgtttaata

SEQ ID NO: 645007 - DNA, 283 bp, Homo sapiens
ccaacaagtaaataaaataattaatttatttagagactctgtctctaaattaaaattggtattgcattgaatctttagatcaataaataaaataaataaaaagtcatcaccaaacccaaggtcatctagattttcagctgttgttatcttttagggttttttttttatcattttatgttttacatttaggcctatgatccattttgagtaagttttcatgaagaatgtgaagtctgtgtctagattcactttytttgcatgtggatgtcccgctgttccagca

SEQ ID NO: 645008 - DNA, 473 bp, Homo sapiens
tccctgaaatgaccagtgcctccctaaggacaggcacatcaggtctcagccaaccttcccttccaaacataactcagccagacccctctggtctctaaatagtatctcttctctttgtctttttctgtttcaggcctccagttaccaactcctgtctggtttcatgtccttttctatctggcagtgggaataatgtttttagtgaacactgttctctgggtgacaatacgtaaagaactgaaaagaaagaaaaagtggaatttagaaatctctttggattctggtcatgagaagaaggtaatttccagccttcaagaagacagacatttagaagaagagctgaaatgtcaggaacaaaaagaagaacagctgcaggaaggggtgcaccggaaggagccccagggggccacgtagcagcggctcagttggtggccatcgatatggaccgtcccctgyccacttgctccccatga

SEQ ID NO: 645009 - DNA, 476 bp, Homo sapiens
catcgtgactcttgctggacacagcctaatgatgtgcaaatgatgatcagtacctgtctctttgctaccgcaacggaaaaaaaatcatagcttggttcactaacaaaattaaataaataaaacttataagaacactaaacattggatttttactgctcatgtaaaaatggcacaaaacaaacatacyacatcaataacaagaacatcacctgttttcatatccctggggttttattacctaaagtgtgttatagtgaaactggatagttaatttaaaatataatttttcttttgttacgctcattttattttgaatttgaggggcctgtttcagacttttttttttttttttttgagatggagtctcactctgtcatccaggctggagtgcaatggcacgatctcggctcactgtaacctctgccttctgggttcaagcgattctcctgcctcagcctcccaaatagctgggacta

SEQ ID NO: 645010 - DNA, 646 bp, Homo sapiens
ctggcgattcctctttccaagcaaaaggagcaaccactgagaggattttcctttaccactgtcctttggggtgtcccagaaaatgactgtagcagtgcaactgtccactttatcatgtagagccatctgtaaaccaatactgagttttctcttctttagcccagctggtcataggaaactcccccatgaagccagaggtataggtttggagagagaaaataatacagcaagagaagggaccatgtgtattttggtcactttctcaagtaatttattttatgttcagggcctgttcaagttcaacattacatataccacttccatttcataatggaatgacagtgtacacatcarcttggctaggtgggtcagtcaacagcaagttcatgatgcatagctcaggtcacatggaaattggtggcctttggttaagttttctctactaaggcccaatagcaagccaaaagctgtttatcaaaaggagagtggttatctacaaaggatggcagcttttttgcttcaaagtcctacggatctgtactgtctaatcagcataatattatcaaggtaatggaccaatgtgaagtcttatggaagcgaaagacaatcaaggtctctgtggactaaattatgacttaggaacaga

SEQ ID NO: 645011 - DNA, 632 bp, Homo sapiens
tctctggtctgtttttccagatgtgtattttcggttcttaattggttggcttcttggattgtcacacataatctagaaatcaataattacactgggaaagttaaacttttttaaagggaaggagggagatttactgagcatctactacaggacaggtattatgccagtaactttcacatgtattaatattttctcatttgatactcattacccttctataaagtaggttttactatctccataccttcattttaaagaacaacaaacatacccagagaggttaggcatttgattaagatcatagcgctaatgagcagtggggctgagactaagcctggattttctgatcctaattatgttatacttgttatggtatcacactgtattatatagttacatgacaatgatataaagcaaacccttaagaaatgagttgttctttacatttatatggtcttttctcttttctcycctttcatactctctacccagacaagctatgttaacttactaatgtatatcttaaaataattttctcaatattcatatgatcatatgtacatatatatatatactcatacacatatacacataaatatacacacatattatacatacaggtaatgacagga

SEQ ID NO: 645012 - DNA, 641 bp, Homo sapiens
cacaactcattctagtaaactcctttaagttagtcatatatgggctactctgcttgctcataaaggggcacggcatactagaattcaagttgaaaggattcttctttggtgttgcactgctggctagcacactcctttaaaaatcacatttcaataattcttaaataaattacctgtaaacatttaaagaatcattatcaagtgcccaacactatactatagactgttatgcttaaccaaatagttatgttcatatatagataccgattcaacatactctgccaataatttctagtggtctggtgcctgtggacatacatgcccagttcacagaggtctgtgttatacggccaacgtgtacttttctagatttcagaataggagtycaaaaaattgaataatcctagctgcaatgttttgtgcaatatttctcctctggaagtatgaccttaattattagcaatactgatttttaaaaactatttcacccaattaatcctagtgcttatgttcaggactatgtattcctttattatcaacagtcttcataataattcttagaatcaatagcattttcaagtttgtaagatgagaaacaagtttcattatacagcagtggtacaattatgggaattcaagtt

SEQ ID NO: 645013 - DNA, 614 bp, Homo sapiens
tgaactattttggaaataacatctttgcacatgtaattaagtttagaagagggaacaacggggaacgataggcccttaatttaatataacttccatccttgtgtaaagaagaaagagacacagaaacagagaaatagagaatgccatgtaatgatgaaggctgaaattggggtgatgaatctacaatccaaaaaataccaaggattgccagcaacaccaaaaactaagagaaggtcatgaaacagactatcccctagagcctttagagagagaaagacccagcatacactttaacttccagcttttaaccttcagaactgcgagagaataaatttctattctttgagccaccaagtttttggcaattcgttatggcagctttacaaaccaacagaaatgaatgagtatttttactctacyttccagaaaaacttatctctagatattttcacttattttaaccatagcaataccatatttcttctcttttatatcttaatgatgaatgtaatacaaatatgaaaaagtatcttgtgtaaaagagagaattactgacaaattacaaagttcttgtattgatgattaatattaatcaatgtcctgttccccagaca

SEQ ID NO: 645014 - DNA, 575 bp, Homo sapiens
aatccacagccacatatcaattaacattacacattttacaagaaagatacacccaacacattacagtggatgacttggggagatgggatgcaaatgaggagtgggaatgaaagagaaaagtgaaacagaagtggagtcttacatggatcgatgaggaaaatgttacttgatgcaggaaacatgcttaactccacttttttgaacttgatattcaaaagaaaaaaataagcaaataaaataaacactgtctattttttagtgaatagtctgtggcattcaatattttacttgaaaatattacacctaaataggcacacattagctttgctattatttttacctcttatctcaggtttctacagcaaaataccataaactgggtgacttttaaacaacatamatttatttctcacagtttgtgaggctgggaaattcaagatcaaggccccattagattcaatgtctgatgagggtttgctggttcatagatgttgtattcttgctgtgtcctcccatagtgcaagaggtaaggcaactctctggggcttcttttatgagggcactacacccattca

SEQ ID NO: 645015 - DNA, 608 bp, Homo sapiens
gtcatcttgatagtaggaactcttgatatgacgtgatgaaatggcactttatctctgtcaccttccgcccaaaaacccataatgcctatctattcatgaagcaaatattagacaaattacaatagaaatttgccctataaaatgcttggcccagccaggcatggtgtctcacacctgtaatcccagcactttgggaggccaaagtgggtggatcacctgaggtcaggagttcaagaccagcctggccaacatggtctgaagcaacaagagcagcctctaygaaaatacaaaaattagccgggcatgatggcaggtgcctgtaattccagctatttagggggctgaggctagagaatcgcttgaaccccggaggcggaggtgtagtgagccgagatcgcgccactgcactccagcctgggcaacaaagcaagactccatctcaaaaataaataaataaataaataaataaaatgcttggccagaactcctcagaactatcaaagtcatgaaaaataaggaaagtctgaataacagtcacaacctaaagaagacatgacaatgacatgtaaacgtgaatgggattctagaacacagaaggcatgttagat

SEQ ID NO: 645016 - DNA, 530 bp, Homo sapiens
tatactcccctaattagacgttttgaggattaaatgagacagtgcatataaaatgcttagccagtgtctggtatataataggaactcaataaattttatctgcttttattactatttaatagatgtgtaacacctcttaccaatccttttactgctttctcttgattatctccttccattttcctggctactaamaaatgttttctactattttcatatcccctattcattttcagcctcaaccaaatatcattgcttaatttacaaataaaaataaagacatgatgcctccaaaccttccaaacacttcttgctaaattgtctgcatcagtactcatccagatcctctttcctctggatggtttctgaggattcattgccaattgtgtggtcatggaagttttcttaattatttttgttttgagtttttcatctataaacaatgacaaccaaatcacataatgcaggtgagacatttaataaatgttagtttctttccctgcatttcccagtctttctacctatattct

SEQ ID NO: 645017 - DNA, 562 bp, Homo sapiens
gtggggagaccaacagctccatcagtcaatacaataaagtaaaatgtatgataagcaaagaacaatgtactacaaagcagattatatgagtaactrccaatttcttgttggggaaaacactggatctaagtttaccctgaagtctgaatagtgattgtcctggacagggagataggaaagaatggttccaggcagagaaaacacatgtaaaagtcctgaggtgacagaatataatacacttgaagacatgaacacaattcaccgtagactaaatgcagaatgagaatggggcaaaaaaaaaatagtaatttcagtagagaggtactgaggggctggtttctgcagggacttgcctgcagctatgatggagattgtatttccttcagagagcagggcgatgcctttaaagatttgcaccatcctggagagagggctactggctgtgggaatcaggcaagtcattgaatctctctaagtctcaactgtctcataatacaggataataagggccattgtgaagaataaaggggtcatttcacacagtactctcagaacagtgccc

SEQ ID NO: 645018 - DNA, 562 bp, Homo sapiens
gtggggagaccaacagctccatcagtcaatacaataaagtaaaatgtatgataagcaaagaacaatgtactacaaagcagattatatgagtaactgccaatttcttgttggggaaaacactggatctaagtttaccctgaagtctgaatagtgattgtcctggacagggagataggaaagaatggttccaggcagagaaaacacatgtaaaagtcctgaggtgacagaatataatacacttgaagacatgaacacaattcaccgtagactaaatgcagaatgagaatggggcaaaaaaawaatagtaatttcagtagagaggtactgaggggctggtttctgcagggacttgcctgcagctatgatggagattgtatttccttcagagagcagggcgatgcctttaaagatttgcaccatcctggagagagggctactggctgtgggaatcaggcaagtcattgaatctctctaagtctcaactgtctcataatacaggataataagggccattgtgaagaataaaggggtcatttcacacagtactctcagaacagtgccc

SEQ ID NO: 645019 - DNA, 540 bp, Homo sapiens
tgccctcatgattcaattatctcccacccagtccctcccacaacatgtgggaattcaagatgagatttgggtgggaacacagccaaaccacatcatctgctgtgcctcatcccacagatagcagagcttcctcctaatctatcaagagttcagcatttagtgagtggtcaggatctcacccttcatttaaccaactaaccaccaccaaccaaccaccaccatcagaggtgggcctaaggcaggccttggggtctctgggaagtgggccatgctcagtctacatcccaatgtgctatggctcctgacacyctgagcaggggctctcccttgcacacaccaaaggaatgactgggcttaaaaaacgtgccaacttgcttataaatcagtctcctcagattctacaattcaccgagccataaaacctcagagcttcaaagatgcttagaaaatatcaaggccagggttcccaggaagcctcaatgctgccattttacaaaggaagaaactgaagtgcagagagattaaggggcttgtccaggt

SEQ ID NO: 645020 - DNA, 474 bp, Homo sapiens
atgtagcctcttggcgtacctcttgttgctttgctcttttctctttcctgcccagtatcatctttcttaaccctgaacattcttcttacttactaaagatacttctctagttctgagatttattcttactccttctcctccagataatattctggagcttatctttatctttttacaattaaaaacagtgaaccccagaaacagtggcacaaatacaaatctctttgaagactttatccctgcaggtctgctgctgcttgggtttgaggtccacactacctgtgcaatctgggatactgtacaacagaagaggagttggcttggtggtggcctgggatccaggcaaaggaagtagaagcacttgctggagtgctggatcctcaacccaggctccacacattccatagataaagcttcgatgaaataracacttcatctaaaattacaaacctgtaaggaatcaagccaccctca

SEQ ID NO: 645021 - DNA, 621 bp, Homo sapiens
ttgttgctttgctcttttctctttcctgcccagtatcatctttcttaaccctgaacattcttcttacttactaaagatacttctctagttctgagatttattcttactccttctcctccagataatattctggagcttatctttatctttttacaattaaaaacagtgaaccccagaaacagtggcacaaatacaaatctctttgaagactttatccctgcaggtctgctgctgcttgggtttgaggtccacactacctgtgcaatctgggatactgtacaacagaagaggagttggcttggtggtggcctgggatccaggcaaaggaagtagaagcacttgctggagtgctggatcctcaacccaggctccacacattccatagataaagcttcgatgaaatagacacttcatctaaaattacaaacctgtaaggaatcaagccaccctcagctgagatattttaagtgagaaaagcaagatacctagaaaygtacgtagtaggatcccattattaagaaaacacaccggctctctcacatatacattctcacatgtacccctctctctgtgagcttgcacatgattacatgagcatcagcaaagttcaggatccttatc

SEQ ID NO: 645022 - DNA, 572 bp, Homo sapiens
gaaataaagtgatagtcatgttgcattagtggcagcagagaataatgcctgccaacataccatttcttcctttcgcccttccttctttcctttttttttttttttcttaataagaagtggtctctgaaattgtttgtttttttattctcccaccctttccataatagtttatgttatcaagtagttagaagtattggtgacactaaagatatataatttgtaggattaatttataattgtttattattttattttagactattctcccccaggtttcattcagacatttacttattcagtttcaagtcagtttctagtctcaatgttaaccttgtttaaaaaaaaaaaaagaaagaagaaatttagacaagataaaacactttgccatccaraaaaaaatatatatgtcttcccaactttccttgacaattagcagcatttagattttcatgccaaaatcagggtaacaagcaatgtccatgggcaaggtgagaaaagtaacaattttttatttggtttgaaattattatttaggccaaaaattgtgaacctaaactgattggtgtttattt

SEQ ID NO: 645023 - DNA, 571 bp, Homo sapiens
ttttggggaaaggggagcataattgagcccataacaggtgaaaactgaataatgtctgcagtcaagttaatgatcatataatcagtgtttgttttttgggttttgtatattactatagctataaaagtcattgtcattgagggaagctggactatctttgcaacttcctgtaagtctataagtattttgaaataacatttttttgaamaagctattgtagtagaacagacatattagtgtgagaacagtcaaaagatgaagtagggtgatctcctctgggtacatgaatgatcacatttgtgagtcccaatgttaatattttggagtaaatcaagattgttgatgttagagttcacttatttatcaactattatttgacccctcttctgtgtcacatgctgctcaagacattgagagttgttgtcaagcaaaacagcaacagtctctgtcttcatggtgcttttggggtaaaatttggtctgcagagtcttacataaattttttacattcccttgtgtgaagatcagtctatgcttccaagggctaaggtatgagtagaattccattatca

SEQ ID NO: 645024 - DNA, 571 bp, Homo sapiens
ttttggggaaaggggagcataattgagcccataacaggtgaaaactgaataatgtctgcagtcaagttaatgatcatataatcagtgtttgttttttgggttttgtatattactatagctataaaagtcattgtcattgagggaagctggactatctttgcaacttcctgtaagtctataagtattttgaaataacatttttttgaacaagctattgtagtagaacagacatattagtgtgagaacagtcaaaagatgaagtagggtgatctcctctgggtacatgaatgatcacatttgtgagtcccaatgttaatattttggagtaaatcaagattgttgatgttagagttcacttatttatcaactattatttgacccctcttctgtgtcacatgctgctcaagacattgagagttgttgtcaagcaaaacagcaacagtctctgtcttcatggtgcttttggggtaaaatttggtctgcagagtcttacataaattttttacattcccytgtgtgaagatcagtctatgcttccaagggctaaggtatgagtagaattccattatca

SEQ ID NO: 645025 - DNA, 370 bp, Homo sapiens
aattttagaattgctttttctacttctgtaaagaatgtcatcagtattttgataggcattgcactgtatctatagattgctttggctagacattttaacaatgttgattcttccaactcatgaacataaaatatgtttttatttttgtgtgtgtcctcttcaatttcttgcatcaatgttttgtagttttcattgtggagatctttcacttttttggttaagtttatttctaggattttattttatttgtagctattgtaaatgatattacttccttgatttctttttcagattgttcactgttgrcatatagaaataatatgaattttgtacgttgatttttatcctgcaagtttactgaatttgttta

SEQ ID NO: 645026 - DNA, 536 bp, Homo sapiens
ggaacatacttcacttccgtgataggcctgccaaagacatatcatttcaatgtaataacaaggaaacattggacaaacaaaattgagggacagtgtacaaaattattggcttgtaatgttcaaaagtatcaagatcmgtaaaggcacaggaagactgaaggactttttcagatgaaagaactctaaatgcattgtatgatcttgtgctaaatgcttttgccataaaggatataactaagaaaattagtaaaacttaaatggggctgaagattcgatggtagtaatttcttgtttgtggagattttatattaaagtatgtaggggtgagggacatcagagcactaccttaatttcaaatgcttcagaaaatgacattttggtactgtacttcctattttcctgtatttttgtaattgttttaaaataaaaagaaatgggtggggcgcaatgactcgtgccggtaatctcagcactttgggaggctgaggtgggtggattacttgaggccaggagtttgaaaccagcctgcccaacat

SEQ ID NO: 645027 - DNA, 550 bp, Homo sapiens
actcaacagttaaagactgaaagtgctcccattgagatcaggacttacaagaatattcactcttgccacttctattcaacatagaggtgttctatccagggcatttaggcaagaaaaagaaatagcatccaaattggaaaagaaaaagtaaaactatctctattcaacagataamatcacaatgtatatagaaaatcctgaggaatacatacatacaaacacatacacacactattagagctaataattgagttcatcaaagttgcaggatataagatcaatatataaaaattatatcaactgtatgtctatataatatcaataaacaatcaaaaaataaaattcatagaacaatttcattgaaaatagaatcagtttttaaaaatctcatttaaaattgtattctccagataatttatctaatttactagacttagtactaaatgccacttttttccctaaagtctaaagtttgccatcaaagtatgaagatctactatctctgagcaccttctgatccttagagctggtgcttcctatataaaagttt

SEQ ID NO: 645028 - DNA, 612 bp, Homo sapiens
ggcaaatacttaataaaatcatagtattcagccttgacaaaggttcagggaaactggcagtctcctacactgcttgtgggagtgtatattagatgatctttctggaaggaaatttggtaatatattttaaaactttcatagattttgacccagaaaattctgcctgggtgttctcaagacccattaaagatatcgcaaagatttttttctcacattttattatgaaaaatttcaagsatacagaaaagttgaaagaatacctatacatccaccacctaaattctacagttgacattaatattttgctaaatttgcttcatcacttatctatctagctattttttactcttctctagccatctatcaacccaacctatttttaaaaatgtatttcaaattaaattgcagacacaagtacacttcctcctaagtacagtatgcatattattaattagctcaatatttgttcatagttttaatcgttttttcttttaagataaaatttactataacgagatgaacaaaaaaagtgttatttctgacaaacgtatataactatgtaaacaaaacccctgtcaatatgcagacctttactatcatctgagaaagctc

SEQ ID NO: 645029 - DNA, 612 bp, Homo sapiens
ggcaaatacttaataaaatcatagtattcagccttgacaaaggttcagggaaactggcagtctcctacactgcttgtgggagtgtatattagatgatctttctggaaggaaatttggtaatatattttaaaactttcatagattttgacccagaaaattctgcctgggtgttctcaagacccattaaagatatcgcaaagatttttttctcacattttattatgaaaaatttcaagcatacagaaaagttgaaagaatacctatacatccaccacctaaattctacagttgacattaatattttgctaaatttgcttcatcacttatctatctagctattttttactcttctctagccatctatcaacccaacytatttttaaaaatgtatttcaaattaaattgcagacacaagtacacttcctcctaagtacagtatgcatattattaattagctcaatatttgttcatagttttaatcgttttttcttttaagataaaatttactataacgagatgaacaaaaaaagtgttatttctgacaaacgtatataactatgtaaacaaaacccctgtcaatatgcagacctttactatcatctgagaaagctc

SEQ ID NO: 645030 - DNA, 612 bp, Homo sapiens
ggcaaatacttaataaaatcatagtattcagccttgacaaaggttcagggaaactggcagtctcctacactgcttgtgggagtgtatattagatgatctttctggaaggaaatttggtaatatattttaaaactttcatagattttgacccagaaaattctgcctgggtgttctcaagacccattaaagatatcgcaaagatttttttctcacattttattatgaaaaatttcaagcatacagaaaagttgaaagaatacctatacatccaccacctaaattctacagttgacattaatattttgctaaatttgcttcatcacttatctatctagctattttttactcttctctagccatctatcaacccaacctatttttaaaaatgtatttcaaattaaattgcagacacaagtacacttcctcctaagtacagtatgcatattattaattagctcaatatttgttcatagttttaatcgttttttcttttaagataaaatttactataacgagatgaacaaaaaaagtrttatttctgacaaacgtatataactatgtaaacaaaacccctgtcaatatgcagacctttactatcatctgagaaagctc

SEQ ID NO: 645031 - DNA, 555 bp, Homo sapiens
ttagttttgtttattctaggaagtcttatatatggaaccatacagtacaatttttttctgtataaggctttctttgttcatccatgtttttatagtttgtacttttattgctaagtcatattcaattacatgaatatactgcaatttgtagtatactattgacattgcctgggctggtcccagattttgcctgtcrtaaataaattggaacacttttgtacaagtctttttgaggacactgtcttctgaggagtggaatttctgggtcatagggcttgtatatgtttaatttcacaagaaattgccagagctttttccaaagtggttgtactattttatacccttagcaaaaatgtatgagttcttgttgctctacagttatgctgataaagtatttgatgttagcagtctttcaaattttggccattcaggtgggtgtatggttgcaaattgttatagttttaatttgcatttccttgatgactaataatgctggacatttttatgtgtttattggctattcatatattttctgtggtaaagcatctagtcaaa

SEQ ID NO: 645032 - DNA, 628 bp, Homo sapiens
ctcattgcattgtgttttcccactgatctcagcttgtraaaattctgtctaacaagaaaatgcacatcttaggcaatactgattttggctttatctttctttttatgaaatacaaatatggctgacactcagaacatctgaaatcagcaaggttaccacactaagttgatatgattccagcaacacttaatagattggcatttttagttagtcacacagcctacacaagagaaaatttacatcttccatttaattgtaatatactggcaatagctaaagacccttgtgttagccagcattattgcggatgcaagtgacagaaatttatttcaaacaagcctgagcaaaagtgttaattataaatccattttgctgggagcaccatcaaggcagcttacggaatcaagactggaggtgccaaaacaccaggattaaaacatattaacttgtaaaacatcagatccctctctttctctccctctcaatcactccatttacttttttctgcgagttgttatctgatgaatttcttccacaaagcagacaaaataaacaccagcaactctggagtcacctctccttaggtcaaggtcaaaatagccctacttctcccccacctctactttgg

SEQ ID NO: 645033 - DNA, 592 bp, Homo sapiens
ttaattaacatatgcagaagctatacaatttaactgaagcccttatttcccaaaactcaagagatttctgaaggccttgcccaagcacagacacagctttacattagtccagcattttacctaccctttccaaatttcatcccagtagaaataaggttttctaaaatgttaattctctactctgtctttttaagtgcaaaataygtataaaatatgcacaaataataagtatgagactcagtgatctatctcaatgaaacacgcccatgtaatcacttcccaagttaggaatcaaacaatcccagacctcatctgtgttccctgccaatcacaatcccttctgtcctcctcaaaggtaacttctaacaccacagattatttttgactatttttgaactctatataaatgaatcttataatacatattctttgttttccgaactttctattttaaaaacttttaaacctacaaaaaagttataagaatattaccaaacaaaccccagatattattaacttatgttttctagttgttaacatttgcctacacttgcttaacctacctctatctctcttgatagatgatagataa

SEQ ID NO: 645034 - DNA, 443 bp, Homo sapiens
agattgatcaaaactgtgtaaatagtacacagaaaaaaaatgggaagaagagacaccagaatgctaacaaaagtaactttgggtgatttgattactggtgattttttttcctkacttttacttttatgtattttccaaatttccattataatcagaaaaaaaatagagattattaagaaaaagcttaccaataagcaggatctacagtgtgtgattctttgatattttatctctgcctctagtacagttgttcttaccagacccccccaagaacagatataaaacatttttttcagtgtagagaagtagcatgatcacgtcataaaacaaaaaggacctaattaatttttcaacctgtctctgattcccctagtcctcagagaatattccaccaggctatgaagtagtatctcttctggaggccctcaacgggcccctcaccc

SEQ ID NO: 645035 - DNA, 387 bp, Homo sapiens
cctttgtgatgtgtgcattgaacatgcasagttgacactatcttttgattgtacagttttgaatacgtctttttgtagaatctgcaagtggaagtttggagctgtttgcaccctgtggtgtaaaaggaaatatcttcatataaaagctacacagaagcattcagaaagacttctttgtgatgaatgcgttcctcacacagagttgaatcttcctttttattgagtagtattgaaaccctctttttgcagaataaccaggtggatatttggagagctttgaggcctgttttggaaaagcaaatatcttcaaattaaaaccacacagaagcattctgagaagcttctttgtgatgtgtgcattcaactctcagaattcaacgtgtctta

SEQ ID NO: 645036 - DNA, 306 bp, Homo sapiens
taatttgaagatatttgcttttccaaaacaggcctcaaagctctccaaatatccacctggttattctgcaaaaagagggtttcaatactactcaataaaaaggaagattcaactctgtgtgaggaacgcattcrtcacaaagaagtctttctgaatgcttctgtgtagcttttatatgaagatatttccttttacaccacagggtgcaaacagctccaaacttccacttgcagattctacaaaaagacgtattcaaaactgtacaatcaaaagatagtgtcaactctgcatgttcaatgcacacat

SEQ ID NO: 645037 - DNA, 548 bp, Homo sapiens
atcataccttttctacttgtcatgatggcttttaatttgctgttgaagtctgtgccatctttatcatgacaatactgctggggcaggtgcagatcctcagatgcccccacatggacctactctgtaacttgaaatgcacacacatacacagcccactgaytgccagctttctcctcctgccagcgactagttaacacccttggcaatccccttccccaagttctcactgccccaaccagggtgatccagtgaaccctaatggattatattgttaaagctggacacattcagtaatttgatgagagtcagttgagtggtttttccatgatgagcctgtaaacatcctgtggtgctgtacaagggcaggcaaatacattaatagaatagcgtacagagtacaggaacagattcacacatatacaattacttgagttatgaaagaagtcactacacttcaggggaaaaagtatagtctttttatactttttcagatcaactgactgcaatgtagtctaccctccatatctggaggttttgaacctgagaat

SEQ ID NO: 645038 - DNA, 548 bp, Homo sapiens
atcataccttttctacttgtcatgatggcttttaatttgctgttgaagtctgtgccatctttatcatgacaatactgctggggcaggtgcagatcctcagatgcccccacatggacctactctgtaacttgaaatgcacacacatacacagcccactgattgccagctttctcctcctgccagcgactagttaacacccttggcaatccccttccccaagttctcactgccccaaccagggtgatccagtgaaccctaatggattrtattgttaaagctggacacattcagtaatttgatgagagtcagttgagtggtttttccatgatgagcctgtaaacatcctgtggtgctgtacaagggcaggcaaatacattaatagaatagcgtacagagtacaggaacagattcacacatatacaattacttgagttatgaaagaagtcactacacttcaggggaaaaagtatagtctttttatactttttcagatcaactgactgcaatgtagtctaccctccatatctggaggttttgaacctgagaat

SEQ ID NO: 645039 - DNA, 517 bp, Homo sapiens
agattttatcaaactttctagctaataacttggcctgccacagtctcatggatctggcagaagacatgaaactcctgggtcagaagaaaaggattttatgactcrcagtacaacaggcagctcttacttcgtcttcacatcagttacctttctcatctaagtcccgcaagggtgatgctgaggtcatcccagatggatgctaaacacaaaacatgtgagtgtcatagctgaggaaccctaagcttaagaaaaccctaatttgataacaatgctactagcatacctgctagactcttgccctgaaaacacattttttttttttttttttttactatgtctatcaggaaacaaagctaccctctgccctggtagtgttttcttataggaaaacactattgctatctttcaggattgcttgctacacaaatgttctttgaaagatagccctggaacaaacacagaaacaaaacttgcagaaatgacacgatgaagtgtttcccagcgtatgtttgtacag

SEQ ID NO: 645040 - DNA, 605 bp, Homo sapiens
tgtgctgctcgttaagctttgacaagtgtataccataaccaagatatagaacatttccatcatttccaaatctttcctcatgctcttttatggccagtctccattgcatcccaagaccacctccctgacaaccacagatctgctttatgtcactataattttgccttgtctagatttcatrtaaatgaaatcatatagtaggtatatgattttttcttcagcttctttcacttagcaccttgcctttgagattcgttcattggttcctatcagttcctttttattgttaaataatactttattgtatggctatatcataattagcttatccatttactagctgatggacatttgggttgcattcagtttgggactatttcaaataaaatttctataaacattcaggtataggtctttgtgtagacatagcttttcatttctcatgggtaaataggattggcaagtcatatggtaactgtatatttaactttataagaaattgccaaactgtttttctgaaagtggctgtgtcattttgcatttccatcagcagcagatgagagttttagttgctttacattttcaccaacacatggtgttgtcag

SEQ ID NO: 645041 - DNA, 605 bp, Homo sapiens
tgtgctgctcgttaagctttgacaagtgtataccataaccaagatatagaacatttccatcatttccaaatctttcctcatgctcttttatggccagtctccattgcatcccaagaccacctccctgacaaccacagatctgctttatgtcactataattttgccttgtctagatttcatgtaaatgaaatcatatagtaggtatatgattttttcttcagcttctttcacttagcaccttgcctttgagattcgttcattggttcctatcagttcctttttattgttaaataatactttattgtatggmtatatcataattagcttatccatttactagctgatggacatttgggttgcattcagtttgggactatttcaaataaaatttctataaacattcaggtataggtctttgtgtagacatagcttttcatttctcatgggtaaataggattggcaagtcatatggtaactgtatatttaactttataagaaattgccaaactgtttttctgaaagtggctgtgtcattttgcatttccatcagcagcagatgagagttttagttgctttacattttcaccaacacatggtgttgtcag

SEQ ID NO: 645042 - DNA, 607 bp, Homo sapiens
agaagtaactttgctaaaactatgtaagtaagaaaaaaaactttaaaatattttttctacatatttgaagatttggtattaaaactcagattgcttttgaagtgagattagtcattagttttcaaaaaaaccccacttttcatataaaggttttgacacgtttgctaaaagaatggagctaaaaactctttagaaactcttagatattcacatgtgattgaaaatttataaagtctaacctgtgatagaatttaaagtgtttattagaaatgataaaaatcatatttgttaggaaaatcaaggctataaacacaagtgtatttaacttggtcagagcatataaatagctttactttaaggaagataataaaaggtatccagttccactaactttcagaaaattaattgctcataaatgttcatgaatttatgtgtcacattartggacttgtttgaacatgcacaaattatttattattcaactgccagtaattatgctgcagatttttcatttcatacttctgcacattatgtaaactaaccattttgggtcttgtcattgattcagaattcagcacttaaatatcaggaaagtagttactataat

SEQ ID NO: 645043 - DNA, 607 bp, Homo sapiens
agaagtaactttgctaaaactatgtaagtaagaaaaaaaactttaaaatattttttctacatatttgaagatttggtattaaaactcagattgcttttgaagtgagattagtcattagttttcaaaaaaaccccacttttcatataaaggttttgacacgtttgctaaaagaatggagctaaaaactctttagaaactcttagatattcacatgtgattgaaaatttataaagtctaacctgtgatagaatttaaagtgtttattagaaatgataaaaatcatatttgttaggaaaatcaaggctataaacacaagtgtatttaacttggtcagagcatataaatagctttactttaaggaagataataaaaggtatccagttccactaactttcagaaaattaattgctcataaatgttcatgaatttatgtgtcacattagtggacttgtttgaacatgcacaaattatttattattcaactgccagtaattatgctgcagatttttcatttcatacttytgcacattatgtaaactaaccattttgggtcttgtcattgattcagaattcagcacttaaatatcaggaaagtagttactataat

SEQ ID NO: 645044 - DNA, 216 bp, Homo sapiens
gactggagcagccaggactggaatgtggaatgggtgggccaatatgcagacactgaagttctttctcgaagtgagcttttaggtctggaattcttgaattaaaactattaaagtgaggaamctttccttctgcatttccttagcatatgtgggattatgttactttgttacaatgagcaaatagaagcacacacacacacacaaccttttttagag

SEQ ID NO: 645045 - DNA, 584 bp, Homo sapiens
ccaacaccaataatttacagccccttctatcttatttctaacacacatgcttggtttaatgaaagtaaataccttttaaatattagatagtttttttaaaaaattcatgtaatgggtataggataaacaatgaatagacttaactggtgatcatcccccccatcatctcttgctagaaagactcctttatgtctgggttggctttttctcctgatttatgtggctgagagagaacacagtgattattgttcctcctggattgaggtctactgcacaaggtctcacctcttttctggacaaggagtcttgagttctatcctaagatacatctataacatgaaatgcaccagctcagcctatttccaacctgaagccattctaccatacccttccccatattcacatttctgtcttcagagcaaagccagcttcccatargctcctcttaccaaggaggctacatcagatggagatatatcaagctgagctgtgattcatggggagctgtcatgtcagaatgggtcttattcatttgctcgtttatcctataatgccaccaaaagagaagttgtccagatcctctt

SEQ ID NO: 645046 - DNA, 673 bp, Homo sapiens
taaaaaggaagatcacccacattctaaaattgtcaagaattctaacatgttatacttctttgccattttgttaaataggatttttccttcaagatggatactttacattattttaaattgtgtctaggtaggaagattccaaaagatttctgcataatcaatttaagcctgaaaagattaaaaagtctctatatttgatttatttttcatccttgagcatattttagaattttaaaagttaaycttttttatttgaaatagatcagtttcacaatacccagtgtgtcatcatttgcactttttttgtctaaataaaaatacaaattttcagtgaatatggatcttcaagatatatttcctcttagacccaaatcataaaataaattgccaatgaatattacatgcaagtgatgttaatattttgcaatgtatcaaaataaaattaacttatttaaccaatgatgagtctaattatttttacttaaatgatatgttacctaggagcaaatatctgggttatcatatcatattccagatattagaaagtaataagggtaatttcaaagtgagatggtagtcatgtgtgtgtgtgtgtgcatgtgtgtgtgtgtgagagagagagaaagaaaaaaaatcaatcatgttttagcacagagagatgggagcaacatat

SEQ ID NO: 645047 - DNA, 673 bp, Homo sapiens
taaaaaggaagatcacccacattctaaaattgtcaagaattctaacatgttatacttctttgccattttgttaaataggatttttccttcaagatggatactttacattattttaaattgtgtctaggtaggaagattccaaaagatttctgcataatcaatttaagcctgaaaagattaaaaagtctctatatttgatttatttttcatccttgagcatattttagaattttaaaagttaaccttttttatttgaaatagatcagtttcacaatacccagtgtgtcatcatttgcactttttttgtctaaataaaaatacaaattttcagtgaatatggatcttcaagatatatttcctcttagayccaaatcataaaataaattgccaatgaatattacatgcaagtgatgttaatattttgcaatgtatcaaaataaaattaacttatttaaccaatgatgagtctaattatttttacttaaatgatatgttacctaggagcaaatatctgggttatcatatcatattccagatattagaaagtaataagggtaatttcaaagtgagatggtagtcatgtgtgtgtgtgtgtgcatgtgtgtgtgtgtgagagagagagaaagaaaaaaaatcaatcatgttttagcacagagagatgggagcaacatat

SEQ ID NO: 645048 - DNA, 586 bp, Homo sapiens
ttggcaaatttcttatgtataggaccagatggcaaatattttaggctttctgggccacacagtctctgtcaaaccttccctatcaatgcagcacaaaagatgtcactggtcgtatgttaacaaatgaatgtagttgtgttccaacaaaactttatttacaaaaacagctggtaggcaagataaggcaggcagaatatagattgctagtcttggctttacaccatagaaaaatcagatacattttttacctgccttctaggaaataagaatctatttataaatcaaattatttcttcaacataataataaccttcaataagaccatttctactaataactccagtggtataacaacagttctacaaattccctctaattccaatgtaatcaacatgaattatatttctttgttttaaatatatgyatatatattcagacaaaaccacagtttcagaaaactaagggatactttctagtcttctacacaactgtgagatctaaatcattctagatgctacatttgacttcttaaatgcttttatcactgtggcccgtgaacacactgaccatcacaggccaagacaaa

SEQ ID NO: 645049 - DNA, 560 bp, Homo sapiens
gcccaccaccacgcttggctaatttttgtatttgtaatagagatggggtttctcaatgttggtcatgctggtctcgaactcctgacctcaggtgatccacccgcctcggcctcccaaagtgctgggattacaggtktgagccaccatgcctggccccagaagagatatctttactttgtcttctgtaaatgttaacaacttatggctatccagcttcagaaagggcatagcacaataatataattattttatatgagtctcacaacaacctatatttttaagcaaagaaattactataggattaaatgactattatgaaaagaaaaaaattggaaaaaatatttgtcatacaaaagcaaattttatcagagtcatcttagttgttatacaatcaataaatgttcttaatcacaagcattttgtcatgccatatggggcagcctggtgatttattacgtcttcttgagaatcactgattgattctactgtctttgaggacaatggttcttcacaagagtgtttagtggtgtgtactgtttcatatcctccatgtcacacac

SEQ ID NO: 645050 - DNA, 560 bp, Homo sapiens
gcccaccaccacgcttggctaatttttgtatttgtaatagagatggggtttctcaatgttggtcatgctggtctcgaactcctgacctcaggtgatccacccgcctcggcctcccaaagtgctgggattacaggtgtgagccaccatgcctggccccagaagagatatctttactttgtcttctgtaaatgttaacaacttatggctatccagcttcagaaagggcatagcayaataatataattattttatatgagtctcacaacaacctatatttttaagcaaagaaattactataggattaaatgactattatgaaaagaaaaaaattggaaaaaatatttgtcatacaaaagcaaattttatcagagtcatcttagttgttatacaatcaataaatgttcttaatcacaagcattttgtcatgccatatggggcagcctggtgatttattacgtcttcttgagaatcactgattgattctactgtctttgaggacaatggttcttcacaagagtgtttagtggtgtgtactgtttcatatcctccatgtcacacac

SEQ ID NO: 645051 - DNA, 575 bp, Homo sapiens
gggtctcactatgttgaccaggccaccagtcttgaactcctggcctcaagggatcctcccaccttggcctcccaaagcactgggattccaggcacaagccactgtgcctagccaggtgatttttattggccttaatttttttttttgaattgtggtaacatatgcaaaacatagaatgtaccatgtattcgtccattctcctgctgctatgaagaaatacccaagacggggtaatttataaagaaaagaggtttaattgactcatagttctgcatggctggggaggcctcaggcaacttacaatcatggagaaaagtcatcttaatttgcagccatctcctacctcttcacagggcagaggagagagaatgaatgcaagcagggaaaatgtcagacgcttataaaaccatcagatctcttgagactcactcattatcacaagaacagcatgggggaaaccgcctccatgattcaattacttccacctggtcccaccctttacacgtggggattatggrgattaccattcaaggtgagatgtgggtgggggcacagagccaaaccatatcatacca

SEQ ID NO: 645052 - DNA, 241 bp, Homo sapiens
ttttaatgaaaagcagccccaaaatcattgtctaacaaagatcagcctgtaagatggagctgcagacayagacaagccagcggcaagcttgcatgggtgaaggtcagcaggaaaaagctaccgggactaggcatgttcaaaacggaggctccatctccccttccctttgccaaccacgtgtacaggaaggagcagacaagatggcaccggtcaagtggaaagtccatttgcataataagat

SEQ ID NO: 645053 - DNA, 241 bp, Homo sapiens
ttttaatgaaaagcagccccaaaatcattgtctaacaaagatcagcctgtaagatggagctgcagacacagacaagccagcggcaagcttgcatgggtgaaggtcagcaggaaaaagctacsgggactaggcatgttcaaaacggaggctccatctccccttccctttgccaaccacgtgtacaggaaggagcagacaagatggcaccggtcaagtggaaagtccatttgcataataagat

SEQ ID NO: 645054 - DNA, 481 bp, Homo sapiens
atcacaagaagagtagcatgggggtgaccacacccatgattcaattacctcccaccaggtcacttccacaacacctggggattgtgggaactacaattcaagatgagatttggatggggacacagagccaaaccatatcactaatcttagtctcaattttcccatcatcagaatactgtcagcacttactctaataccccatgcgttcatgtcccttttgtaattcactctttctaaagaacattcttctctttggctacacagcctatctttccatctttttttttttaagtataacttatgtaaaaaytttaaggcttctgtgtcttttctacattttcactggctctctaaggggtcatctcaggtgccaatgaaggcagtcttcagtctggattcctttcaaggatgtgaaaattatctcttcaaaatacattaggcaatgtctgcctactttggattttgtgacggcttgaaacaa

SEQ ID NO: 645055 - DNA, 522 bp, Homo sapiens
tcttgctgtgctgtgacatgaagacaccacatggagaaagagcaaagagagggaagagggggggaatggagggggagagggagggggagaggaagagggagagggagagggagacctgtttctgcataacagcactagctcattcaggaaggcagagacctcatgatctaagcccctcttaaaggtcccacctcccaatatcatcacaatgacagtgaaatttcaacatgagttttggagggacaaacattggaagggtagcagcttttacacagaagactgagtaaaattagttcgctttaccccacaggcagaactgagagcatgaatgaaattttctgggaagcccctgccctttagaagaaacattgtaaccttgtagtgactggtgttatcactcctgaaaccagctgctytgccaggctgtgagttacacagtcaagatacttgcacctagtgaaagcttaaagggccatccacctggaatgaagcaggagggagtcatgtttaggggagggttgt

SEQ ID NO: 645056 - DNA, 588 bp, Homo sapiens
gaagcactttgtcaaagtcaggagggcttaataaggctcgattttcactgaatgcatttgttaggctcttgaatgttaaatcgcaagctgaatcattgtgcaattgctttcttttctttttttttctttttctggccaagtcagaaatggctctgcagagacaagctctgagttatccattagtggattaatgaatgacaatttgtactaaaactaatctcttttttccttcaaaatgaagctcatcttcctcaatgtgttttttccacgaggtgcatgaarttatcaacatgttaccaagaagatgaattctgtgtgtgacccgtcagcatcgtcgatacgtaacagtgttatggcagagctccagcataaagccacagcatgacaccagggttggagaggacctaatacctgcagtcttgggcagccaggggatttgttgctctacaccaatttgctcaaatatagaaaacatatatttactgtttcctgtagatgtatcagcagctcctttcccagggatggttgaaaagctttggctccgttttgctgtctgctctctaaactttctacccttctttaacttgc

SEQ ID NO: 645057 - DNA, 588 bp, Homo sapiens
gaagcactttgtcaaagtcaggagggcttaataaggctcgattttcactgaatgcatttgttaggctcttgaatgttaaatcgcaagctgaatcattgtgcaattgctttcttttctttttttttctttttctggccaagtcagaaatggctctgcagagacaagctctgagttatccattagtggattaatgaatgacaatttgtactaaaactaatctcttttttccttcaaaatgaagctcatcttcctcaatgtgttttttccacgaggtgcatgaaattatcaacatgttaccaagaagatgaattctgtgtgtgacccgtcagcatcgtcgatacgtaacagtgttatggcagagctccagcataaagccacagcatgacaccagggttggagaggacctaatacctgcagtcttgggcagccaggggatttgttgctctacaccaatttgctcaaatatagaaaacatayatttactgtttcctgtagatgtatcagcagctcctttcccagggatggttgaaaagctttggctccgttttgctgtctgctctctaaactttctacccttctttaacttgc

SEQ ID NO: 645058 - DNA, 459 bp, Homo sapiens
tttcaaatgtcaatcaagatataaatgagatgaatgccttgtggaattaattatttttatgactgtgttatgatatgaaaatgttatgatagggaaaaatgcaagaaactgttacccctgtaggaatattgactttgtagccttggttagaagacaggctctgatggaaaaatttgctatgatggattgtgccatggagacttgactctctctacatttatggcactgaagccacctctgtggtgygcagtgtggacacacgccacgtctctcagacgaagcacacctggcagtgggcaggccctggctgtgccctgctgctgtggcctgccccttcttcctctagtagggcggggaccctctaaccaggcagctttggactagaccagtgctattcaaagaatgatctggagacagtgaccaggagtcctttgtggatctggggacctaacattagga

SEQ ID NO: 645059 - DNA, 428 bp, Homo sapiens
taatagcagcatttattacatttctgatcgtgtttctggacaattkcagttccagattcagctgcacttttcctctaggtcttcattccctgaagaggttgatatgggcatctggtctcattcctgatgtattcctcagatcagagtagttgtcaggttgagggatgagaaaggcatttgtgtgagagagctgtgtggactttggcagatagggaaaaaacaagagtcctgaggtgccacgtgtcccatgcctttggctccccaccttttccaccctgctgtctgccctgaaaggccaccattgccttctggccttgcttgtctttggccagtgggaagtctcaacaggaaagtttggagagagaaagaagtgtgagttggaggatcttgtcccccagttctctctctgcaggattgtcacagattag

SEQ ID NO: 645060 - DNA, 446 bp, Homo sapiens
atctgcctgtgaatacccactacactccagcatgggcaatcacagtgagatcccatttctttttttttaaaaaaattcttatccaataatataaccctaacacatgtgaattatgactgccagacagcttctctcatagcaatattataataaaattttatatgggactacaggtgcacaccaccacacccagctawttttttgtattttttatagagatgagtttttgccgtgttgcccaagctggtctcaaactcctagactcaagccatctgcctgcctcaagcctcccaaagtgttgggattacaggcataagccaccacgcctggcctcaaaaagttctcaatgcaagttatataaacattgtatttactaaaaatagttctatgcaatgcaaacagcagagacacataaatagcagtaagtgatcacccccactgaattc

SEQ ID NO: 645061 - DNA, 593 bp, Homo sapiens
atatccaaatcctatcagtgttggatttctgtgtgtatttctttctgtttttgtgacaaggtctcttgtccagactggagtgcagtggcacaatcatagctcaytgcagcctggaacttttgggctcaagggatcctcctgcctcagccttccaagtagctagaactacaggcatgtaccaccacacccggctaatactttttgtttttatttttggtagagacaggtctcactatgttgcccacactggtcttgagctcctgtgctcaagtgatcctcccacagtggcctcccaaagtgctgggattagaggtgtgagccacagttcctggctcagtttctatatttctattgctgccaacccaaaagtcctgattaatataagcagtataaacattggaaagtaaagtggaactttcattaattacatttattacttggaaaactccagagaatgagctgaacactaattcaaacaaatagaagaaaggatggattttttttttcaacaaatggtattggaacatcagatccctacctcataccaaaataactttcagcaaaataaaagatttaattaaactgtaaaagga

SEQ ID NO: 645062 - DNA, 593 bp, Homo sapiens
atatccaaatcctatcagtgttggatttctgtgtgtatttctttctgtttttgtgacaaggtctcttgtccagactggagtgcagtggcacaatcatagctcattgcagcctggaacttttgggctcragggatcctcctgcctcagccttccaagtagctagaactacaggcatgtaccaccacacccggctaatactttttgtttttatttttggtagagacaggtctcactatgttgcccacactggtcttgagctcctgtgctcaagtgatcctcccacagtggcctcccaaagtgctgggattagaggtgtgagccacagttcctggctcagtttctatatttctattgctgccaacccaaaagtcctgattaatataagcagtataaacattggaaagtaaagtggaactttcattaattacatttattacttggaaaactccagagaatgagctgaacactaattcaaacaaatagaagaaaggatggattttttttttcaacaaatggtattggaacatcagatccctacctcataccaaaataactttcagcaaaataaaagatttaattaaactgtaaaagga

SEQ ID NO: 645063 - DNA, 553 bp, Homo sapiens
gttctctttctggttggtggatatcttgactgcttctataccatagatggagacacaggatctggccttacatttctgtgccacccaaccattatgggagacttcatgactgtttctatggcatttatgcccaggctctctgcagccctctccctccacctcctcaccactctttccagacagaggtcatctctgctctcagatctcacaaagctttctcaggatttgcagacaacccagcagctgtggctgatagacaaaaagcaggcctttcctctctaggaacccctacctaamactagcgtgccctgctccacacagaggggctcttccagtcttggaaacgggagagaaggaacccttttcttctctttgcttcctggagtcctcttctgattccctaacagcattgatgtttataataaactcaaggaagccagacttttctagattttccacactgttgtatcttgccactgaagcaaggaccacagaatggtccacaggcttggattcagcaggcttggattaggggggagcagaagggctacaa

SEQ ID NO: 645064 - DNA, 553 bp, Homo sapiens
gttctctttctggttggtggatatcttgactgcttctataccatagatggagacacaggatctggccttacatttctgtgccacccaaccattatgggagacttcatgactgtttctatggcatttatgcccaggctctctgcagccctctccctccacctcctcaccactctttccagacagaggtcatctctgctctcagatctcacaaagctttctcaggatttgcagacaacccagcagctgtggctgatagacaaaaagcaggcctttcctctctaggaacccctacctaacamtagcgtgccctgctccacacagaggggctcttccagtcttggaaacgggagagaaggaacccttttcttctctttgcttcctggagtcctcttctgattccctaacagcattgatgtttataataaactcaaggaagccagacttttctagattttccacactgttgtatcttgccactgaagcaaggaccacagaatggtccacaggcttggattcagcaggcttggattaggggggagcagaagggctacaa

SEQ ID NO: 645065 - DNA, 568 bp, Homo sapiens
gttccagggcaccatggtttgggggagcaccttggcctaagatgtcatctggtcaccttcagatccaaatgagatgctgccaatcctcttggggtggtccctcatccacacaccacacacatgccacctaatggtcacacaacttctgtacaatgtgttctctttctggttggtggatatcttgactgcttctataccatagatggagacacaggatctggccttacatttctgtgccacccaaccattatgggagacttcatgactgtttctatggcatttatgcccaggctctctgcagccctctccctccacctcctcaccactctttccagacagaggtcatctctgctctcagatctcacaaagctttctcaggatttgcagacaacccagcagctgtggctgatagacaaaaagcaggcctttcctctctaggaacccctacctaacactagcgtgccctgctccacacagaggggctcttccagtcttggaaaygggagagaaggaacccttttcttctctttgcttcctggagtcctcttctgattccctaacagcattg

SEQ ID NO: 645066 - DNA, 497 bp, Homo sapiens
tggtagcccaattggttcctcacatcaaaagattccctttattatttccttattttctctttaattctggcactccttcatgattgaacttacagatgttcttttgtctgctaattttcgagtaagcctgtgctctctataactttcagtctcaatatccttctaccatcagccttttgtctaaacattcttattctggtttgtttccctgaactcttgacatcaatctctgttccttcaatattctgtttcttctactggaagcactctttcccagatttcacccactttactcttctcaatctctgtgtctgagtwaaatgcttccttaggtttctatgtaggattgtctgtccatctgtaatttttctatatctctcatgttaacatagttacatcctttactgaaaaatgtctcctttaaaaaaaatcaatgtgtttgtttactttattaaaatgccctctaaactgcaaggtcaaagaaggtaagtatgata

SEQ ID NO: 645067 - DNA, 542 bp, Homo sapiens
gtttgtcaggttttgccactattagcatgactcagtacccatagagtctgtctcttaggcatgtgaagcaaatgatttctctgacccaaaacatttcatatgccttaaaagtcaaacaatgcaaagatgtgatatttagaatactagttacataataatggataatgacttagcttttaaaacaactgctttaaacatgacacatttaaagctaatttgtaactttcatatgtttctgaaacttttacagtcactaaataatttgagtaaagcaaatgggtttcagaccgattacaatttggaaagattgattataaattttgaataatatgtaacaaagaaaaatgtggtcacttgattatatacctcttccccaagatcaagtaaatactttatcartagaaaaaagaaagaaaagcaaaaagaaaagaaaaagaaagcaacactgctatatagaacatttttttttctaaatggaatccagcagcaaaaaaaagataattgaagatactattaaaagatacaatttaatattaatattg

SEQ ID NO: 645068 - DNA, 518 bp, Homo sapiens
ttaattcaacctcatatatttctcagtcaatttattcaataatgaggtcacttgatttacttcatgtgtacatttcaatgaatgactgcatgtctaaaatatattttatacttttttactgagattattcacacttcagtcttcctgttttggtacaaaatattttagacaaactattatacttgttcatgtataactgtcactttagttataaaaawgatgcttaagttaaaaataaaataattttaataaagaagtgtgagaagtaatatataacctctgagtcagtcagaatctagcaaagctttataggtcacattcattaaacattcttacattcactgtcagtggctctaattaagaatgatcatataaaaagatcttttcatttttcttggttttttctagtttgcccaaatcgcaccaattatttcttctatactgttggttcatgagtttgtgactgtacatagttagtaattacttaaaatcagattttttttttacattttactgaa

SEQ ID NO: 645069 - DNA, 576 bp, Homo sapiens
gaatggggaaagcagacaagagacaagaaatgaagacagcccctagaagctggaaaaggcaagaacatgtattctcctttagagtccccagaaggaaagcagcgctgctgacaccttgattttagcctaatgaaaaccatttaagacttctgacctttataattttaaaatgatagatttatgtttctaaactaccaaataaaaatattttgtctttagtttttaaaagtttaatcraaatgtttcttgaaatgtgtttattccgtgtagggtatcttaggcttcttgaatctatacatttgtgtcttctgcaaatttgaggtttttttgaagcactatttcttcaagtattctttcagcctcattttacttcttttctggtacacgtaataaaaatgttggatctttgttgttgcctcacacatacctacatctgtgttcattttatgtatcagtctattttatttatgttgttcaaattggttaaattctactattctgccctcacattcactgattttaccttctcgcatctcaatggcgctattgactccatccaacacatttttcatttct

SEQ ID NO: 645070 - DNA, 586 bp, Homo sapiens
gtattttatcaaaacagctttctgagtatgtgatactgtgatatataagtaaaaaaaaatgctaattcatgatattctgtccctggaagaatatkgacagaggtttacatttaacatcaatgtcaataatagagtcagaattgatatcaaacttgagaaatatttttgccaaaagtaggtctttcataattaatatgaattgatttctgccaaactatcatatttagccatgtggtcagtaatataatgtaaattatatgtagatatatatttttaaagttgaggacacctaaataaaacatgtaaattattttaattacttgacaatctattatatacaaagtatttaagtatattttaaacatattcaatttaactaattttttgagtgatttgggcaaaattctgttttagttcatttatagacatgcttatatttgagttactgaaaatacaaacatttaagtagtctactcttagcatattaatatgtcctgtattcattacaacattaattgcattaaattcaactactatgaataaataatctatcacatatacattttaaagatagaagcatttcagt

SEQ ID NO: 645071 - DNA, 590 bp, Homo sapiens
caactacaactggagagttaaatgaaaagtcttattagttagttggagtgggttttgcaagacactggtgagaagtacagaatttggggtaattggagtaattacgtgggcttaaatatatatgtgtgggtagaagagggagatgtcaagcgatgagagtagagatgagtttaggataaattacaaatgtcttcaggccatccaaagtgtttataatttaytctaatggaagtgacaagacattaatgagatctaaaatagggactacaagaaacagattacaatagataaacaagactgtaggcagagagcttcttaattccacagttcattggcaagtccaagaagaaacttaaggtgacctgaactatagtaatgacagaggattcacttataagtacagtcttgagttgattaatgatgagaattcattctgagaaatgtgttccctaggtgaacatcatagtgtccttttacaaacctagatggtgtagcctactacacacttcggcaataaggtagaagttattgcttttaggctacaagcccttacgtcaggttactatattaaataatgtagccaactgaaa

SEQ ID NO: 645072 - DNA, 590 bp, Homo sapiens
caactacaactggagagttaaatgaaaagtcttattagttagttggagtgggttttgcaagacactggtgagaagtacagaatttggggtaattggagtaattacgtgggcttaaatatatatgtgtgggtagaagagggagatgtcaagcgatgagagtagagatgagtttaggataaattacaaatgtcttcaggccatccaaagtgtttataatttattctaatggaagtgacaagacattaatgagatctaaaatagggactacaagaaacagattacaatagataaacaagactgtaggcagagagcttcttaattccacagttcattggcaagtccaagaagaaacttaaggtgacctgaactatagtaatgacagwggattcacttataagtacagtcttgagttgattaatgatgagaattcattctgagaaatgtgttccctaggtgaacatcatagtgtccttttacaaacctagatggtgtagcctactacacacttcggcaataaggtagaagttattgcttttaggctacaagcccttacgtcaggttactatattaaataatgtagccaactgaaa

SEQ ID NO: 645073 - DNA, 539 bp, Homo sapiens
ctactacacacttcggcaataaggtagaagttattgcttttaggctacaagcccttacgtcaggttactatattaaataatgtagccaactgaaacacaatgataaacatctttatatctaaacatagaaaacatacaataaaaagatatggtataaaaaataaaaagttgtacacctgtataggatggttactataaatggcacttgcaggcctagaagttgctctggatgagtcagtgagtgagtggtgagaaaaagcaaagtctttagacattactgaacactactgtagacttaataaacactgtacacttaggctacattacatttctaaaaacwattttttctctaataataaaataaccttagcttactgtatcttttttactttataatttttttgactcttgcaataatgcttagtttaaaacacaaacacattgaacatctgtacaaaaaatattttctttctttatgcccttattatataagcttttttctacaatggaacagaacagagccctcagaaataatgctg

SEQ ID NO: 645074 - DNA, 600 bp, Homo sapiens
caccatatgatctttgtagttgttcccaccgggcctgaacctctctccccatcgccagcctgccctgctgtctgcatggctgactctcattcattccctctcaagcactgcttcccagagagtttctcagccgccctaccaaatgtgcagtccctatcacattaccctttttattttctccaccacacttcccaccatctacaattatcttgactgagcatttgctggcctgtccattgtctctctactcgtagtagaataaaaggtgattgaaggcaacaaacagcccatctgtcatcctcactgccatatttccaagccctagaaaagtacccgaacaaatgaagcactccataaatgctttttgaatgagtaagtaaatgaacccaaatgcatttttcttactaatcctttgaattatttttacacatttccaattacttatttctctttttctctacttccaaagaaaccgcagtggatactgtgcacgactyagaagctccaggcaaggataataaacatgccacatctgtatctgtggatgttccttcagcctgggcagaaaagatacagtcaggaagatacagagaaagaaac

SEQ ID NO: 645075 - DNA, 564 bp, Homo sapiens
aatagtatataaacttggattaaaatattcaaatttactagaatgtggacattggaaagaatgaaaataaacagaagcataaagcagcagatataaaattaagaaagcaactaagagtgtttaaagtacatattcatctgtagtctaatgtctaccataaacaatgactcttctcagtaaaacacaaattgttcatgaagggaaaaagcatgttgtattagagaatattcaacataatttttttagtactaacttgtgcctggagtattattgktttttctattatgaacttatgcacttgttaatttttttcataaaaattatatgtacaactccactcaaaagcagtttttggtgggtttttttttttttttttttgagacagagttttgctcttttcacccaggctggagggcaatggtgcgaatttggctcacagcaacctagcaacttttgcctcccaggttcaggtgattctcttgcctcagcctctcgagtggttaggactacaagcatgcaccaccatgcctggctaattttgtgtttttagtagagacatggttt

SEQ ID NO: 645076 - DNA, 564 bp, Homo sapiens
aatagtatataaacttggattaaaatattcaaatttactagaatgtggacattggaaagaatgaaaataaacagaagcataaagcagcagatataaaattaagaaagcaactaagagtgtttaaagtacatattcatctgtagtctaatgtctaccataaacaatgactcttctcagtaaaacacaaattgttcatgaagggaaaaagcatgttgtattagagaatattcaacataatttttttagtactaacttgtgcctggagtattattgttttttctattatgaacttatgcacttgttaatttttttcataaaaattatatgtacaactccaytcaaaagcagtttttggtgggtttttttttttttttttttgagacagagttttgctcttttcacccaggctggagggcaatggtgcgaatttggctcacagcaacctagcaacttttgcctcccaggttcaggtgattctcttgcctcagcctctcgagtggttaggactacaagcatgcaccaccatgcctggctaattttgtgtttttagtagagacatggttt

SEQ ID NO: 645077 - DNA, 564 bp, Homo sapiens
aatagtatataaacttggattaaaatattcaaatttactagaatgtggacattggaaagaatgaaaataaacagaagcataaagcagcagatataaaattaagaaagcaactaagagtgtttaaagtacatattcatctgtagtctaatgtctaccataaacaatgactcttctcagtaaaacacaaattgttcatgaagggaaaaagcatgttgtattagagaatattcaacataatttttttagtactaacttgtgcctggagtattattgttttttctattatgaacttatgcacttgttaatttttttcataaaaattatatgtacaactccactcaaaagcagtttttggtgggtttttttttttttttttttgagacagagttttgctcttttcacccaggctggagggcaatggtgcgaatttggctcacagcaacctagcaacttttgcctcccaggttcaggtgattctcttgcctcagcctctcgagtggttaggactacaagcaygcaccaccatgcctggctaattttgtgtttttagtagagacatggttt

SEQ ID NO: 645078 - DNA, 523 bp, Homo sapiens
gccagggcagggcaggaccagtgcagggccaatgcagggtgagggcaaggccagggcatggaagggcagggcaggaccaaggaagggccaggagagggccacggcagggtcacggccagaagaagggtatggctggggtcaggaatatggtaggacaagggctgggcccaggctgggacacgcagggcagagcatgatctgtgcaaggcayggccagagccaggccatagagatgggagggcaacaccaaggcagagtcagggtagatccagggctgagcagagtcagggcaggtccagagtagaggcagagctagggcccaagcagggccatggtagcaccagggcagaggagggcagggcaatgcaggactgggccatggcagtgcctggtcaactccggggcagggccagatgcaggacagggccagggccagtgctcaggccagggacaggtcatgacaggaagtgccagagcagggctggaccaacgttggggcagggcaaatcagaccaggacactt

SEQ ID NO: 645079 - DNA, 523 bp, Homo sapiens
gccagggcagggcaggaccagtgcagggccaatgcagggtgagggcaaggccagggcatggaagggcagggcaggaccaaggaagggccaggagagggccacggcagggtcacggccagaagaagggtatggctggggtcaggaatatggtaggacaagggctgggcccaggctgggacacgcagggcagagcatgatctgtgcaaggcatggccagagccaggccatagagatgggagggcaacaccaaggcagagtcagggtagatccagggctgagcagagtcagggcaggtccagagtagaggcagagctagggcccaagcagggccatggtagcaccagggcagaggagggcagggcaatgcaggactgggccatggcagtgcctggtcaactccggggcagggccagatgcaggacagggccagggccagtgctcaggccagggacaggkcatgacaggaagtgccagagcagggctggaccaacgttggggcagggcaaatcagaccaggacactt

SEQ ID NO: 645080 - DNA, 456 bp, Homo sapiens
aacatcccccctccttcgggctgtcctgccttttcatatcaaagcaatgtrcagcttacacgtattgattgatatcttatgtctccctaaaacgtgtaaaaccaacctgtagcccgacgacctttgacacacgttctcaagacctcctgaggctgtttcactgatatttctttaactttgaccaaataaatttctaaactgattgagacttttctcagatacttatttgtttataggtatcactggatacacttaaggaattgaagagatttatgacattgagaaaaggaggaagccagggtgtgtggacattgagagagagagagagagagagagagagagagagagagagagattgtgatgtatgtacaggactaacactgagacctggttatgtaatggtgtagtactgagtatcatccccaaatagtgaggtttcattccatgaaggctatg

SEQ ID NO: 645081 - DNA, 456 bp, Homo sapiens
aacatcccccctccttcgggctgtcctgccttttcatatcaaagcaatgtacagcttacacgtattgattgatatcttatgtctscctaaaacgtgtaaaaccaacctgtagcccgacgacctttgacacacgttctcaagacctcctgaggctgtttcactgatatttctttaactttgaccaaataaatttctaaactgattgagacttttctcagatacttatttgtttataggtatcactggatacacttaaggaattgaagagatttatgacattgagaaaaggaggaagccagggtgtgtggacattgagagagagagagagagagagagagagagagagagagagagattgtgatgtatgtacaggactaacactgagacctggttatgtaatggtgtagtactgagtatcatccccaaatagtgaggtttcattccatgaaggctatg

SEQ ID NO: 645082 - DNA, 456 bp, Homo sapiens
aacatcccccctccttcgggctgtcctgccttttcatatcaaagcaatgtacagcttacacgtattgattgatatcttatgtctccctaaaacgtgtaaaaccaacctgtagcccracgacctttgacacacgttctcaagacctcctgaggctgtttcactgatatttctttaactttgaccaaataaatttctaaactgattgagacttttctcagatacttatttgtttataggtatcactggatacacttaaggaattgaagagatttatgacattgagaaaaggaggaagccagggtgtgtggacattgagagagagagagagagagagagagagagagagagagagagattgtgatgtatgtacaggactaacactgagacctggttatgtaatggtgtagtactgagtatcatccccaaatagtgaggtttcattccatgaaggctatg

SEQ ID NO: 645083 - DNA, 576 bp, Homo sapiens
gcttttgcaggtgtaaattaaggagcttgaaacagggagatggtcttagattaatcaactgggacttaaatgcaaactcaagtgtcctaaaaaaaacaagaggtagagagagatttagcatagactgaagtggagaaggcagtgtgaacacagagacagagattgcagtgatgtgtccacatcccgggagagagaagccaccagaagctggaagagctaaatcagactgctccctagagcttcagaaggagccagaactgatgactccaagatcttagcccagtgaaactgatctggacttctgaactatgagagattccattcctgttgtktgaagctaccacatttttgagaacttgttacagtagcccgaggacactaacacaaatggggctccgggaaaatccagactaaaggtgttgtgttggtttgcaatctccttgcttaactttctgatactagacgtaaatagattggtgaaacattttgtgattgaaaaaatgtacatgaaacctacagtgtacagagaagcatctgttagttataagataaatattgataattttagttgaaaat

SEQ ID NO: 645084 - DNA, 567 bp, Homo sapiens
taaattaaggagcttgaaacagggagatggtcttagattaatcaactgggacttaaatgcaaactcaagtgtcctaaaaaaaacaagaggtagagagagatttagcatagactgaagtggagaaggcagtgtgaacacagagacagagattgcagtgatgtgtccacatcccgggagagagaagccaccagaagctggaagagctaaatcagactgctccctagagcttcagaaggagccagaactgatgactccaagatcttagcccagtgaaactgatctggacttctgaactatgagagattccattcctgttgtgtgaagctaccacatttttgagaacttkttacagtagcccgaggacactaacacaaatggggctccgggaaaatccagactaaaggtgttgtgttggtttgcaatctccttgcttaactttctgatactagacgtaaatagattggtgaaacattttgtgattgaaaaaatgtacatgaaacctacagtgtacagagaagcatctgttagttataagataaatattgataattttagttgaaaatgaca

SEQ ID NO: 645085 - DNA, 542 bp, Homo sapiens
ttcttgaagctaatatctagccacagatgaagtaaaaccctgattgctcctacttgtacttattctccaaaagcacttgttttggagttctcccccggcgttaatgrgatgaagcacccacacaatggtgtacactcccatagccattcctaacccttagttgtgtttccttctccagtctcttcacttttacgagacttgaaatttctcctttcttagatttaaggcataaagttgaacaagggagatgatttggggaccagtttggtaacttttaagtaattcctgcacatgtacctaacatctctagaatatagggtatgcctcacctatgatcctcagtttgggggatttaacctacatttagaaccaactgggaaaatcacattcagaattctgttagagtttaaaacatgttcattgagaagaatctgccatgtcctgtctttttctgtggcattttccaaatctctgcactgctgaaatacttccttattaagtagcacttccacttaataagcagaagaagctttattgctcat

SEQ ID NO: 645086 - DNA, 596 bp, Homo sapiens
tcatgagggtagagacctcacaacccgatcatctcttataggctgcagctttttaatattattaccacggcaattatatctccaatgcttgtgaacttytgagagaaatactgcaccacaggaacttcaaattgagagaaaaatgctgaagccaaaaataaagatgtggacaccagaatgataagtttactctgaaactggttgtcctgaggaatttaacaaagttttaaacctacagacttgcacttgattgctagctctggggacctgaggcaaatgttgggtcttcagaaggaaaggaattggacttcagatctgcatagaaactggggacccttaaagtaatacaacatgactgaaattggggaccagcaatgtccacttatcaacagagggacaatatcagaagattcgtctttcttatcctgatatctaggttttaaaaaacagtttctattttgaaagtaaccttcctgtatatagatttggaggtcaaaatgatattacctacttggttacagaaaaatccaagaattgaaattacctcatgctagatgtgcagtgtcccaggatatagagcagtaggaaaacgatat

SEQ ID NO: 645087 - DNA, 596 bp, Homo sapiens
tcatgagggtagagacctcacaacccgatcatctcttataggctgcagctttttaatattattaccacggcaattatatctccaatgcttgtgaacttctgagagaaatactgcaccacaggaacttcaaattgagagaaaaatgctgaagccaaaaataaagatgtggacaccagaatgataagtttactctgaaactggttgtcctgaggaatttaacaaagttttaaacctacagacttgcacttgattgctagctctggggacctgaggcaaatgttgggtcttcagaaggaaaggaattggacttcagatctgcatagaaactggggacccttaaagtaatacaacatgactgaaattggggaccagcaatgtccacttatcaacagagggacaatatcagaagattcgtctttyttatcctgatatctaggttttaaaaaacagtttctattttgaaagtaaccttcctgtatatagatttggaggtcaaaatgatattacctacttggttacagaaaaatccaagaattgaaattacctcatgctagatgtgcagtgtcccaggatatagagcagtaggaaaacgatat

SEQ ID NO: 645088 - DNA, 595 bp, Homo sapiens
atgtagtaattaacgctaagtatctactatcaagactgacacagttctacaaatggtagctgtcattattgcccatgaaggtgaagtaggtgatttacatggcaggcttgggagaaagaaatgagtctgttggggaagaagaaggccaggtttgtttgraggcagaggaagctaggccaccttgcactgctaaattgtgccatgttctgactggggctgggcccagagaaagctctaattcctgtgtgttgattgaaactgaggttgaagacactgatctgtctcttcctggtgctcatgaaaattcttcctacctagcctgagcttcatggacaaataaaggctaaccaaagcactttcttttaaaagtttcaagttacttaaggtctctagatttggagcagaaagagatgctaataatgaaacttgctaaatacagcaatttttctgcagtccatacaaattttattagttaaggaggtgatgggaagaaagcaaatatactctgatggtaaggaattgcagttcttccgaaaagcactgtaaatgacaatataatgacgcatcaatccagtccccaggggggaaaatatat

SEQ ID NO: 645089 - DNA, 576 bp, Homo sapiens
ccactcagggaggtgaaaacacacgtgagaaggccagggaattgatttagaaggaataaatctaacaaaagagaagtaacacttctggggccttatcacactcattctcttcacagtagtgaagtggaaaggcacttcatcaatagtctaatttacaaagtcaaggtctgatattgtttgatttttttttaataattaaaaacttgctttcagaagcacattatgccgtgaggaattagatatttagaaaatacagtcttttgcaaccggctttctttctttttctaagtcttatctgtctagcaatatgatagtgtgaaaccattgtctaattcatgtttaaaggagctggttatttccttaagattagcaaattcatttaaagttattggattttgtttttcatttatgcaaatgaaatatgatcttaagcagaaataagtacaattgaaattaacatgattacaatagggtaacataagaaagaaaatttctctattaattttttttcataatcatcaggccaggtttaagtaatttttccaccaaaaarttcctcacaatttatccaaaaag

SEQ ID NO: 645090 - DNA, 547 bp, Homo sapiens
tacagatatattttagacagtcatgcagggcttggggtaggagacgtttggagccaggagagcctgttaaagtaccctacattgccctgtttkaaactaatagaattgtattcatgttgaggtcatctcttttcagaatttactgaatggatgctttcctcacgattgattcaaaattatgagtttttagtgtactttaaaacattggttcccctagcatgtgggttaatgtaggggaggcaaaattttacctctaccctcttagagattttttcggttgtggggtgctgagaattaaattgacataagacagatcaacagaagaaaagcatacaaatttatttaatccatgttttatgtggcacaggagccctcataagaaaatgaagacccaaagatgcagttagggttgaacacttatatactgaatggaacaaagagtagtaaattatgaatatgtgagaaagcaaagggccttgggctagggtagttacttgggtgaaacagccaggaagataagggttagtgaaattagatttgtgctata

SEQ ID NO: 645091 - DNA, 525 bp, Homo sapiens
agactgtgtctcaaaacaacaacaaaaagatacaatgggagttctacttctacctaggatgtagaaagcaaacaaaaacaccttttccaccctakaaataagaaaaactacagataaaatacaaactcataatttttcttgaacccatcagatagttaaggccatagggcaactaggtagcttgaaatccaaggcgtctctaagaatacagggtacaagctctgtctcaccttcggcagaacacaggaagaagagatgccggttgccatcaaacaagtaggaaggatttgctaaaatttctaacaaattgcagaagtctgactgtgaactagtgtgacagtacaggtttgtctgggagccacagacagagaagcagttcacacttacaagatcgtcttcacagatttccatttggtgctcatgagaaagactgggtgagggtgggggaccagagggagtcttccttggtggtgcaggcctggaggaggggagtgcagttgctgaaggaaagtcacaaagccctcc

SEQ ID NO: 645092 - DNA, 642 bp, Homo sapiens
cttgtggggctgagacaaactctgcacacttagccctgttcaaatttcagactgtgaacaaaataaatgytgtcatttacttcaggccactaaattttggatcagtacgctacacagaaatacatagccacaacatctgtcttaattcacagtatagtgtgttctaaacgagataatgcatactaatattgcaaataactgagaaaatatgtgattattattgcttttgcttgtgttataatcactctatggagtcacttcaaataattacatttattctaatatcttttatttctcctactaaaagtatggtccacaaatcagcagcataaatgtaacctgggagattgttagacatgcagaatctgggatcccaccccagatctactgaatcagaattctgcactttgacaagatccctcggtgattcctatgcatattaagttttgtaagtaccaggagagaccacttaagcaggtcaataattgttgtgtaagatagttccatgattagtcacgtgtactggcagcctaagcgagctactacttctatggatagacactaactcctagtcttctataaatagtaatggtgatccaataagaaaacctctgcattttcatcaggaaattcatgagaaat

SEQ ID NO: 645093 - DNA, 560 bp, Homo sapiens
ataacttattatctgtaagccttcttgtgtcatttgtaaaatggagaaaatagtttttccttatagggcggttttgggaataaaatgggataatgtgtatgtaacatgcagcacaatgcttatacaaagtaagtgcatagtaaaccttcactttcattaaatgtcaccacttccatgaagtctagattgcctatgctgaaaytctgctcagaacacctacatgattttgtttgattttttcttatggaaaaatgtcttactcatgttttcaatagtgaactatgtggtttgttttattgtccatgctagacttcaaattcttagactataacatctggacgtgatttgacatgaagtcctgaacatagcccaggtaaggaatatttctgtatctttcccccacatttatacttctgcctgtctttttgtaacagttatgcagatagaaataagttgctaaattgttggttgacatctcatattgagccattttttttaactaggcagcattttttattaagcccgccactctgattaccattattttagtaactatacct

SEQ ID NO: 645094 - DNA, 560 bp, Homo sapiens
ataacttattatctgtaagccttcttgtgtcatttgtaaaatggagaaaatagtttttccttatagggcggttttgggaataaaatgggataatgtgtatgtaacatgcagcacaatgcttatacaaagtaagtgcatagtaaaccttcactttcattaaatgtcaccacttccatgaagtctagattgcctatgctgaaactctgctcagaacacctacatgattttgtttgattttttcttatggaaaaatgtcttactcatgttttcaatagtgaactatgtggtttgttttattgtccatgctagacttcaaattcttagactataacatctrgacgtgatttgacatgaagtcctgaacatagcccaggtaaggaatatttctgtatctttcccccacatttatacttctgcctgtctttttgtaacagttatgcagatagaaataagttgctaaattgttggttgacatctcatattgagccattttttttaactaggcagcattttttattaagcccgccactctgattaccattattttagtaactatacct

SEQ ID NO: 645095 - DNA, 560 bp, Homo sapiens
ataacttattatctgtaagccttcttgtgtcatttgtaaaatggagaaaatagtttttccttatagggcggttttgggaataaaatgggataatgtgtatgtaacatgcagcacaatgcttatacaaagtaagtgcatagtaaaccttcactttcattaaatgtcaccacttccatgaagtctagattgcctatgctgaaactctgctcagaacacctacatgattttgtttgattttttcttatggaaaaatgtcttactcatgttttcaatagtgaactatgtggtttgttttattgtccatgctagacttcaaattcttagactataacatctggacgtgatttgacatgaagtcctgaacatagcccaggtaaggaatatttctgtatctttcccccacatttatacttctgcctgtctttttgtaacagttatgcagatagaaataagttgctaaattgttggttgacatctcatattgarccattttttttaactaggcagcattttttattaagcccgccactctgattaccattattttagtaactatacct

SEQ ID NO: 645096 - DNA, 619 bp, Homo sapiens
ttgcttttttttttttaacgtcagatggtaaaatatagtattatttaggaaatgctcaatttatatgtgyagcaatcaacatttcacacctctcattgcatattgcataaaaagtgagcttggtagaaaacatgtcataatgtttaaatgttatttttatgaatggcttaaaactttgtttctcaatgtacattgtagggcatttggcaaagaagcctggagacatttttaatttccatggcactgggaggggttgctaatggcatctagtggatagaggccaagatgctattaaacattgttcaatgctcaggataaccccctacaacaaagcattatcccatttaaaatgtcaatagttctagggttgagaaaccctggcctatgaaaagcaatgtgctaaaattgtactctaggggctcagaacaaattatttagttatacggctaatgtaagtggtatgcatttttactgaagtatcagagttgaatttgtaaaatggtgtctctttaggtactttttttgtcaaattttagtacaacggtgacttagtcagcccccactgccataacaaaataccttagatcaggtgacttaatcaacaaaaatttatttctcg

SEQ ID NO: 645097 - DNA, 426 bp, Homo sapiens
gatttcttctgtgaaatatcagtgccacagattgtaacagatagcttcatgcacactctgcattttattggtttgtttggaaaatgttggccattgaattattcatagatttatttcaaatagtttggaaattgttgtacttttgaaaacatgctgttcctgtagttttttgatgagagttatagttgttatatatacataaagataattttcttttcatttttaagagacaattctttttatcctaaatattttattatctttaaatttctttctgtattattayatgtgctcctgaagcgagcactctttttatctatgatacttccataataatctcttctatttatagctattggtagttccccaccacaaaaaaaacataattctggtgatagaaatttttatttgctgtttaggtttgtg

SEQ ID NO: 645098 - DNA, 624 bp, Homo sapiens
taatctctctggtcatctttgtatcttgaaaaaacaattgattaatacctcaacttcatcaaaaaacccttgtttaccattggaaaactgaaatttttagcaagaagaaaaaactgaatataaatctattcattttaattacaataagcagaaatagaattaataagttaattctataagttatgttagcatttgtaaaaggaggcttaaaactgagtctcatgagatttgtccttgttggagttgtaggagatgaggttaatccactaattcttaacgtacatcatgtgaagtaccacgtgggtcaaccctcatcaggckttatccacagaaacagattttcctaaaactgaaccagaaaagaagtaatagagggagagtttaatccagactttcaagtttttgactggtggatataagctaatctgttcgacttcaataagattctgcttacctgacttgttttttgtagatttcaaaaactctatttgttatttggcctctaaagcatcactggacctttttctttctttttttttttttttcaatacagatagactttaataaaatgccctaagtaatattctttatccttttcctcttagttgcttgatatgttcttcc

SEQ ID NO: 645099 - DNA, 363 bp, Homo sapiens
cataaatgtacttaataccactgaactatgcacctaaaaatggaaaagatggtaaatttcatgttatgtgtattttacaatgatttttaaaagcatgttatttaaaaaatcactccagaacaagaggcacaarccagacagtcccaggcaagcctggacacagaccacctatggaaagatgatgttacagattttggatttttagaaagatgagaagctactgaccaattctaactaaggaagggcatgattatatttgagttgtttagaaaagcattttgactgctatgcagaatcgatggggaggggagtaaactcaaaccccagtcttctgtctgcaaagacaattggttatttaaggtt

SEQ ID NO: 645100 - DNA, 583 bp, Homo sapiens
acacttcctttcctgttcttcctgggcctttgtccactgcttctgctgcttcagaaccaattccacccactaactatgcccctgcctgcctgccccctctccattttacctccgccttctttccatcctgctggtctggtacaaaaggcaatgggtatttcaaaatgctggctgctcttggtctcacaggtacaaaagctgattagagaaagaataagttgcctagagctgtgattgccaaacttttctgatggttcacccttatcactaaaatgttttgatcacaaagtcccaacatatgcatacttaaatccgtggctctgaaatatggatttgtttcaagtctttattgytataatgtcaaatttagtatctctaactagtaaaactaaataagtaaaatttttgaaggtatgtaatgtccatcattttcactaggttggcaactaggtgcatatatacattatgtatttatatatttataagttgtgcaccctctattgtattagtagattatatatgttataaaatataccaaaggtaaaaactcaaaaaggtgagatttaaaaaatatatatagaag

SEQ ID NO: 645101 - DNA, 531 bp, Homo sapiens
gaatgtcgtaatcggacagcagatctcaaggtggcaagtacagccagtagaggatggctagtgtgatttgaataatattgtagaaactgagcccagaatgaggttattaccagaatgttacagttgctagtggaaggtaaattgaacaactaatattggaacggaaagaagagtatttattaagcaagcattawgttttacatgagatttacatatgttattttacatatgactttcatatgtttttttcactttatcctcagaagaagcctatgtgttaacatcttcattttataaacagagaaactgatatgagaagctagttaacttgtggtcacacaagaaaatggcagatccagaatctggctcacgttgactgattctaaatttctgatactttccactacatcacctccaaccaagaaattagttattaagtctgaaattatagaaaacaagccaacttttctgggtaaagatggtggatgaatataggcaatagctatcaccctcttgtcgaaccctaagccc

SEQ ID NO: 645102 - DNA, 587 bp, Homo sapiens
acttcatacttaatgatgaaagctaacattctcrttaaagttaggaataactttaatgctatcattaatactctttcacattgtttctgtttaacctgtccaagctaaatgacttgttatgagtctttgttttcagcacttagtcatttacacagatacacagtctacatcatgaggatcacaagtagaaaaattagaaagatcaaacaaaaaccaggtgctgtggctcacgcctgtaatcccagcactttgagaggccgaagcaggtggatcacctgaggtcgggagttcgagaccagccagaccaacgtggataaaccccatgtctactaaaaatacaaaattagccaggcattgtggcgcatgcctgtaatcccagctactcaggaggctgaggggagaactgcttgaacccgggaggcaacggctgcagtgagctgagatcacgccactgcactccagcctgggcaacaagagtgaaactccatctcaaaaaaaaaagttcaaacaacaaatggattttttaaagagatattcaaaatgtaatatccaaatcttttaaggatttttgttgttgtttttattat

SEQ ID NO: 645103 - DNA, 587 bp, Homo sapiens
acttcatacttaatgatgaaagctaacattctcattaaagttaggaataactttaatgctatcattaatactctttcacattgtttctgtttaacctgtccaagctaaatgacttgttatgagtctttgttttcagcacttagtcatttacacagatacacagtctacatcatgaggatcacaagtagaaaaattagaaagatcaaacaaaaaccaggtgctgtggctcacgcctgtaatcccagcactttgagaggccgaagcaggtggatcacctgaggtcgggagttcgagaccagccagaccaacgtggakaaaccccatgtctactaaaaatacaaaattagccaggcattgtggcgcatgcctgtaatcccagctactcaggaggctgaggggagaactgcttgaacccgggaggcaacggctgcagtgagctgagatcacgccactgcactccagcctgggcaacaagagtgaaactccatctcaaaaaaaaaagttcaaacaacaaatggattttttaaagagatattcaaaatgtaatatccaaatcttttaaggatttttgttgttgtttttattat

SEQ ID NO: 645104 - DNA, 579 bp, Homo sapiens
tcatttttactcatctccaagtatttaatcatttaagcaatttcttttactatccattatttaacactgtgctgtgtaatttccatatgtttgtgaattttgtgattgatttctaattttatttttgatgagamagcatactttttggaaggtttaatcattataaagttttattgaggcctgttctatggcctatatatggtttaagttgaataatgttccaaatgcattgagaagaatgtatagtagtttgcctacccacagtttcactctctgaagtttcagttacctatgatgcagtatgatatttagagagacagagagagagagacagagagagagaccatatttatataacttttactacaatatattgttataattgttctattttattagtcattattgataatcttttactgtgcctaatttataaattaaacttcatcataggcatgtacatataggagaaaaacacaacatatataaggtccagtagtattatcagtttcaggcaaccactgggagtcttgagacacatcccctgcagataaaggggactattgcgtattttgcagt

SEQ ID NO: 645105 - DNA, 499 bp, Homo sapiens
taccaccatgactggctaattttttgtatttttagtagagatgagacttcgccatattgtcctgtctggtctagaactcccgacctcaggtgatttgcctgcctcagcctcccaaagtgctggcattacaggcatgagccactgtgcccagcctctcctagagttctgatcagccctgttctgagctcctaatttcttcaaaaccttgtatttccctcttttgaatctgtycaagttcagccagagacaggggcaagcatctgctgcattttctcctttacctctcacttccctgtaagaagggtatgcctggcactctcttttcttttcttttttttttttttttaatttgagccatggtctggccctgtcgcctaggctggagtgcagcagcatgacctcaactcactacaacctctgcctcctaggctcaagcaatcctcccaccttagactcccaagtaaccgcgactataggtgtgtgccaccatgcctggtaa

SEQ ID NO: 645106 - DNA, 536 bp, Homo sapiens
tttttgtttggagtcgtggcctatcagcttgtaaaatgtgtaaaagccaggtttttgatcactgatggcatcagttgggaaagaggtatttaagagcccctgccagagaggatctgctaagatctgctgggagatgcttcctcagcaggcggcctctgtggctgccgttttcttcacaggctgcaggtggcatcagcgggtacgtgctcctgctggctcttcctgccttgtccagcagtgcagagcttgacctccarataggggtcctggcccctatcatcttctccaggcccctttgtttacaaaggtggaggcagagggaaaaacaccagcttgagctcacacagagagttgatggtggtaaaattgggtttagaacaggagtcggcagacactttgtgtaaaggaaaagataggaactattttagggcttgcaggccacacagtctctgttccaaccactcaattctgccattgtaacacggtggctgtcagcagtacataagtggctgaacgtggctgtgttcctgtaaaac

SEQ ID NO: 645107 - DNA, 619 bp, Homo sapiens
aatcaggtgtggggatgatttatcttaaggtttaaataacattaaataacattgttaaaacttcataacaccaagaattaatgtagtcatrtagaatttagctgtgaacaagactgtacatttctttcttataatagaacttcctgttaatgaatatgtcaaaacactttcatcactgacaacaaaattacaatggtaaggcacatccccataattaatacatagatttcatagatactattttaacacttaaaaaaagtttcactgaattattttccataatttttatactattttcacattgacagatttttttttagaaaacggaagactggagttctcttatctgaagtttagaaagaattttaaaaatggaagataaggatataattagcaattcaggggcttagaagtgctttagaaaaaatactaaaataatttacatcagagctcaatttcaaaaaaagtttttctttaattgaaaagctggaagaaatgacttttctaactgcatatggaagctgataatagcaatcaagatcatgatcatgatttttcatccctcttatagcagagatttttttctaagctattcacatacttgtattaaatctaatat

SEQ ID NO: 645108 - DNA, 653 bp, Homo sapiens
tggacctggggggcagagcttgcagtgagctgagatcaggccatgcagtccaacctgggcaacagagtgagactccgtctctaaaaaaaaaaaaaaaaaaaaatacatttacactatactgtagtctattaagtgtgcaataccattatgcctaaaatgaatgtatattaattaaaaaawttttttactgaaaaatgccagtaatcaccttagtcttcagcaaatgatcatctttttgctagtaaagggtcttgccttgatgttgatggctgctgactgattagtatggtggttgctgaaagttgaggtggctgtggcaatttcttaaaataagacaatagtgaagttagccacattgattgacttctttcacaaaagatttctctgtaacaggtgatgatgtttgatacattttacccacagtagaacttccttcaaaattgaagtcagtcttcttcaaccctgccactgctttattaaatatggttattgaatattctaagtcctttgttttcatttcaacagtgttcacagcatcttcattgggagtagtttccatctcaagaaaccactttctttgcctacctaggagtaactacttacctactcaaattttaccatgagattgcagcaattcagtcccagcttcacag

SEQ ID NO: 645109 - DNA, 441 bp, Homo sapiens
tgatatattttactagcactttgtacttttcacaatgacatggtacccactgtgacaggtaaatcatgtgatgatcatgaattcagatgccaggtcagactgtctgtactcaaatcttggtgtcaccacattctaatgaccttgaaaagatatttagcctgtctgtgactcaatgtcctcatcctctaagtagcgataattggggtgtccactttatcggggttcttacttgactaaagtcaattatacatgaatagtgcttagtgcctggcaagtagtacgtgcttaataaatgtyaatgattattattagttcattgaaatgtggttgcctcatgcatgtgacgctctcatttgaaagttggagaaactgaatcacggagcagtttataggactggccaaagtcacacagcgcatttgtagccagctgtcccatcaccc

SEQ ID NO: 645110 - DNA, 531 bp, Homo sapiens
gtggaagtaagccaagtatccatcaacagatgaatgggtaaacaaaaggaagtatgtacataraatggaatattattcagccttaaaaaggcaggaggttctgacacatgctacaacatgaaggaaccttcaggacattatgctaagtgaaataagtcagtcacaaaaggacaaatattgtatgattccacttttacaagttacctagtaaaaatcataagacagttacccagttaaaatcataagacagaaagtaaatggtggttgcaggtgccaggatggggaacgaaggggaaacagggagttgtttaatgagtatagagttttggttttacaggatgaaaaagttctggagattggttgcccaacaatgggaatgtacctaacactattgaactgtactttcatttaattttatttatttatttttttcagagatgaggtctcactatgttgcccaggctggtttcaaactcctgagctcaattaatcccttggcctcccaaagtgctgggattatagatgtaagcc

SEQ ID NO: 645111 - DNA, 584 bp, Homo sapiens
gtgtgtgtgtgtgtgtgtgtgtgtagacatagcctgaggggaggttagtataaccccattacaatatattagtagcgtggcttaaattttcaaaaaacaagaacaacaaccaagattatttgtatattacagtctattattaaagagttttaacagcccgtaagtacttctaacagtccataagtacttcatagtgtattatgtcctttagattattgattygtatgtttgctttgattcatgatggctttgaaaattatattttaagttatttaccacaaatgactctctatattcaaatacttagctttcatttgtcttgacctaaaattccaatgtagagaaacgaatttctctattcacagaaatggtaacaattccaaacacgaccagtgaaattagttacaggagcaatgttgttcttccttaggaaggctattaaatttattagtctaagactggtctttcaacaagaaaaggagtttatgtttgattatgtgtggtcatttctgcagatttgttttcttgttaatgtagtattttaggggcgaggtgtattttgcccttgttcttttttttttttt

SEQ ID NO: 645112 - DNA, 588 bp, Homo sapiens
ggcagagggatgccaccaccactctgcggaggtccaggaggcccaggaagtcctgggggacccatgggtcacatgggaggccgtggaggagatagaggaggcctccctccaagaggaccccagggttcccgagggaacacctctggaggaggaaacgtccagcaccaagctggagacaggcagtgtcccaatccgggttgtggaaaccagaacttcgcctggagaacagagagcaacaagtgtaaggctccaaagcctgaaggcttcctcccgccacccttcccacccccgggtggtgatcatggcagaggtggccctggtggcatgtggggaggaagaggtggcctcatggatcatggtggtcccggtggaatgttcagaggtggctgtggtagagacagaagtggcttcygtggtggctgggcatggaccgaggtggctttggtggaggaagacaaggtggccctggggggcccccggacctttgatgtaaccaatgggaggaagaagaggaggacgtgaaggacctggaaaaacggataaaggcgagcactgtcaggagcgcagagatcagccctactagatgca

SEQ ID NO: 645113 - DNA, 565 bp, Homo sapiens
tctgactttgatattcgcatatcatcctaaaaataaaatatgacaaattagagcagtttctattttgggaaatcacagtgtrtttaatattcaagccatagggtttgtttttaaaaactaaaaaaaaaatccatactaattatatgatttctaaatatgccaacagctcagcacgccctgagcacatattacatgcaggagttacacgattctctgggtctgaaccttgtgcctttctttgtcttcactgccactcactgatgttcatattcattctgaagtgaaatttggcccaactttgtttctacgtatgttatcaatctcccatagaactgataggagacagtggctggattatgctgatgccgtcaggacacactactttaaaatatggcaccttggcatttgagaaagcagcagaagcaggaaagtcacgtttacctcctcaccctttcccttgaagcaggttacattgctgcaggaaaggaatgtcctttgatctctaaacacactgggacacagaggagaatctgaatacgcagtccttgctaagttgtcccatgca

SEQ ID NO: 645114 - DNA, 543 bp, Homo sapiens
ttttgtgatcattgacatttaagaccaaaaaagaaaagactcctaagaagaactgggttttttttttttcctcttccttttgggaagacaatgtgaattaaattctatagtatcttatgaaatacagaaattgtagaacaaaaacttataactttatttatttacttatttttcctgagacagagtattgctctgtcccccaggctggagtgcagtggcacgatcttggctcactgcagcctctgccttccagattcaagcgattcccattactcagcctcccgagtagctgggactacaggcatgtgctacctcaygcctggctaattttcgtatttttggtagagatggggtttcatcttgttggccaggctggtcgcgaactcctgacctcaagtgatccgcccaccttggcctcccaaagtgctggaattataggtgtgagccaccacgaccagccagaaatttacaacttgaactgtgactttccaaaatggaaaattagggcatgtccttggtctgtgttccccaaatagtcaatct

SEQ ID NO: 645115 - DNA, 543 bp, Homo sapiens
ttttgtgatcattgacatttaagaccaaaaaagaaaagactcctaagaagaactgggttttttttttttcctcttccttttgggaagacaatgtgaattaaattctatagtatcttatgaaatacagaaattgtagaacaaaaacttataactttatttatttacttatttttcctgagacagagtattgctctgtcccccaggctggagtgcagtggcacgatcttggctcactgcagcctctgccttccagattcaagcgattcccattactcagcctcccgagtagctgggactacaggcatgtgctacctcacgcctggctaattttygtatttttggtagagatggggtttcatcttgttggccaggctggtcgcgaactcctgacctcaagtgatccgcccaccttggcctcccaaagtgctggaattataggtgtgagccaccacgaccagccagaaatttacaacttgaactgtgactttccaaaatggaaaattagggcatgtccttggtctgtgttccccaaatagtcaatct

SEQ ID NO: 645116 - DNA, 568 bp, Homo sapiens
agcttcacagcaaactccatgagagtcctctgctcccaccatttttgtagatgaagaaaatgaggcccagatgatgaaaccaggaaaatgagtccaaggtcccatggataggaaaaagtggagctgggatttgaagctaaacggcctgactccagaaccttgagcactacactgtatatcctctattatgacatctgcaaatacctttttttttttttttgagacagagtctcgctctgttgtcctgcctggagtgcagtggcatgatctcggctcactgaaacctctacctcccaggttaaggtagattctcctgcctcagcctcccgaagtgctggcattacaggcttgcaccaccacgcctggctaatttttatattattttagtaaagacggagtgtcaccatgttggccaggctggtctcaaactcctgacctcaagtcatccacccgcctctacctcccagtgctgggattacaggcatragccaccatgcccagccttgcaaataccttttattaactagaaagtgatgaacccatgaatcattatttcctattttgtaat

SEQ ID NO: 645117 - DNA, 567 bp, Homo sapiens
attaagctacctgcaagcatgtcataggactctccagtgaccttcagacattaaattggatgataaacatattgacaatgtccaaggctgcaccctatttaattataaattacaagtgatgttgcttgttttaattttcatagtgttcgagaaatgcaattgcataaatcacaggaccattgtacatagttttgtacagaaattcacaaaatttttcaccaatacaaaaaaaatcccattctcaaaaacatatctgcttatggtattttaagagttattctacacaacattttctgcatttgatattactgraatcataatgattctccagagaaggcagcaattgctgcaagcctctgcctactttaatatgccttcaggtacagttgtgtcttagttttcggtactgaaatacaatgtttagaattatttttctttaaaagtttgtaaaatttattaagaaaatgaagagatttttaaattatgaaaggggttccaaacattaaggataatcctgtcactttataatcagtcaccttatggttgattagattatgataatgggct

SEQ ID NO: 645118 - DNA, 644 bp, Homo sapiens
agttcccagtcaggttgattttataccaaaataacttttatgaaaaagagaaagtagtaacaatgctatagattatttaatctcttgccaaataaatactgaaaattacaaaaatactatttttcatttgattattaaataggcatattcaacttaatatttccaaactgagatcctgattctcactcaaaccatcccttccttaatgttcccactcagttatcggtcacgtaaattgatggggtaaggtttcaccacaatactaccagttgttcagataaaaaattttgatataatctttaacttgactytttctcataacccatatctgtttcatctataaatcctttttgctgaaactttaatatatacccaggattccacgttctcacccaacccttgctactatactgctgtaagtcatcatcccagctcctctggattatcaaaatgacctcataacttgccttcctacttctgcccttgatgcactttcattttatttgcaatatggtaacaaggtgattctgttaaaacatttcatattatgtcacttctcagtttggaaccttctgtttttttcttatcacatttagaattgaagccaaatttcttgcttaaaatgaaaaggactacattatatt

SEQ ID NO: 645119 - DNA, 583 bp, Homo sapiens
gcccctgcagcacacattgttggctccctatcaatagccattccttattctttcttgaagaagaaatccaagtctattgggatatttattatcccaatccccctcctcagcctcagaaacagaaatgwttattctaagctaatcaggtatttaccttcccagtgcctggtttgggaatgagcatgtggtgtgacccagccagtgaaatgttacaggaagccctttgcatgcttctaagttttctccctgtttaaaagacacatgtgaagaaaagcagcccttgcgatgttgtgttgtgagaacaagatgtttggagctgctgcggattagccaaccatgaaaggagacgtgaataaaacactgtcaacagcacagctgaaagagggaaaagtgggatcctaggatatcaatgaacaaccaaaacaactctggttcctactgttttagccactgttcatctagtatttgcagtccaaagcattctacccagtaaatttcccatggcacacaggataagacctactcatttctatagtattaaaaagtctatcataaacttgccttagctaagtattcacctcat

SEQ ID NO: 645120 - DNA, 455 bp, Homo sapiens
gatgttcaattccagctgacatgggagaccaaaagtctacttttattttttttttagtttccacggagaagtagcaagctgacattctgtaattttcgacatacatactaacaatatattttgcacggaacatgttattcagctcaaagtcatctcatagaccatcttacatgactatttttgcagcacaaatcacaatttcaatatttgggtggcacccattttgctttgattcacactatttcctcagagctagtcagcaaaaatagtcaaatgaccttccagtgactgcacaaaatatggaatgcttcaaagatctgtcctgcctccttatgcagaagccaygctaactttccccgtattgttccaattttaggatatgtgccgccgaagcaagcacaaagccctacttttacatatgattagtgatgcgtcatggacaaggcttggctctg

SEQ ID NO: 645121 - DNA, 642 bp, Homo sapiens
aattcaaaataacattccacagctttcaccaactagttatatttaaaggagaaaactcatttttatgccatgtattgaaatcaaacccacctcatgctgatatagttggctactgcatacctttatcagagctgtcctctttttgttgtcaaggacattaagttgacatcgtctgtccagcaggagttttactacttctgaattcccattggcagaggccagatgtagagcagtcctatgagagtgasaagactttttaggaaattgtagtgcactagctacagccatagcaatgattcatgtaactgcaaacactgaatagcctgctattactctgccttcaaaacaaacatttaactttcccatgaaaaaagcacactatttattatctctcattgctcgctgtattaatgaaagggcagcctatatgaatataaagagcatagcccttggatgacattcaacgtgggctggaatcctacttgaagctctgtcacttcctggctgttgcttagccttttggggtctcagtttcctcatcaataaaataggaatgaaaatagtagctttctcacaggaaaccactctaatgcttaaatgagactctgcacaaaagatatagaatagttcctaacacaaata

SEQ ID NO: 645122 - DNA, 642 bp, Homo sapiens
aattcaaaataacattccacagctttcaccaactagttatatttaaaggagaaaactcatttttatgccatgtattgaaatcaaacccacctcatgctgatatagttggctactgcatacctttatcagagctgtcctctttttgttgtcaaggacattaagttgacatcgtctgtccagcaggagttttactacttctgaattcccattggcagaggccagatgtagagcagtcctatgagagtgagaagactttttaggaaattgtagtgcactagctacagccatagcaatgattcatgtaactgcaaacactgaatagcctgctattactctgccttcaaaacaaacatttaactttcccatgaaaaaagcacactatttattatctctcattgctcgctgtattaatgaaagggcagcctatatraatataaagagcatagcccttggatgacattcaacgtgggctggaatcctacttgaagctctgtcacttcctggctgttgcttagccttttggggtctcagtttcctcatcaataaaataggaatgaaaatagtagctttctcacaggaaaccactctaatgcttaaatgagactctgcacaaaagatatagaatagttcctaacacaaata

SEQ ID NO: 645123 - DNA, 529 bp, Homo sapiens
gaaaccattaatgatatcatcatgttgattcaataagtttgaaagcaaaattgatagtaatctttggaagaaattgtatatgtgtctatgtatgtacatacatagacatacatattgctttctgaaattttcaatgactttatgcttcttctgaagcaattcgagtttagwatttgagacccctgggtcaaaacatcttcttgagtatactgaagaacatttggattaatttcagacacgtattttggtttatatagtgttttttatccatggtaacttatttactgtttaaaaacatattgagaacaaacagcagcagcaaccctgaattgagtgaaagtcctgagagagctttgcccaatcagtgcatgtgcatgtttacactaatctcctgtctgaacctaggaactggctgaatgagctagcagatggcctgtctggctgcattataaatgataatttatttttatttgttttactcattcattcattttgagacagggtctcactctgtcatccaggctagagt

SEQ ID NO: 645124 - DNA, 529 bp, Homo sapiens
gaaaccattaatgatatcatcatgttgattcaataagtttgaaagcaaaattgatagtaatctttggaagaaattgtatatgtgtctatgtatgtacatacatagacatacatattgctttctgaaattttcaatgactttatgcttcttctgaagcaattcgagtttagaatttgagacccctgggtcaaaacatcttcttgagtatactgaagaacatttggattaatttcagacaygtattttggtttatatagtgttttttatccatggtaacttatttactgtttaaaaacatattgagaacaaacagcagcagcaaccctgaattgagtgaaagtcctgagagagctttgcccaatcagtgcatgtgcatgtttacactaatctcctgtctgaacctaggaactggctgaatgagctagcagatggcctgtctggctgcattataaatgataatttatttttatttgttttactcattcattcattttgagacagggtctcactctgtcatccaggctagagt

SEQ ID NO: 645125 - DNA, 529 bp, Homo sapiens
gaaaccattaatgatatcatcatgttgattcaataagtttgaaagcaaaattgatagtaatctttggaagaaattgtatatgtgtctatgtatgtacatacatagacatacatattgctttctgaaattttcaatgactttatgcttcttctgaagcaattcgagtttagaatttgagacccctgggtcaaaacatcttcttgagtatactgaagaacatttggattaatttcagacacgtattttggtttatatagtgttttttatccatggtaacttatttactgtttaaaaacatattgagaacaaacarcagcagcaaccctgaattgagtgaaagtcctgagagagctttgcccaatcagtgcatgtgcatgtttacactaatctcctgtctgaacctaggaactggctgaatgagctagcagatggcctgtctggctgcattataaatgataatttatttttatttgttttactcattcattcattttgagacagggtctcactctgtcatccaggctagagt

SEQ ID NO: 645126 - DNA, 529 bp, Homo sapiens
gaaaccattaatgatatcatcatgttgattcaataagtttgaaagcaaaattgatagtaatctttggaagaaattgtatatgtgtctatgtatgtacatacatagacatacatattgctttctgaaattttcaatgactttatgcttcttctgaagcaattcgagtttagaatttgagacccctgggtcaaaacatcttcttgagtatactgaagaacatttggattaatttcagacacgtattttggtttatatagtgttttttatccatggtaacttatttactgtttaaaaacatattgagaacaaacagcagcagcaaccctgaattgartgaaagtcctgagagagctttgcccaatcagtgcatgtgcatgtttacactaatctcctgtctgaacctaggaactggctgaatgagctagcagatggcctgtctggctgcattataaatgataatttatttttatttgttttactcattcattcattttgagacagggtctcactctgtcatccaggctagagt

SEQ ID NO: 645127 - DNA, 578 bp, Homo sapiens
aaaatcatgaacattttcctctgcattttctcctaagagtttcaggattkacatttatgtaagtttttaattcatgttggattgatttttgtgtatggtgtgtgattagcatccaacttcattcctttgcatgtggaaatctggctttcccaatatcatttgttgaaggcactataatttctccactgtgtattcttggcgcccttgtcaaatattggttgatcatatttgggtttatttctgggctctctattcagttccatttgtctatatgtctgtctttatgctactatatttgtatcttgcaagcttgctaaactcacttattagttttagtagcttcttctatttattccttttgattttctacatacacaattgtgttgtctatgaataaaagcagttttatctctttctttctaatttgaatagttttatttctttttcttgccttattgcactggctagaacttcaaatacaatgttaaacggaaatgaggagaatgtaaatttctgtcctattgtttatattagggaataatctctcattttcccaccattccttatgtagatttttc

SEQ ID NO: 645128 - DNA, 603 bp, Homo sapiens
cagggttctcccctgtgcccccatgcctaaagcagtccctggaagataataagtgcccagtgaatatttgtggactaaatgacaagtgagtgaatgtactcctgcaggttagacacatacatcatggttcctggcatctaacacacgcttaatgcctacagagtgaaagataaattgtgtttcttccagaagttctatttaaaactgtccctgatcatttaatattacctcctgtggcttcatgactccttgatcccttttgtgaagggactgtttaggcaacagtctctcccacattcagagccctctaataaattctgtagacatttactgagctgttctctgattccccaaatagactaagttggctaattgtttgctcctgcagtaccctctctgctgttttttggaagcgcacaaaccacttattgttacttgtttgatgtctgttttccccaatgggccttaaaggtttcaatagggcaggatccatgtgaaacttgctccctgctgtttccygcacttccagtccactatctgacactcgttggacagtaaatgagtatttattgactgaaggggccaggtatcgttagcagtgcc

SEQ ID NO: 645129 - DNA, 546 bp, Homo sapiens
atatatgactaagtcctcaaaaacaattgcaacaaaagcaaaaatttacaagtgagatttaattaaacaaaggagctgctgcacaacaagaaatatcaacagagtaaacagacaacctacagaaagggagaaaatatgcacaaactatacatctgacaaaggcctaatatccagaatctataaggtggtgaaacaattgaacaagcaaaaaacaaacaaccccattaaaaaatgggcaaaagacatgaacagacacttctcaaaagawgacatacaaatggccaacaacatatgaagaaaatgctcaacaaaaattaatcttcaatatttatgaacaagtttggagaatgtgacttatacttatggtcaagtgatttatctggtctcaaatgctggaatttggcttgtttatttcatcacatgccacactaagaaatcacaagactctcccatggagagtgcaaggccttcactgattaacaaagaggagagcagaactgattttctctacagggcgggcttccagcatgggcaacatagtaagaa

SEQ ID NO: 645130 - DNA, 615 bp, Homo sapiens
agttgagatgtccaggaaaagtaccttaaacaaaggtattacttacaaatttaaaacaatgctatgagtttctaacatacacaggcagacacccttccaagtggaaacctttataaagatgtaaattttttgtacaaaagtgtttgaggggagtcagctaaatgatagaaatttatattttggtgctcaaacttagcttgtttcttaattagaataccagcttcttggtggagccctgtggtgaatatgggaaggaaacatgtagattttagggcctaatatttaaatacgtgagaagaaakcacagctggaaggcagaacacagatcccccaaaaatcaagggtcctatttttacatcaaatcttgggttcctccaaagaggaaaatgccacaggataaaatgctttcacagtgtacctgactgtaaggacatatccctgaggctagctgcaatgcaatgcaatgcaaaagaaactaaagatagcagaaaggaggaataaggtggattaaaaataaatagaacaattttaagaaaggaagtaaacagacgtgccaagtacataattgtttaaaaatgttttagctgccgggtgtggtggctcacatctgtaatc

SEQ ID NO: 645131 - DNA, 615 bp, Homo sapiens
agttgagatgtccaggaaaagtaccttaaacaaaggtattacttacaaatttaaaacaatgctatgagtttctaacatacacaggcagacacccttccaagtggaaacctttataaagatgtaaattttttgtacaaaagtgtttgaggggagtcagctaaatgatagaaatttatattttggtgctcaaacttagcttgtttcttaattagaataccagcttcttggtggagccctgtggtgaatatgggaaggaaacatgtagattttagggcctaatatttaaatacgtgagaagaaagcacagctggaaggcagaacacagatcccccaaaaatcaagggtyctatttttacatcaaatcttgggttcctccaaagaggaaaatgccacaggataaaatgctttcacagtgtacctgactgtaaggacatatccctgaggctagctgcaatgcaatgcaatgcaaaagaaactaaagatagcagaaaggaggaataaggtggattaaaaataaatagaacaattttaagaaaggaagtaaacagacgtgccaagtacataattgtttaaaaatgttttagctgccgggtgtggtggctcacatctgtaatc

SEQ ID NO: 645132 - DNA, 478 bp, Homo sapiens
attttctcaactaaaatgtaaaagagagagagagatagaaagatggaaaaagagtaagggaaggaaggaaggataagagagaagggatggaaatagaaaggaaggggggataattttacacataactcrtagggttttcatgataatttaaaagaatacgaagaatcatttattttagaatgcctttattgtttataggattaagcatgttatgtatcagttaggatctaacctcttcctacaaggccgtttccttgagtaactatgcacatttaagtacctgatacagtaggaactcaataagtagtagacacctctaccattactattaaaaatgtactggtaaaagtgtttgaaatgcagtgtgaatgaagctctaaaattctgctattgatgtcctgtggcctggcttgccttattatattccaacctttgtttactagtaaatagatcatcccaaatcagtgcaaacatgtac

SEQ ID NO: 645133 - DNA, 478 bp, Homo sapiens
attttctcaactaaaatgtaaaagagagagagagatagaaagatggaaaaagagtaagggaaggaaggaaggataagagagaagggatggaaatagaaaggaaggggggataattttacacataactcgtagggttttcatgataatttaaaagaatacraagaatcatttattttagaatgcctttattgtttataggattaagcatgttatgtatcagttaggatctaacctcttcctacaaggccgtttccttgagtaactatgcacatttaagtacctgatacagtaggaactcaataagtagtagacacctctaccattactattaaaaatgtactggtaaaagtgtttgaaatgcagtgtgaatgaagctctaaaattctgctattgatgtcctgtggcctggcttgccttattatattccaacctttgtttactagtaaatagatcatcccaaatcagtgcaaacatgtac

SEQ ID NO: 645134 - DNA, 478 bp, Homo sapiens
attttctcaactaaaatgtaaaagagagagagagatagaaagatggaaaaagagtaagggaaggaaggaaggataagagagaagggatggaaatagaaaggaaggggggataattttacacataactcgtagggttttcatgataatttaaaagaatacgaagaatcatttattttagaatgcctttattgtttataggattaagcatgttatgtatcagttaggatctarcctcttcctacaaggccgtttccttgagtaactatgcacatttaagtacctgatacagtaggaactcaataagtagtagacacctctaccattactattaaaaatgtactggtaaaagtgtttgaaatgcagtgtgaatgaagctctaaaattctgctattgatgtcctgtggcctggcttgccttattatattccaacctttgtttactagtaaatagatcatcccaaatcagtgcaaacatgtac

SEQ ID NO: 645135 - DNA, 595 bp, Homo sapiens
tgtctgtgggttttccacatgcatggtgcaagttggtggatctaccattctggggtctggaggacagtggtactctttgcacagctccactaggcagtgccccagtggggactctgtgtcggggttcacaccccacatttcccttctgcactgtcctagcagaggttctccatgagggctttgcccctgcagctaacttctgcgtggacatccaggcatttccatacaacctctgaaatctagggagaggttcccaaaactcaattcttgtcttctatgcacctgcaggaccaacaccacrtggaagctgccaaagattggggcttgcaccctctgaagcaatggcctgagctgtaactttgccctttttgccacaggtggagcagctgggacacagagcatcaagtctggaggctgcacacaacagagggggccctggccctggccctggcccataaaactatttttccctcctaggcctcagggtctatgatgggaggggcttctgtgaaggcctctgacatgccctggagacattttctccattgtcttggctattaacattcagctcctcatttcttatgcaaatttatgc

SEQ ID NO: 645136 - DNA, 567 bp, Homo sapiens
cttctttggattatctattagggcaaagtaaaaccagcaagcttayattgctatctcatggctaaggtgtcaagctattggatctttgtgtgtgtatacatgtctagatgtgtttatttgtatgtacacttattgttatatgttatgtctaccaaattggcttataagtaaaagaacacttataaattaagtaagtctaagcaactttcaagttaatgtgacttaaagtaaaactttactaaacaagctagccttaaaattattgatggaataaaaatagaaatgccttcagaattttcaggatacattttgtctgaattttatgtttgtctttgctaaatattttaaaatatcagtattaatgcaagctaggagctgcttagggtaagtctgcctcccattctattcaaagtctcactgagataaattcatgtctgattgcttcctttggaaaggctaattggaaactcaaaagaatgcaaccatttgtctccaacctgtgatctgaaagcccccaagactcctcacctcaagttgtcccacctttccagaacaaaccaatgatta

SEQ ID NO: 645137 - DNA, 563 bp, Homo sapiens
atagacaacacaaacaaatggaaacacatcccatgattatggatgggtagaatcaatatcgtaaaaatgactatacttgccaaaagcgatctacaaattcaacacaattcccatcaaaataccatcatcattcttcacagaattagaaaaaaaaatcctaaaattcttatggaacaaaaaagagcccacatagccaaagcaagactgagaaaaaagaacaaatttgaaggcatcatattaccaaacttcaaaatatactacaaggctacagttaccaaaacatcatggtactggtataaaaataggcatgtagaccaatggaacagaatagagaacccagaaataaagccaaatatttacagccaactgatctttgacaaagcaaacaaaaacatagagtggaaaaggacaacctcttcaacaaatggcgctgggataattggcaagccacatgtagaagaatgaaactggattctcatgtctcaccttctacaaaaatcaagaaggatcaaagacttcartctaagacctgaaaccataaaaaatctagaagataacactgg

SEQ ID NO: 645138 - DNA, 467 bp, Homo sapiens
ttactcagcatttacaggatcaagtccaaatatggccgttttacaatctggcycgtccaccctccagcttttaatcagtcccatatatcctatgccctattcacaattgagtattagtgaatgaccttccttacttccatgcttcagccctgaattcaattctctcaccttagagtacacaaagcagagtaaattaaatttgtagaagacacccaaatgcaaagcaagccagtaaaattgttctttcctctataagtagtgctctttctcaatcactaacttcaattttccaggatatattactgtgacatcttgattggctgaggcaaattatctacaaagtttagatttacagtctgcatttcttttcgtattagggaaccaatgcttatacatttaaaatgtagtgtgttttgcattcattttcattttatttacttttttatttgtatttttttacaaatgcc

SEQ ID NO: 645139 - DNA, 467 bp, Homo sapiens
ttactcagcatttacaggatcaagtccaaatatggccgttttacaatctggctcgtccrccctccagcttttaatcagtcccatatatcctatgccctattcacaattgagtattagtgaatgaccttccttacttccatgcttcagccctgaattcaattctctcaccttagagtacacaaagcagagtaaattaaatttgtagaagacacccaaatgcaaagcaagccagtaaaattgttctttcctctataagtagtgctctttctcaatcactaacttcaattttccaggatatattactgtgacatcttgattggctgaggcaaattatctacaaagtttagatttacagtctgcatttcttttcgtattagggaaccaatgcttatacatttaaaatgtagtgtgttttgcattcattttcattttatttacttttttatttgtatttttttacaaatgcc

SEQ ID NO: 645140 - DNA, 540 bp, Homo sapiens
gatgctcaccttgaagactggaaggaagtggctacaaactaagaaatgctggaaactgccagagttgaacatataagggacacgttctcacctgcagcctcccaaggaaagggaaccctgtctacaccttgagtttggcctagtgatactgatttcagacttctggcctccaaasgtacgcaaaaataaaattccactgtttgaagtcatctaatttgcataaatttgttacagcagccacagaaaactaatatagctttcttaaggtgattgtgtgggctgctctgatgtttgtgtcttaagaagtgggtggaaatgtaaaaggataataaatctttcttaaaggaaactttacacaagaaggcttaaacattttcatgattcatgcatatatttgtcttcaacacaaacattaagaaatgaaaagattgcacacagaccctttccttttcaccacttgccaactttccattctttgtctcatgagcaattatctaaagtgaaaacgttgtcctcttgaaagtagtttacacagagata

SEQ ID NO: 645141 - DNA, 540 bp, Homo sapiens
gatgctcaccttgaagactggaaggaagtggctacaaactaagaaatgctggaaactgccagagttgaacatataagggacacgttctcacctgcagcctcccaaggaaagggaaccctgtctacaccttgagtttggcctagtgatactgatttcagacttctggcctccaaacstacgcaaaaataaaattccactgtttgaagtcatctaatttgcataaatttgttacagcagccacagaaaactaatatagctttcttaaggtgattgtgtgggctgctctgatgtttgtgtcttaagaagtgggtggaaatgtaaaaggataataaatctttcttaaaggaaactttacacaagaaggcttaaacattttcatgattcatgcatatatttgtcttcaacacaaacattaagaaatgaaaagattgcacacagaccctttccttttcaccacttgccaactttccattctttgtctcatgagcaattatctaaagtgaaaacgttgtcctcttgaaagtagtttacacagagata

SEQ ID NO: 645142 - DNA, 574 bp, Homo sapiens
agatatcaattgatgggggaaaatgaacttctttttaagtgtcaatattttgatttgaacatatgatttcraagtatggtttatattatgacattatgtcaaatgtatttttttaggtatgatgcaacatgtattaagtaaaaagctgtttcttaagtgttttgaacacttatttttttgtgtgtttacatccctattgtcctttctctaaattttaacatcttaaagtaatatagatccgtgaaaagagtacctttcaactgtttctcatgttgtcttttagtggggtaccatggaatacaaaagagaaatataaaatgtattatgaaagatttataatgtgaagaattttatttttctcaaattactcagtgtttcagatactttctataatactggctgaattccctttccaaatgcagtacaaatgagggaggttgtattgtggtttagatgagtaatgaaatcattatcaatttaaacaagtggtgatgggatcttttatcttcaaaagttggctaatcatgtcattatcatgacaagatttcaaggtgatttaatactgaaatttgga

SEQ ID NO: 645143 - DNA, 586 bp, Homo sapiens
acctgatgcaaattttgcataargactgagctgaagggggtatgaggactaaaagtagtagaaaaatttcactcctacactgtcgcataatcataacctgatagtaatattccttaagggggttctctggtttacaactaagtaggttccaggaggccagggctgtgaatttgtcctgttcatagttgtttatccagcaacgagcacaaaataggtgcccagcaaatatttttttacatgaatgaacaaaatgctactttttccctttgtttttatctttacaaagacatgtacataaattaaaattttatatgatcttgtggtattttaaaaataatcagaacattctatttcaattctgactaaattattgttatgattattgctttttactaagactgaagctaaatcagttctactgtgattatgattcaggttgtgctgaggaatccctaatctgcgtttctttttttctcctcccccttgctaagtgatattatacctagcacaatattcctacctcaactgtgggacctgtaagggtttaatgatcttaatttatgtatcctcatttattacgtagtac

SEQ ID NO: 645144 - DNA, 599 bp, Homo sapiens
ctcctctctctaagatgctcatgtataaactgcttatatttggcacttgctgatgcttgatttaatatgtgtatttttgcaaagttaagagacgatgcgttgattgttaacatctgtcttccgactctccttgtcttctacctgaaagcaattcaggtgtgaaaggcgggcaggctggagcaattctgattaggttcggccaatctagatggaaatagccccatttggttgaagtccaactgcagctgataaacaacctaatagccattcacgtccagccaccctccatgattccatttctactcctcttaaagcaatytgtgctatctgagatggcgccctggcttagtattcagcatcataggaggacgtttacttaagggtgctggtgaaaactgaacaatgagttccaaagcagcagcaagtcttgggaatttgcatgagaaaaccacaagaaatgtaattatttttgctagcaaaactcagagtagggttgtcttcttatttaataccatgtcattacaaattatagaactcaatttaggaaacggtgatttagattctaagctgaaaggagctagttgcacaccgaacattat

SEQ ID NO: 645145 - DNA, 526 bp, Homo sapiens
taaaatggaaaaggtcgagggcatgccaggttctctagtacttcagctggttgcatattacagtcattttgtgcacattttaaactgatgggcaaattacatcaaggaaaaattcagagcccagaggttgacctgcagctaaagagttcctaagttgtctatttctctattttcttttctgcttgctttaaatctgctgttacttttctactgagataaaacccactatttgggtgcaacttttaatttttgttattgtttttataaaccagtgagtttgtattactatcccatgcctagcactctaaagtaaaagctataggatctttgtttctgtgggcatgtatatgtgtatttatgtttacatacatatattttgttgtgtgctttggccacaaggtaccamattgacttaaagaatactcataaaactaaataataagcccaaatgcttttcaagttcatgtgacttaagtaaaatctttaataaataagctggctttaaaattattggtaaagtcatgtt

SEQ ID NO: 645146 - DNA, 526 bp, Homo sapiens
taaaatggaaaaggtcgagggcatgccaggttctctagtacttcagctggttgcatattacagtcattttgtgcacattttaaactgatgggcaaattacatcaaggaaaaattcagagcccagaggttgacctgcagctaaagagttcctaagttgtctatttctctattttcttttctgcttgctttaaatctgctgttacttttctactgagataaaacccactatttgggtgcaacttttaatttttgttattgtttttataaaccagtgagtttgtattactatcccatgcctagcactctaaagtaaaagctataggatctttgtttctgtgggcatgtatatgtgtatttatgtttacatacatatattttgttgtgtgctttggccacaaggtaccaaattgacttaaagaatactcataaaactaaataataagcccaaatgcttttcaagttcatgtgacttaagtaaaatcwttaataaataagctggctttaaaattattggtaaagtcatgtt

SEQ ID NO: 645147 - DNA, 526 bp, Homo sapiens
taaaatggaaaaggtcgagggcatgccaggttctctagtacttcagctggttgcatattacagtcattttgtgcacattttaaactgatgggcaaattacatcaaggaaaaattcagagcccagaggttgacctgcagctaaagagttcctaagttgtctatttctctattttcttttctgcttgctttaaatctgctgttacttttctactgagataaaacccactatttgggtgcaacttttaatttttgttattgtttttataaaccagtgagtttgtattactatcccatgcctagcactctaaagtaaaagctataggatctttgtttctgtgggcatgtatatgtgtatttatgtttacatacatatattttgttgtgtgctttggccacaaggtaccaaattgacttaaagaatactcataaaactaaataataagcccaaatgcttttcaagttcatgtgacttaagtaaaatcttwaataaataagctggctttaaaattattggtaaagtcatgtt

SEQ ID NO: 645148 - DNA, 546 bp, Homo sapiens
ttgttacataggtagacatgtgccatagtggtttgytgcccctattgaatgaacctctaagtttctccccttgccccccaccctgcaacaagccctggtgtgtgatgttcccctccctgggtccatgtgttctcattgttcaacgcccacttatgagtgagaacatgcagtgtttggttttctgttcctgtgtttctgttcctgtatgtgtgtcctcagtttgctgaggatgatggcttccagcttcatccatgtccctgaaaaggacatgatctcattcctctttatggtcaaaaacttatccaccatgatcatattggcttcatccctgggatgcaaggctggctcaacatatgcaaatcaataaacataatccatcacataaacaaaatcaaagacaaaaacaatatgattatctcaatagatgcagaaaaggcctttgagaaaattcaacagcccttcatgttaaaaactttcaataaactaggtattgatggaacatatctcaaaataatagctatttatgacaaacccacagccaatatc

SEQ ID NO: 645149 - DNA, 640 bp, Homo sapiens
cctttttatctttggtagaatagtttagagcaaatctcagacatcatgtcatttcatgagggctaagaagccttactgtcttawtgaagattaaaaaatagaccaaaaaccccactggacaccttttagagaggagtatgctttgtctcttactgatagccaagcaaataagtgaaaacacaaaatcttgggaaattgagaggctcatgaacctgtcatcctggtagatattacaaaggaaagcaatcaaatgcaaagtgaattcttcccaaatgaccaccttcctgctcttggctgtactctgggtatcaccgtggaggactatggctgctgtaaccttgaagaagggagaaggagaccagaaatgctttttgcagatggaggaggtggtggcgggtggcgggtggaggttgagggtgggggtggtctctgagagatgcaacatcccttttcttgcaagagatctgatggatgcatcatatgtcaacacagaaaagagaaacacttcacctcctgttcttgagtgaaatgccttttttttcgggcattaacatggggggctagcatttcacatttaaatccaaggtcacttctctgggtaggaggtcactctcatgtttctaagaactgaaaagaaaaa

SEQ ID NO: 645150 - DNA, 640 bp, Homo sapiens
cctttttatctttggtagaatagtttagagcaaatctcagacatcatgtcatttcatgagggctaagaagccttactgtcttattgaagattaaaaaatagaccaaaaaccccactggacaccttttagagaggagtatgctttgtctcttactgatagccaagcaaataagtgaaaacacaraatcttgggaaattgagaggctcatgaacctgtcatcctggtagatattacaaaggaaagcaatcaaatgcaaagtgaattcttcccaaatgaccaccttcctgctcttggctgtactctgggtatcaccgtggaggactatggctgctgtaaccttgaagaagggagaaggagaccagaaatgctttttgcagatggaggaggtggtggcgggtggcgggtggaggttgagggtgggggtggtctctgagagatgcaacatcccttttcttgcaagagatctgatggatgcatcatatgtcaacacagaaaagagaaacacttcacctcctgttcttgagtgaaatgccttttttttcgggcattaacatggggggctagcatttcacatttaaatccaaggtcacttctctgggtaggaggtcactctcatgtttctaagaactgaaaagaaaaa

SEQ ID NO: 645151 - DNA, 518 bp, Homo sapiens
gatgcagttactagaactttcaatatataaaaaatccctaccactccagaggaccatgtttccttgggaattatacctggaaacatgaaaaataaggaaagcacagacaactcaggattgcttcctaaaagagaatagattttcttcatgtgcacttttgggctgctattccaacaacaagtgtataagcaacaataaaaattgatccagattttatcaytgaatttcgcagaactgaaaaacaactattgattttgctctaggggccaagcttatatacattaaccaggatccaatcacagccctggatttatttttgctgaggcaagaaagggaatagttcatattttacgttgcatcaatataaatgtcactggtcaggtgaaacaacgtacacataaacttaaagaaaagtcatctgtcttcctataattaagcttaattgatcatagacatattatgttctaaacttagcaatttagatatatatatacactcattattttagaggaattaat

SEQ ID NO: 645152 - DNA, 518 bp, Homo sapiens
gatgcagttactagaactttcaatatataaaaaatccctaccactccagaggaccatgtttccttgggaattatacctggaaacatgaaaaataaggaaagcacagacaactcaggattgcttcctaaaagagaatagattttcttcatgtgcacttttgggctgctattccaacaacaagtgtataagcaacaataaaaattgatccagattttatcactgaatttcgcagaactgaaaaacractattgattttgctctaggggccaagcttatatacattaaccaggatccaatcacagccctggatttatttttgctgaggcaagaaagggaatagttcatattttacgttgcatcaatataaatgtcactggtcaggtgaaacaacgtacacataaacttaaagaaaagtcatctgtcttcctataattaagcttaattgatcatagacatattatgttctaaacttagcaatttagatatatatatacactcattattttagaggaattaat

SEQ ID NO: 645153 - DNA, 553 bp, Homo sapiens
cacagttagatttgcacaggttaaaccaactttgcatggcaggaataaaacctacwtggtcatggttggattagctttttgatgtgcttctagatttggattgctagtgttttactgaggatttttgcatttgtgttcatcagggatactagaagttttatcttttcattttgtctttgccagattttggtatcaggatgatgctggccttatagaatgagctagggaggagttcctcctccttgaatttttggaatagtatcagtaggattgtgactggcttttctttttgcctctggtagaattcagctgtgactctgtctggtccagggctgttttcccgttggtaggtttttaaattactgattcatagcgcttttatttgtcctacctactgccaccttcataagtcttgttgcttctgtttaaggaaggaggctcagtttgctcctggactccactagctagagaatcagagaattgactgcctctttctagcagacaactgaagatcagctctataccaacaacacacagtggataatttgtagtg

SEQ ID NO: 645154 - DNA, 553 bp, Homo sapiens
cacagttagatttgcacaggttaaaccaactttgcatggcaggaataaaacctacttggtcatggttggattagctttttgatgtgcttctagatttggattgctagtgttttactgaggatttttgcatttgtgttcatcagggatactakaagttttatcttttcattttgtctttgccagattttggtatcaggatgatgctggccttatagaatgagctagggaggagttcctcctccttgaatttttggaatagtatcagtaggattgtgactggcttttctttttgcctctggtagaattcagctgtgactctgtctggtccagggctgttttcccgttggtaggtttttaaattactgattcatagcgcttttatttgtcctacctactgccaccttcataagtcttgttgcttctgtttaaggaaggaggctcagtttgctcctggactccactagctagagaatcagagaattgactgcctctttctagcagacaactgaagatcagctctataccaacaacacacagtggataatttgtagtg

SEQ ID NO: 645155 - DNA, 615 bp, Homo sapiens
taaaaccatgaaagccatagaagaaaacatgattaaatccaaatgaccttagatttgtcaatgaattctttagctataagaccaacaaaattaagcaataaaagaaaaaaaacagatagttgtatttcatcaaaattaaaacactttgggcattaaaaaaaaaaaacatgtattgtttttctaggtttcctaagacaaaatgctacagactgggtagcttaaacaatataaattattttcttatagttttggaaacaggaagtccaaggtcaaggtgtctgcaggtttagtttctcctggggcctctctttttggctttcagatggtcactttctcattgtcttcacayaggtattcccctatgagtaaatccatggctcttcttcctcttcttataaggacaccattcctatcaaagatcccacaggtataacctcatttaaccttaaattccctaacttcaaatacagtaacattctgggttagggtttcaacatacacatatagagtaacacatttcacgttatcaagaaaatgataacctagagaagaggagaaaatgtttgcaaatcatatttctaataagtgcctcatacccagaatatacaaagaata

SEQ ID NO: 645156 - DNA, 615 bp, Homo sapiens
taaaaccatgaaagccatagaagaaaacatgattaaatccaaatgaccttagatttgtcaatgaattctttagctataagaccaacaaaattaagcaataaaagaaaaaaaacagatagttgtatttcatcaaaattaaaacactttgggcattaaaaaaaaaaaacatgtattgtttttctaggtttcctaagacaaaatgctacagactgggtagcttaaacaatataaattattttcttatagttttggaaacaggaagtccaaggtcaaggtgtctgcaggtttagtttctcctggggcctctctttttggctttcagatggtcactttctcattgtcttcacataggtattcccctatgagtamatccatggctcttcttcctcttcttataaggacaccattcctatcaaagatcccacaggtataacctcatttaaccttaaattccctaacttcaaatacagtaacattctgggttagggtttcaacatacacatatagagtaacacatttcacgttatcaagaaaatgataacctagagaagaggagaaaatgtttgcaaatcatatttctaataagtgcctcatacccagaatatacaaagaata

SEQ ID NO: 645157 - DNA, 615 bp, Homo sapiens
taaaaccatgaaagccatagaagaaaacatgattaaatccaaatgaccttagatttgtcaatgaattctttagctataagaccaacaaaattaagcaataaaagaaaaaaaacagatagttgtatttcatcaaaattaaaacactttgggcattaaaaaaaaaaaacatgtattgtttttctaggtttcctaagacaaaatgctacagactgggtagcttaaacaatataaattattttcttatagttttggaaacaggaagtccaaggtcaaggtgtctgcaggtttagtttctcctggggcctctctttttggctttcagatggtcactttctcattgtcttcacataggtattcccctatgagtaaatccatggctcttcttcctcttcttataaggacaccattcctatcaaagatcccacaggtataacctcatttaaccttaaattccctaacttcaaatacagtaacattctgggttagggtttcaacatacacatatagagtaacacatttcacrttatcaagaaaatgataacctagagaagaggagaaaatgtttgcaaatcatatttctaataagtgcctcatacccagaatatacaaagaata

SEQ ID NO: 645158 - DNA, 584 bp, Homo sapiens
ctaattgccagtctaggaggatggcctgcccattctgaagagccctgacaagcagagttaacaagtattgctcacaaagtcattttaagtagaaccagtctgctagttattaagtgtctggaagctatttcccagtattaagtagccaggatttgctgctaatagagtcagagtcagcattacacccactgcttgtaaatgacttacttagaaaaagtcaagacatgttgtgacttggctgtcttctgttctttggagataaggtaaaagttcctagtaacgaaacatgcaaacaaacatattacaatcatttaacatgtgttacaagtaaataattggagaacacgcttttgccttcttttccttagccttttaccatttcctttgaactaatgcattccctcagctgccaaacatatgtttttcgggtgatgggagtcattgtaaggagcaggcccagcacgattctctaccatttccatgcctgatgctttagtgctaggtagatgagatgacgtttagaagtkgtccatgtataacaaaagccctcttgtgttctagtaattgatgcagttcaaaaaatt

SEQ ID NO: 645159 - DNA, 576 bp, Homo sapiens
atatctcatatctcattagcttggagtacaaataagatcagatcttttttcaatattaaaattaatctctgcagctgggtgcagtggaccacgtctgtaatcccatcactttgggaggccgaggagtccaggagttgaagaccagcctgggtgacatggcaaaaccccatctctacaaaaaatacaaaaattagctgggtgtgatggcatgcatctgtagtcctagctacttggaaggctgaggtgggaggaccacctgagcctaggaggcagaagttgcagtgagccgagatgacaccactgcactccattctgggcaacagagcgagacttcatctcaataataataataataataataataataraatatctggaatgagtgtgaaattatctggaaatttaatatgtttcccttggggctgttcttcttccctctttctctttatgaagtattcaaaaactctaagggcttattcaatccaaaggggtcaggcttagttccaagtagagaactaaagaatcttattggcctgctagcgggccccatttttagcttctgttggtgttgcacag

SEQ ID NO: 645160 - DNA, 519 bp, Homo sapiens
ccctcagatttagcctcagacagacatgctagaaatgtatccacttatcacttgaatggaaatcatcttggtaggatttgaggaagatttttctcatggcttccaatcctgagggtacaatgcagcattgattactgctcagagagagtggtcargctatggagtaggaagacctggtactaaaaactaatttaaaaacacagagatcataatactgcaaaaaattatttgtgaatcaaccataaattccaatggctctcatgtaggctttcagatatcaatggatatatattgaagaaacgatcaataataacctttcttcaggtgttttaggaagtcatataatgaatgaaagtggtttgaggaaagaatgaatttggctgtcagtattattaagaaacaatacaaataaatgaaaggaagacaggaatgatttatttcatggttctgtcaagtgggaagacacgagtttatgtacttagcttattggtagaatacatgagtcaggataggctcggt

SEQ ID NO: 645161 - DNA, 519 bp, Homo sapiens
ccctcagatttagcctcagacagacatgctagaaatgtatccacttatcacttgaatggaaatcatcttggtaggatttgaggaagatttttctcatggcttccaatcctgagggtacaatgcagcattgattactgctcagagagagtggtcaggctatggagtaggaagacctggtactaaaaactaatttaaaaacacagagatcataayactgcaaaaaattatttgtgaatcaaccataaattccaatggctctcatgtaggctttcagatatcaatggatatatattgaagaaacgatcaataataacctttcttcaggtgttttaggaagtcatataatgaatgaaagtggtttgaggaaagaatgaatttggctgtcagtattattaagaaacaatacaaataaatgaaaggaagacaggaatgatttatttcatggttctgtcaagtgggaagacacgagtttatgtacttagcttattggtagaatacatgagtcaggataggctcggt

SEQ ID NO: 645162 - DNA, 519 bp, Homo sapiens
ccctcagatttagcctcagacagacatgctagaaatgtatccacttatcacttgaatggaaatcatcttggtaggatttgaggaagatttttctcatggcttccaatcctgagggtacaatgcagcattgattactgctcagagagagtggtcaggctatggagtaggaagacctggtactaaaaactaatttaaaaacacagagatcataatactgcaaaaaattatttgtgaatcaaccataaattccaatggctctcatgtaggctttcagatatcaatggatatatattgaagaaacgatcaataataacctttcttcaggtgttttaggaagtcatataatgaatgaaagtggtttgaggaamgaatgaatttggctgtcagtattattaagaaacaatacaaataaatgaaaggaagacaggaatgatttatttcatggttctgtcaagtgggaagacacgagtttatgtacttagcttattggtagaatacatgagtcaggataggctcggt

SEQ ID NO: 645163 - DNA, 519 bp, Homo sapiens
ccctcagatttagcctcagacagacatgctagaaatgtatccacttatcacttgaatggaaatcatcttggtaggatttgaggaagatttttctcatggcttccaatcctgagggtacaatgcagcattgattactgctcagagagagtggtcaggctatggagtaggaagacctggtactaaaaactaatttaaaaacacagagatcataatactgcaaaaaattatttgtgaatcaaccataaattccaatggctctcatgtaggctttcagatatcaatggatatatattgaagaaacgatcaataataacctttcttcaggtgttttaggaagtcatataatgaatgaaagtggtttgaggaaagaatgaatttggctgtcagtattattaagaaacaatacaaataaatgaaaggaagacaggaatgatttattycatggttctgtcaagtgggaagacacgagtttatgtacttagcttattggtagaatacatgagtcaggataggctcggt

SEQ ID NO: 645164 - DNA, 581 bp, Homo sapiens
taaaatattttcggattctatttcacaggaagccattcatcggaattatctgagtctcaagttkgttagttagatttaacagagctaaccctcatctatgacttatcagcagttatatgtaaaagtaaggctttgtgcttgctttggcagcacaaatactaaaattggaacaatacggagaaaattagcatggtgaagcatttcatattttgcagtcacgggaaggtcatttgactgtttgctggctagctaagtcatagtttgaatcaaaacaaaatgggtggccccttatattagaattgtgatttttcactacaaaaacatttgtgtaaggtgatctataaactgagaatggagataagtaacacatggggtgttgtgtaaatattttgttagtatgtatcttggaaatgagaaaatgtcaacttgcatctacttcatggaacttaaaaaaaatgaaagtagggttttgtcttccatgtcagttggagataacatcactgatggagatgaaccatcattctagcaaacatctgctcattcagttagagtctgtagagaagtaatagtggtagcccaag

SEQ ID NO: 645165 - DNA, 578 bp, Homo sapiens
taaaatattttcggattctatttcacaggaagccattcatcggaattatctgagtctcaagtttgttagttagatttaacagagctaaccctcatctatgacttatcagcagttatatgtaaaagtwaggctttgtgcttgctttggcagcacaaatactaaaattggaacaatacggagaaaattagcatggtgaagcatttcatattttgcagtcacgggaaggtcatttgactgtttgctggctagctaagtcatagtttgaatcaaaacaaaatgggtggccccttatattagaattgtgatttttcactacaaaaacatttgtgtaaggtgatctataaactgagaatggagataagtaacacatggggtgttgtgtaaatattttgttagtatgtatcttggaaatgagaaaatgtcaacttgcatctacttcatggaacttaaaaaaaatgaaagtagggttttgtcttccatgtcagttggagataacatcactgatggagatgaaccatcattctagcaaacatctgctcattcagttagagtctgtagagaagtaatagtggtagccc

SEQ ID NO: 645166 - DNA, 616 bp, Homo sapiens
agatctgctgtattcttgcaaatttcatcaaattatacccataaaattggtgagctttgtgtgtaaattacacctaaataaaacagatttttaaaaatctgtttgaatttagtaaaaaggcaaactaggcaccatatatttcaaaaggtcttaatgcattatctcaatatctacactattgatgccttgccatttgctggctttgtgacatcgggcaaattattccacttctcttaatttccttttctgtaaaatggagaaaatagcagctgtggtataggaccgtggtgtgacaattaagtgagttaattcattaatatgcstggcagaatgtctggcacataagaaggactccattcagttattcatacactcttaaattcatgatctactacatggaaattgttttaccaaggccttggtatacagtggaggataaaatagataacatccttgcacttatggagctctatatcctagcttgggggaaaactattcatagtaaaaatgaaagtacctgaagataactgtatctgctaggcaagcaatcaaaacaggtgcacatggtagagagagaccagatggtttctttagttggagtggtaaggaaaggtct

SEQ ID NO: 645167 - DNA, 251 bp, Homo sapiens
gccaccaccaccaaaatgtatcctgattgtttctcatattttccaatccaacattgcagaagactttctaatctccgtatttatacttagaatttaaaaatattctgaaggtcaagaaagaagtaggcaaatccccaggacagacccagcccttatgctcctcacaacctgcctactcttggcttttgcaaccttgagttcaactacygtcacttcataccacctgtcgctccccacacatgctgtgtgct

SEQ ID NO: 645168 - DNA, 615 bp, Homo sapiens
aaacacaataaaggcagatctgtaaaaataaaaaaggaagcagcttaacatttttatgtattcacgtgatatgttttattgccttatttccaacagggatcaagtttatacagtaaacttaaatgaaatgcccaaaacagaagtaataccmaacaaggtgagcaactgtagttggcaaatttatttaccttccctctgaacctgattaattttcccactgcctccccaaaaatgttcgcagttaaaaactgctttggttttgcttgattaatacagaaactgacatggcgatcaagacaacaggatcgagaaaactgtgctatgaaaggcaagcataaagtgagtgaaacagaaaaatgtctgctagatttagtctttctgtgggcttgataccacagtgccagcatgttcaaatgtctaatattaatgtaactactactttctttaggatgaatgccacaactttatcaaagtatttgttccaagaaacgatgagatggtttttgtttgtggtaccaatgcattcaatcccatgtgtagatactacagggtaagtatattttatgtgatatgcttcttttgatcaacttttctcccttcactgatatgctgtta

SEQ ID NO: 645169 - DNA, 615 bp, Homo sapiens
aaacacaataaaggcagatctgtaaaaataaaaaaggaagcagcttaacatttttatgtattcacgtgatatgttttattgccttatttccaacagggatcaagtttatacagtaaacttaaatgaaatgcccaaaacagaagtaatacccaacaaggtgagcaactgtagttggcaaatttatttaccttccctctgaacctgattaattttcccactgcctccccaaaaatgttcgcagttaaaaactgctttkgttttgcttgattaatacagaaactgacatggcgatcaagacaacaggatcgagaaaactgtgctatgaaaggcaagcataaagtgagtgaaacagaaaaatgtctgctagatttagtctttctgtgggcttgataccacagtgccagcatgttcaaatgtctaatattaatgtaactactactttctttaggatgaatgccacaactttatcaaagtatttgttccaagaaacgatgagatggtttttgtttgtggtaccaatgcattcaatcccatgtgtagatactacagggtaagtatattttatgtgatatgcttcttttgatcaacttttctcccttcactgatatgctgtta

SEQ ID NO: 645170 - DNA, 573 bp, Homo sapiens
actgaattcgttttgcagacaacaatgaaaaagaaaatccaaaaagaaataaattttttgaaagcatttacattgccatcagacacaagaaggtcctgtcaggcatggacaaagtctatacagtcataactcatggcctagagagcccttggaatgtacagctacagacagctacagataccccatatccttgcccctagggacatcaggaaacagggtttcatctgccagactgtggtgaccatgactgaggattacttcccttcaatcccctcagagacaaaatgaaatgaagggaaagtcatccctgactttgtttaaaacacagcatcctacacaggttttacaaacatcttattttttacgacctttttctgttatttcatttttaagaaacccaccgctcacctattcatcccctgagagmagcttatttaaagctcatgagaaagcagagaactatttcacaacattgaagcaaaataatctgactgaaccaagctttcacaggggaactggggaaagagtgaagaaccaagcaaaatagacgagtcaggagactaaagttgtaaa

SEQ ID NO: 645171 - DNA, 343 bp, Homo sapiens
aaagtgtgtggaaaacaccaaactattacaggattaattctcctggacaaagaatagttcctttcaaattgtagctgctgacaagatttcccatctctacggttcttcagggaaaaatccctaaagtatgactgccatagcagttcactttctattggtaccagtatatcttgcagagccatctcttattaagggttaacatttttctctggaaagaaattggtcataggtaacttctttagtaaagtgataatactgataaaataggaacaaaaggaaggtgaaccatctactcacaaacttatttgtgatrtcatgacccccagagggcataccttgacat

SEQ ID NO: 645172 - DNA, 533 bp, Homo sapiens
catatgagtgaagtcatgcatttggggtcttctgtgggttttggaatattttctatatttctgtgaagaatgtcattggtattttgacagggattttattaaatctgtagattgctttcgttagtatgaccattttaataataatcattatttcaattcatgaacacagggtatctctcaatttgcttgtgtcttctttaatgtctttcatcattgctttacagattttagtacacacatcttttatctcttttgttatgtttatttcaggcatcttatttttgtagctattgtaaatgaaattattttattgatttacttttcagataatttgttatcaaaatatagaaatactactggtcttttctatgttgttattgtatcatgtgactttactgaattcatttgcttattctaacaattctttgatgaaggctttagggtttactgtatataagaccatgccacctgcaaacagagamaacttattccttttcagttttgacacattttagtttttttctcttgcctta

SEQ ID NO: 645173 - DNA, 572 bp, Homo sapiens
gtcctgtcacagaaacagtctgattcaaaggcctggttggtcaaaggggccccgaatttctgcccagatcactttgacaggcttcmtgagagacaacaaaacatgtttgcttgtgtaaatccatccaaagtttgtgtaggctcttccctgtactatggcagacaaactaagcataaaaatggtattaagaacattgttctaacactttgtggtttatgaactcttgtaaatacaatgcttatgaaagcaggcaatgatataccattttatggtataatatctttgcctgctttcataagcaatgtatttactgcatacaagggctcataaaccacaaaaagaagaaagagggagagaaggatattaaactcaggtctctttttgagatcaggtgttggtaggatggtacaattgtgcaaaaaccccaaattttgatagtggcagtgtttcaaagttgggacaatgttggcgaccttacaaaaatgatttaactgaattcttgaagagaatattaatttgagttttatggtcagcactgtaaagcatccttaggaagttatttactttctttc

SEQ ID NO: 645174 - DNA, 572 bp, Homo sapiens
gtcctgtcacagaaacagtctgattcaaaggcctggttggtcaaaggggccccgaatttctgcccagatcactttgacaggcttcatgagagacaacaaaacatgtttgcttgtgtaratccatccaaagtttgtgtaggctcttccctgtactatggcagacaaactaagcataaaaatggtattaagaacattgttctaacactttgtggtttatgaactcttgtaaatacaatgcttatgaaagcaggcaatgatataccattttatggtataatatctttgcctgctttcataagcaatgtatttactgcatacaagggctcataaaccacaaaaagaagaaagagggagagaaggatattaaactcaggtctctttttgagatcaggtgttggtaggatggtacaattgtgcaaaaaccccaaattttgatagtggcagtgtttcaaagttgggacaatgttggcgaccttacaaaaatgatttaactgaattcttgaagagaatattaatttgagttttatggtcagcactgtaaagcatccttaggaagttatttactttctttc

SEQ ID NO: 645175 - DNA, 605 bp, Homo sapiens
ctgaaaaagaatcgtgagcactccggttccctttcttactacagactactagggagttagccgtgcctcacaacactggagacctgaggcttgctctcttggaaaacagaatcatttcattcctgagttggggcaccacacatagtgcaaggctgatgtctaatatatggcctaaaacacggggaaggggaagggaaagatttgcatactgaaccarggaagtctcatttcactttctaaccgcatcccacccgccccctgcccctccccctgggccttggtagctggagctctggccacagggcagaatgtgtttttctatggggaaaccaaaggaattcatttaaaaagacttgtagattttatataaagtgccaaacaaaagctaaccagatgcctgagaactccacagaaaagatagagagtcggcatgtcccatccacagtcacaaagaagtatgaacgtatgaatgggttgccaaggataccaggcatctgaaaagccttcaaacatgagtgtaaaagagatgattacaacaaacaaacaataataataatgaattcagaggacacagagacaatgcagggcagaagaaaattaaaata

SEQ ID NO: 645176 - DNA, 533 bp, Homo sapiens
ctactgagaacacaaaagaaataattacacaaacagttgtaatagtgatatttgctacttgccatgtagaactcagagtgaagtcacaaaatgaatacacatggacaaaatgaatacacatgggcaaggcaaaatttggcctagcattgtagatagttgccaatgcttttttgaaaaataagatttcacaataaaataagagttttcttgtactctttttaaaaattcattggaactgagtagcagctgcccctttttgatagggcatatggtttctggttttccaccattctcaacactcccttctgtctccctgaccgagtccaagttccagaccccatttttcatcccatttatgctgctatttttcccatagacctgcaaagtccaatgcagtagccactaaccacaaatgactatttaaatttaaattttacataattaaatgtgaaatataattaaaagttcaggtccttatttgcaccarccacattttaagtactaatagccacatgtggctagcggctaccata

SEQ ID NO: 645177 - DNA, 620 bp, Homo sapiens
tgagttatggacccactgtaggtaagggtctaacgggccttcatgcatcttcaaggtcaggctgcttcaaaacgggcatctgtctgctgcctttggtcacaatggaaactgacaaaccatgagttcatgctgagctgaaaggcccagatgagccacagaaacaagatgtaactgaacctgcaggaagggtaaaattaaaatcaccccagccctgactacctctgagacctcatttcctctggctctcaccttcattcacttggttccargcactgcagcctccttgctgttcttccatcatgccaaggacactcttgcttccaggatgttgcctttgcccttccctctgcttggaatgctctttccctagttgtttcccctccctcagttttcagttctttgttcaaatgttacttctccagggcagtcttcctggaccactctatctacattaagacccccacatatgtcctgccattccctagtccattagcctgcttttttttcctcatgatctatctacctttaatttgtgtgtctatcttccaactctaacatgggctctatgagggcagggatttgactatttgtttaaaactatatacccggctgggtgcggt

SEQ ID NO: 645178 - DNA, 603 bp, Homo sapiens
aactactatacagatatctaatactatcaattagtttagcttgtttggagaacatatattatatatgttcttttgtggctggcttcttccaacattattttggggatagtattcatttacgctattgcatatggcaatagctttttttttattattatactttaagttttagggtacatgtgcacagtgtacasgttagttacatatgtatacatgtgccatgctggtgtgctgcacctattaactcgtcatctagcattaggtatatctcctaatgctatccctcccccctcccccctgcatatggcaatagcttggtccttctcattgccatatagcatttcattgtatgaatattccactactgttttatccaccctactgctgacagctgtttcacttgtttaaagtttttagttattctacatttagttatgtgttatacctttttatttaaattaggtcttttatagctattgttagacttgctcttatatatttggggttttttaataccagtgtaagtgatattgttttctcaatttcatatcttaattgtttataactagtatgtacaaataagattcattttaaaatactggc

SEQ ID NO: 645179 - DNA, 614 bp, Homo sapiens
ttacttcacaatatttaataataatctgtgaaataaatggtgttgtggggtgtgttttacaacacacctacttcacgcatccacatgtttatgaatggctggctgatcttactcttatgctgaggctggtattgtaattatttaaaatgggctttcattggagtgaaaacaagaatataaaagggagaaactatttcctgacatggaatcaccaaattaaagccatagatttctgctccatgcatgccaaattttatatcctgatgtgtcaggttgatactgagtgattttccttatggggtcaaatctctaagggaaacttccacaattaaakaaaagaggctttcctgagtaacacccatttaaaaaagtaaagtcttccatacccttctaatttgaaacttttttatttccagtgtttgaactgaatatgtgtaattctaaattgaacactatttgtatttagtatcttttaaaataaatctgtatatacttgcagaaaatgatgtgccattacatataataaatattcatttttagtatctcacttcacttttaaagagaaaaaaatatccagttttactattaacctaatgcgaactcttctctacaga

SEQ ID NO: 645180 - DNA, 605 bp, Homo sapiens
tacacaaaaaacattgagttttagcccagaaaatagtgtcatctctgattttagctagatctaaaacagtgacccttttaaatgccccccrcccctgcctcgagtccccaagtgaagtctggccttttgtatagcaacacctctgttgaaacattgtcacatatactggggagggcaatggtcctgaagctttagaccataatcagcaaagaagttgccgtgagttccattttagaagtgagagaattgggaaagaacactttaaatatctgcttccaaacaatctagttgaagatataactaccttctctcccaaatatagtagcagagaatgatcctcgaggaatatctgtgtatttctacatgtgtctgtgtccgctaatacgttgccaactgcctcttctttgaaagggttggcttcaattctgacagtatattcttcctccattttgtattccaatgtcttttctttatgaagtggtgagtctaacatatggtagtacggcaaatattttttaaatctcattttatgttgttctgcaaaactgttttgaaattattttaaaaatccagggatattgtctttgtttaatctccttttttgt

SEQ ID NO: 645181 - DNA, 582 bp, Homo sapiens
ctataaaaccagttacttattttaggagatgcataatgaacctgtaagcactgtattcagagggaaaacagattcctactcaaactgaatctgaccttccagccctcacaagactctactttccacaactaggttaattgatttccaaacaggttgagtaggctgctgctcacagacccctccacctgaaccccaaccagttctgacttgggtactccagaccttccactcagttatctttgctgtcagcatcatctacgaagaatgactccatgactgacatgctgagttcagttattattcagagttggagtatgtcttcctccagcacatggcttccccattctaaaaggaggctacctactctgtgtttctaaacctgtgtctgtgaaatttctttttattaatgtgtactaaactattgtgttcctgttaagtaactccccattttaatacctgagtttccaaacacacacagtcttgcttcacaccaactmtccctcctcaattctcccacttcctgtaactgaaggctaattctggctcctttgggaaggacagtttgttaccttaagtatctgg

SEQ ID NO: 645182 - DNA, 366 bp, Homo sapiens
aaccaaatgattcatcacaggaacattgtccatttgctcagcttcctgcttccatcccttatccctaaacagctctagacttactttgccagagtgaagaggataggttgggaacactatgtctgatgagcattgctaaggtgaactgaggtagcagttgcaaggactgagtttcagaagcagtctatggcctaggaaaccctgagaggaggtcaaggataccgcggggcttaggaagtttaggcccactctggggagtgctgcaggtgctaatggaggttatcggtgcacagatcaaaagggagatgccatgaaaaggaaatgcacgcrgggcatctgaggacagagagcgcttctctgttcttt

SEQ ID NO: 645183 - DNA, 524 bp, Homo sapiens
ccaaccttacacaaccaccaccctgatcagtcagcacccatcaacatcacgacatgcatgacttgctgaaaggctgaaatgactgttagcattttttaccaataaagttattttttgttccttggttggtttgtcaccccacctggagagtgcagcagcaggatcatagctcatcacagccttgaactcctgggctcaagcaatcctgctrcctcagtctcccgactagctgagactgcgggcatgtgccaccatgtccagctatttttatagagacagggtcttgctgtgtttcccaggctggtctcaaactcctgggctcaagtgatcctcctgtctcagcctcccaaaaggctagatgacaagcatgagccactgcgcccagcctattttctaattaaggtatgtacattgttttgtttgttttttttttttagacataatgctattacataatacactgtatatagtgtaaatataacttttatatgcactggaaaaccagaaaatttgtgtgactcctt

SEQ ID NO: 645184 - DNA, 514 bp, Homo sapiens
tggtagcttctgggatgacagtgtttcagagaaccccagaatgggaggaggaaaacctgtgtcttccacctctgtgtgtgctggggtgcggggggaggaggcgacactgaggcaaggctgaaattcttgaaataaatatgtactaaagggtcagggtataatgagccctacagtttacccacatttagataaaattatctgcccagtcaggttgcagaaatttctgtccaccctcatattgcacacactccttttgttcacatttatagttctkattaactttacttaataggcttttctcttgtaactttctggcacttgctcctcccaaggccttttctcctgactatgattctatgacttgatttagtttgactcctggctggatcagggtctattaatgtgtctggctctgtgttaagggatacacatacagcaggtgcatgtcaagttggtgaatggtacagagaaaatgtaggaataaaaactgttcatgagttcaaagtttaaacca

SEQ ID NO: 645185 - DNA, 514 bp, Homo sapiens
tggtagcttctgggatgacagtgtttcagagaaccccagaatgggaggaggaaaacctgtgtcttccacctctgtgtgtgctggggtgcggggggaggaggcgacactgaggcaaggctgaaattcttgaaataaatatgtactaaagggtcagggtataatgagccctacagtttacccacatttagataaaattatctgcccagtcaggttgcagaaatttctgtccaccctcatattgcacacactccttttgttcacatttatagttctgattaactttacttaataggcttttctcttgtaactttctggcacttgctcctcccaaggccttttctcctgactakgattctatgacttgatttagtttgactcctggctggatcagggtctattaatgtgtctggctctgtgttaagggatacacatacagcaggtgcatgtcaagttggtgaatggtacagagaaaatgtaggaataaaaactgttcatgagttcaaagtttaaacca

SEQ ID NO: 645186 - DNA, 583 bp, Homo sapiens
cactattgctatttctgtaagcctggaattttctctagaccaagaacctcaataagtcctaatgtctcaaagaaaaatggtgtgtgacaaggtattaccacttagcacacttaaacattattaattgtaatagtccatgaataagcctgtaaaatcttaaagagaagttgatatatgtggaaagtgaaaaagacctcattaaagctgattcttttagcaactcacataacctggcacaaattagataactgctattgaaataaaggattcaaataatccaatgacacttcagaaggtgtattagcccagtcttgcattgctataaagaaatacctgaggtcaggcgtggtggctcatgcctgtaatcccaacactttggkaggctgaggtgggcagatcacgaggtcaggagtctgagaccagcctgaccaacatggtgaaaacctgtctctactgaagatacaaaaaattagccaggcatggtggtgcgtgcctgtaatcccagtcactcaggaggctgaggcaggagaatcgctggaacctgggaggtggaggttacagtgagccaagatcgtgccactgc

SEQ ID NO: 645187 - DNA, 580 bp, Homo sapiens
atatttatatcgtctttcctcatagttttcctcttctggtcttttgccttaatagttatttactatttctcattcatatttggtagaaagtgtcattatacaatgtataacaaaggtcttgagaatacaaatgtataactctttcatataattataatccaaagaaatctttaatatattcatgttaaacatcagtttatatgatatttgcaatccatgtgaaaaaaccattttacaaaaacattaaaataaagcccaagtttttgtatttgagtgattcagcttaagaagacttatataatttacgaaataaatacatatcatttgagmataatgcaacacacctttaaaaaccacttgtttgaaaagaagcaaggcatatccactgattatatacaactactgctttcaaaattttcacttttaaccagtagacttttcatcagtgttttatattgtcagggtgttttttgtttttgtttttatgatttaatgtatttaacttgtttctctattagaacagaaaaaacacatacttctttatttcttctgcattcctttccatttgttggccatgaca

SEQ ID NO: 645188 - DNA, 571 bp, Homo sapiens
aacagcatctcaaggcagaagaatttttcttagtacasaacaaaatggagactcttatgtctacttctttctacatagacacagtaacagtctgatctctctttcttttccccacaccacagaatctggattcactaccaagagactgtagcatttatcaaaaagaagataaagagaaataagagttcttgttgtctagggaatatatcatcttctttaggtaatgcttattaatgctcctcaaaatagctagagcattcaagctttgtaccgagttcacaatgagagaagtagcttctactagaaattaaatatgttacttctttcattgagtaactattgctacaagaatacgtttgctgaataaattagcacatttattgatataattgatttgcatactgtggcagcacttcatggaccaaaccctaagtcccatgaaaaattgaatagaattatttgacagttaagtatcattggaaaagcctggctctagttctcaggaagcaatctggttgattatgtgttttcggtgtgtagtcataatacaactgtatatcactagtgtaca

SEQ ID NO: 645189 - DNA, 387 bp, Homo sapiens
ttactggccccatgaaactccaaacccagaaggccagtcattcaatcctacagctccaaaatcaccctttttgaaaccctgtcccacatccaggacacaggggtgtgagggctgggctcccaaggcctcgggcagcttggcacctgtggctttgcagggtatatgccccaagggtgccctcatgggctgggctggtgatgagtgcctgtgacttttccacattgaggaaacaagttttgggggsggggtctatgaatctggggtctgcatgatggtggtctccagtgtgggagttccaaccccatattttccttctgcactgccctagtagaagtttgatataaggctctgcctttttgggatgttttgcctggacacccaggaatt

SEQ ID NO: 645190 - DNA, 365 bp, Homo sapiens
aaaaacataaaactcatttaaaaaataaacaaaagccatttcaaagataytgtcccatacaagaatgaagaaaggaagataagtaaatgtagttaaagcatgagccgtgatcatcacacactcttcattcaacggctgaatttgccttttaaaattatgcataccaactctttgtgtattaacataataaaattgtaatgcaataagaaaaaaaacatttccaaaaacaccagagaagtccagacggctgattaaaagatgctaaaatgtacagctcgctggagactggagttcctttttaggttgattttgaaggacttgtccaggcaaggagccttccaggaggaaatgcatccttgtctggg

SEQ ID NO: 645191 - DNA, 365 bp, Homo sapiens
aaaaacataaaactcatttaaaaaataaacaaaagccatttcaaagatactgtcccatacaagaatgaagaaaggaagataagtaaatgtagttaaagcatgagccgtgatcatcacacactcttcattcaacggctgaatttgccttttaaaattatgcataccaactctttgtgtattaacataataaaattgtaatgcaataagaaaaaaaacatttccaaaaacaccagagaagtccagayggctgattaaaagatgctaaaatgtacagctcgctggagactggagttcctttttaggttgattttgaaggacttgtccaggcaaggagccttccaggaggaaatgcatccttgtctggg

SEQ ID NO: 645192 - DNA, 424 bp, Homo sapiens
ggccaggtgctgtggctcacaccgaggcaggtggatcacttgaggtcaggagttcaaggccagcctggccaaaatggtgaagccccctctctactaaaaatacaaaaattagctgggcatggtggcagacacctgtaatctcaggtacttggaatgctgagtcaggagaatctcttgaacccaggagacagttctgtagtgagctgagatcatgcctctgcactccagcctgggcaacagactgagactctgtctccaaaaaataaaaataaataaattaaactaaattaaattaaattaaaaaacaagaattatgtcaaagtttttggtgtgagcaactagacagcttgtgttgccattcactgagatggggaagcctatgtgaggaggargttgaaggtttaaagaggaagatctagaattc

SEQ ID NO: 645193 - DNA, 554 bp, Homo sapiens
ttagatgaacctggccctgcacctgcccttgcccttgccctggcactggccttggacatgtccgtggtcctaaccctggccctgccctggagctgccactgtcttggccctgccctggctctggccctgccctggccctggccctgcccyggccccagccatagacctgccctggttggtcatgccctaccttaaccctgtgctaccctgggcctgctccaccctgccctggccctgccctccctttggccctgccatgaccctgccttggccctcacactggccctagcacagacctggtcctatctgtggccttagcctggcattgacccctgctcctgaccctggccctgccatggcccttgccctgccaatgaccctgacagccctggccctggccctgtcttggccctggccctgaactggccctgccctgaccctggccctgaagtggatttgcaggtgtcttgtccatgatttaacctggtcttatcatggccctgtccctcccctggctctgtcctggtcttgtgctgaccctgacccagaccttg

SEQ ID NO: 645194 - DNA, 554 bp, Homo sapiens
ttagatgaacctggccctgcacctgcccttgcccttgccctggcactggccttggacatgtccgtggtcctaaccctggccctgccctggagctgccactgtcttggccctgccctggctctggccctgccctggccctggccctgccccggccccagccatagacctgccctggttggtcatgycctaccttaaccctgtgctaccctgggcctgctccaccctgccctggccctgccctccctttggccctgccatgaccctgccttggccctcacactggccctagcacagacctggtcctatctgtggccttagcctggcattgacccctgctcctgaccctggccctgccatggcccttgccctgccaatgaccctgacagccctggccctggccctgtcttggccctggccctgaactggccctgccctgaccctggccctgaagtggatttgcaggtgtcttgtccatgatttaacctggtcttatcatggccctgtccctcccctggctctgtcctggtcttgtgctgaccctgacccagaccttg

SEQ ID NO: 645195 - DNA, 633 bp, Homo sapiens
ttggtacaaaaaacacaacctgtgaagaaataggaaaattctaattttcttatttctaattatcttatagttagataagtaggaaacttatctaagtataccaacaggtatatgggaaagtactgaaatcactaaccatcaggtaaatgaaaatcaaaaccgcagtaaaatattatctcacacctgtcaggctggcaactatagaacaaagcaagtgttggtgaggttgtaaagaagttggtacctttgcacactgttggtggaaatgtaaaatggtgctgccgctctggaaagacatataatttttttcaaaaacttaaataactcccatatgatccaacaatcccatttctgggtattaatcccaaaacagtaaaatcaggatccccaagagatattagcactcctatgttcatttaatcactattcatggtagccaaaatatgaaaatgtggtatatgccaacctaatacataaataaataatgcttttgctttttttcttccaataatgaagaaaggcctttttaaggctttagaaagaaggaaattctgcaatatactgcaacataaatgaaccttgaggccatgatgcataygataaaaaccagtcacagaaagacaaatattgcgt

SEQ ID NO: 645196 - DNA, 613 bp, Homo sapiens
cccctaacagggtcaccaaattgtctaaataacatacatgcatatatatatatatatatatatatatatatatatayacacacacacacacacacacacacacacacacacacacacacaggcacacatggaatatatatatgcatttttaagttacttgaaaatatatttaaatacataaataatttgtgtattacacacaaatatgttatttgaaaatacatttaattatataaataattgtatatttaaatacatttaaatatataaataattgtatatataaatatttgtatattacatataaaggtatgtttttaaaaacataatatatgcaaagggagagataagtgaaggagatagaggaatatactaatggagaaaggaaaaggagatgctgcttactagcttctagcttttgttttccagcaatccaaagaataatatctcactagagattttatatgtgcttcagaaagatgtatagaaagagaagagttcctagtgtatggggtacgagaggtatcatggaatggaagggataacatgataattaagagaagcacagatgtccttagggaatagaagattttctggtcctgaaggagaggag

SEQ ID NO: 645197 - DNA, 619 bp, Homo sapiens
gatttaaagcttaatgctgttttcttggttgggttttggactcacttgaaaccacttacacctttttcttgcctagttatttcttttgaactgagaaagtctattctgcacctgtttcaccattatattttgaagacaaatcacttgttttgatttcacaggctcacagctggaaacatttgcctccagataaatcataccttgagtctcatccatatctgcttctgatgtgactctggacttagaactttagagtcaatgctggaatgggtaaaaattttgaggctattgagacagaagtattgtattttgtatgtgagaagaacatgagttttggagggttgtagatgagatgctatggtttcaatgtcccctctaaaactcatttgaaaacttaattgccattttaacagtattaagaggtgggacyttcaagaggtaattacatcaggagacctctacctgcatgaatggatgaatgtcattatccttggagaaggttagttatcacaggagtggactcctgaaaaaagaataaatttggccccatctctctctctgctttgtacgctcacttccactttccttcatgggattatcctcactagaggtttacacc

SEQ ID NO: 645198 - DNA, 628 bp, Homo sapiens
ccaaaattatctcctttgactccatgtctcacatccaggtcacagtgatgcaagaggtgggctcccattgccttagggagctctgcccttgtggctttgcagggtacagctcccttatggctgctttcatgggctggcattgggtgtctgaggcttttttaggtgcacagtgcaagcttttggtggatctacaattctggtatctggaggaccatggccgtcttctcacagatccattaggcagcaccccagtgaggactctcagtgggggctcccaccgcacattttccttccacactgccctagcagaagttctccatgagggctctgcccctgcagctcagctctgcctggacatccaggcttatctatacatcckctgaaatgtagaagagattcccaaacctcaattcttgacttctatgcacctgcagacccaacacacatggaagctgccaaggcatggggcttgcacccccccctctgaatccatggcctgaactgtaccttggtcccttttaatcatggctggtgtggctgacacacagggcaccaaatccccaggctgcacacagcagggtcgggggtgggggggccaggttgcggggctgggaccggcacacaaaac

SEQ ID NO: 645199 - DNA, 628 bp, Homo sapiens
ccaaaattatctcctttgactccatgtctcacatccaggtcacagtgatgcaagaggtgggctcccattgccttagggagctctgcccttgtggctttgcagggtacagctcccttatggctgctttcatgggctggcattgggtgtctgaggcttttttaggtgcacagtgcaagcttttggtggatctacaattctggtatctggaggaccatggccgtcttctcacagatccattaggcagcaccccagtgaggactctcagtgggggctcccaccgcacattttccttccacactgccctagcagaagttctccatgagggctctgcccctgcagctcagctctgcctggacatccaggcttatctatacatccgctgaaatgtagaagagattcccaaacctcaattcttgacttctatgcacctgcagacccaacacacatggaagctgccaaggcatggggcttgcacccccccctctgaatccatggcctgaactgtaccttggtcccttttaatcatggctggtgtggctgacacacagggcaccaaawccccaggctgcacacagcagggtcgggggtgggggggccaggttgcggggctgggaccggcacacaaaac

SEQ ID NO: 645200 - DNA, 628 bp, Homo sapiens
ccaaaattatctcctttgactccatgtctcacatccaggtcacagtgatgcaagaggtgggctcccattgccttagggagctctgcccttgtggctttgcagggtacagctcccttatggctgctttcatgggctggcattgggtgtctgaggcttttttaggtgcacagtgcaagcttttggtggatctacaattctggtatctggaggaccatggccgtcttctcacagatccattaggcagcaccccagtgaggactctcagtgggggctcccaccgcacattttccttccacactgccctagcagaagttctccatgagggctctgcccctgcagctcagctctgcctggacatccaggcttatctatacatccgctgaaatgtagaagagattcccaaacctcaattcttgacttctatgcacctgcagacccaacacacatggaagctgccaaggcatggggcttgcacccccccctctgaatccatggcctgaactgtaccttggtcccttttaatcatggctggtgtggctgacacacagggcaccaaatccycaggctgcacacagcagggtcgggggtgggggggccaggttgcggggctgggaccggcacacaaaac

SEQ ID NO: 645201 - DNA, 586 bp, Homo sapiens
attaaatatgtagtaaaacaaacagtagtttcaaattagaattagaattaaaagcaagtatgttatactattttctcccttccatcttccattcccctcatggatctcttgctcactctctaaattgctcagacttctatttggagaccattattctagttatgtaagaccacatgcttttcagtggtcagattcctaactatttatcactgctcaaatatatctgcctgaactcawccttaatccactttacatagaatttttcctgccttcatttttgcttcctcagggcttcatcatagcatttgttacatttttccttaatagacaagagcacttgtccattaagcactatagtttcaacatttttaagggccaacataaaaatttgagaccttaaaaaataactattggcttgaacaataaaataataactgtagtgttgaaaataatacaatgtaacgttataacaatcagccaactacaacctaattcttccattgtcataggctggctcagtggcttatgcctgtaatcccagcactttgggaggcagaggtgggtgggtcacttgaggtcaggagtt

SEQ ID NO: 645202 - DNA, 635 bp, Homo sapiens
cattattttttaagaaaaataacattaaaaactatgatgaaaaccaggggaacatgaagcaggaacgtataactgctttcaaaggattgttatcatcatcttttccaggcaagcaactgctaaaggaatgtgtcatcactagcctagcctataagagatctttaagggattcctaaacacagaaaggaaaaagcaataccagctgggtgctgtggctcatgcctataatcccagcactttgggaggccaacgtgagtggatagattgagaccagaggtttgagaccagctcgggcagcatggcaaaaccctatctctaaaaaaaaaaaaaaaaaaaaaaaaaaattagctgcgcatggtggtgtgcacctgtaatcccagctacctgggctacctgggaggctaatgtgggaagatccattgtgcctgaaaagtcaaggctgcaataacctatgatcatgccactgcactccatcctgggtgtcagaacgggaccctatctcaaaagagaaaaaaaagagtggtaccttataccacaaaaccacacttcaatacatagcccacaggacctataaagcaaccatagaatagaaactacaaagmaaccagctaatgacttcacaataagattaaaag

SEQ ID NO: 645203 - DNA, 461 bp, Homo sapiens
tggcctgtaggcataactttgtgttctgaaggaaatcaaaatatttcaccctaaaatatacttctttgatgtattttgagatggctgttgagagggcccacaaacagaactagccctgcaaagctgtctattgtgagggagatttgtatttgtagagaaaatctgcrttgatgcagccaggctttttctgagactctcgcttgtccagatctaggaaagagtaagaatctgatgccttgaaaggtctgaaagaaacattttccatctcttctctgagggctgctacctgtaaggtttcatctacataacaagaccacctttgctagccaagcctcctcttctttccctcccataacgtgtcttgtcaccataacttgatttaccaccatactctcttttttggtcattgactgaacccccattctttcaagatgatgtagaagtgttaaccacctggtcat

SEQ ID NO: 645204 - DNA, 639 bp, Homo sapiens
agacaaaccatatcagatgccttccttcagctgtcctattagctttcagtttagtagaggaagccagacatacagacaaaaagactcacagcataaaagatgctatgagcatacatcaagacacatgcaattacgatcaaatgtatcagaggtaaagaagagggaaagtttcacagaggaatatactcagaatatatgatcaggcaattgtcctgagcaaattaaattaatcaaatcaattattaatgtaattaaatttttctaattaatttacttctactatatgaagaaacagattccatgggaacttagggccaagcttaattttcctcatcatatcttgtttttatttaaattatagttagcagaattctgaactagtggagtttccatgctggttccaattgttctcccaatgggtgttttgacactccataaatatatttgcataattggctrtgttagttctggtgtgattttgacatgtcttgtgattctcaaggtctcagagaagcttgtgacaaccctgaatcaacattttgtcctcagttattacctaatcatgcacattatcacatagaggggtttgcagggatgatagatgagagtgtctatattttgagtgactgcttaggaaag

SEQ ID NO: 645205 - DNA, 604 bp, Homo sapiens
caaataaataattcaaactcattcaatccatttagcttaaaacagctaagtcccaattgggtagtttccaaatctcaaaccataagtctctattggatgtccctttgaagcagatggtggaaggaatwttctagccagagagtctgagctccactttagttacagaaaccatcttagctcagaggtgcaaaagggatatttgtctggagcatcctgctccaagaacaaagtgggcaggaccaactttctttcattcaccatgaccgctgggttagtttcacttcatagcataattaagtatatcagacactttttaaaatgtcccaaagatctctgaggctctatttatttttcctatttttttttatttttttcagattggatattttgttttaaactgtcttcaaatttcctgacttttaccatttcccatctgctgttaaaccccttaaattgttattttaattttctgttctgcaattccattttgaatttcatttgtttcattgttatgctgaaatccctgacctatatgataaaattatattacatttaatttgatatttattaattttttaaatacataaataatagttgctttaaa

SEQ ID NO: 645206 - DNA, 604 bp, Homo sapiens
caaataaataattcaaactcattcaatccatttagcttaaaacagctaagtcccaattgggtagtttccaaatctcaaaccataagtctctattggatgtccctttgaagcagatggtggaaggaattttctagccagagagtctgagctccactttagttacagaaaccatcttagctcagaggtgcaaaagggatatttgtctggagcatcctgctccaagaacaaagtgggcaggaccaactttctttcattcaccatgaccgctgggttagtttcacttcatagcataattaagtatatcagacactttttaaaatgtcccaaagatctctgaggctctatttatttttcctatttttttttatttttttcagattggatattttgttttaaackgtcttcaaatttcctgacttttaccatttcccatctgctgttaaaccccttaaattgttattttaattttctgttctgcaattccattttgaatttcatttgtttcattgttatgctgaaatccctgacctatatgataaaattatattacatttaatttgatatttattaattttttaaatacataaataatagttgctttaaa

SEQ ID NO: 645207 - DNA, 603 bp, Homo sapiens
aggcaaatagagattttcttttattgaaatgctgccatcattttctgctctaagtgtagatgttgcacgagtgacatctgtggtatatccttcttccagatagaagtataaatttataatttagtggggagaggaattttcttttaatcaccaaactaccagctgtatagaaaatttttttgaaatcaccaaactagcagttgtgtatcttagctcctaaagccacattcacaagaatcataagcatctcatttagaaaatctaatgtccaccggacccaacatcatctttccacatgttggagtttagaacatgcagtattggacaccaaaagaacagaaataacttgaaattatacaattaccaaataacctccatctctttgataaaaatgactttttacccaaagtgagatgtgaacaagttctcctctttaacccaggcagattttcagcttagctcaaagcaaactataattaaataaaacaataaaaattttaactcaatgaatatcctaggagttaatctgctgtggtaatcratagtgacataaaaacaagatgcatagagctgaaaaaggcatctgtccacctgagtgaattc

SEQ ID NO: 645208 - DNA, 483 bp, Homo sapiens
ttcctctagaaggactttagagactagcagaggacatagcagttaattaaataatgcatccaagagtacacatttttatctttaaaaattgccacaaaggagagccacactggtgcaatgaacctaagttgaggggatttggctgagtcagggaaatctggaaaggctggtctgagcaagtgagttccaagcggacatccgaagaatcrgcaggagcttgctggtgacatgtgatgaccgagcattgtaagcagaatgagcagcctgtgcgaaacccctgtgggaaaagcagctccacacacaccaggttctgaaaacaggctggtggagagtgtgaaagtcagctcgcaggagagggcatccgaggagcagccatggggtggctggccaaaacagggaagacagtgaaggaataagacaaatcgtgggctttgtgattccacaaaccatgagcaagatcagaggcaggtccccaacactgtg

SEQ ID NO: 645209 - DNA, 594 bp, Homo sapiens
ttggctgggcgtcccctctgtataatttgtagattttgtcagagacctgtctctgggtagacccacctttttgaagataggctacaaccacacaatatttttggggtaaacagttggaaactgtttgttattggattcttctrtgacacttagcattttgttggctattagttaaaacctgatcctgtgtgtttggatgactcatttattgtatttatttgatacatactaacacacacacacacacacacacacacacacagagcaatttacctaaacctttacaattagcctctttgataatttacaaatttaggagaaaataaagtgatcggatttctcctaagccttaaaatctctaagggcatttaacattcttcagtgatgtacaggtagaccacctggatgtactgtcagagcatagaaggtggctcctaccatctgtagaatgggaaccatgattgctgtttctctcaaaaggtttgtgcaaaacccacaaggttcacttaatacccactgggaggagaacccagttttctgtccaaacattttagcatttttctctttcttttcctctccccctttaaaaatgtt

SEQ ID NO: 645210 - DNA, 533 bp, Homo sapiens
gatttttctttcttcacaagaacaggtttcaggaattaaccacttttagtctctctttgcatctaattaattcagtcttctcctctgggaaatatatttactcttattattgaacatcttatatttacactaggagttggggggtcactacattaagaagacagtgtgtgcccatctttttctcctttgtgttccctctcctgccagcagtcatgaacttgaaaaaggtctatgtctaatcttctatgtcattagctataatatctctgtagactcagttctttccaccaatggtcatgcagttctaaatgtaaggagttctaaatgtggcccccactttgatcattgagctaagctgcattctccaatttaactttattagagggccttattctttcagagtagtgaactattaggaaactgcctggccagttagtaatactaacacatgaatcctcaattcatatccagscaggcccagttgcttgggtctactcttcattggttataaacccaagcaaggcataaataat

SEQ ID NO: 645211 - DNA, 596 bp, Homo sapiens
ccatcatgtctcctgtacagcctgcagaaccatgagccagttaaacctcctttgtttgtaaattacccagtctcaaggatttcttttagcagtgagagactgccctgatacaacccagctaaaggtttatcaattatattgatttttccatgtaactggataagatttcactagtttttttctattgttttcctttttataatttcactgatttctgctctagtttttattatttatttccttcttcttgatttaaatttcatgtgctcttcttttgccagttttctaatgtaaaaactttggctattgcctttgcattctcttagcatttctttcccacaaattttgacgaattttattataatttttagttcaaattttaaaaaaatttatcttgagacttcttttacccatagtttgaatgagtgttgtttaatttcgaaatatttagggatttctcaggcatgtttccactactgatttctagtttaattctacygataacatcctttgtatgactcatatatattttttaatttgtgaatgtatgttttattgctcagaatatggtttaccttgctgaatatttcatgcaa

SEQ ID NO: 645212 - DNA, 523 bp, Homo sapiens
attataatcacatacttcgactcaatcacatactcataaacatgggcaggaaaacatatacatgctcaaatatatatgtattcacatgatcacatacacaataacatgtacatacacaatcacacacacatgtacratcacaagtacatacaaaatcacacagctatgtgaaatcatttacttatacaaagtcacatacacaatcatatacaatacacattacatcctcttaaaaatcctataagtttgggtcccattattatcatgttcatttttcaaatgaggaaatgaggtacaaaagttgtatgaaattattctgcttgtaagtgatacagcctatatttgaaatgtgaggagtctgactctagagtccatgttcttaatcaaaatgttatacgttttggcaccgaaacattttctttggtttttaatactagtaactgttttcactgtccactactctgtgtttagcctgtaataattcattgtctgcattatctttttaaccatgttgttttgttcc

SEQ ID NO: 645213 - DNA, 523 bp, Homo sapiens
attataatcacatacttcgactcaatcacatactcataaacatgggcaggaaaacatatacatgctcaaatatatatgtattcacatgatcacatacacaataacatgtacatacacaatcacacacacatgtacaatcacaagtacatacaaaatcacacagctatgtgaaatcatttacttatacaaagtcacatacacaatcatatacaatacacattacatcctcttaaaaatcctataagtttgggtcccattattatcatgttcatttttcaaatgaggaaatgaggtacaaaagttgtatgaaattattctgcttgtaagtgatacagcctatatttgamatgtgaggagtctgactctagagtccatgttcttaatcaaaatgttatacgttttggcaccgaaacattttctttggtttttaatactagtaactgttttcactgtccactactctgtgtttagcctgtaataattcattgtctgcattatctttttaaccatgttgttttgttcc

SEQ ID NO: 645214 - DNA, 564 bp, Homo sapiens
aaataacaagaaatcagtctttgacataatagtgtttgagatctctgagatttagctctgaccacattttatgagcactaaggcagaaaatcatagttgtgtttaactgagatgaaaaatgaacactcttttctaacctttttctatctaaaagatagatctcttgattaaaacagctaaacttcaacaacctgaatataaccatgatatttaaagatttcatggcaaatcaaacttaataacccacatattawttgatatattctctctttattccaaaaccattattattgcttgtcctctttctacttaacagttccaaagagagtcctttactttttttttactgatgtctcattgtatacaaatattctaaagaaaatcctctagttacccctttatttaacttttttcctctgccttatttcaaacaagagttcaagtaacttgcaaatatatgtaaaatgtgacaaaatagtccagaaaaagaagactaagaagagacaaagtggagccaagaataatagaacttaaagtgcaaaccatgatcaccctcatgtcatt

SEQ ID NO: 645215 - DNA, 569 bp, Homo sapiens
tctgaaattatattagtaaataaaagaacaaaccacataggatatragaacttaaaaaaaaaacagtaatccctggatatcagcaaaattttactaagaaagagttataccaaactacatttatttatcatttgatgaccaagatggcagcttgctctttgttcccagaaatagtcaagtggaagatagaagatgaatcgtttgttagggatacagaagaaattctgcctgcagggagaagttcaactggtttctaggtttcttttaattttcacatcttgagtttataattctaacattttgtacatagcagatatgaactttcccccaaattaattactatcttctcatctctttaccatgttgtcctcccccctcacttatcattcatgattatcatttcattactttgaattgcatttatttgaacctgaaaaaattaaattttgttttcaaaaaagtataacaacctgaattgtttccagttttagcccaaagctaagttcctgttgctgtttttatttgaatatacaagaacagaggatttagatatgaatgaaaattaagag

SEQ ID NO: 645216 - DNA, 569 bp, Homo sapiens
tctgaaattatattagtaaataaaagaacaaaccacataggatataagaacttaaaaaaaaaacagtaatccctggatatcagcaaaattttactaagaaagagttataccaaactacatttatttatcatttgatgaccaagatggcagcttgctctttgttcccagaaatagtcaagtggaagatagaagatgaatcgtttgtyagggatacagaagaaattctgcctgcagggagaagttcaactggtttctaggtttcttttaattttcacatcttgagtttataattctaacattttgtacatagcagatatgaactttcccccaaattaattactatcttctcatctctttaccatgttgtcctcccccctcacttatcattcatgattatcatttcattactttgaattgcatttatttgaacctgaaaaaattaaattttgttttcaaaaaagtataacaacctgaattgtttccagttttagcccaaagctaagttcctgttgctgtttttatttgaatatacaagaacagaggatttagatatgaatgaaaattaagag

SEQ ID NO: 645217 - DNA, 499 bp, Homo sapiens
cctttgtaaaaccatcagatctcatgagacttattcactatcatgagaacagcacaggaaaaacccacccgcatgattcaattacctcccaccagctcccttccatgacatgtgggagctatgattcaagaagagatttgggtggggacatctccaaaccatatcagtgccattagaagaagcataaggcaaaaactcattcacatcccaggtttgtttacaagatataggcacagagactgctggaatcaaataagattttrgtcccatgttgttatagtttaatatagtgcatagctgtggaaacacaattagttaccaataaactatgtgatacttttcttaacattgaagaaaacatcttgtgcatgtttttaagcttcaccttcaagtgaacctaatattttagtgttgttacccccaatttcatgctagtctttgcatttttaagccttagtggatttaaaagttggtgaaaaaatagcatcataaaaaattg

SEQ ID NO: 645218 - DNA, 499 bp, Homo sapiens
cctttgtaaaaccatcagatctcatgagacttattcactatcatgagaacagcacaggaaaaacccacccgcatgattcaattacctcccaccagctcccttccatgacatgtgggagctatgattcaagaagagatttgggtggggacatctccaaaccatatcagtgccattagaagaagcataaggcaaaaactcattcacatcccaggtttgtttacaagatataggcacagagactgctggaatcaaataagattttggtcccatgttgttatagtttaatataktgcatagctgtggaaacacaattagttaccaataaactatgtgatacttttcttaacattgaagaaaacatcttgtgcatgtttttaagcttcaccttcaagtgaacctaatattttagtgttgttacccccaatttcatgctagtctttgcatttttaagccttagtggatttaaaagttggtgaaaaaatagcatcataaaaaattg

SEQ ID NO: 645219 - DNA, 628 bp, Homo sapiens
agacatctgtgctaatataactgaggggtagatttctagaagagaaattgctgcatttgagatatgtacctcgagtttgctagacgttgtttaggttgttttctgactagctaagattgcatatgaagtggtggaagaattggttgtcaactctccatccctgctccccacattctacttcctatcctttgcaagaatgggatacaatgatggggataactcccccagtggggtgactgaaaatcatttttgatgggctttgggaagcacaaagagaggtttttgttttcagaatgacccaccctcctaatgatgtgggctcaggctgagcactacctgagtccctgagcagagccaaaatgaagagggcctgtgagggccagaggtgtcagttggactcctccacagagcagaaccactagcccattcctgggaaactccaygggctccccaacttctgctcacaaaatgctgcaatcacttgtgttgtggttttaacttttcaaagccttttgcagccgacgtttcattccacttcagctgggagggaggccaaacagcgattgttagatgaaaagactgagatccagagaggctgtgtgatgatggcgagtggtcatgaaaatgt

SEQ ID NO: 645220 - DNA, 590 bp, Homo sapiens
aggtggggcaagagagagatgactggccacatctgactttctggcaagcccagctccagtcaatgagagagcagaatctcccacaggtgggaagaggtgttggtgctgcctctcctgcttccttctctgtcccttcccctaccttcccccaggaccaagcacctggaatagagatggactctctcccttccattttactgaatttattttataaagacggggtctgctgtgttgtccaggctggtcttgaactcctgggctcaactgatcctcccgcctcagcctcccgagtagctgggactacagaaacacaccatcatgccctgctaattaaaaacaaaaacaaaaacaaacaaacaaacaaaaaccaaagtgttttttgtttttttgtagagatgggggtctcatcatgttactcaggctggtcttgaattcctggcctcatgtgatcctcccgtctcagcctcccaaagtactgggattacaggcrtgaatcgccatgcccagctctcccttccattttaaagaggagatcataggcttggagaacccaagtgacttgggcaagactgaactggcaaagagcagag

SEQ ID NO: 645221 - DNA, 590 bp, Homo sapiens
aggtggggcaagagagagatgactggccacatctgactttctggcaagcccagctccagtcaatgagagagcagaatctcccacaggtgggaagaggtgttggtgctgcctctcctgcttccttctctgtcccttcccctaccttcccccaggaccaagcacctggaatagagatggactctctcccttccattttactgaatttattttataaagacggggtctgctgtgttgtccaggctggtcttgaactcctgggctcaactgatcctcccgcctcagcctcccgagtagctgggactacagaaacacaccatcatgccctgctaattaaaaacaaaaacaaaaacaaacaaacaaacaaaaaccaaagtgttttttgtttttttgtagagatgggggtctcatcatgttactcaggctggtcttgaattcctggcctcatgtgatcctcccgtctcagcctcccaaagtactgggattacaggcgtgaaycgccatgcccagctctcccttccattttaaagaggagatcataggcttggagaacccaagtgacttgggcaagactgaactggcaaagagcagag

SEQ ID NO: 645222 - DNA, 566 bp, Homo sapiens
gttcttaaattgtgcacgctgcacacatcctagcaggatgcaactgccaccacctcaaggcatagttccagcagctcacacaaacaccctctgggcccagagtgctgccgccagaactctagaactatcatttctatgtgatacctctgggaagtgggtacagatccctccactactgctactactgctactgtcacccttaccagaatggatcctataccatccttatctcttcatgtcactaatgttcagtttaatgtcttgggtggatggatctgatcagtggagctcagtcttcatgactgagccacaggagcattgaaaacataagaaacaggttcagctgctatgtrtctgaggcaggtactaggtattcagcactcagtctaacccccttctgtcttctaaaccttacttgcttagaaacccttacagcaacaccattctggccaggaaaatggaagcagtacgatctcttccactttctcctcctttttgtccattatgaggcctggctcttggtagggcattggttacatgtatgttggtgttatgttcacataata

SEQ ID NO: 645223 - DNA, 543 bp, Homo sapiens
ccagtgcaaaaaataatattgccagccttacagactctgataaaaattttagaatatgaaattcttgcaattacatgcatctaaaatttcacacacagcaaaatacagatgattttcactagagctgtttctataagataattcatttcagtatattcattgacaaaatatattctgaagaaaaagatttctttaccacaatagacttttaattatagaaactgtctttaattatagaaattgtatatatatatttggcaagaatttattatcataattggttctttttaaaattacatttttttaacttgctataggctaaggcagcaaagaaatatggaaaaacagtgcatatttggtgatatccatgtggctttctttcttttctttaatttcctttataaggcaatttggaataaacaaaagtgaactaataaaaattccccatatgttttaacttcaatttgcaaatccartttttgaaaaaacagaatttgtagccaacttgctctaaatcagatcactcatccttcaaagcaaccc

SEQ ID NO: 645224 - DNA, 580 bp, Homo sapiens
gcctgggctctctggctccagagctcatgctcttaactcgcacagggaaaccctgacagtcatggaggatttggaaaacaactttgatgggagtttccaacgacctcaacagcctattgagccaagaggtctcaataaaaataactgaaacttgccacatgattactggatctcagcaaccttctcaaagccccccagatattcgtggggtgtgtcagctgtgctcaccactcatcctttttttttttttaactatactttaagttctgggacacatgtgtagaacctgcaggtttgttagataggtatacacctgccatggtggtytgctgcacccatcaacccgtcatctacattacacccatcctttcatatccttccactcaggcccctttgctgatggccaatggccagtcaataatgccactttccagcccaggatacatttatacatccttttgcttatcctttatgttgtaaagagggtgtcatagctgtgtctaaataaggattaaggcataatgacatggaaacactcagtgtaggagcaataacttcacatgtctccagacctgagacc

SEQ ID NO: 645225 - DNA, 449 bp, Homo sapiens
agtgttcttgtagttgtgaaaaatcatcaggaacagcatctttgaacacttttcatgtcaaagtcatatccttcatgcgttatgatgtggaactgtgcacataaagctcgaccacatgccgaggctgacccaactgcctttttaggaaaattcaaacttgtctctaggtcctcctgcagtcatctcagtgctgaggcaagatggtctttcttccaaacaagagtccagatccattttttcaagagattaacaactttaccacttgcttaacatgacgccctctagtacaatggtaaagcacatgctawttagagccaggaagatctgtgtctgaatcctgccactgagaacctgtatgtctttcagtcatttaacctccatgagcctcactttccttatctacaaaatggaaataagtaccttccttattgggcttctgggaagactaa

SEQ ID NO: 645226 - DNA, 449 bp, Homo sapiens
agtgttcttgtagttgtgaaaaatcatcaggaacagcatctttgaacacttttcatgtcaaagtcatatccttcatgcgttatgatgtggaactgtgcacataaagctcgaccacatgccgaggctgacccaactgcctttttaggaaaattcaaacttgtctctaggtcctcctgcagtcatctcagtgctgaggcaagatggtctttcttccaaacaagagtccagatccattttttcaagagattaacaactttaccacttgcttaacatgacgccctctagtacaatggtaaagcacatgctaattagagccaggaagatctgtgtctgaatccygccactgagaacctgtatgtctttcagtcatttaacctccatgagcctcactttccttatctacaaaatggaaataagtaccttccttattgggcttctgggaagactaa

SEQ ID NO: 645227 - DNA, 449 bp, Homo sapiens
agtgttcttgtagttgtgaaaaatcatcaggaacagcatctttgaacacttttcatgtcaaagtcatatccttcatgcgttatgatgtggaactgtgcacataaagctcgaccacatgccgaggctgacccaactgcctttttaggaaaattcaaacttgtctctaggtcctcctgcagtcatctcagtgctgaggcaagatggtctttcttccaaacaagagtccagatccattttttcaagagattaacaactttaccacttgcttaacatgacgccctctagtacaatggtaaagcacatgctaattagagccaggaagatctgtgtctgaatcctgccactgagaacctgtatgtctttcagtcatttaacctccatgagcctcactttccttatctacaaaatggaaataagtacctwccttattgggcttctgggaagactaa

SEQ ID NO: 645228 - DNA, 571 bp, Homo sapiens
cttaatatccttttaatgcagatataaatctgagttcaacaaaattcaggtccaaatttccaaggcagctatgtttttgagtttgctgaattcagatattctcatttgcttatttgtaatctcccttcaaggaaatggcttacttattctgtggcagtcacctgaatgatatttagaaagcattggccatattcacagaggcagtcaaagatatcttacatatatgcctcctggtaagcattaaccccacctggtcagccgaaaatacatactattcaaattaggttttctgtctttactttttccatcttggctaatataaagattaacattaaatattgtaaaaagagaggttcttaaattttcatttctgtttatagatattttacagcttaggtataagctacatgttactcyagataatattggaagtatacactgagtatgtatatgtgtgtgtgcatatatatgtatatacatatatacacatataatgtgtatactccgccttcaatcttatcaatgtacactgaatatacataaatgtgtgtgtgcatatgtatatatacgt

SEQ ID NO: 645229 - DNA, 410 bp, Homo sapiens
gaattcccagaaactggtgaatggatatcccaggatgaaaacaggcaccaagtaggttagaaggaattgggaagagatttcttccaaaagatgaagcgatgaagttctgacarttctgaacacactgagaggatgtttaattctggcaaagagcatggagcttgtaagtgataacaggaaagtcagcacgttttaaaataatacaataattacctctaaggcaaacaaaagctgtgcaagaaaagaaagttaaacactctgcaacacggttcaactgtgtataacactgtcataaatttaataccattcacgctgcctattctctaattggcattatggtatatcaatattaggagaatgagaagggaacccattttggcagggtaggtgggtgaggcatgaaaaaaaag

SEQ ID NO: 645230 - DNA, 581 bp, Homo sapiens
aatcagtagggactaactggattgaggactctttgcagaagaaggatttccggtttaagtatgacctttaaaagtctctaccactacacaaacatcgtaggcatcacaacttagccaatgatgtgattttaaatgttctccccagctgctgcatcttagacttttaaaacttaataggttaacactacaagttgaggtagcaatattaatactattttattatgagtcgtttctgacacagaagcactttacataatcaacagtactaaatatacttaaggcagtattttggttgctatttcaatccagtttaatagtgtggtaaaattactagcacataattgcatgataagtatacgttgaataaattcactattgactaaatgccaatgttgtaaaaccattggtcatttttattcagacaatttaatatatgtccagctggcaccatgtagacatgattttaaaatcctaatggcatttatcacagttcctgctgatgagyaaaagataccaactctgattgtcttaagcggtattcacagaatcaaaggcaggcttagcaaaggagacagaactaa

SEQ ID NO: 645231 - DNA, 444 bp, Homo sapiens
ctggaagtaaagcagtgaaggagaggctgtcagctaagcttcagcagttctgggaggggggcagtgtgagaatgctatgaacagaagtcacgggtcacccagagtaggaaactataggactgctagcagaaacattaggaaactgtgccgtattggatatgcatagcccasaaattaaacccaaatcaagcccattttgtagtcagagaaacaattacctcctaggccaccttcaaggagcaaaaaagaatagataaatcaagtaactacctctgattattgatactcaccacccccccccaaaaataggggccctccctagtacgataaaaaacaaaaggcagggagcagctaaaggggcttcagaaaggagttactggtagaaacaaagagtacatttgcatagcagtgagaggtgacaacgtgctagcagcgagaggtgac

SEQ ID NO: 645232 - DNA, 444 bp, Homo sapiens
ctggaagtaaagcagtgaaggagaggctgtcagctaagcttcagcagttctgggaggggggcagtgtgagaatgctatgaacagaagtcacgggtcacccagagtaggaaactataggactgctagcagaaacattaggaaactgtgccgtattggatatgcatagcccagaaattaaacccaaatcaagcccattttgtagtcagagaaacaattacctcctaggccaccttcaaggagcaaaaaagaatagataaatcaagtaactacctctgattattgatactcaccacccccccccaaaaataggggccctccctagtacgataaaaaacaaaaggcagggagcagctaaaggggcttcaraaaggagttactggtagaaacaaagagtacatttgcatagcagtgagaggtgacaacgtgctagcagcgagaggtgac

SEQ ID NO: 645233 - DNA, 580 bp, Homo sapiens
attcagccatagaaaaaaataaaatcttgtcctttgcagctacatggaaggaactgaagattttcatatttgtttgccatttgtatgtgttcttttgagaaatgcytattcagatcttttgccgattttaaaatcagattattagattttttttctgttcagttgtttgagctccttatatactatggttatgtattagtccattctcatactgctatgaagaaatacctgagactgggtaatttataaaggaaagaagtttaattgactcacagttctgcattgcccgggaggcctcaggaaacttacaatcatggtggaaggcaaaggaaaagcaggcaccttcttcacagggcagcaggatggagtgagtgcaagcaaaggaaatgccaggtgcttagaaaaacatcagatttcatgagactcactcattttcaagagaatagcatggaggaaaccacccccatgattcaattacctccacctggtcccacccttgacatgtgcagattatggggattacaactcaaggtgagatttgtgtggggacacagagccaaaaccttattaatcccttgtc

SEQ ID NO: 645234 - DNA, 591 bp, Homo sapiens
gaagcttatttctcaactaaagcaaatgctaggaagtccaatacagcagggtttaaaactttttcttcaatttctaaaatgcaaaactatctggaaaggagaaagtattccatcttggatttataccatacgagggtagtatttttatattagattgtaaccaaaataaacttgtccgaatttagatcacagatcttattattcttgtccatcgctcaagcccttccttgccctttccagcattctccaccgagaaaccagctgttggggtggatagcggcagtccaaaaagcstagtatactgctgctgttccttcttgctgccacaaggtgtcagttttgaaaactgatcccccaacagcctgagctgagatgcggtttcattgttgactgttgaaattttttttttttttttgagacgaggtctccactctcgcccaggctggagtgcaatggctgggtcacggctcactgcagcctcaacctccgtggctcaagcaatcctccgacctcagctcccaagtagctggaactacaggcactcaccaccacgcctggctaatttttttttctttttttttttttttccag

SEQ ID NO: 645235 - DNA, 591 bp, Homo sapiens
gaagcttatttctcaactaaagcaaatgctaggaagtccaatacagcagggtttaaaactttttcttcaatttctaaaatgcaaaactatctggaaaggagaaagtattccatcttggatttataccatacgagggtagtatttttatattagattgtaaccaaaataaacttgtccgaatttagatcacagatcttattattcttgtccatcgctcaagcccttccttgccctttccagcattctccaccgagaaaccagctgttggggtggatagcggcagtccaaaaagcgtagtatactgctgctgttccttcttgctgccacaaggtgtcagttttgaaaactgatcccccaacagcctgagctgagatgyggtttcattgttgactgttgaaattttttttttttttttgagacgaggtctccactctcgcccaggctggagtgcaatggctgggtcacggctcactgcagcctcaacctccgtggctcaagcaatcctccgacctcagctcccaagtagctggaactacaggcactcaccaccacgcctggctaatttttttttctttttttttttttttccag

SEQ ID NO: 645236 - DNA, 632 bp, Homo sapiens
attattgtcatttactctttgtaaatactgttacatgtgacacctgtctttgccaataaaatccataatcctggagagcagataatgtattttcaattttctttggcctcacccacgttatttgggacaaagcccaaaaatatatgggtatttagtccttatggaggcacrgaatgatgtagaaatgagagagggagaatgccagcatgagtggttgccaggttcattggcaagcatcttggcaacgtcttacctgaagaggcagcatgacgtggtggaaagaggtggattttgaatcagacgaacttcggttttcatcccagctctgctgtgcactaactgtgtaaccttgggcaagtacttaaagtttctcaatcttgttttttcttttttttccacctgagaaatgtagttaataatacctaactcacaggtgttttgtgagtatcaaatgaatataaatcatcttgcaacatcttgacaaaattagtaattgcaaaaaaaaaaaaaacaaaaagccgatttgctctgttaaattcatagaaggcacaggaaaaaatctctcttccattggccttggcaataaatttttaaatgtgccaccaaaagcccaagcaataaaggcaaaaacg

SEQ ID NO: 645237 - DNA, 537 bp, Homo sapiens
ttataatcatggcagaaggtaaaaggggagcagatgtgtcacatgtttagagggggtgcaagagaaggggagggaggtgccagactctaacaaccagatccctgagtaactaatagagcaakaattcactaattgccatggggacagcaccaagccattcatgagggattgtatggcagatgcacctggcagcaataacttaagcataccctgagaattacactgtatagcagatgcacctgaatatgtgtttgaagtttcaagctaagaaatctgggagtggccaacccagagattaatttcatatttgtgaggaacatctgaacccccagcccatcccatggaacaagggtcatacaggggatcaagtccctttgttttgagttaaatgatgttttccaggtggagactgttagaggaaaggtgctaagtgaaaacgctatataaacttcagggtttttgcaagtggttgtggtcctcctgtccagcctgctaccactggaccacccctgtgtgcaagtttaatgctaataaaac

SEQ ID NO: 645238 - DNA, 537 bp, Homo sapiens
ttataatcatggcagaaggtaaaaggggagcagatgtgtcacatgtttagagggggtgcaagagaaggggagggaggtgccagactctaacaaccagatccctgagtaactaatagagcaataattcactaattgccatggggacagcaccaagccattcatgagggattgtatggcagatgcacctggcagcaataacttaagcataccctgagaattacactgtatagcagatgcacctgaatatgtgtttgaagtttcaagctaagaaatctgggagtggccaacccagagattaatttcatatttgtgaggaacatctgaacccccagcccatcccatggaacaagggtcatacaggggatcaagtccctttgttttgagttaaatgatgttttccaggtggagactgttagaggaaaggtgctaagtgaaaacgctatataaacttcagggtttttgcaagtggttgtggtcctcctgtccagcctgctrccactggaccacccctgtgtgcaagtttaatgctaataaaac

SEQ ID NO: 645239 - DNA, 565 bp, Homo sapiens
agattctccttctagccttcctcagctccttcagatagattcactcattctcacctctgccctttcttaatgccttcttaccrccatgacagcccttagcatgttttgtttgtacccgtctctcctgcaggcaacaagctctttcagtgcccaggtggtgttgtattcattttttaaccccagaacctagttgaatgcttggcatgcacttcagccctcaagtggtggttgactgattgtgaaacatcgccaactccgggcttcctgggagcaggcactaagtgttcttcctcgtgttatgcttagcttggctattaggtactcactgatatatttgcttaattagattgagtgatgggaaatataaaaatcaagaaatgaagcaaaatgatagaatagagcaaatgagaaagttctgtgagagaaggtgactagaagacagagtcttcacaaagacgatgacaattagaacttctcagggttgaagaattcttaccttctctaaacaccctgattttagtttgttgtcagtttatctctctccttgcaccaagtagtagttttt

SEQ ID NO: 645240 - DNA, 565 bp, Homo sapiens
agattctccttctagccttcctcagctccttcagatagattcactcattctcacctctgccctttcttaatgccttcttaccgccatgacagcccttagcatgttttgtttgtacccgtctctcctgcaggcaacaagctctttcagtgcccaggtggtgttgtattcattttttaaccccagaacctagttgaatgcttggcatgcacttcagccctcaagtggtggttgactgattgtgaaacatcgccaactccgggcttcytgggagcaggcactaagtgttcttcctcgtgttatgcttagcttggctattaggtactcactgatatatttgcttaattagattgagtgatgggaaatataaaaatcaagaaatgaagcaaaatgatagaatagagcaaatgagaaagttctgtgagagaaggtgactagaagacagagtcttcacaaagacgatgacaattagaacttctcagggttgaagaattcttaccttctctaaacaccctgattttagtttgttgtcagtttatctctctccttgcaccaagtagtagttttt

SEQ ID NO: 645241 - DNA, 510 bp, Homo sapiens
tacttaaacacctttttttcttgtcaaaagttatacattagcagccagtgccagggagaggccatatcctgatggttcacacctgttgcactaaagtgttaattgaatgcagataccagggaaaagcaacttcccaggcatgtgcattaagagacaaaatggccgagtatgagcttccagggacacacccctgtaaaagggaaagaagcctcagatgggcttgtgtgtaacttcttaaacacactgcatgtgctcacttcccaagggtaaggagggcaacgtgcatgcgggcagcccaccctaagggaagaatcacgggaaaggggccagcctataaagtcctaggatcaaggttgaacaccacactgggcctttatgtgccctcttcggtctcttccaagcatactttctctttctttccggttctaaaaccctttaaaataaacttccactcctgttctgaawcttccctcggcctgtttttctgccttatgcttctcagacgaattc

SEQ ID NO: 645242 - DNA, 532 bp, Homo sapiens
ttaagacttgttttgtggcctatgatgtggtctatcttggacaatgtttcatttgctgatgaaaataatgtatattctgcagttgttgggtagaatattctgtacatagctgttacatttgttcagagtgtaatttaagtccattgtttctctgttgagtttctgtctcaattatctttatagtgctgtcagtgaagtattgaagcccaccattattattgtgttgtctatctcatttcttagatctagcagtaattgttctataaatcttggagttccagtggtagatgcatataaatttaggattgtaatatgttctttttagattgatccttttatcattatatagtgatkttctttgtcttttttttttttttttttacttttgttgctttgaagtctgttttgtctgatacaagaatagctactcctgctcgttttttatttccatttgcctggaataaacttttccactcctacaccttgagtttatatgaatccttccatgtttggcaagtctctcaaaaacagt

SEQ ID NO: 645243 - DNA, 532 bp, Homo sapiens
ttaagacttgttttgtggcctatgatgtggtctatcttggacaatgtttcatttgctgatgaaaataatgtatattctgcagttgttgggtagaatattctgtacatagctgttacatttgttcagagtgtaatttaagtccattgtttctctgttgagtttctgtctcaattatctttatagtgctgtcagtgaagtattgaagcccaccattattattgtgttgtctatctcatttcttagatctagcagtaattgttctataaatcttggagttccagtggtagatgcatataaatttaggattgtaatatgttctttttagattgatccttttatcattatatagtgatgttctttgkcttttttttttttttttttacttttgttgctttgaagtctgttttgtctgatacaagaatagctactcctgctcgttttttatttccatttgcctggaataaacttttccactcctacaccttgagtttatatgaatccttccatgtttggcaagtctctcaaaaacagt

SEQ ID NO: 645244 - DNA, 561 bp, Homo sapiens
ctggcttttggagaagagctactgactttccctgctaagcctagcaatgaaattgtgtctctgctgaaagtaacttcccacgagtggaaagatctaggactcaaggcctcccatctggattcttttgtcctgtggggtgttcccttgatgtggtgctcttccccttctcctaaaagtaggagttcttgacagccaaattatatggataatattgctcttttaggcctagccacccagttgggctgccacactccaggctggtgctggggaatgtctgcaaaggatctggtgatatgacctgtcctcaaatctcccagcccaggatcagctctgatgagggtagcaggagagtgatgtagactctctgagattccttggttatagatagccttagcgttcttgaatactggctttctcaaatgcttgtcttaatagcagtgaactagrcatgttgacagactaagtacttcctggttagccagggtgttgcaagcaatggtgacagattacatcacacaccagttttctcctttatcggtgcagtgttattctacctagagt

SEQ ID NO: 645245 - DNA, 632 bp, Homo sapiens
gcctcacctagattctacacagttggcaaggcagatctccctcctgcattactccaataaaagcacccagctaagctctaagcagcctgagttaagaactccacctgtcccaggccataagctttccctgtggtgatagcaactgtagcaattgtaccattcagggcatgcccctttccatctgtatgcaagtccaggtgcccagttcctgtgctggtggctgcagcacacttctggctcacccctcaggttctggccaagggagtttgtccccacttgatgttatattgcagaattcaattggaagcttctatcaacctgtaacctctgcctgagctagctggctgacttccccaaggtctcctgtgacatataataaggaatggcytccctaggttggcactaaagactgggaatgcctgccaggcattttccaccgccgtttcttcttttatatttctcatcactccctaaatcagttccagatctgggtagggttaaggtcttctctgatagcctgaattttcaggttcctttgtggggatgtgtatcctggaggcagtttctcccactcccatactctggggacttagaatttttcacctgtctcatggtgaaggctgcagcctgcc

SEQ ID NO: 645246 - DNA, 589 bp, Homo sapiens
tacacactaggattccagagatgagtaatatattatcaccactctcaaggagtaactgagaatcaataatcacagatattataatggaaaaataatgaaaaggcctatgcttctccatgaaaattctgtaatagaaactatagatagagagaaagaatgtgaggctcataggatggagtgggagagagaggagggctagttaagacatctagagtcaggcttccgagccaccttcctggcaggtatgtccctttttgatccaacctggctcattctcagtytgcccaacatgttcactactgctattgtagaaaccaagacagggcacttttaaggctgatgccgaaaggtgcatgtgtttgggaagcaaagatgttcagtgtaatcctggaaaagagggcccccatctgattcaagagcaataaaatacggatcattcaaacagcaaaaacatagttgacacacttacaaagaaaggaagcaccaaagtccctctcaggcttgggactcaataattagaatcctgtcaaatcactggagtcatagatgagagagcaaaagaggtcacgaaagttccatccagaggacc

SEQ ID NO: 645247 - DNA, 569 bp, Homo sapiens
ttatgtcaggtgccatctcaggattgcatcrgaaacatgtaatgtttgtactttttttgttttcatttctaaagagaacagaaggactaacactctttccaggcagcagtgaaagaacaaggagacgcccttgctctagaggctctaaaaactaacagaggagagtcaaaactcagcctcaccgctacttggaatgcaaacaaatacaaaagttgtgaaacaatgcttctttatgccaaccatgtcatgaaaaatttacatggtgagaaaaacaataaaaaacaaatcactcttttagctgaggtgtatggggagtgagaatttaaaacctactagagtctatgaaacttagcaagtacataaagtaacctgccacttagcaggatatgagaagtaggaactgaaaatgggaaagcagggggtttttgaagactttgtaattatgccaggaagggttttgagagcctataacagaagaatgacttcaggaatggattagaaggagtctacataaaaggcattttgggaaataaaacaatgggacttaacagctaactttatgtacagag

SEQ ID NO: 645248 - DNA, 596 bp, Homo sapiens
gctttaatgtattaattttgggagaacataaacattcggtccataaaatctctgtactacctttgcaattgctctgtaaatctaaaattatttcaaaacaaaaagttaaaatgggaaatggaacaaaaatgtaatgtgataacttagtggagtcatcataatgttttcttttctcaytaatatatgataatatagtttgttaaaacctagttgttatcacttgtgttttcataaacactaaactgtccataagtgttttttatgcatggtactatagcagaaacatgactttagttgtgaaacacataagttgctaacagagaactaagaactgacatttttattaatgtattataaaatgttatatgtataccaataaatagacatcaatgaggcaatgggttgcaaaatctcattttgacagcagtccagctctccaaggtcagtgagcaataagaaaaaagtgtcaaccatttaagatagaaaataatttctgaagtttattcctgttgctttctcatctcctataaaacacacacacacacaagtaaaaatgcaaactaactaatttcagtggtttgttaataatcggtctg

SEQ ID NO: 645249 - DNA, 498 bp, Homo sapiens
tgcaggcccaccagctagggcacatctcccccacccccaagcctcctgaggacacgccaattccaacatctcccacctcccaccatacgcaatcacaggagacatcattccaactggagttcccagtccacgaagaaaagagagatcttctctaaacagggtcctgtctgtttccagcataaaccacctgagatgttcagaaggagagttctttctttcctccacagcttcggaaaatcattcttttgcacgttcagagggggaaaagttggcaacaaaacttgactttttaccagaatgaaaactttctttggggttaaggaaacattgccatctggtggcataatatagaaataactggacagagtgatgagtttctaacccacaaaagatgaagtcacasaattccaatcagaaagaactagaagggtccttaaagcttagatccaatgcttttactttactgagtaacggaactattgtatagagatggcttgt

SEQ ID NO: 645250 - DNA, 370 bp, Homo sapiens
aatctacagctctttaaaaatgaaacagttcaccctgtgaatttgtttgcaggattggtgatctgtttctgatgccaggaaggtgggactcctatctcatttctgatagaaagtgagggaaagctatgtatagtgagaactggatactagattcttattccgaaggcatggaaggtttaatatgtaaggatacaatgtaaatagtccctctttttgtatttttctttggttattgktacgtaactatagtcgtttgtcacttaatgatacatggtgacaaagttctaagacatgcattaggcgattttgtcattgtggtaccatcatagagggtacttacacaaacgtagatggtgagccctactgcaca

SEQ ID NO: 645251 - DNA, 370 bp, Homo sapiens
aatctacagctctttaaaaatgaaacagttcaccctgtgaatttgtttgcaggattggtgatctgtttctgatgccaggaaggtgggactcctatctcatttctgatagaaagtgagggaaagctatgtatagtgagaactggatactagattcttattccgaaggcatggaaggtttaatatgtaaggatacaatgtaaatagtccctctttttgtatttttctttggttattgttacgtaactatagtcgtttgtcacttaatgatacatggkgacaaagttctaagacatgcattaggcgattttgtcattgtggtaccatcatagagggtacttacacaaacgtagatggtgagccctactgcaca

SEQ ID NO: 645252 - DNA, 551 bp, Homo sapiens
cactctaaaacgtagttactatagttgtctcctataagaattcagatgtaccatgggtcaaatcatttctcaaaaactataataaccacaccccaaagaaggctagatgtgacatgataagctagaaaaaactcttgttattgcagtctcttaagtctgtccaaacaacctacatttgttatctactgtagatgtgatagaagttccctacttgtctggttcgatatttgtaagtcaggggtactgaattaagaaytctttccactctttccatgagaaatgttacacagattacatagtggtagagtgtagggcagcttcctgagctttccataactcaatgttctgctcttgagagatttgaaagctgatgtaatttacattattcattagcaaattggaagccataagattggttacagagtggcatctggtgagattttcttccaataattgtttgcagagctagtccacctttctttccatataagtattaagcatagaattagagaggggctgtttatgaaacaacatacttttttcttggcttt

SEQ ID NO: 645253 - DNA, 610 bp, Homo sapiens
aatcacaccaatgtccatcaacattagacaacataaataaataattgtggtctattcaaatatagtattaggtgaaagagataaaaacacatattatatattgtcattgatgtacagttcagaagtaggccaaactaactgagataatgtttaactttgagaatgagaaaccaggtaatgagggggwtgcttctgaggtaccaccgttgattagttcttgacctggatggtagttgcagggtgtatcaacttagtgatatttcatgagcctattatttgtaatatctgctctttttgcctgtgtactatgcttcaacatttttatttaaaataatatgtcttgagcacatactctcacctccctaagctgtgagacatttctttcttgcttcctatgaaaactgtctatagtttacaaagtatatatactttcttttctttcagaagtatgttaactttagcataaataatatgtgcatatttatacaaatcataataaaacaacaaagacaacatcatcataaaaaaattaaactttccttttgaaaatgtcctccatctagtccctttttagtgatggcctcttaaaaatattgtttgtgtagcaaag

SEQ ID NO: 645254 - DNA, 610 bp, Homo sapiens
aatcacaccaatgtccatcaacattagacaacataaataaataattgtggtctattcaaatatagtattaggtgaaagagataaaaacacatattatatattgtcattgatgtacagttcagaagtaggccaaactaactgagataatgtttaactttgagaatgagaaaccaggtaatgagggggatgcttctgaggtaccaccgttgattagttcttgacctggatggtagttgcagggtgtatcaacttagtgatatttcatgagcctattatttgtaatatctgctctttttgcctgtgtactatgcttcaacatttttatttaaaataatatgtcttgagcacatactctcacctccctaagctgtgagacatttctttcttgcttcctatgaaaactgtctatagtttacaaagtatatatactttcttttctttcagaagtatgttaamtttagcataaataatatgtgcatatttatacaaatcataataaaacaacaaagacaacatcatcataaaaaaattaaactttccttttgaaaatgtcctccatctagtccctttttagtgatggcctcttaaaaatattgtttgtgtagcaaag

SEQ ID NO: 645255 - DNA, 633 bp, Homo sapiens
agctcttggggctgttctacggagagccattcttttattcctttactttcctagtaaactcactttcactttaaggacttgccctgaattctttcttgcatgagatccaagaaccctctcttggggcctggattgggacccctttccaataacaaaactaaaccagctattttatataataacaacttgaccaaaacaacaacttagaaaggctttggaaatgttggtttaaattatgattggatcaataatctagccttttttttcagaccagcacagacaactgagaaattgtgataaatgacttacacctttayaacagacaaaattgtgaagatacttgaaaattaattttcttacttgatagttagattcaaaacaatgaactaaattagaaaatatccagtaatgatttcaattgcaggtttagaatgtatgtgattcagaaaaaccatgatctaacaaataatgaagttttctcttgaggttttaggaaaagtccaaagtggtggaactatattatacatgttatatataatatatattatgtttttatttgttatataaaaatatttatatattataaataacatctattataaataacatttattatatataaatattcatata

SEQ ID NO: 645256 - DNA, 607 bp, Homo sapiens
tgtgtcttacaagtgcaaattcagttaatatttatcttgtgttacttatataattaaatttctatcttctatgctgtattttattttctatacattccaccctttctttcatccttcctgatgttttttcttaattgattgaaggtttttaaaatttgtatttctccgctagttttgaagttataacctctatgcttattccaccagtggttactattgaaatggtaatacacatacctatcttacaaaatatatagttaataaaatctctctgtcaacctccaaaattgcaaagacttcagcagactattttatcttcggtcactatctctcctctacacatcatggtactttttatgcttatgaattcttagaagagactttttcttcttttaagacatgagtcaaaaattggaaagttccttagttgttgatctttcctggtgggtasatatttttagtccctcatttctgttaggttttagccattcagagtactgatttgtgataggagatctcagctccagctccccacattttactaacccaataaaatttctcattttccccttgagtaatccaataaattttcttattttccctttgg

SEQ ID NO: 645257 - DNA, 604 bp, Homo sapiens
atctatggtatttgtgttacagcaacctgaactaagatagggcgagtagtgtcccacccacctgccctgatattagctggaggggaacaagaaactgagtaaagtgggagagggagtacaaaaaggcacaaggcacagtctctgcatttagggggcgtgactctcctggggaagatgatcaattacccacagccggccaaatgccaatatgtctcaagtatgtgccttccttcagtgggtagcccacccacactgaaggttcgccccatgccacagmcactactgtacattgaggatacaaagatggaccagaggaagctcccaaaaatctatgagcaatgaagaattttggaggcatatgcattctgtaaatgatttgcaaggcttatttaaatgcatcataactgctactgagccgaacgtctattcccagttcttttccttaaatgttaaagactaaagacagcacttaccatctgctatagcttgagatctgctccttcccccaaggtctcccgacatggcaggccctggctggcagtcccatatgacacagcacacaacccaccgggaacatctaacagtcagaacatctgctggcctt

SEQ ID NO: 645258 - DNA, 533 bp, Homo sapiens
gagcaaagcagtccagttaaataaaccaaagaaacaakattaaaactagataaggtcatgtgtaggattttccaaatctttcttgtcatgctgaaacttccagctcttaaaacagtaacacatatttcctttgtcctaaaaaccaatattaagtctccttccttgggcataagaatatggatagttatacttaggtgacagtaatgtgtggtaaagagtgggccttgctggcatgcggacaatgaccaaattgtattgatcatattttaatcgaatacattgctccactactgacttgcaaatacatgatgaatttgctttctaacatattccaagaaggccagagaactggcttatccatttggattaatccactggtgaatttctttcgggataggccaaaatggatctggactataatctttacatatttagatccttcaaactagaccaaaaaggaaatctgggctgcaaggctcaattagaagaacagtgtgggatgctgctttgctgactattgggggtcgctgccc

SEQ ID NO: 645259 - DNA, 533 bp, Homo sapiens
gagcaaagcagtccagttaaataaaccaaagaaacaagattaaaactagataaggtcatgtgtaggattttccaaatctttcttgtcatgctgaaacttccagctcttaaaacagtaacacatatttcctttgtcctaaaaaccaatattaagtctccttccttgggcataagaatatggatagttatacttaggtgacagtaatgtgtggtaaagagtgggccttgctggcatgcggacartgaccaaattgtattgatcatattttaatcgaatacattgctccactactgacttgcaaatacatgatgaatttgctttctaacatattccaagaaggccagagaactggcttatccatttggattaatccactggtgaatttctttcgggataggccaaaatggatctggactataatctttacatatttagatccttcaaactagaccaaaaaggaaatctgggctgcaaggctcaattagaagaacagtgtgggatgctgctttgctgactattgggggtcgctgccc

SEQ ID NO: 645260 - DNA, 473 bp, Homo sapiens
aaaataaaagtaaagaatatgaagttgcaatattttaactttacagcaaattgctttacaataaaattattacagagatagataaaasttatgttacttgtatgatatgggcataggagatgtttttgaaaaatgtaattcagataacagcctttccctgtaatttcaccctcccttctcccgtatctatggcatttgttttcaagttgtatgatgcactgagagggatattccaaaggtaaacatggacttttgtctctgattacttatttggtgagaacataaataaattgtatatatggtcttctgtgttctgcctgttaaaagcatcagagacataagagaaagttttctcatattacaactctctggcaagggatactaaaaacaaataaatatgatgtatcatgtacatgtcagaataaattctgaattgggaagaacaagaatgaactagaatgaatggaattaag

SEQ ID NO: 645261 - DNA, 553 bp, Homo sapiens
tttaagccagtgagtctatggcatttattatagtagcccgagctcactaaaagaggttccaacataagaataagcattgaggccgagcgtggtggctcatgcctgtaatcccagcaatttgggatgctaaggcaggcagatcacctgaggtcgggagttggagaccagcctgaccaacatggagaaaccctgtctttactaaatatacaaaattagccaggcgtgatggtgcatgcctataatccctgcyattcaggaggctgaggcaggagaatctcttgaaccctgggggcagaggttgcggtgagccaagacagcgccattgcactccagcctgggcaacaagcgcaaaactctatctaaataaaaaaaaaatatataccaaaaagaaagaaagcattcaaagtttctttttgttacttttataacattttttcaaaagttttgtaattatgcaatgttggaagcttttcaatgcctttactgttccaaaccaactttcagaaaaccaacttagatctgatgaatgttcgttttaacattgtctttgaaa

SEQ ID NO: 645262 - DNA, 553 bp, Homo sapiens
tttaagccagtgagtctatggcatttattatagtagcccgagctcactaaaagaggttccaacataagaataagcattgaggccgagcgtggtggctcatgcctgtaatcccagcaatttgggatgctaaggcaggcagatcacctgaggtcgggagttggagaccagcctgaccaacatggagaaaccctgtctttactaaatatacaaaattagccaggcgtgatggtgcatgcctataatccctgccattcaggaggctgaggcaggagaatctcttgaaccctgggggcagaggttgcggtgagccaagacagcgccattgcactccagcctgggcaacaagcgcaaaactctatctaaataaaaaaaaaatatataccaaaaagaaagaaagcattcaaagtttctttttgttacttttataacattttttcaaaagttttgtaattatgcaatgttggaagcttttcaatgcctttactgttccaaaccaactttcaraaaaccaacttagatctgatgaatgttcgttttaacattgtctttgaaa

SEQ ID NO: 645263 - DNA, 566 bp, Homo sapiens
caaacaaactttcgtgaagttttatttgctgggaactgatgcttgtaacctagaattaagataattcagaaagaatattatatgtacatatatgcttycaaaacataaataaaaggattgcctttcccttccaatttgcctctctttagtcatctgccaacatatctggaaatgaaacagatatagctcaatatattttttattatctgctaactcctatgctcagaaacaaaataagcaaatcaatactgcctcttcactaaatatagaatgcatgaatcaatactacccagttccagacaatgcaggctgcttagcttcatgacacggtcatgcagtcaagaaagaaacaatcctacaagagaacaagagggtttatcttgccttttattttatacacattaatctgtttaatttttgaaattttttttcaaccctctgaagagtaaatctcagtatgactactatacttgttattgacaaactgttatagctagagtctcttggtgcctgtgatagccagaataatgactcccaaagaggttcatatcctaatccctggtatc

SEQ ID NO: 645264 - DNA, 610 bp, Homo sapiens
tcaaactagggcctgaacatagggtatagaaagtaaaaacttttgagaaaaaattctgatgagttttattattgaaatgaatmacatactgtaaggtgagttcttaaaggggcagatttaactcatttttcctgtttctcttcatcttcaagttccatgtagaacaatgttacttggaaatcgttagcattcatcctaactttggtaatctagtctctcttcacagatagatagatagatagatggatagatagatagatagatagatagatagatagatagggtaattatctatagatagatagatagacagataaagtaattaaggatctacaaatagggtctaagttgctacagcataaatgagcaaatcaaacattgaccccactcattgacactcctgtcttaaagtctcaggctatcttgaacttcacatgattaaaattttcatatttcatcaaattggaatatgaggctatcttagggattgggtcctcctggtgcagtagttgtatttgttttatttttgtaagttcttatatctatgttgatgatttcaataatcctatcccttttatttattctcatattggaaaaaatctgactttaa

SEQ ID NO: 645265 - DNA, 610 bp, Homo sapiens
tcaaactagggcctgaacatagggtatagaaagtaaaaacttttgagaaaaaattctgatgagttttattattgaaatgaataacatactgtaaggtgagttcttaaaggggcagatttaactcatttttcctgtttctcttcatcttcaagttccatgtagaacaatgttacttggaaatcgttagcattcatcctaactttggtaatctagtctctcttcacagatagatagatagatagatggatagatagatagatagatrgatagatagatagatagggtaattatctatagatagatagatagacagataaagtaattaaggatctacaaatagggtctaagttgctacagcataaatgagcaaatcaaacattgaccccactcattgacactcctgtcttaaagtctcaggctatcttgaacttcacatgattaaaattttcatatttcatcaaattggaatatgaggctatcttagggattgggtcctcctggtgcagtagttgtatttgttttatttttgtaagttcttatatctatgttgatgatttcaataatcctatcccttttatttattctcatattggaaaaaatctgactttaa

SEQ ID NO: 645266 - DNA, 608 bp, Homo sapiens
tacctttctcttttgctttaataatatttgctttatatatctgtgtgctccagtgttgcrtgtgtatgtatttataattgttatatcctttgttgaattgaccccatatcattatataatgaccttccttgtctcttcttacagttttttttcttgaaatctattctgtctgatataagtatagatactcctgctctttttttgtttccattagcatggaatatctttttccatccctttgttttcaatctatgtgtatctttatagatgaagtgtgtttcttttaggcaacagattgttgggtcctgtttattcatccactcagccactctatgtcttttgattggagagtttagaccatttacattcagtgtcattattgataaatggggacatactcctgccattttgttattggtttttctggttgttttgtggtatcctcttccttcttttcttctttcctgtcttccttttagtgaaggtgattttctctactgatatgctttaatttcttgcttcctattttttgtatatctgttgcatgttgtttgagattaccacgaagcttgcaagtgctatcttataacccattattttaaactgat

SEQ ID NO: 645267 - DNA, 484 bp, Homo sapiens
tacccaatagcaacatgcattgataaatcaggtatcacaaacacttgcagacaatgaaggctcattcttgacactacacgtcaaagatggagagccaagcagtagtttttaatgagaaatgtgagaggcaattttctgtttcttagcatttaagaaaaccaraaattacagacagttgaagaactaaagctggtttcctagtataatgtattagtaggctcaggccaccgtaatgaattctcacagatggagtgatttaaacaccaaaaatttgttttctcagttctggaggctgaagcccaagatcaaggtgtgggaaggactggtttcttctaaggcctgtctccctgacttgcagatgtttctctctttcctcatgtggtctttcctctttgtgcacgcatccctgttggtccctggtgtccaaattgccttttcttatagggacaccagccatatcagattagggcctaccctaatggga

SEQ ID NO: 645268 - DNA, 598 bp, Homo sapiens
acagtttcagaaactaattgtataagtgtactgttattaccagtctcttttcccctggttgaaacaatcttccataacaacatttrcaactataatattgcgtaacaagcactgttacggtgtaatgtcttttaaataggggttagataggagagaagtgagtatccattatcttattatcataacatccgtcagtcttccagacaaaacaccatcatcccactgggagctaaggacggtttttacttaaacacaaggtcatactgtttgggtgcatgggagagcagtggaggtggggtgggggattttcatttattccaaggcactcaacgctggacttcttccaagagaggaaacaagactaaatagatcatttgttttattctgtttgggcagttcttgcatttctcccaactgtggcttatggacacaaagccaaactcagagcctagctggagctggctaaactccaggtcaaaggaataaacaatttgaagctctatttgcggattaaggcaagccacacaattgcaggacaaaatgaaatttcactgtgaatgtgaagtcacaaagaaacagccaggtagaagtgttaaat

SEQ ID NO: 645269 - DNA, 550 bp, Homo sapiens
gtagaatgatccatttcatttaaaaggggaggtgatataatagccaaaactgaaacacattaagaaatgccagagaagagaagaagaataacaataatcataacacattaatatatcacacatttcaagtatttatggcaagaaaatcataactaataaaaaaagtaaatttcctaagtaaaggaggagtaaaagaagaaagacagtattccccagatgcatgtatatatgtatatgtatatatatgcatgtatatatatctataaactgtaaggttggagatgaaatcctcttaggagtttaccttgactctggatgacagcaccttcacaagataagctgcattgactaggtgaatgayaaagtgagaataagtcatcaagctattcataattctaactcctatccccatagttcatatgctttaaaatgtaagtctgcgtatatgcccctacaaaaaatttccaccctttaccctcaaacttcaaggttatcttttgggaggtgataaatagaaccttcagttgatcctaagaaggaattcaatttg

SEQ ID NO: 645270 - DNA, 595 bp, Homo sapiens
aaaaaacaaaaacaaaacaaaacaacaacactgagacatgaaggtagcaactacaggaagtagcttgccctactctttaggactggcagaactagaaagacagatgtgtactattggaacttagaagcctcaaggggggtgcatggagctgaaacataagacgcccaaggaaaggctgttgctgggctctatgagaaaacaggattactctctggttctctgagtactgaagagctgctaaatgtctttacctgctgctgcagacagaagcatggggtgatttttggacgttgtttgtaggaccaggaaaaagacagggaaaaagcagaaaaaaacaagyccttacctacttctgcctgccttgctcttgtaagccttttgccaaaactgaatttagagccagctgtcacagcagaaaaattatctgcagagcctaaatccagcatcacaaagaaaaggagcaaagattgggtttggagctgggagataggagcttaatcaccatcacaagcagtttataaaaaattagaattgataagccttaattattattgcaaatatcatcatgaccagtggataatctggaagtgaaaga

SEQ ID NO: 645271 - DNA, 595 bp, Homo sapiens
aaaaaacaaaaacaaaacaaaacaacaacactgagacatgaaggtagcaactacaggaagtagcttgccctactctttaggactggcagaactagaaagacagatgtgtactattggaacttagaagcctcaaggggggtgcatggagctgaaacataagacgcccaaggaaaggctgttgctgggctctatgagaaaacaggattactctctggttctctgagtactgaagagctgctaaatgtctttacctgctgctgcagacagaagcatggggtgatttttggacgttgtttgtaggaccaggaaaaagacagggaaaaagcagaaaaaaacaagtcyttacctacttctgcctgccttgctcttgtaagccttttgccaaaactgaatttagagccagctgtcacagcagaaaaattatctgcagagcctaaatccagcatcacaaagaaaaggagcaaagattgggtttggagctgggagataggagcttaatcaccatcacaagcagtttataaaaaattagaattgataagccttaattattattgcaaatatcatcatgaccagtggataatctggaagtgaaaga

SEQ ID NO: 645272 - DNA, 631 bp, Homo sapiens
aataataatagtaatgataataattttttctagttttccaggggagacagtcaagggagatcaccctgttgctgtgctggaagttgatgtcttggcaattatttcctggaggacccaagtgacacatccctccaccattgctttttttcatgtgggctttgacaaacattgaacacatatttgcatgcatgggaaaatatttccatagtagttgctgtcagttcacctgactatgtaagaatcttccttaagcagcagtctgcctttatagagaaacagcattaactgagtggctcattcttcacagctcttgacagccccagggctgagccactctattttaatactgctctgtagataatgatcttcattttggcagaacctcaaaatgaccttgatgtttacaatagcagggcaaagcagtgaactggctgacwgcattaaaacagacaattaacagcaagagagaagggaactccctgttcttctaatgtacacatattttctagtaaaagtaaaactccataatctcttgcttaaataaattgtatactattttcaacttttcatctcaattttgtaaaactggagagagtattgtcaggttgttttaaacatgtaaatcatactc

SEQ ID NO: 645273 - DNA, 564 bp, Homo sapiens
attgagtgcgatgattgagtgygatgactgagtgtggctgctgcttctgtctgtgcttaaggcttgatgatcagaccacacgcatttctggatgtgcagtgctcagtgtacagcatgcccacatgatggagtagatggggaagccaggaactgtgtccggataggagagaagttacctgcagaagggacactgctttcctcccacacctcagcagctggcctgtgattctcccgtgggcctcccagaggccccacacagcctgcttgttcacccctgacactgtgggtgccagtggccatgcaggtcttcacagcctgccatatgacataggtaggctttgtatcatatgttacctcccagattcaaaaagccccaccaaagtcggcctcgtgttggtgaagatgcccccacctgctccacatcaccggagcttgaagcctctccgagccaaggggagccggcttacttcccacccctgtgcacttgtgttgtttgggtatctgaggtgcccaaagcttcctggtcaacaggccccttgcgcgcgctgtcctagtgtgctttct

SEQ ID NO: 645274 - DNA, 564 bp, Homo sapiens
attgagtgcgatgattgagtgcgatgaytgagtgtggctgctgcttctgtctgtgcttaaggcttgatgatcagaccacacgcatttctggatgtgcagtgctcagtgtacagcatgcccacatgatggagtagatggggaagccaggaactgtgtccggataggagagaagttacctgcagaagggacactgctttcctcccacacctcagcagctggcctgtgattctcccgtgggcctcccagaggccccacacagcctgcttgttcacccctgacactgtgggtgccagtggccatgcaggtcttcacagcctgccatatgacataggtaggctttgtatcatatgttacctcccagattcaaaaagccccaccaaagtcggcctcgtgttggtgaagatgcccccacctgctccacatcaccggagcttgaagcctctccgagccaaggggagccggcttacttcccacccctgtgcacttgtgttgtttgggtatctgaggtgcccaaagcttcctggtcaacaggccccttgcgcgcgctgtcctagtgtgctttct

SEQ ID NO: 645275 - DNA, 570 bp, Homo sapiens
agatggctaatctcttgtagctgaaattcatgctaaaatgataccaaaagattagccattccattgatttcttattattttggtgctagaaaaacattgtaacctttataaaatgcaaagaagagatgcagcaatgcaatttctgtgtttatctaagctgaacagatctcttattcttttttattaataccaaaccaaggctaacaccttgccagctgcctgccagttatgttctccaaggataacatracaggaaaaaaaggaagagacaattctggtgctaaagaaagcagccgcctggatgctccacttagaagaatgccacttcatcctgtctctaaaaggggtatcctaatgtccaggaaaaaatgccaagtgctgggaacctcccagggttgccaacagtggcaatgtcacctgttggaaactgagagagccagagcggagatgccaagaggtggttcacctgcaaggaaaacaaagtgaaatgggaaagcatgttcctggttaggtggggatgagtttcgcaaggcttcatgttatgtgagtgcccaggaacgcggtggtgct

SEQ ID NO: 645276 - DNA, 404 bp, Homo sapiens
ggaattccaggcccagtatctttgtgtagctgggtagccttgggcaagttactcaatcacttcattgttctcccagaaagaattttaaaatatggacttgaaagatacacatcaatagtggctgcttatatgggattgggcagaaggagtcaaaagagacttaaagtgtatctgtaagatttttatccattctttaataatgtctaaagtaaaagtgacagaatgtaacacattacatttagatgatgggcacatatgcatttgtccattgtcctctgtgcttttctgtgygctgtttgtgatgattaattttatgtgtcaattcaacgaagctaaaagatgccagatagctggtgacacattatttctgggtgtgtctgggaaggtgtttctggaagagatga

SEQ ID NO: 645277 - DNA, 541 bp, Homo sapiens
aacttcaattggtcatgatgcatattatattttctagctccttcaaaagaaggtgttagaaacatgcctataggtgtttcatggtctaaggagttcctgagtatatatgacatatgcattcaagtaggattcttcatttattgttcatttttagaatagacattgtaaagtgacagcaaactattctgaaagcatggtgagaatttataatccaagatatgagagaaggttcacatggatccacgcctcaacgtcgctcagtgtttcggccaacgatatgggtaagaaatgatkcctcattgttaatgaaatttatgtttattttttatgaatgaactttaaagatttcatatttttataagacctaaatgataacttttctctaaaccacctgtttaaaatattcccaatatttatactgtagtataggtatgtgtgttcgtgcgtatcttgttgatatatttgctggtaaaatatattgaaaatatattctccgaattggatgcctcacctgtcagtctactttaacattggatggaca

SEQ ID NO: 645278 - DNA, 636 bp, Homo sapiens
ttgttaaaatatgtatatatatcaacatacatgtttctacttaacacctggagaaagccaagttaactatatgtgaaagttcatagtatgcaaattyatatttcataggcttttgggttaaaaatatattaacttatacatttggctaaaagattaaatggccaattcccctcagaactactgttaaattccataaatttttttattcattaattaattttaaaacaagtattgatcctaaaaacataaacacattattcattattttaaaaaattacattgctgaaacgatgcaatctgcatttttatcacatcataaaagtcttttagaatttaatcttagaatatcacttccaatctcatttttcattttctaaaacctagccaacttgttttgaaaacatgacaattttaaaagaaataatatgttgttggattaccaataaaagcttaggaatggtaaagcttcattgaattaaacagtgtagacaaaaagagcttcacagattaactgttgcaagaaattatcaaatttgactcatttccataattattttagattctcccctaatgtttaaacatgtttttattttgaaatacacttcaaaatgattgtatataatatcaaggaatact

SEQ ID NO: 645279 - DNA, 636 bp, Homo sapiens
ttgttaaaatatgtatatatatcaacatacatgtttctacttaacacctggagaaagccaagttaactatatgtgaaagttcatagtatgcaaatttatatttcataggcttttgggttaaaaatatattaacttatacatttggctaaaagattaaatggccaattcccctcagaactactgttaaattccataaatttttttattcattaattaattttaaaacaagtattgatcctaaaaacataaacacattattcattattttaaaaaattacattgmtgaaacgatgcaatctgcatttttatcacatcataaaagtcttttagaatttaatcttagaatatcacttccaatctcatttttcattttctaaaacctagccaacttgttttgaaaacatgacaattttaaaagaaataatatgttgttggattaccaataaaagcttaggaatggtaaagcttcattgaattaaacagtgtagacaaaaagagcttcacagattaactgttgcaagaaattatcaaatttgactcatttccataattattttagattctcccctaatgtttaaacatgtttttattttgaaatacacttcaaaatgattgtatataatatcaaggaatact

SEQ ID NO: 645280 - DNA, 636 bp, Homo sapiens
ttgttaaaatatgtatatatatcaacatacatgtttctacttaacacctggagaaagccaagttaactatatgtgaaagttcatagtatgcaaatttatatttcataggcttttgggttaaaaatatattaacttatacatttggctaaaagattaaatggccaattcccctcagaactactgttaaattccataaatttttttattcattaattaattttaaaacaagtattgatcctaaaaacataaacacattattcattattttaaaaaattacattgctgaaacgatgcaatctgcatttttatcacatcataaaagtcttttagaatttaatcttagaatatcacttccaatstcatttttcattttctaaaacctagccaacttgttttgaaaacatgacaattttaaaagaaataatatgttgttggattaccaataaaagcttaggaatggtaaagcttcattgaattaaacagtgtagacaaaaagagcttcacagattaactgttgcaagaaattatcaaatttgactcatttccataattattttagattctcccctaatgtttaaacatgtttttattttgaaatacacttcaaaatgattgtatataatatcaaggaatact

SEQ ID NO: 645281 - DNA, 636 bp, Homo sapiens
ttgttaaaatatgtatatatatcaacatacatgtttctacttaacacctggagaaagccaagttaactatatgtgaaagttcatagtatgcaaatttatatttcataggcttttgggttaaaaatatattaacttatacatttggctaaaagattaaatggccaattcccctcagaactactgttaaattccataaatttttttattcattaattaattttaaaacaagtattgatcctaaaaacataaacacattattcattattttaaaaaattacattgctgaaacgatgcaatctgcatttttatcacatcataaaagtcttttagaatttaatcttagaatatcacttccaatctcatttttcattttctaaaacctagccaacttgttttgaaaacatgacaattttaaaagaaataatatgttgttggattaccaataaaagcttaggaatggtaamgcttcattgaattaaacagtgtagacaaaaagagcttcacagattaactgttgcaagaaattatcaaatttgactcatttccataattattttagattctcccctaatgtttaaacatgtttttattttgaaatacacttcaaaatgattgtatataatatcaaggaatact

SEQ ID NO: 645282 - DNA, 629 bp, Homo sapiens
gtttcaattgacctatttctctttgtaataaggtcaaattctaacttctttccaaatatcataattacttattgcatgtcctatattctaggaagaggcaaagatatgcaattcttattccagagaagtgaaaaagaaatagactgcgggtaaacagatttgggtaattatcatatacttctttagagattawtactgcatgtggtcatactgaagggtttaaaacattctatgataaaccaatctatttaactccctgaagcaattaatgtttcacatctgcttatctgaccacagaaattgaggaaaagcttgttatatcctgctcaacttttgtttggtaaatgctgaattaggctattgaaaaagaaaaaataagtaaaggtgttttttactaatgcttagcacttaattgttgtggaaagggctttgtcactgtagattaattacttcattaaaacacatctgaatgtgtaagaagagcagcatacttgaaattaataaaaaattgtaaattatatatttattattttgataaattggacatttcgcaaggttctaaggggccgcatagtccagattttgtttcaattattttgtcacaaaatgatggtagtttaatttggtta

SEQ ID NO: 645283 - DNA, 629 bp, Homo sapiens
gtttcaattgacctatttctctttgtaataaggtcaaattctaacttctttccaaatatcataattacttattgcatgtcctatattctaggaagaggcaaagatatgcaattcttattccagagaagtgaaaaagaaatagactgcgggtaaacagatttgggtaattatcatatacttctttagagattaatactgcatgtggtcatactgaagggtttaaaacattctatgataaaccaatctatttaactccctgaagcaattaatgtttcacatctgcttatctgaccacagaaattgaggaaaagcttgttatatcctgctcaacttttgtttggtaaatgctgaattaggctattgaaaaagaaaaaataagtaaaggtgttttttactaatgcttagcacttaattgttgtggaaagggctttgtcactgtagattaattacttcattaaaacacatctgaatgtgtaagaagagcagcatacttgarattaataaaaaattgtaaattatatatttattattttgataaattggacatttcgcaaggttctaaggggccgcatagtccagattttgtttcaattattttgtcacaaaatgatggtagtttaatttggtta

SEQ ID NO: 645284 - DNA, 629 bp, Homo sapiens
gtttcaattgacctatttctctttgtaataaggtcaaattctaacttctttccaaatatcataattacttattgcatgtcctatattctaggaagaggcaaagatatgcaattcttattccagagaagtgaaaaagaaatagactgcgggtaaacagatttgggtaattatcatatacttctttagagattaatactgcatgtggtcatactgaagggtttaaaacattctatgataaaccaatctatttaactccctgaagcaattaatgtttcacatctgcttatctgaccacagaaattgaggaaaagcttgttatatcctgctcaacttttgtttggtaaatgctgaattaggctattgaaaaagaaaaaataagtaaaggtgttttttactaatgcttagcacttaattgttgtggaaagggctttgtcactgtagattaattacttcattaaaacacatctgaatgtgtaagaagagcagcatacttgaaattaataaaaaattgtaaattatatatttattattttgataaattrgacatttcgcaaggttctaaggggccgcatagtccagattttgtttcaattattttgtcacaaaatgatggtagtttaatttggtta

SEQ ID NO: 645285 - DNA, 598 bp, Homo sapiens
gctctggctaggacttccactaccatgttgaataggagtgatgagagaaggcatcctcgtctatttctggttttcaaggggaatgcttctttgtacatctagtagaatttggtcattaattcatcagattctgggctttttcttgataggtaggctatttattactgattcaatttcagagctcattattgttctcttcaggaaatcagtttcttcctggttcagtcttgggagaatgtatgtgtccaggwatttgtccatctcttctagctttcccagtttgtgcacatagaggtgtttgtaattgtttctgataattatttttaactctggggggtcagtgataatattccctttattatttttggttgtctttatttagatcttctcttttttcttctttattattgtagctagtggcctatcttattacttaaaaaaaaaaaaaaactcttggattcaatgttaatttcaatggttttcatgtcttgatgtccttcagttaaactctgattttggtggtttcttctcttctgctagatttagtgttgatttgtttttgcttctctaattctttcagttttgacgttgagttgat

SEQ ID NO: 645286 - DNA, 623 bp, Homo sapiens
tccttaaaatgagtttaccttaccccttccaaattgaatgagtggatgggaacttttagaaattgtaagttatttttaatctttcactttacaaatactaacttattcttcattccagtcggtattctaatgttgcttattgtattagtccattttcatgctactgataaagacatacctgagactgggaaggaaaagaggcttaatggagttacagttccacatggctggggaggcctcacaatcacggcagaaggcaaggaggagtaagtcacgtcttatatggatggygtcaggcaaagagagagcttgtacagggaaagtcccagttttgaaaccatcagatcttgtgagactcattcactatcatgagaacagtgcaggaaagacgcaccccattaattcagtcacctccccctgggttcctcccatgatgtgggaattgtgggagttacaattcaaggtgagattttggtggggacacagctaaaccataagacttatgatcttaatgatgtagtttattttagataggataggcatggcagatacaacttcttagtcttcacataaaggcatttctacttaatagaatatgtagggagttctgataagtacattag

SEQ ID NO: 645287 - DNA, 466 bp, Homo sapiens
actgccaccagggattggtgagagtttctgccttacatattttatctctctgtggcactcacactaagcattctaggtggaaggcactcttctggctgccaaggaggatattttatatgttcctcaggacagcgcagacccttycttgcggcatttgacagcatatagataagtatggacatagaaagtgagtggtataggaaagaaggcatttcaggcagaggaaacattagcaaaaccagatgtcaaaaagtaaaggccttgatttttgagcacagagtttactttttctaaatgtttgtgatttgtgtgactgtaacaatgagttctgaccctggacaaggcatttatagtctctgggcttctgctcaatagattataaatccaaaagattagatcatttgattataaacttcctcagaattctaatattattattatgtaaccatgtaagttaagtaaaaat

SEQ ID NO: 645288 - DNA, 580 bp, Homo sapiens
tcccatcctcactattccacccccagaaatgctacgtattttagatgaactgttcatattgtttgtaaaagtagattggcagtactgttaacatgattattaactgcagtgttaggcaatgttaaaataacttcaaattgttttgcaaaatctctgtcataaaaatgcttaccaacaaatactgatactaaatttagatgtgggggtattagttataatcctgaagtgggagggggaacttcttaattccaatttagttctaagagaaggaagagtatttaggcccagagaaggttacgcttaaaggtctgatagtgttttctttgaaaaatatgtctcaaactagagaataaaactaattatctcatctaagttacctagagacatttatgctcatcagtttgataaaggactgcaagtagacacagaagctgtattttcagtcttgaacccagcaatagtacattaacaagattggggcaaggcaaagggactttygtggcacaagatacaatatatggattgcgttcttttggcttaacaaggtgcaccttgacgtagtcttgtcctagcctttaat

SEQ ID NO: 645289 - DNA, 585 bp, Homo sapiens
gactcaagtaatttacccctaacataaatgcatgtaaactccttttccttaaagagaatctaaatacccaaatccctctttaattatacttttacttgacggaagggataaaaaactataataggaagagctaatggacccaaaggactactataatttccaaaagaggtataaagtatccaacattttcaaatttattttctctagaaaattatatttttatggaacattttgtaagaacactgttgctcagactagattctgggagacagtgataccaacagtttgaaaacttgtcagcttacttctgtttcattgcacagtgccatttctcctgaaatcacttgaccacatacatccaacactatttttctctccgttcccattgccacaagagttcagtttctcatcatctctcrcctagcaattgctatgatctctcttaactgcttccagtctcaccctgctgcaatcttttctccatgttttgcgaatgagatcttcctagaatgcacatttgacaacttggaaccaaatttacttagctcctcatgcgaaattcctctgccactggtcactctttga

SEQ ID NO: 645290 - DNA, 594 bp, Homo sapiens
aaaaaaattcaatataacctttgatattaatatatttcaatttactgtattttcttactgaaaatcaataaatctatatgtaatttaaatttgggtatatcttcagagaaatacttaaatttttaaggcttatgacattgaaaatgcaactaagctaccaataaattaattagcaaatttcttgtctctgctgtggagtccagtgtgtaaaatatagttctcaacttgacatggcttatacattaaagagtctaccttcagggtgctttagtgttcaaaaaataaaaagaaaagaaaaatagactaatcagcaattttaccttgcaataagccttaccaacacaacayaggtccacctaccggaaggaaaataatactaaaagttgtttaggccatgtcatcttgtccattttaaaataacactagtttaataatgtacttccctattttgctgctaattgtataaaatattttttccttaatgagccaaacttcattctcattaccagtacagatcttataaaaaatcaaatgagacttttaaaaagtagttttaaccatgtgctatttagcattttactagcaatcttaaca

SEQ ID NO: 645291 - DNA, 599 bp, Homo sapiens
cttagagaggactttcctgaccaacaaaacctccccttcacaggtgctctcaccatctaaaagcatcytgggtttttgttttttgtttttctaggataccatgttgcatttacatcctgtttttttaaattattattaaattttttaatttttttagagacagagtctcagtctgtcacccaggctggagtgcagtggcgcaattacagctcgctgcagcctcaaactcccgggctcaagcaatcctcccaccttggcctcccaaagtgctgggattacaggtgtgagccaccactcccagacacatccagttgaacttttattatccatttccttactataacttgaggtccctgagggcctggttatttgtttcgatgactgcttttacgcctggcacctagaccaggatcggtaacggagcgggcactcagcaaaagtctgttgagtggtgggaaaaacagcatacactgtttaaagacccagggccggggtgcacggctctttctgtgcctgcccaccgccagccccgcctacctgttccttagtctgggctttctgcacatagtctcggccaactttgatgcgaggggtgagca

SEQ ID NO: 645292 - DNA, 599 bp, Homo sapiens
cttagagaggactttcctgaccaacaaaacctccccttcacaggtgctctcaccatctaaaagcatcctgggtttttgttttttgtttttctaggataccatgttgcatttacatcctgtttttttaaattattattaaattttttaatttttttagagacagagtctcagtctgtcacccaggctggagtgcagtggcgcaattacagctcgctgcagcctcaaactcccgggctcaagcaatcctcccaccttggcctcccaaagtgctgggattacaggtgtgagccaccactcccagacacatccwgttgaacttttattatccatttccttactataacttgaggtccctgagggcctggttatttgtttcgatgactgcttttacgcctggcacctagaccaggatcggtaacggagcgggcactcagcaaaagtctgttgagtggtgggaaaaacagcatacactgtttaaagacccagggccggggtgcacggctctttctgtgcctgcccaccgccagccccgcctacctgttccttagtctgggctttctgcacatagtctcggccaactttgatgcgaggggtgagca

SEQ ID NO: 645293 - DNA, 599 bp, Homo sapiens
cttagagaggactttcctgaccaacaaaacctccccttcacaggtgctctcaccatctaaaagcatcctgggtttttgttttttgtttttctaggataccatgttgcatttacatcctgtttttttaaattattattaaattttttaatttttttagagacagagtctcagtctgtcacccaggctggagtgcagtggcgcaattacagctcgctgcagcctcaaactcccgggctcaagcaatcctcccaccttggcctcccaaagtgctgggattacaggtgtgagccaccactcccagacacatccagttgaacttttattatccatttccttactataacttgaggtccctgagggcctggttatttgtttcgatgactgcttttacgcctggcacctagaccaggatcggtaacrgagcgggcactcagcaaaagtctgttgagtggtgggaaaaacagcatacactgtttaaagacccagggccggggtgcacggctctttctgtgcctgcccaccgccagccccgcctacctgttccttagtctgggctttctgcacatagtctcggccaactttgatgcgaggggtgagca

SEQ ID NO: 645294 - DNA, 594 bp, Homo sapiens
acctcctcacctctcatgtaacagttttaaaacctactacaataactagagattaaagaaggattcaatggatgctaaaaggtagataacaaagagtattgaaatgatttataagtgtcagagactaacatagacagatttgagatacagaaaaacaataaatatctttttttttttttgagatggagtttcactcttgttgcccaggctggagtgtaatggcacgatttcagctcaccacaacctctgcctcctgggttcaagtgattcccttgcctcagcctcctgagtagctgggattacaggcatgcaccaccacatctggctgatttttttgtatttttagtagagayggggtttctccacgttggtcaggctagccttgaactcccgacctcaggtgatccacctgcctcggcttcccaaagtgttgggattacaggcatgagccaccgcacccggcctaagaaacaataaatatcattatggaagacaaactagttactgccgtgtactatagcactttaaaaataagtccattaataataaaccctgtctctaagaaacctgcaaacttcttatagagataaaacc

SEQ ID NO: 645295 - DNA, 581 bp, Homo sapiens
gactaattttacattagcatagtggtaatcactttaagatcgtttagtaagaatgatggcccaatcaagactaggaagtattttttttaaatgagatagagaaatgaaagatatagggtttattgcaaatagtttttaactgaaatccaaatattagtaatgaactattttgaaaggaatgtattgagtaaaaccccataatttatcattcattttcttctgagtaktttccacacattttgatctctagaatatggcacctgggctagaaatctctcagggaccgtctccatcatgatttttctggaatttcctgtttgagtcaggatgaaaatatccccgatatgctctgtttttggggatttagccccgtgcttccacaacttagagaatcaagagataaaagaagctaaaacaagagaaatgtggttaaatcatgattttaatttttcagagcttcttgcttcatgtaaactaaaagtttatggattataatcctcaaacagccatacataaaaactgtatttagatactttctttgcctactaacttaacacaacttgagtcaaggtttggaagat

SEQ ID NO: 645296 - DNA, 575 bp, Homo sapiens
cttttgcttctgggaacttttctatcataagtataaccttaagctaactcccggagygacagcccatgaaaacaaggagttcagctttcccagacaccccagcagaggccagagatgtgtgactgagaacattctaagtcatccaagcccaaactaactaacccagactagagaaaccacacggtttacccacagagaaaaagtgtattaaataatcgttgttttaagccattaacttatagaatgattttctttgcagcaatattaactgataaattaattgtaatcctagttgtacactatgaattatcctaattcaccagataaagcagctggattccatgttattgcagtgacttgctcaatgtttctcagctagaaagaagaaaccactgaatttcaaaatcacagttgtttccagagaaaagtttttctcagttgtttacacatcgttgactacactctggtccttctagtgatccaaagtgtagcatagaagattcagcctttgtgacatcttcagttagtcagttgcatctggagctctcccattctactcgggggcctaccaaaca

SEQ ID NO: 645297 - DNA, 575 bp, Homo sapiens
cttttgcttctgggaacttttctatcataagtataaccttaagctaactcccggagtgacagcccatgaaaacaaggagttcagctttcccagacaccccagcagaggccagagatgtgtgactgagaacattctaagtcatccaagcccaaactaactaacccagactagagaaaccacacggtttacccacagagaaaaagtgtattaaataatcgttgttttaagccattaacttatagaatgattttctttgcagcaatattaactgataaattaattgtaatcctagttgtacactatgaattatcctaattcaccagataaagcagctggattccatgttattgcagtgacttgctcaatgtttctcagctagaaagaagaaaccactgaatttcaaaatcacagttgtttccagagaaaagtttttctcagttgtttacacatcgttractacactctggtccttctagtgatccaaagtgtagcatagaagattcagcctttgtgacatcttcagttagtcagttgcatctggagctctcccattctactcgggggcctaccaaaca

SEQ ID NO: 645298 - DNA, 555 bp, Homo sapiens
aaaaagtttccaatttaatggaaacctaaggaaacaaaagcattatttctagtactctgagamcctaggtcgatctctttctctctctctctctctctctctctgtctctgtgagactgtatatcaatctctgtctttatctctctctctctctctcatatatagttccctcttgaagcatttctctgtgtgtgtgtttctttctcatatggcaagcctgaaaatttgtcctttcagatgttttgaacttagcttatctctttaacttattcaggttaaaatatcatacatgatatgagcagtaaacattttgttagtggagctttgcttcttaagcatcacaacactgtagaatattttattctgctgtttcaatttcccatattcatgcacgcctctaacatttggtaaaggttagtggggaaaactagctgtaatttctgtgttcttctggttacaactccttaagctataccccaaactccactcttttctattttctgtattagaaacttctgacaatggcaagagagacaagttatccaccagtaacag

SEQ ID NO: 645299 - DNA, 299 bp, Homo sapiens
acctggttgattctaacatgcagctaaagttgagaaccactgcagtagggatacatgattgcttgaccttggagatatttataattaataaagtggggccttctcattgaattggaccacaacttttaaaataatagctatttacattaatttataatatacaaatatgacaaaacaacttacccttattcaataaatayttattgaaccattgagattcttgctaacaaaaaacagacatccaatggaaagatatcctcgctgttttaaccattgagtcagaaacctttggtgccagt

SEQ ID NO: 645300 - DNA, 552 bp, Homo sapiens
gaattcttccatcatggcaggagcagccatttgtccrcagtaaaatagacacttacacctaatttgcagctgcattctctatctgtattaattccgccaacactaccatccatatatttattaaatatcttattcatcatcataacgtttcactcagcattgcctttgatcagggaattttattttacaataaaatattgtgtaaatcatctctagttcatgagatttatggttctatcagcttttcctatcagggtggtacagtttgaatgtttgtgtgctcttcaaaatttatactgaaacttatacccaaagcacaccgtattaaggggtgaaacatttaagaggtgatcagctcatgaagaatccactgtcatgaataggattaatgcctcataaatgagattgggtcctgaccagacaatgatcccgccggtaccttgatctttaaatatccagcctccttaactgtgatcaataaatgtatgctgattataaattacccagtctaaggcattttgttatagctgcacaaatggactaagacacaga

SEQ ID NO: 645301 - DNA, 592 bp, Homo sapiens
ttgtttgcattctggaaggattactctaggtgtactrtgaagccaggtgggttggaaggagttaagaccagtaacatgaagagcagttagtaggctaacaatagtcctggtgagatgatgagggctgccctagtgtctgtggggataatggggagtggataaatatttaagaggtagactccccaagaactgattaactggtttggggaggaaatgggggcagtgggaatgaagactcacagctttgttcttgaaagcacacttgaatgaagttgtgaaaatgcttataagtagcactttggtacagtttgggatgaaatttggaaattattttgtgcctaactgatggctagctaaaagaacaaatgatcacagcagtggtgtccaaactttgatcttacactgcatcagtaaaaaatatttaagcacatatcctcgctttctccctatatacacatatatagtttaataaaaacatagcgtatatgtgtgtatgtataacataaacctgagaattatatattagtaaagcttaggtttttttttcatgttttaaaaaatatataaatagaaagtctagttactcctgtac

SEQ ID NO: 645302 - DNA, 592 bp, Homo sapiens
ttgtttgcattctggaaggattactctaggtgtactatgaagccaggtgggttggaaggagttaagaccagtaacatgaagagcagttagtaggctaacaatagtcctggtgagatgatgagggctgccctagtgtctgtggggataatggggagtggataaatatttaagaggtagactccccaagaactgattaactggtttggggaggaaatgggggcagtgggaatgaagactcacagctttgttcttgaaagcacacttgaatgaagttgtgaaaatgcttataagtagcactttggtacagtttgggatgaaatttggaaattattttgtgcctaactgatggctagctaaaagaacaaatgatcacagcagtggtgtccaaactttgatcttacactgcatcagtaaaaaatatttaagcacatatcctcgctttctccctatatacrcatatatagtttaataaaaacatagcgtatatgtgtgtatgtataacataaacctgagaattatatattagtaaagcttaggtttttttttcatgttttaaaaaatatataaatagaaagtctagttactcctgtac

SEQ ID NO: 645303 - DNA, 586 bp, Homo sapiens
catccacgcaaaattattgatactacctggataatagcatttacaaacataaaagggacattaaagactcaagtaaagagcaagttgtttgtctctttgccatgcacatacttagacttttaatatactgtgtttacattaaaccataagagttaacttcttctgaggaaaaattcaagctggctgcagaaatttgcataagtaatgaggagccaaatgttaatcaccaagacaatgggggaaatgtcttcagagcatgtcaggccttcacggcagccccttccatcacaggcctggtgggctagaaagaaaaaaatcgtcccagtattctgtgtagcctagggacttcaagaaggaaaatgtggagttggaactcccactgagttgcttctcagacactgcctaaaggagctgtgagaaaagggccaccatcctccagacacctgagtggtagatccaccaacaacttgcaccatgcacctggaaaagctaaagacactcaatgccagccctttaaagcagctgggrgggaggctgcaccctgcaaagccacaggtgtggagctgcccaaggccatggaaaccca

SEQ ID NO: 645304 - DNA, 609 bp, Homo sapiens
ggggtgtcgggggcagtgaggggtagtggggtaagactaggaaaccctaactttaagtgaaatataaagggttagagagctagaagctaaataaatgtagatataatatcattccaattgtaactaacttttcctcattgctcatagtcatgtaatggctccaatgactcctaactaaaagaactgaacagaaaaaaataaaataaaataaaactacyccaaataaacacaagagatttagtagaaccacaaaaaaaattagaattgaagccaagtaaagctaccttccaataacctatgttagtaattataatattataaataaagtgtctgggtgtaacattttctagcattatctcctcctactgcagtgtcatagctttgtttcatttcctccttacacacacatacatacatgcatatgcacacatatttacacaaatttgcatgaaagatcccacatatattatattacacatctcctttcaaagaaactgaatgattaggtcagtttaaaaaaattactccaatagctcctgactttctcatcttagatgtttgtaacaatcctgtcaatagtgttttctgtgctgttgctcttttctgata

SEQ ID NO: 645305 - DNA, 609 bp, Homo sapiens
ggggtgtcgggggcagtgaggggtagtggggtaagactaggaaaccctaactttaagtgaaatataaagggttagagagctagaagctaaataaatgtagatataatatcattccaattgtaactaacttttcctcattgctcatagtcatgtaatggctccaatgactcctaactaaaagaactgaacagaaaaaaataaaataaaataaaactactccaaataaacacaagagatttagtagaaccacaaaaaaaattagaattgaagccaagtaaagctaccttccaataacctatgttagtaattataatattataaataaagtgtctgggtgtaacattttctagcattatctcctcctactgcagtgtcatagctttgtttcatttcctccttacacacacatacatacatgcatatgcacacatatttacacaaatttgcatgaaagatcccacatatattatattacacatctcctttcaaagaaactgaatgattaggtcagtttaaaaaaattactccaatagctcctgastttctcatcttagatgtttgtaacaatcctgtcaatagtgttttctgtgctgttgctcttttctgata

SEQ ID NO: 645306 - DNA, 594 bp, Homo sapiens
cctttatggtttagctttgaaataaaaatgataacagttttttcccaaaacaaaccttactgcctgtggactagattgcttaaggccacagggttagaagttatgataatcttacttaattcaagatgtggctattttcattaaaccaatatcaatgtcttatttattaaaaaattacacaagcaaagatcattctgttttgkgcttggtttacagttttgtaacccttatgtcaaattttgacaccttaaagtatttggcaacaataagtatgaaattgtttgattaataaatgcaaacaaaaatatatgctggaaattcttaagacatttctaatattatcatactttagcaataattgtaaagttatcttatttataaaagattttattgaagttacataaacttgaaaaagcatttgactagtcttttttttctggcaaagtatttaattcaagcacttttattttcttaagccaattaattagagctcttttatatattttcagtaataaaacattgtgtacaaaacacataaatacatacacacattaagcatgccaatagaagtacatcttatagatttatgaaaac

SEQ ID NO: 645307 - DNA, 522 bp, Homo sapiens
tcacatagtaaacctccttgtaaaatttgtttcttcttgcttagaagccatcaaacttatgcaactggagccttggaatattggctctctttttaccagggaccyttagataggcccttagatctgactaccatttcccccaaaacaatgccccctgtcagcatgaagcagttaagagcagttgtcatccctatcgtaatggcagttagatgtacctcttcagagggagggtttgatggcagtggctgctccagatagtctgccactgccatgatgtcagctgcagaagggaggcacgaccaggcctcctgcttcctggagtaggcaggagccccacctactgggtggggctgcagacgccaaagttgtggctgcagatccaagcgtccctgtgctcttggtgggctggaagcaggcaggaaccctgctcccccgggcgcagctgccactgcccaaaccatggctgcagacctaggcctcctgctccacagagcaggcaagagcacggccactccctgggca

SEQ ID NO: 645308 - DNA, 522 bp, Homo sapiens
tcacatagtaaacctccttgtaaaatttgtttcttcttgcttagaagccatcaaacttatgcaactggagccttggaatattggctctctttttaccagggacccttagataggcccttagatctgactaccatttcccccaaaacaatgccccctgtcagcatgaagcagttaagagcagttgtcatccctatcgtaatggcagttagatgtacctcttcagagggagggtttgatggcagtggctgctccagatagtctgccactgccatgatgtcagctgcagaagggaggcacgaccaggcctcctgcttcctggagtaggcaggagccccacctactgggtggggctgcagamgccaaagttgtggctgcagatccaagcgtccctgtgctcttggtgggctggaagcaggcaggaaccctgctcccccgggcgcagctgccactgcccaaaccatggctgcagacctaggcctcctgctccacagagcaggcaagagcacggccactccctgggca

SEQ ID NO: 645309 - DNA, 522 bp, Homo sapiens
tcacatagtaaacctccttgtaaaatttgtttcttcttgcttagaagccatcaaacttatgcaactggagccttggaatattggctctctttttaccagggacccttagataggcccttagatctgactaccatttcccccaaaacaatgccccctgtcagcatgaagcagttaagagcagttgtcatccctatcgtaatggcagttagatgtacctcttcagagggagggtttgatggcagtggctgctccagatagtctgccactgccatgatgtcagctgcagaagggaggcacgaccaggcctcctgcttcctggagtaggcaggagccccacctactgggtggggctgcagacgccaaagttgtggctgcagatccaagcgtccctgtgctcttggtgggctggaagcaggcaggaaccctgctcccccgggygcagctgccactgcccaaaccatggctgcagacctaggcctcctgctccacagagcaggcaagagcacggccactccctgggca

SEQ ID NO: 645310 - DNA, 584 bp, Homo sapiens
gatgcccagcaggtgctttaagaagggtctcatgttacctggtaaattatacaaccatttttaaatgctgtgaagttttgcagttaattaagtagtatcattttataatggattatacagattaatttattttttcaaattggcacaatttggcattgtgacaataatgcacttagtgttctaaaactggtaatgcatctccttaaacacttatttccaagggcagggatagccatagacataggtggtggcttacaggctatgttaataaggagccccacggttcctgcttaactaaaaatagtacccccagtgacttgcttgtttttctcaacctaagctaaaattttactatgagtgttccttgacagattaataacacatctagttctagttgtttctgataagagattttaagcctatattttaaataacttaacaaaaatcacatagctagtggtagaactgggattcaaaccttgtcaatctggctctgtcttatattcttaacagtataggatrttgtctttagctgtgttcattaactaaagataaaagtgggagcatgttctctgcttcctatc

SEQ ID NO: 645311 - DNA, 571 bp, Homo sapiens
gctcatgctattgtttgtggcttaagaatgcctttaagcggttttccaccctgggcgggccaggtgttccttgccctcattcccataaacccacaaccttccagtgtgggtgttagggccattatgaacatgttacagtgctgcagagattttgtttatggccaattttggggccagtttatgtccagattttggggggcttgttcccgacaggaagttatgagacatgaagagagtgagatttcaactactacacatacatacccctttccagtgtgacatcgtcacaaaggctacctcattgcttgcatctggtatagctctggaacatgctttgaccaakagaatgtggcaaaaatggcagcctaacctttggaaagctttgcaactttcaagtaattgtgcagctcctaagcagctaagttggtttactacacttggaaaaatttagtcagtaaggagacagccagaccaaatggatttagacagttaattatttctggtatagcaggcagcttgaacttcatgctctcattgaaatcccagggggataatgcagaatgggcccagg

SEQ ID NO: 645312 - DNA, 558 bp, Homo sapiens
gatcacgaggtcaagagttcaaggccaccctggccaacatggtgaaatcccatctctaccaaaaatacaaaaattagtcgggtgtggtggcragtgcctgtaatcccagctactcgggaggctgagataggagaattgcttgaacccaggaggcagaggttgcagtgagctgagattgtgccactgcactccagcctgggtgacagagtgagactccatctcagaaaaaagagaaaaataaaatgccttttcatttcagggtaaatttatgacacattgatgtctacgggttattacttttattactctggtatttaactacagtcttcagacattattttcaaagaaatatacaaaaattaaaccaatttctttatactgccaataaaaaacatacattgaatttaaaagtaccgtttacgatagcatcaaactataaaatacttagggataaatttggtcatatacataaatgtgtatgacctttataccgaaaaatataaaaccgctgagaaaagttgaagaagatctaaataaatggggaaacaacttggtttt

SEQ ID NO: 645313 - DNA, 558 bp, Homo sapiens
gatcacgaggtcaagagttcaaggccaccctggccaacatggtgaaatcccatctctaccaaaaatacaaaaattagtcgggtgtggtggcaagtgcctgtaatcccagctactcgggaggctgagataggagaattgcttgaacccaggaggcagaggttgcagtgagctgagattgtgccactgcactccagcctgggtgacagagtgagactccatctcagaaaaaagagaaaaataaaatgccttttcatttcagggtaaatttatgacacattgatgtctaygggttattacttttattactctggtatttaactacagtcttcagacattattttcaaagaaatatacaaaaattaaaccaatttctttatactgccaataaaaaacatacattgaatttaaaagtaccgtttacgatagcatcaaactataaaatacttagggataaatttggtcatatacataaatgtgtatgacctttataccgaaaaatataaaaccgctgagaaaagttgaagaagatctaaataaatggggaaacaacttggtttt

SEQ ID NO: 645314 - DNA, 558 bp, Homo sapiens
gatcacgaggtcaagagttcaaggccaccctggccaacatggtgaaatcccatctctaccaaaaatacaaaaattagtcgggtgtggtggcaagtgcctgtaatcccagctactcgggaggctgagataggagaattgcttgaacccaggaggcagaggttgcagtgagctgagattgtgccactgcactccagcctgggtgacagagtgagactccatctcagaaaaaagagaaaaataaaatgccttttcatttcagggtaaatttatgacacattgatgtctacgggttattacttttattactctggtatttaactacagtcttcwgacattattttcaaagaaatatacaaaaattaaaccaatttctttatactgccaataaaaaacatacattgaatttaaaagtaccgtttacgatagcatcaaactataaaatacttagggataaatttggtcatatacataaatgtgtatgacctttataccgaaaaatataaaaccgctgagaaaagttgaagaagatctaaataaatggggaaacaacttggtttt

SEQ ID NO: 645315 - DNA, 558 bp, Homo sapiens
gatcacgaggtcaagagttcaaggccaccctggccaacatggtgaaatcccatctctaccaaaaatacaaaaattagtcgggtgtggtggcaagtgcctgtaatcccagctactcgggaggctgagataggagaattgcttgaacccaggaggcagaggttgcagtgagctgagattgtgccactgcactccagcctgggtgacagagtgagactccatctcagaaaaaagagaaaaataaaatgccttttcatttcagggtaaatttatgacacattgatgtctacgggttattacttttattactctggtatttaactacagtcttcagacattattttcaaagaaatatacaaaaattaaaccaatttctttatactgccaataaaaaacatacattgaatttaaaagtaccgtttacgatagcatcaaactataaaatacttagggataaatttggtcatatacataaatgtgtatgacctttatacygaaaaatataaaaccgctgagaaaagttgaagaagatctaaataaatggggaaacaacttggtttt

SEQ ID NO: 645316 - DNA, 564 bp, Homo sapiens
gagttccaacaccaagtcccacaatcacttcactctacctcccccaagcacacagattctctcttcataccagctggttgctctcagggaattggggagggggtggtataggcaattcaaractgtctttcctctcctctcagtgcctctttcagggatatgaaattaaaaccaggtactgtgatcactcacctgattttttattcttatgatggtgcttttctataaggatagttgtttaatttggtgtttctacaaggagaatgattggtggaggtttctatttggctatcttgctctgctctgcctcccttccaaaagttaatttttaaagtttagaagttgacataaatgttgatgttattttaaaatttattataccataagacacacttatatttacactttattgaaattagcagactatcatctctgaaaaatataatttttataagtgtgctattgttttttgccatcttcactatatatgtgcatgtatatgtgtatacacaggaaatatgtgactgtcgtgcattttccaaagatcagcattatagttgctaa

SEQ ID NO: 645317 - DNA, 596 bp, Homo sapiens
aaaatgtgtctttaggaagctggacatcaaattctatttctctttgcagtatatgcaaagcattaacaaaatgtagtttttgataacatctcttcattaatatttacaaatgtacttcgtacattttttatcatgttggacttctgacaaaaccttgtgaaccttctacagaatatactgcaaatagtagaatttatggaaatgtataaagaagaatatctccccttgcagtattctttccgcctcatgagacatttatgaaaggaagaaaagtaaccgaaaaaagtttccttactttttcacacattctctattgaaaaagggagtgatgcccttcacaacattttccttcctttttataccccaaagatttctcttctcaatggaatgccttgataaactattcagttactgagtagttttttaaagtaaattttattacctcttcytggacaagagtactagaggaaaagctttgtgttaagggcatgctgtcattttctgctataccttgctaaataagtaaacaaatccagagccttgagggatgagtcattggctcactaaccttcagacatgaagtggtgagccacagg

SEQ ID NO: 645318 - DNA, 665 bp, Homo sapiens
gaagtttatcctttgctataatgccctccattgyatcattctgcagtgttgcattaaaaaattaacacacttagttgactgcattgtgtctagaaagcttaattactgctgtcaacatgatggacaggcagacccatgagccccagatccagcttccactaagagcacctctgtccctgctgtgcataccatcccggctcctgtattctgtcttttttttggcacctgaaaaataattagcattttactagagagttcaccagaatataatttacaaggacagagcacttttttgtttaaattataaagccccttgacaaggaccttcttaaaaagtgccaaatagcattagtgatattcatcaatttccactaaattgttgtatgccaaagttagttttactgtttcatttacacactacattgtacatggctttactactccaaactttaaaccaaaaataatcttccttcaaaggacaaaggagaccctggaggtgtttgctagtcatttaaaacagctatggctgacagtttacagcttaccctccagaaaaagtcctaatgcgcttttccaggcttgctcccaatgggtagatccctgctcagagcctggctagttattggcagtagatcaaccttcacttgctgccctctcctccactt

SEQ ID NO: 645319 - DNA, 630 bp, Homo sapiens
tccaattgttttattgtggtaactgagtattagcgtgtacacaaggatgtttcaaatgtcaacttagtctaattctgagctacatctcgagagttaattagaaacatactcatgggccaatactgaggtttagaaagaattatcttaaggaagtcagttttgatacatattgtcttgatttaatggaatgttccagattcaggaagtatatatggagccctgaggaatgaataggcatattttaataacctgaacttgacataccaagttatttaagttaaatggaaggagacatgttggctcatctcatcagtcagtaatgaatcacrtggccctgaatagcgttagcatttgattctggaaggctctgctgtgtgattttaagcagtgtgcagtagaaactccaaaattacctccatgtaactgactttccaaattaaccaacaccctctactcccttttaaaaatatgctgactgatgcccatggtgtgccgaatactcctggctgatagctactccggggttgaccctacacatgacaccacccagatctgagttttgtttctactaagagtcagttcttttgtccctgcctgaaattgcattatttaattaaatgttatgtaaat

SEQ ID NO: 645320 - DNA, 535 bp, Homo sapiens
tgtgtgtgtgtttttatacatgtatacatgtatttctggttcscaatgatcttgaccaagagagtatcattcttttatgtcacagtttctataatcaacagcatattagagaactcaacatgcaactccttagacctaacggtaaaacttgagtttttaattttaacaaattagataaatagcagtgtttatataaaccagagaggataaaaccctaatttataaggtatgtaatattgtctggctacatgagccacctttccccttcctcgagttaaaatttctagctttgcttcttataatgatttaaatagagaggtaattgcatacttttctttaatgtaacacatacaaaattaagctttagaaattgcgtgtttaaccctcttactatgatctgctcattgagtaaataatttgttcaattttggctgagcatggtccatattgttgattaactattatcaaatgaacacttgtaaattggtaaaaaacttgagtaaaatattggcacaagaaatcccgtggtaacagc

SEQ ID NO: 645321 - DNA, 535 bp, Homo sapiens
tgtgtgtgtgtttttatacatgtatacatgtatttctggttcgcaatgatcttgaccaagagagtatcattcttttatgtcacagtttctataatcaacagcatattagagaactcaacatgcaactccttagacctaacggtaaaacttgagtttttaattttaacaaattagataaatagcagtgtttatataaaccagagaggataaaaccctaatttataaggtatgtaatattgtctggctacatgagccacctttccccttcctcgagttaaaatttctagctttgcttcttataatgayttaaatagagaggtaattgcatacttttctttaatgtaacacatacaaaattaagctttagaaattgcgtgtttaaccctcttactatgatctgctcattgagtaaataatttgttcaattttggctgagcatggtccatattgttgattaactattatcaaatgaacacttgtaaattggtaaaaaacttgagtaaaatattggcacaagaaatcccgtggtaacagc

SEQ ID NO: 645322 - DNA, 561 bp, Homo sapiens
tcattcattatccgctcaacaaatatttactaagcatctaccagcaggggctagccttaacatctacattttgataaaaattataccaaaactgaggatttttcatcaagaaagtaactcttaatgagcttcattaagtcaatttaattccttgatcacttttctattcattcatgttaaaccatttcttcacctttccccattttttttttatttttgtggagattattttcatcgggatcaattatttttaaattgttgaaggtgactattggcttacgatcagcttttggctcactrtagatctcacaaattagagtttttgccactgtctgggatgctctgcgggtgagtaggtctaccaggtaatgtttcctgagcctgcgtccgcagatggtgactttgtcatggaagaggtgattcttctgtcaatttttagtcaataacatactttaccaggtgcagtcttagttgtcgccagttttactttgtgttaattatttcaaccaattttaatttcttcctggatcttttttttgagaataatatctcaataatact

SEQ ID NO: 645323 - DNA, 356 bp, Homo sapiens
gtaatcagaaatgaccagatgactctagttaraatttttgaaggagggattacattaatatttcaaaacccttactctgtagataagtgtattttaattttttcccctcgtatacttttatttacctggggaaggagcttttagggttggggggtggtttgctatctctttagctagcagaatagtgtgcctttgatcctcacacatcctgtattatggacacagtagccatgcttcacggggaggtcagagctggctaccagcagtcttgccctttactgagcttagtgtcatctttggatgctgtcatatgctgctttgagtgaaccagagaaacagccatttgcagcatgaga

SEQ ID NO: 645324 - DNA, 573 bp, Homo sapiens
ttattcatattaagcagtgtcatcaaattctatcaatttatttcccttaaatattttcttaaatcctttttttattctgcagcaccaaaaattcttccttmagttgtgtattaggtagaatgaacatgagaaattcccattcacttgatccttccaattctatcttctttcctaggaattcttactaactctttggtatttcttcttcatagactatttgtatacattgatatttgtgcaaccaggatgtagcatatgcaagttgatttctatcttccttcccaggaattcttactaactctttggtatttattcttcatagactatttgtatacatcgatatttctgcaaccaggatgtagcatatgcaagttgatttgtagttccagtttgagtctgacaaccattgttataagtggtataagttccagtttgaaagccttaaggcttgagacctaaaaagagccattatttctgtttgagtgcaagggctggaagagactgatgccctactcaaagcagtcagacaagaggagattccccttagtttttttattctattcaggtcatcaa

SEQ ID NO: 645325 - DNA, 573 bp, Homo sapiens
ttattcatattaagcagtgtcatcaaattctatcaatttatttcccttaaatattttcttaaatcctttttttattctgcagcaccaaaaattcttccttcagttgtgtattaggtagaatgaacatgagaaattcccattcacttgatccttccaattctatcttctttcctaggaattcttactaactctttggtatttcttcttcatagactatttgtatacattgatatttgtgcaaccaggatgtagcatatgcaagttgatttctatcttccttcccaggaattcttactaactctttggtatttattcttcatagactayttgtatacatcgatatttctgcaaccaggatgtagcatatgcaagttgatttgtagttccagtttgagtctgacaaccattgttataagtggtataagttccagtttgaaagccttaaggcttgagacctaaaaagagccattatttctgtttgagtgcaagggctggaagagactgatgccctactcaaagcagtcagacaagaggagattccccttagtttttttattctattcaggtcatcaa

SEQ ID NO: 645326 - DNA, 583 bp, Homo sapiens
gggctaatgtagatcatccgctaggttggctaactgaagctgaaactcaacagtggtttacagtctgtgaagtgcaaatcctgcaactaccctggcatgttctggcagagattctctggtcctatcarggtcatctggggaacttgctaaaaatacaaaaagctactctgctactagtcttctctactattctagagcagtggctttcaaactccagtcacatcagaggcacttgggggagccttcagaattcacaaagcttaggtcaccttccagaccaatcaaatcagaatctctgggggtggcaccaagcaccagtgctttttgaagcttcccagatgattctacttggcacacaagattgacaatcaccagaggaaggagtccaaaggtccagaggaagtgttgggttctttggaagcggcccctgcaatgtgaattcaggagtctatcacgaatccccccatgatgtcccaaaggagtctatcgacattaatcagtatactgatgcagtgagaacaaggacattccagggtgcttcagagcactgtgaccccctgtgctctgcccacacatttgtaaa

SEQ ID NO: 645327 - DNA, 583 bp, Homo sapiens
gggctaatgtagatcatccgctaggttggctaactgaagctgaaactcaacagtggtttacagtctgtgaagtgcaaatcctgcaactaccctggcatgttctggcagagattctctggtcctatcagggtcatctggggaacttgctaaaaatacaaaaagctactctgctactagtcttctctactattctagagcagtggctttcaaactccagtcacatcagaggcacttgggggagccttcagaattcacaaagcttaggtcaccttccagaccaatsaaatcagaatctctgggggtggcaccaagcaccagtgctttttgaagcttcccagatgattctacttggcacacaagattgacaatcaccagaggaaggagtccaaaggtccagaggaagtgttgggttctttggaagcggcccctgcaatgtgaattcaggagtctatcacgaatccccccatgatgtcccaaaggagtctatcgacattaatcagtatactgatgcagtgagaacaaggacattccagggtgcttcagagcactgtgaccccctgtgctctgcccacacatttgtaaa

SEQ ID NO: 645328 - DNA, 583 bp, Homo sapiens
gggctaatgtagatcatccgctaggttggctaactgaagctgaaactcaacagtggtttacagtctgtgaagtgcaaatcctgcaactaccctggcatgttctggcagagattctctggtcctatcagggtcatctggggaacttgctaaaaatacaaaaagctactctgctactagtcttctctactattctagagcagtggctttcaaactccagtcacatcagaggcacttgggggagccttcagaattcacaaagcttaggtcaccttccagaccaatcaaatcagaatctctgggggtggcaccaagcaccagtgctttttgaagcttcccagatgattctacttggcacacaagattgacaatcaccagaggaaggagtccaaaggtccagaggaagtgttgggttctttggaagcggcccctgcaatgtgaattyaggagtctatcacgaatccccccatgatgtcccaaaggagtctatcgacattaatcagtatactgatgcagtgagaacaaggacattccagggtgcttcagagcactgtgaccccctgtgctctgcccacacatttgtaaa

SEQ ID NO: 645329 - DNA, 583 bp, Homo sapiens
gggctaatgtagatcatccgctaggttggctaactgaagctgaaactcaacagtggtttacagtctgtgaagtgcaaatcctgcaactaccctggcatgttctggcagagattctctggtcctatcagggtcatctggggaacttgctaaaaatacaaaaagctactctgctactagtcttctctactattctagagcagtggctttcaaactccagtcacatcagaggcacttgggggagccttcagaattcacaaagcttaggtcaccttccagaccaatcaaatcagaatctctgggggtggcaccaagcaccagtgctttttgaagcttcccagatgattctacttggcacacaagattgacaatcaccagaggaaggagtccaaaggtccagaggaagtgttgggttctttggaagcggcccctgcaatgtgaattcaggagtctatcacgaatccccccatgatgtcmcaaaggagtctatcgacattaatcagtatactgatgcagtgagaacaaggacattccagggtgcttcagagcactgtgaccccctgtgctctgcccacacatttgtaaa

SEQ ID NO: 645330 - DNA, 561 bp, Homo sapiens
gattagcacccaatcatctgacgcctgctgtagtgctttttctgctctaccgtgctgactatttaaagaagtacaactcccaaagtataatrcacctttgagcactaaattcaatttactatccatctctccttaattgagtttggtttccattctctccttagaaaacactttaaccttcaaatattgggctctgtccaaggcagggctacccacacgttactttgagctttgattttaaaagctcctatgggtactttcggtaggggcattaatctcttaggtgtaagaatcttatgtagcattaactctggtccaagctgatgttttcttttctgttcagaattggcagtgagttctgcagtgtagctaaccaatgagagtttttattttattattattatttttaatctctcaccttccatagttaagagagagaaagcttcagacacacacacacaaagtgaaacaaaatacaaaaattctaccacctggccttcctgtgttaagaaatggttactagtgagactggattctcccaggcaatattattcactccaa

SEQ ID NO: 645331 - DNA, 600 bp, Homo sapiens
ctttctgtttcttctcaggctttctcaatagagctgtgtaacatgatagcatcagaaccaagagcagggtattacaatactagtcagtaagtgctattataatgatgcatgtcacaaatagattgtgactgacttctgaatcagtggycttggttacacggtcttgggtacttatataccatttgttttcctattttactcctatttctagcctctcgttagagactgtgctcactctggcaatgtgatcacagttaaacaattactccatgaaagaattatacatagcagcctttccagattcactgtgaactctgaaattagaaactgggtttcaccaaagatgctatatgccagagtggctgcaataaactgaaacgattagtgctatttgcaaactaagtggatgtgtctttgttaaaatttgatgtttatttttaatatggttgcctgcccttctctatttgaacagttcattacaccttaaatgtaaaccacatgcacactagagcatttgtgtaattttctggggcaaagaatttgggctgtgatccaatgctaaaatatattactttaatatttatttgcatctgtttggta

SEQ ID NO: 645332 - DNA, 600 bp, Homo sapiens
ctttctgtttcttctcaggctttctcaatagagctgtgtaacatgatagcatcagaaccaagagcagggtattacaatactagtcagtaagtgctattataatgatgcatgtcacaaatagattgtgactgacttctgaatcagtggccttggttacacggtcttgggtacttatataccatttgttttcctattttactcytatttctagcctctcgttagagactgtgctcactctggcaatgtgatcacagttaaacaattactccatgaaagaattatacatagcagcctttccagattcactgtgaactctgaaattagaaactgggtttcaccaaagatgctatatgccagagtggctgcaataaactgaaacgattagtgctatttgcaaactaagtggatgtgtctttgttaaaatttgatgtttatttttaatatggttgcctgcccttctctatttgaacagttcattacaccttaaatgtaaaccacatgcacactagagcatttgtgtaattttctggggcaaagaatttgggctgtgatccaatgctaaaatatattactttaatatttatttgcatctgtttggta

SEQ ID NO: 645333 - DNA, 530 bp, Homo sapiens
ttgggagcctgcatagtctttagatggctgccaaagcacttaaaatctcctttaaattcttaccatatgcttacttttgtactaagtaagtgctcccaagtcttttacttgctcttcacagcaaccctaataggtatctccattttacataggtaaaaactgaggctacaaacaatctatggttccaaatcctatgtgcttactgccgtcttctcttagaaggggatgcagtactgtacaaagatygagctggatgtcgcattgcatgtttgctgagtcctcctcattgctgatgttaggatccttcaacagtttctcagatgccagctatggctggcatccagtatggtggtgtaatggaagtgtactactagcactactacatcaggtcagcacagattaactcagttacgtgttataccttcaagacgctagacattccagaattattttccttggccatccaagtgaagtagaagtagattgttggattgcaaagaaaatgataaagattccctaaaggaatttat

SEQ ID NO: 645334 - DNA, 554 bp, Homo sapiens
aaacagtgtattccaaagccttcactaacaacttgccttacatttcatgacctccaaagatcttgaagataaaacacggcaaaggttattctctttctttcttggcattgttcaggcacagcctaacccagcagtacttgccacccatagcacaaaaaaagcaaatgaacagagaactgagcactgagattttatcayggaaacagtgttctcaaatatcaatcacagagctgtaccttgggggcgtgaatttgaaaggataaggcaaaaaacctcctaaaatcgttcacctccgctctcatgaaatggttgataaagaatggcattgattaaagtgatttaaaactggcatgctgcgattgtcctataaactattctgaaaactggttttcatgaaaatagagagaaggtaatggaaaatggaggtgaacaggacctgggacagaagcattccaaaaacctggttagtccccaaaactcattagtctgattaccatatgcttcagttcatccccatcttcaagccatgagtcccatatttcgtggtgaattag

SEQ ID NO: 645335 - DNA, 654 bp, Homo sapiens
ccacacaaaaaagcaccttgaagaaccgaagataaagtgagcaatcacaccacctgattttaacatcatattaaagaaagaggcactgaggtagaaaagacagtcttgaattgcctacaccactccttccccatcacctggcagtggcacatggcatggagagagaatctgtgcacttagaggagggagagcgcagtgactgtgggactttgaatcagaactcatttctacccatcacagtggaaagtaacactgggcagaactcagccaatgcccrtaagtggagcatttagaccagtgccagccagagggtaatcacctattccggcggtcagaacctgagtaccagcaagcctcaccaccaagggctaaaatgctctggagtctcaaacttaaaagccagtctaggccacaaggactgcaatcctttggcatgtcctggtgctgtgctgggctcagagccactggacatgtggggcacatgtcctaagaggacagcattttgggtggccaaggaagtgtttgtgtcacccctcctccaaacctgagcagtgcagcttgcagctccaggagagacttcttacctcttcttgaagataggaaaggggatagtaaagaggactttgccttgcaacttggataccagttcagcca

SEQ ID NO: 645336 - DNA, 621 bp, Homo sapiens
tcccaccttaccccgtcttcagctagccaaaacattccctggtatttgaggcccttccaatttcctcctggttttgtgggtgggagaataaagaaaaaactgcactgttcccacccacatagttacagccactttatcaaacagaagagcagtctggagccattgcaaaacaaaatacctgccacaactcctctcttctcatttcgactccagcttttcatcttagcaaaaaagttgcaatcagcaccccctagacggaaggaatatcctgtcttaatgggagtccataggaggctgcaggctgctcccctacagagactaacatcaaggtagttgcagaattcagattctaattacagtgtggttggaggcggggtggattccagggaggtcaggaagaggtaaagtacagaattgagctccttgggaggaggtcataggaactttgcagtatgaaaatggctagagattgggtagaattgagcaggctggcaatggcagttttgtgtgggtggtaggacctaggattcaaacttgagggcaaattgtggagcacatacgacaaatgatgtagagcctttcctatttcccttcctgstgtgtcatccgaaacaataaata

SEQ ID NO: 645337 - DNA, 523 bp, Homo sapiens
gtgggtctttccaaatagagataagtctgtgtgtacgtattattggaatgattgctcagtatttgttgatctttttattgtgaacaggagtataattcaggatatagagttttyagcagtgacatcttaaagttgggtcattttgaattacttttcctggctatcactattttttctggagttcatagactcaactacagggatctccacagctttgtagaatttgcacaactcttaacaagagataggggaatcattctgcccttgattggttggaagattgggattcttgtaaccttcctataaattagaagtaaatatatattgcctgttagctagttcctcatcctcttctgtagcataaactaattaaagatgcagaagattaatgttgtaaaaggctgattctgccatggaaaaatccatttcctctcatttgattttatatttaaaagtctttaaatgatataaaatagtctaacaagatgttcccttccttttccagtgagatctaatcctatga

SEQ ID NO: 645338 - DNA, 578 bp, Homo sapiens
caggatatagagtttttagcagtgacatcttaaagttgggtcattttgaattacttttcctrgctatcactattttttctggagttcatagactcaactacagggatctccacagctttgtagaatttgcacaactcttaacaagagataggggaatcattctgcccttgattggttggaagattgggattcttgtaaccttcctataaattagaagtaaatatatattgcctgttagctagttcctcatcctcttctgtagcataaactaattaaagatgcagaagattaatgttgtaaaaggctgattctgccatggaaaaatccatttcctctcatttgattttatatttaaaagtctttaaatgatataaaatagtctaacaagatgttcccttccttttccagtgagatctaatcctatgagttctgaaataaagaaagggaagctagcagaaatgaaaacaaaaagtccccaggaaactcatcttagagctattccaaccagttttagaagcagctgtccaaaattaacagttctcaatttttttggttccagagtcacttcacattcttaa

SEQ ID NO: 645339 - DNA, 548 bp, Homo sapiens
gttttccagacatcattaaccacaggaagagatcataacacagcagaaacttgggattgaataacaaccttgaaattcaaactgacatcatgtattgttgtttgcattatatcctaaacagttattaggaacaattagcaattaaagactcttaggtgcagttatatggttttctacaatatatcctgaatagcaggataagtgctttggctgcaagccaatcatcaaaagccaacagaaaactctaayctaaaatgcgtgctcctttatggccattgagcaaagtatgttaatcaagcaaagccatacacgagatggggagacttcaggtgtaaactttcgctatgaagcctatccccattttatccaaactctatgtagccccaaagaaataggatttatacacatatcttctccacttaacttttatgaaaaagagacacataataagcacagaaacagatatccagaaatatttttaaaggaatatgtcctgatttcaggacaaaattagtgtaatagcgtctatcttctagtcctttagtagt

SEQ ID NO: 645340 - DNA, 548 bp, Homo sapiens
gttttccagacatcattaaccacaggaagagatcataacacagcagaaacttgggattgaataacaaccttgaaattcaaactgacatcatgtattgttgtttgcattatatcctaaacagttattaggaacaattagcaattaaagactcttaggtgcagttatatggttttctacaatatatcctgaatagcaggataagtgctttggctgcaagccaatcatcaaaagccaacagaaaactctaacctaaaatgcgtgctcctttatggccattgagcaaagtatgttaatcaagcaaagccatacacgagatggggagacttcaggtgtaaactttcgctatgaagcctatccccattttatccaaactctatgtagccccaaagaaataggatttatacacatatcttctccacttaacttttatgaaaaagagacacakaataagcacagaaacagatatccagaaatatttttaaaggaatatgtcctgatttcaggacaaaattagtgtaatagcgtctatcttctagtcctttagtagt

SEQ ID NO: 645341 - DNA, 610 bp, Homo sapiens
gcaggagggttcccacacatgcacttgctcattgttcccttgcagaagcaaaggaagcaaaggaagcatgygtgcttcagccggtagaaaacggctcagcggctggggctcagcttcctaaaccagtgacagggcgcagatcggtgtgtttgctactacccaggcctgcagtggtgcagcgggattgggggagggggatgggggaagacttcacctgcctgatatttgtgtgtctgtagaccattagtggataagtaaaagataatgacgtataaccaaaaacattttaatgagagtaaaacaatgcatgagaaatcagagcagtaggtctgcccagtttgctaaaacagccccttcgtaaaaaatatatcatgttacttgatttacccgaacccaagtgcctaggcataacttatttcagcagtgcctgccgtttaatagaatacaagataaatttttgcatttcttcaaactgttgtatttcctacttttagcctgatggttgggttagatctagtttttaaagtggggagaagagtatggccgggagttacagcaggtgctttaaggagatggcaaacatttcaggatcagtgtggtattagaaata

SEQ ID NO: 645342 - DNA, 597 bp, Homo sapiens
ccaaaaacattttaatgagagtaaaacaatgcatgagaaatcagagcagtaggtctgcccagtttgctaaaacagccccttcgtaaaaaatatatcatgttacttgatttacccgaacccaagtgcctaggcataacttatttcagcagtgcctgccgtttaatagaatacaagataaatttttgcatttcttcaarctgttgtatttcctacttttagcctgatggttgggttagatctagtttttaaagtggggagaagagtatggccgggagttacagcaggtgctttaaggagatggcaaacatttcaggatcagtgtggtattagaaatagctctgcagtaggaaagctgcagaagtcttgcaatcttgctgtaatcagaaggcagtgcgagtgctgagatcattttattacagaaagaatgagatgtgggaaggaagagaaaatacatatctatgttcttaatcttagtatattgacttatattttgtttctctatttttctcataagaatcttttttttttcctaaaagacattgttgcagaatactttatctcaaaaccatcactgcatcattataaatgtattgttta

SEQ ID NO: 645343 - DNA, 597 bp, Homo sapiens
ccaaaaacattttaatgagagtaaaacaatgcatgagaaatcagagcagtaggtctgcccagtttgctaaaacagccccttcgtaaaaaatatatcatgttacttgatttacccgaacccaagtgcctaggcataacttatttcagcagtgcctgccgtttaatagaatacaagataaatttttgcatttcttcaaactgttgtatttcctacttttagcctgatggttgggttagatctagtttttaaagtggggagaagagtatggccgggagttacagcaggtgctttaaggagatggcaaacatttcaggatcagtgtggtattagaaatagctctgcagtaggaaagctgcagaagtcttgcaatcttgctgtaatcagaaggcagtgcgagtgctgagatcattttattacagaaagaatgagatgtgggaaggaagagaaaatacatatctawgttcttaatcttagtatattgacttatattttgtttctctatttttctcataagaatcttttttttttcctaaaagacattgttgcagaatactttatctcaaaaccatcactgcatcattataaatgtattgttta

SEQ ID NO: 645344 - DNA, 545 bp, Homo sapiens
ccccatctctactttaaaaagtttacttccttctgtgttttgtttctagtgcaaacacaaaaatattcattcagtgccttactctgtgcaaagcattcttatttgaaaaataaggatggaaatgtcaaccaagttattactggagactgaaaaacaatgagtataatgacctccaagcacgaaaataataaatggcaacatgcaaaagatggtgtccgcarttgcctttattcatccttacaggcattagatgattaagcattagactcaaagcccacagtctccttgctaccaaagacatgaatccctgtccagcagactgaagtcctctatagatctttctggtgaaaagaccctggatatctgagagtgttctttctcatgcttggctcaagaataagggtttcaatctagatctcaaaaagtcttgctaccataggaccagcaattccacttctgggtataaaaacccagaagaactgaaagcaaggacttgaacactcatctttatagtagctttattcacaataggcaaaaggtggaag

SEQ ID NO: 645345 - DNA, 510 bp, Homo sapiens
aagttataaatgaggtaacttacctaatgatagaggcttccttttattaaaggatttcaaagctgcttctgaaaaaggagaaggggggaaaattttgcattttaccataagctcaagattttattgccttcataaaagaaaagatgacayttagaactggatcacttgttcctttctcttatctccttccagttcaaaatgcttgcatcttttttttttgagacagagtgtcactctgttgcccaggctggagtggcacaatcttggctcactgcaacctctgcctcccaggttcaagcgattctcctgcctcagcttcctgagtagctgggactataggcatacaccaccatgcccagctaagttttgtatttttagtagagatggggtttcaccattttggccaggctggtctcagactcctgaccttgtgatccgcccacctcggcctcccaaagtgttgggattacaggcgtgagccaccgcgcttggctgcttgtatcttttaat

SEQ ID NO: 645346 - DNA, 560 bp, Homo sapiens
  misc_feature 1, 2, 3, 4, 5, 6, 7, 8, 9: n = A,T,C or G
nnnnnnnnnaaaaaaaaaaaaaaaagaggaatgattgggaagatttgttgtccatctattccatcatatgctcacttgtcttgttggttgaagtcraaccatggaatagaggatgttcggccaaatttccttgctaccctgctagtctgtctgtccaccttaaatgttttcgctgggttaccttttggtattataatgttagcttttatagtaagaaactcgtttagagcactttaatgtaaaattccatataagaaatttattttagagctatgaggtagaaaaagctcggttctcctgaggaggtgttatttaccgtctttataacataattgtcatgtttccattttaactttggccatgaagaaacacattttgtggcctggatgtttatgtttagctgtttttctggagagctttgcttcttgcctctttttattttgtttcttgatgatggatattttctttaaaatcacatattatccttatgtataatgtgattttagtttccgaggttttattggtaagttaagctacctcagttctttagtggaaaatac

SEQ ID NO: 645347 - DNA, 613 bp, Homo sapiens
attctgctctaaatactttatacgttttataactcatttcattctsaaaataatcttgtgagataggcactattacaaatggggaaattgtcacagaaagatcaagtaacttatccaaagccacacagctggtgggagtggagccggggtattaacattggttgcccctcttagctggaaatgggcttgccattttcatgacagggcctcttcctgtgcacttccaccccactacctttggttcgcctgtgttcctacaccacaaaccctccaggataatcttgactgtgcctcagtttacccccagcaattgtccacatgctctttttgcattttcagctttaatctccattctgggaatgtttagatatataatgtttgggtagatagagaatgtttagaagtctattctaggtcatagaagttcatgctccagaatatacatttttatcctggtgcctggaagattcctgtaggaggcagcatggcactgctactctagttcacacccctcacccccaaggaaaagaaccaccacgagcactaaaataaaatacattctcaatgtgcttaggataaagaaaatgactttttaccatggcctacaaagcac

SEQ ID NO: 645348 - DNA, 613 bp, Homo sapiens
attctgctctaaatactttatacgttttataactcatttcattctgaaaataatcttgtgagataggcactattacaaatggggaaattgtcacagaaagatcaagtaacttatccaaagccacacagctggtgggagtggagccggggtattaacattggttgcccctcttagctggaaatgggcttgccattttcatgacagggcctcttcctgtgcacttccaccccactacctttggttcgcctgtgttcctrcaccacaaaccctccaggataatcttgactgtgcctcagtttacccccagcaattgtccacatgctctttttgcattttcagctttaatctccattctgggaatgtttagatatataatgtttgggtagatagagaatgtttagaagtctattctaggtcatagaagttcatgctccagaatatacatttttatcctggtgcctggaagattcctgtaggaggcagcatggcactgctactctagttcacacccctcacccccaaggaaaagaaccaccacgagcactaaaataaaatacattctcaatgtgcttaggataaagaaaatgactttttaccatggcctacaaagcac

SEQ ID NO: 645349 - DNA, 554 bp, Homo sapiens
gagagactaggaatcactctcctcctcctctccaccacaccaaaaaaaaaggaataataagaaagtgaaaggaaaaatagttttaggttaaatttcatcaccatctgaaagaaaattactccgattttgtttaagcaagagaagaattcagctgagaaattatctagcaggcagcaaaatcagggagtcacttcccattgcaaagcaaaagaaaacaaggagcaagaggatggtcctggatagctgtttagacaatcagacatactgctaacatctccttgccttagaaactccgtgatgtttaaattaacaattggccacaagccaaacacaggaacactcaaaagtttagaagggtgtgctgcaaytggtaccttagcaaaacacaataataaattaagaggattcaagaagccttcactgtagactctaagaagatttaagatttgtaccgagaaacggcttctaaatctcttctactgcattagtttagcatctaaagaacacctgtctaaaaatcaaaatatctaaatcctatcctttgagtcaacttg

SEQ ID NO: 645350 - DNA, 542 bp, Homo sapiens
tgctgaaattctgtgattgtatgagtataatgtaaaagttgtctcaatcaaggaaacttggagtaaagactcaatatgatggatttaaaaggaatgaatgacagttccaattattgggttcaaaaaacatgtgctacaagtataagatgagaaaaatagggtacactagtagttcatgtgaaataaggctctgaatattttagctgagtgtgtattccatagcacatagtagtattttgtggcttctaaaaaagtacacatatccattgggtatgagtcggagcrttattctttcttgaactgcgctctcacgatgcctcctcagtttaagaacttactctgaaatagtaaaagcatagtgtccagatcaggaggtcatggttcagctctgtgctgcactggtaagaacatgtgttaagcctttttccattttgagcctcactttttaaagaggtttttgatgaactggagtcatccagtgatggggaggcaggatagcctagtgttgaagcacacgcactctagagtctacttgggtttga

SEQ ID NO: 645351 - DNA, 535 bp, Homo sapiens
aggctagtcatggaggcagcactgggcacctgaatcacagaatgtttcagaggtggagctaaaaatggaacctacttgtgacaggtgagtttgaaaggctaagaaaaatctcttagctaaattcaggagaaacaagctcttctggcatttggtttggctcccaactaaatggcttttaactgtggggccaactatatgtcaaagcaaattttaaacgtaactctgattatgtttgtatctcattttaactctgtgcttaattctaacattgaagttttcacattaccataagagaacattctgtatctttctttttaaatacaattcccaaatcattgctttaaagatctccacttccctgccataggggctttctttcctccttcacacacagtrgttatttctctggataggtcttgctatctctttaggagagtaatctaaagatctactcacagttctttcagaagtttggtcctataaactcacagtaaaattaggccttgaaaaggaccaaacttctcatgctaaccca

SEQ ID NO: 645352 - DNA, 366 bp, Homo sapiens
gaactgtctatcacaaatgcaatatgaaaaggagatgygccccatgtgaggcatgaaatatcatctctaataactggcagtttaatttcaagatttcgggtctgctcatttaaaagtacctgaagcaaagttctaaagcacagaatgataaaggaaatcacggttgttatactttaagaaaccttgtcccatttctgctagaaaatataagaaattgagttaaaaagaagatatggaaaacaatgcaaaaccgacaatagaatgccatggcagacagtgcctcagaacttttcataattctgtagcacattcactaggacatagtttttgtaattatcttagaaaactggtcttattcttttccaa

SEQ ID NO: 645353 - DNA, 537 bp, Homo sapiens
attcaaggagctttcctgagatcctagtgagggtactacagaacacagacagtttctaagtatgacctcatccagttcagtaaagtgtggtggccatcggtgtgtggtcatcatagtgtaggagttatcctctttgcttaaagtagtttatgttaaaaataaaaaaaacctgagaataacaccatttgctcataaattagttctgtaatctgagggtcagttaggaattcagtgacagattttaggtagaaagagtccatatacagaattagttgcttacaaaagcatcagaagggctgaaaatgggctttagattggggctacaggaagagaacagtctcaacaagacaaggaggggaaattgagaagctaaccagagacctttgaagtttaraaataccactttagctgcggcagggaccaagaagctcctgacatgactattgtgtccagagtcatgtgacaactgttgggtctacactgggaggaaatggatgccagtctctacaacccatgaagtttattttttgacagtgg

SEQ ID NO: 645354 - DNA, 605 bp, Homo sapiens
tgacacataaaattaaccatcatatatctcttgcttgtccaaatggtttgcttttcttgctattctaatcatatagataattttttcagagctttctccaaattttctgcatgtttgaaacactttttcctgaaataggaggtgactgtttttcagtgtaagcattgaatagtttgtaaataaagtagttcctattacctgtcatgtagttcatatttattacacagaggaaaatgtagaactttaatttcatgatacctcattsgtcatggttagattcttcaagatcagaaatagtttttgttttggaattcacagaatgaatgcatataaactcttttaattcacactggccaaatgtatcctctcgatctgatgcattttcatttaaagagcatctttattactaaaataaataccacttagcttgtagaatagaaagcagtttaggcattttattatttttacttactgaaagactcttcagctgatttgccttatttcatgttcaccggtgattagagaatctgatggatgacattttatcgcctacactttggccacagatgtaatcaatctgctcttggctagccttgatggggcct

SEQ ID NO: 645355 - DNA, 605 bp, Homo sapiens
tgacacataaaattaaccatcatatatctcttgcttgtccaaatggtttgcttttcttgctattctaatcatatagataattttttcagagctttctccaaattttctgcatgtttgaaacactttttcctgaaataggaggtgactgtttttcagtgtaagcattgaatagtttgtaaataaagtagttcctattacctgtcatgtagttcatatttattacacagaggaaaatgtagaactttaatttcatgatacctcattggtcatggttagattcttcaagatcagaaatagtttttgttttggaattcacagaatgaatgcatataaactcttttaattcacactggccaaatgtatcctctcgatctgatgcattttcatttaaagagcatctttattactaaaataaataccacttagcttgtagaatagaaagcagtttaggcattttattatttttacttactgaaagaytcttcagctgatttgccttatttcatgttcaccggtgattagagaatctgatggatgacattttatcgcctacactttggccacagatgtaatcaatctgctcttggctagccttgatggggcct

SEQ ID NO: 645356 - DNA, 605 bp, Homo sapiens
tgacacataaaattaaccatcatatatctcttgcttgtccaaatggtttgcttttcttgctattctaatcatatagataattttttcagagctttctccaaattttctgcatgtttgaaacactttttcctgaaataggaggtgactgtttttcagtgtaagcattgaatagtttgtaaataaagtagttcctattacctgtcatgtagttcatatttattacacagaggaaaatgtagaactttaatttcatgatacctcattggtcatggttagattcttcaagatcagaaatagtttttgttttggaattcacagaatgaatgcatataaactcttttaattcacactggccaaatgtatcctctcgatctgatgcattttcatttaaagagcatctttattactaaaataaataccacttagcttgtagaatagaaagcagtttaggcattttattatttttacttactgaaagactcttcagctgatttgccttatttcatgttcaccggtgattagagaatctgatggatgacattttatcgccyacactttggccacagatgtaatcaatctgctcttggctagccttgatggggcct

SEQ ID NO: 645357 - DNA, 617 bp, Homo sapiens
ctttagaaatatgccttctgcccagtttttgtaaagattctgaatatcaaatcttttcccagttaaaattccagtacaatatataataaatagtaccttcataagtgaaaatattacataawttaatgttttataatttgtaaaaacaatttttatgaaagaaaacttattccttgcaaaaaaatcatattttgaaattaacaagtcatgattacacatgacttagtgtgggtacaataaataatagttgattaattttgctttttaaattgtcaagcagagaatcatcgcagactttatatacccatgctatataaagtctgccatgattctatggaacaatagatccaggtttggcttgagcattttgtttgttatcaatattttctataaggcataatatgtaatatacattatcctacacttcttggagatctactcttatgaaggacaggggtttccatcagcttgcccacaggatgactttaccatgaggaaaatgaggatgttagtttcatatatgctttgagaaacttcaatcgaggtttagagaaccctcccttaattgtcttccactctgcatcaggaagtctcgtgccttgacgataaatatgagc

SEQ ID NO: 645358 - DNA, 575 bp, Homo sapiens
ttctacccagcttttgataaataattttgaagatatgttttgtaaaatgtttagttagcaaagcaatctcatctaacttctaaagttatatgtaaatttcagttaaccatgctatgtctataaagtctatgcttttatgttgaatgttcaaattatttaatgggttttctagaaaaaattagtattgaagcaattcagtctggacactaacgttttcatacttcctagttaattatcctcccatctatgtttacaaacaaaaatgtggcttattgctaatgttactacttaaccttccttatacttgatttgaatcttttcagcattagtctacatygaaaatatgtcagtgctacaaactgcatctcacagaaagctcagaattcattgacccattctgaaatatagttttctggaaccaaggtagactttaatcgtacataaatgatttgtaagactttcttcacttattacagtccatgtctcacataactctccacataggaagagactggggagagaaaggaaatttcaatgctcattcatagaagaaaaaaaaaggaatagattcaatt

SEQ ID NO: 645359 - DNA, 374 bp, Homo sapiens
ttgtaaccattttaccatagagaaggtgactgggaaggtcctgggtaggttaggacagagagtggggaaagggcaggtacaggtgatgaggaactgttttcaggttgagcatgaaagtacaatgagaaatacttaataaaaggttcccggggtggactgataggaaggaaagcagagtacagaaatactcactcctagagctagaaatgtctggcaaggtagctgggcagatactgggcctcccagaacatctatgccaagcagtgatcagggctgcagtttargaccacaacccagtcttctgctgctgttaggtgacgatgctggtaagaacaagagagaatcctagaattagagggattaaagcaaaaatt

SEQ ID NO: 645360 - DNA, 561 bp, Homo sapiens
cactctgcgatagtaaatgcccagcaggaatttttgcacttaattcaaatagataaatatcaccagagtttgttatataaccaagaaggttatgtagtgtgctcgttgttttacagaggacaaatcagatttttgttttagagacagatactttttaaaaataaagacacagcatamattattttagtacacttatggtctaaaacatgatttgagttgtcaataagccattgttgaacactatcagaaagaaaaaaataggtagctactatccccctgtgcctccgcatcaattttatgtatctcttcgctagtagtgatcatatcataattaacaaaatttctaaagctattttattcagaaatcatgtcatatttatctttataacccaagtatatcacctggtatttagtgggttctcaattaatgctataaagagaaaagcaaatatagtgaagattggttgccttgttcttcatcaatggaagtgtactgttctaatacatattaagaactaatgctgctaagttgagattaagtttgtttttcagggaggagac

SEQ ID NO: 645361 - DNA, 608 bp, Homo sapiens
tacaggcgcccgccaccatgcgtggctattttattttattttttttgtatttttagtagaggcagggtttcaccgtgttagacaggatggtctcgatctcctgacctcgtgatccacctgcctcggcctcccaaaatgctgggattacgggcatgagccaccacacccggcccaaaatctcttctatctttaaatatatactacattgtaatttgctgtagtcaccatactttgtatagaacttattcataggagtcatttttatattaaaactttgagcttgttatctgctttttgacttaatttggaatcatagacatgtatcccaggctctaagattctaaattaacttcaaaagagttaactggaatgatttgcttttaaatctttcatttatttgttgctatcttatagaggtggatttcactgcttgtgcatttttggaaagtagtccatctcatcattacatttatttgcggttctgatctaattttaataaatagctcaacrctggtgttatgaaaatacttgaaggtttttaaaggtataattgcctcttaggttagatatattttgttagagtaatttagttgtagcctatggtatta

SEQ ID NO: 645362 - DNA, 608 bp, Homo sapiens
tacaggcgcccgccaccatgcgtggctattttattttattttttttgtatttttagtagaggcagggtttcaccgtgttagacaggatggtctcgatctcctgacctcgtgatccacctgcctcggcctcccaaaatgctgggattacgggcatgagccaccacacccggcccaaaatctcttctatctttaaatatatactacattgtaatttgctgtagtcaccatactttgtatagaacttattcataggagtcatttttatattaaaactttgagcttgttatctgctttttgacttaatttggaatcatagacatgtatcccaggctctaagattctaaattaacttcaaaagagttaactggaatgatttgcttttaaatctttcatttatttgttgctatcttatagaggtggatttcactgcttgtgcatttttggaaagtagtccatctcatcattacatttatttgcggttctgatctaattttaataaatagctcaacactggtgttatgaaaatacttgaagstttttaaaggtataattgcctcttaggttagatatattttgttagagtaatttagttgtagcctatggtatta

SEQ ID NO: 645363 - DNA, 506 bp, Homo sapiens
atggtccctgcttcttcaatctcttcctaaaattactcaacataagcaaaaatcttataataaggtcttctcaattacctatttccctgacaccacaaaattcccctggagtgtgttcttccwtgcaagctaaaaaaaaaaaaaaatctaaacatgttcctgatggtctttgactagtggtctttcacactttgaaataatctttgctttctaatagcagaaagacatttcagacccatcctcagttttcctgattaaaatatggctatcagttgtcctttattttagttgagagatgaaaataaaaaataaaaatgtgggcactagagttgagcatgagagttagtgatgattaaaattgctgctgctgctgctgtaactattgatgtcattgagctactttttaaggaggagtatctatttgtttaagattacatcaaacacccacatctagcctattttcacatcagtcattccaatctggcctattttcttgctgtacccaa

SEQ ID NO: 645364 - DNA, 506 bp, Homo sapiens
atggtccctgcttcttcaatctcttcctaaaattactcaacataagcaaaaatcttataataaggtcttctcaattacctatttccctgacaccacaaaattcccctggagtgtgttcttccatgcaagctaaaaaaaaaaaaaaatctaaacatgttcctgatggtctttgactagtggtctttcacactttgaaataatcyttgctttctaatagcagaaagacatttcagacccatcctcagttttcctgattaaaatatggctatcagttgtcctttattttagttgagagatgaaaataaaaaataaaaatgtgggcactagagttgagcatgagagttagtgatgattaaaattgctgctgctgctgctgtaactattgatgtcattgagctactttttaaggaggagtatctatttgtttaagattacatcaaacacccacatctagcctattttcacatcagtcattccaatctggcctattttcttgctgtacccaa

SEQ ID NO: 645365 - DNA, 594 bp, Homo sapiens
ggatcagtcattctcctggtcttttgcacatgagggtggtgggagttttcttgagtaagatttatggtagaatgtcacttatcttggtttcttcagataacttacagcttgcaaggtcttgtgatcagtgggaatgcatgaaatrtaatgctctggtcagggtgagctgaagccaagtcccatccctactctgtctcatccctaaaatttccacatacctctttgtaatctctttctcttactaccccctgcatcccctatccctaggcaactactgatctgctttttgttacttcagatttgtttgcattttctagactcttttacaaatggaatcatatagtatgcatgctttctggtctaacttctttaactcagcataattattttgagattcatccatcttgttgcatgtctaaatagtttttttattgctgagtggtatttcactgtttatctagctgttgatggacattgcaattgcagtcaggatttagctgttacaaataaagtttcaataaactttcatgaacaattatttgtgtggatatacattttcattcatcttgagtaaatacctagaagtagaatggc

SEQ ID NO: 645366 - DNA, 534 bp, Homo sapiens
agtgaacaaaagtggacaagctgatgactagaaggataccagagatctcaacaaccagagatctcacaaagtgggtgggaagtctaggaaaaaaaaagggtgaagatgagctggactgcaggagactaggagcagaggatctctcaagaccatgttgcagggagactgtggtgaggacaccagctcagccagccacggccaggacactgccggctttcaagtgcatggctctcagacatcatctccagctcttgctgcctcttagggtcactctcttctgaaggtatgtggtctgtttggctgagagtgggccatttgtttgtggaagctggaggaccacgctgagttgtggaagtaggaatacaaaggcatgactaacttccagtaaatttgcacaaactctccttacttcaagaggaagaaaacaaggaacgccaggtctgagaatgggtcccagagatgggcaaacagaggaagagtaaagacagggtctcrtcctatagttaacatatatgtctattttttttctctctc

SEQ ID NO: 645367 - DNA, 602 bp, Homo sapiens
gtaattatatatatatattttaattattatatgtatatatatatttttcttcttcttagacatggctacacacattgctatgatctgaatatgtcaccccaaatttatgtgttggaaacttaatttccaatgcaactgtgttgggaggtggggcctagtaagaggtgtttaggtcatgagggctctgccctcattaatggattaatgccacgatctaaagggcttgtggggttgggtttgctctcttctgctcttctgccatgtgaggacactgtaagaagtccttaccagatgttggtgctatgatcttggacttctcagcctccagaaccgtgaggaataaatttttgttctttataaactacccagtctcaggtattttgttatagcagcaaatattaagtaaaatatatgtagcccaaattttctatctatttaattgctcattgtctgtcttcccttactggaatgtaagctccataaaggtatgatttttgtgtatgtatgtattgctatatctaaaacagtgtctgacacttartaggcactcagtatacgtttgtcaagtgaataaatcttatttaaccctcaatataagccta

SEQ ID NO: 645368 - DNA, 615 bp, Homo sapiens
ccctgtttaaaaccttcagtgtctcctcatgtgcaccactcagggctcaaactcttcagcctcagccctatacagtctgaccccacctgagtctcaagtcgagttccccacatcttcttcttcctgccacaccttccagctgaaccacaccattccccagagcttatatctttcccttgatctttgctgatgcttcttatcaacaatttgtcactgaaaccttcacccaagtatttaagtggtatttaagtatttaaattggtatttaagtggacagtaaattttagttgattgatcacatgaacaaacaacagaaaacyacaatgcaagttaaattgtcataagtgccctaagagagagttgatttctaaaatgtgatggatacaatgacctctgtgttgcctccttctcccttaatagctaaacatcgaaggattggacatggcccaatgcccaattttaaggcctttggtgttcatgatttagaaatccatcctttctttctctctccctcccctgcactgtcttgttaaggtaccatttcttgattggatgattcatactctcctaagttctttttccacattgctactaaagtgatgcttttatgaagca

SEQ ID NO: 645369 - DNA, 392 bp, Homo sapiens
cagtagaatgaatgccacaatgaaaaaacgggcactggtggaatagtcagagagcaattgtaataaagaagattgctatgaaaaccagcaacggaggccaccttccagcaccccaggagctcaaataaatgcatrcgcagaaacaacagggatgaagtctggcaggaatgaattgttttcactccctttctagaggagagggagccagtaggccagaaaatgtggtgtctatggatggctggggagggaggaagtgacgggataggcctttggtgtcttaacagaggcttgtttcctccaggggacccagtaccctgggaggagtgagactgctccccagcttgttgtctgcagcagggctgtcagtgttgggcagtgacagggaggaattc

SEQ ID NO: 645370 - DNA, 629 bp, Homo sapiens
actagtgtaaggataaacatatagattaatagaatggaattgggaatccaaaaacatacccataacctctctattgattttcaacaagagtgccaaaaccatcagctggatttccacatgcaaaactaggataaagttggacccttgcctcacactgtatacataaaagtaactcaaaatggatcaacgatgtaaacttaagggctaaaattataacacttttagaaacataggtgtgaactcttttgacctagggtttggcaacagtttcttggatatgacttcaaaagcacaagcaacaaaataaaaatataacttagacctcaaaattaaaaacttttgtgcattaaaagcactatggagagcaattacccatggtaatagagagaatatttgcaaatcatatatctgataaggacctagtatccaaaatatataacgaattcttacaaatcaatagccaaaagacaaaatctcaattaaaaatggrgtttaagcgtcaaattttgtctcctcaaaaaagataagttgaagtcctgatccgagtacttcagagtacatccttacttggaaatagagtcactgcaaatgtaattagttaagatgaggtcatactggaataagaatgc

SEQ ID NO: 645371 - DNA, 629 bp, Homo sapiens
actagtgtaaggataaacatatagattaatagaatggaattgggaatccaaaaacatacccataacctctctattgattttcaacaagagtgccaaaaccatcagctggatttccacatgcaaaactaggataaagttggacccttgcctcacactgtatacataaaagtaactcaaaatggatcaacgatgtaaacttaagggctaaaattataacacttttagaaacataggtgtgaactcttttgacctagggtttggcaacagtttcttggatatgacttcaaaagcacaagcaacaaaataaaaatataacttagacctcaaaattaaaaacttttgtgcattaaaagcactatggagagcaattacccatggtaatagagagaatatttgcaaatcatatatctgataaggacctagtatccaaaatatataacgaattcttacaaatcaatagccaaaagacaaaatctcaattaaaaatggagyttaagcgtcaaattttgtctcctcaaaaaagataagttgaagtcctgatccgagtacttcagagtacatccttacttggaaatagagtcactgcaaatgtaattagttaagatgaggtcatactggaataagaatgc

SEQ ID NO: 645372 - DNA, 625 bp, Homo sapiens
agtctaccttaaatgtgcccagaacatttgcattatcccacagttgggcaaaatcatctaatacaaagcctattgtatattaaagtgttgaatagctcaacactttttgtatttattgaatcctgtactgaaagtgaaagtcagaatggttgtataggaaccatcgtaatattgaaaaatcctaagttaaatcttactaatcctaggactacctgtatatacaatatatataatatatctatatgtatataaaattggagtctcttgaaactgcttttgaagttgtactatctatatcattttggaacttgtgtttttctcactcaatatattmtaaactcattttcctatcagaacttataaatctagctcattttgtaaaaggttatgcagtgttccattgtataaatatatcataatttatttaacaaatacctaacgatgaatatctggtatgttttcaattaatttgctataataatgcaccatatacatccctgtacatctagttttgcttgtctgagtttttctgtagagcttagatttttggacatggtaaagtatctctgagcctcagtttccttttccataaaatgaggacaacttacaaaaggttgcgagaatt

SEQ ID NO: 645373 - DNA, 428 bp, Homo sapiens
attgccattaatgaagtgaagcattctaaactcacaagtgttacagtgacaaaagtcctagacatgttcatcagtaagtccgtgtatgtaacacaacagtaatttgattatatataattatgtaaatcaataatgtgccttgaattacttttgtatatgccctaattttgtctattcttcagaattatcggttataaaaatataggtgagcagggcagataaatattatgttctttttctagagtttgcgrtatttgtggtaatttgctagactctaaaaatacataatttgctgtatttttctccttttagatgaatgctcccccgcataattttgtatgagatatttcctattctttttttaaaaaaagagtgtccccaaatagcataagattcagtaccacaaatagttagacacccagagcaag

SEQ ID NO: 645374 - DNA, 611 bp, Homo sapiens
ttacttcctccctcctacatctcttcagtttattttatatttgttttgtcaaattgaattataaacataacttattttcatttaaaatgaaatagacaatgaacctgccattgttgccactaaattcaggtttagacagctggacacattttttaaaaatatgtattcttctcactttttattttctagaaaccaattataattgtaatctgtgttgtcttgatttaatccttaaatatttatttgagatactccaagtaattttcatatttgtttaaaatagtaacactaatatctagtttacyacataatagtttcagaatgtcatgtgacatatagaattcctgcttttgaggtttgaggatttctttttagtataaaatagagtcaacaatttttaaaaaacagagtatatatgtattttaaagtatgttagcattttcagtaatacaatctagctatattatgcaaaaatctgtcctttaagcagaaagtctgaagcaatatgctcaattctctaaaataagtatttttttacaattcccccatatttctgatcatttttccttcatttttatgctttttaataaaaatatatttaaaggaaagta

SEQ ID NO: 645375 - DNA, 575 bp, Homo sapiens
ccatctttgtcagtgactgaatttcccatagcaaaagactatgtgttagtatgtaagtgcccatatacttgattaagctaaaaataattttcattctgtgaaaaattaaaataattttcatcctgagagataatgatataaagaaggaaatacatttaaaatgtctagcatcttagaagtgccataacatttatctgtcaaaaaatggtgaaatatgacaaacartcatgtctggatttgtgtctttgctcaacaacttaatatgtgtaatcttatgcaaattaactctttgatcatcagcaaaaatttgttatactacttttataactacttcagagtttgtggagtttaaattacacatattttgacagttcatgggggcatattgtgctattctttaaaacccaaagataaggttatgttgcaagaataaaataatgaaaaatccacatgtaagtaagatcagatttttttttaatcagaggaaacaaaaatgtaataataattgactgtggatgaaacatattgggagattcaaattccaatcaagttgcagacattcttccttgtagcct

SEQ ID NO: 645376 - DNA, 575 bp, Homo sapiens
ccatctttgtcagtgactgaatttcccatagcaaaagactatgtgttagtatgtaagtgcccatatacttgattaagctaaaaataattttcattctgtgaaaaattaaaataattttcatcctgagagataatgatataaagaaggaaatacatttaaaatgtctagcatcttagaagtgccataacatttatctgtcaaaaaatggtgaaatatgacaaacaatcatgtctggatttgtgtctttgctcaacaacttaatatgtgtaatcttaygcaaattaactctttgatcatcagcaaaaatttgttatactacttttataactacttcagagtttgtggagtttaaattacacatattttgacagttcatgggggcatattgtgctattctttaaaacccaaagataaggttatgttgcaagaataaaataatgaaaaatccacatgtaagtaagatcagatttttttttaatcagaggaaacaaaaatgtaataataattgactgtggatgaaacatattgggagattcaaattccaatcaagttgcagacattcttccttgtagcct

SEQ ID NO: 645377 - DNA, 539 bp, Homo sapiens
acacaactttgcaaagtagcaaaacacaaaaaagaaacaacaaaaaaaatcatcygctaagtctctgagtctctgaaaacacaggttaagaaatgtaaatagcagcaccttaaattcaggaatctgttaagaatggccctctagttagtttagtgatgataccaggagaaaccttcttataaggtagtagcaagagtcactacagcacaagacaaaaaattggtgatcccatttgagttgaaaaaatacagagacagcatgaatttggtcatgtgttgaatcaagacaattatgtcatttaaaaggctgactgctacaaatgtgaagtattaatacctacttacagtgaaaatagaagctcagataccagaaagagttcacaataaatctggcattagaatgtaaagctgatgcagagctctttttattttttattcacacatggtaattttggagcagtgaaaaatatgaaaagtttggggttagaatagagtgaaaagaggctcaggctacagctactaatattaagcatataaaca

SEQ ID NO: 645378 - DNA, 539 bp, Homo sapiens
acacaactttgcaaagtagcaaaacacaaaaaagaaacaacaaaaaaaatcatctgctragtctctgagtctctgaaaacacaggttaagaaatgtaaatagcagcaccttaaattcaggaatctgttaagaatggccctctagttagtttagtgatgataccaggagaaaccttcttataaggtagtagcaagagtcactacagcacaagacaaaaaattggtgatcccatttgagttgaaaaaatacagagacagcatgaatttggtcatgtgttgaatcaagacaattatgtcatttaaaaggctgactgctacaaatgtgaagtattaatacctacttacagtgaaaatagaagctcagataccagaaagagttcacaataaatctggcattagaatgtaaagctgatgcagagctctttttattttttattcacacatggtaattttggagcagtgaaaaatatgaaaagtttggggttagaatagagtgaaaagaggctcaggctacagctactaatattaagcatataaaca

SEQ ID NO: 645379 - DNA, 539 bp, Homo sapiens
acacaactttgcaaagtagcaaaacacaaaaaagaaacaacaaaaaaaatcatctgctaagtctctgagtctctgaaaacacaggttaagaaatgtaaatagcagcaccttaaattcaggaatctgttaagaatggccctctagttagtttagtgatgataccaggagaaacctycttataaggtagtagcaagagtcactacagcacaagacaaaaaattggtgatcccatttgagttgaaaaaatacagagacagcatgaatttggtcatgtgttgaatcaagacaattatgtcatttaaaaggctgactgctacaaatgtgaagtattaatacctacttacagtgaaaatagaagctcagataccagaaagagttcacaataaatctggcattagaatgtaaagctgatgcagagctctttttattttttattcacacatggtaattttggagcagtgaaaaatatgaaaagtttggggttagaatagagtgaaaagaggctcaggctacagctactaatattaagcatataaaca

SEQ ID NO: 645380 - DNA, 538 bp, Homo sapiens
atgttgcacaccctaccttcatctcctccctgagctccagcctgatggtgtcctcctcccagtgctgcatctttggcacggccccctggttctgataaaaggtgatggattttcctgygggaggacagggctcagacgctggggcccctctgatggccctgtagctccccctgccgtgccctggcctcccactcactgatggcatctctcttgccagtattgaatgaagcgaagttcttgttttttcagcagctcactcaggtctgccttctccttcaggtggtccataaagctgctctggagccaaaatattgcagtcacatctcggcagcgacctgccctcaggtggcattttcaagtcatggagaaggcggaggtgagtcctggcatgggccagcttctccgtgacttcctgcagggcccggtgggtctccccactcacagactcgcccccaggccctggggctccagggcctctggctgcctctggctccttctgggccgaggccaccgggtgagccaggcgctggcagcacac

SEQ ID NO: 645381 - DNA, 538 bp, Homo sapiens
atgttgcacaccctaccttcatctcctccctgagctccagcctgatggtgtcctcctcccagtgctgcatctttggcacggccccctggttctgataaaaggtgatggattttcctgcgggaggacagggctcagacgctggggcccctctgatggccctgtagctccccctgccgtgccctggcctcccactcactgatggcatctctcttgccagtattgaatgaagcgaagttcttgttttttcagcagctcactcaggtctgccttctccttcaggtggtccataaagctgctctggagccaaaatattgcagtcacatctyggcagcgacctgccctcaggtggcattttcaagtcatggagaaggcggaggtgagtcctggcatgggccagcttctccgtgacttcctgcagggcccggtgggtctccccactcacagactcgcccccaggccctggggctccagggcctctggctgcctctggctccttctgggccgaggccaccgggtgagccaggcgctggcagcacac

SEQ ID NO: 645382 - DNA, 576 bp, Homo sapiens
agaagtctaggacctgatgacttcactgcygaattctactaaacatttaaagaagaactaatattaactacactaaaactcttcaacaaaaattgaagaggaggggatacttccaaactcattggacaaggccagcattatcctgaaactaaaccagacaaggacacgacaaaaaagaaaattacaggtcaaagtcgctgatgaacatagatgcaaaaatcctcagtaagaaaccagccaactgaatccaacaacatgtaaaagagatcattcaccatgatcaaataagattcatcccagagatgcaaggctggtttaacatacataaatcaataacatgatacatcacactcagagaaccaaaaagaaaaaccatatgatcatttcaatagatactgaaaaaagcattcaataaagttcaacattcttttataataaaaacactcaaaacactgggtatagaaagaacatacctcaaaataataaaaactacatatgacaaactcacagcaaacattgtactgattggggaaaaattgaaatcctttcctctaatatctgggacaagacaatgat

SEQ ID NO: 645383 - DNA, 576 bp, Homo sapiens
agaagtctaggacctgatgacttcactgccgaattctactaaacatttaaagaagaactaatattaactacactaaaactcttcaacaaaaattgaagaggaggggatacttccaaactcattggacaaggccagcattatcctgaaactaaaccagacaaggacacgacaaaaaagaaaattacaggtcaaagtcgctgatgaacatagatgcaaaaatcctcartaagaaaccagccaactgaatccaacaacatgtaaaagagatcattcaccatgatcaaataagattcatcccagagatgcaaggctggtttaacatacataaatcaataacatgatacatcacactcagagaaccaaaaagaaaaaccatatgatcatttcaatagatactgaaaaaagcattcaataaagttcaacattcttttataataaaaacactcaaaacactgggtatagaaagaacatacctcaaaataataaaaactacatatgacaaactcacagcaaacattgtactgattggggaaaaattgaaatcctttcctctaatatctgggacaagacaatgat

SEQ ID NO: 645384 - DNA, 585 bp, Homo sapiens
atctgctctcatcagagttaattattcagttgccttgttttccaagtaggtgtctggtaaaatttagcagaatcttaattaaaacacattttcaaactccttggatgctcatatcatctaaaggaatcaagacaatttccaccataaacatcaagcttcagttgagctatcaaagggaagaaggaattcaaccaatataagttgttaaatattaactattgggatgcctggagcatgcagataagaaaaacctaccttgagaaacaacctattttccccaaattaccaaacagtcacagcacacagtcaaataayaagaatactcatacatctgatttgctttcactatgcagtagagaaacaggaatgtagcatacaaacttggaacatcaaaaagacaatgtaagtgtatgtatttacccttgaattatttatttaatcattaaaatatgacatgtatatacatttcaacttcaaaatttggaataaattttcaaaaaatgaaaatatttgcccaaatgaccactactttacaatcagctgctaatgtatggaaataccatttctaggtaaatccttaatatc

SEQ ID NO: 645385 - DNA, 532 bp, Homo sapiens
ccctattgacactattgcataagatagagaaagaggaaatcagcagggcacagtggcttatgactgttatcccagcactttgggaggccgaggcaggcagatcacgaggtcaagagagcaagaccatcctggcaaacatggtgaaacccccgtctctactaaaattmcaaaaaaaaaaaaaaaaaaaaaaaattgctgggcttggtgatgcacacctgtagtcccagctgctcaggaggctgaagcaggagaatcactatgacaaacccacagtcaacattatgctgaacaggagaaagttgacatcattgcccctaagaactggagcaagaaaaggacatcgagtttcagcacttttattcaacatattactggaagccctagccagagcaatcagacaagagaatgaaataaagggcatccaaagaggtaaagaggaactcaaaatgtcactgtttgctgttgatatgattgtatacctagaaaaccataaagactcatccaaaaagctcctagaactgataaatgaatt

SEQ ID NO: 645386 - DNA, 532 bp, Homo sapiens
ccctattgacactattgcataagatagagaaagaggaaatcagcagggcacagtggcttatgactgttatcccagcactttgggaggccgaggcaggcagatcacgaggtcaagagagcaagaccatcctggcaaacatggtgaaacccccgtctctactaaaattacaaaaaaaaaaaaaaaaaaaaaaaattgctgggcttggtgatgcacacctgtagtcccagctgctcaggaggctgaagcaggagaatcactatgacaaacccacagtcaacattatgctgaacaggagaaagttgacatcattgcccctaagaactggagcaagaaaaggacatcgagtttcagcacttttattcaacatattactggaagcccyagccagagcaatcagacaagagaatgaaataaagggcatccaaagaggtaaagaggaactcaaaatgtcactgtttgctgttgatatgattgtatacctagaaaaccataaagactcatccaaaaagctcctagaactgataaatgaatt

SEQ ID NO: 645387 - DNA, 541 bp, Homo sapiens
aacccacagtcaacattatgctgaacaggagaaagttgacatcattgcccctaagaactggagcaagaaaaggacatcgagtttcagcacttttattcaacatattactggaagccctagccagagcaatcagacaagagaatgaaataaagggcatccaaagaggtaaagaggaactcaaaatgtcactgtttgctgttgatatgattgtatacctagaaaaccataaagactcatccaaaaagctcctagaactgataaatgaattcagcaaagtttcaggatacaaaattaatgtacacaaatcagtagctctgctaaacaccaacagctacacagctgataattaaatcaagaaccccacctttttttacaataggtgtaataaaataaaataaaataaaatacttaggaatatacctaaccaaggaggtaaaagtcatttataaggaaaactacaaaacactgctgaaagaaattayagatggcacaaacaaataggccataaaatggccataaaaatggccatactgccaaaaac

SEQ ID NO: 645388 - DNA, 563 bp, Homo sapiens
aatccctgcatttgtaaataatttgcttgctacagtgctccaattaaaaaaaaagtcaaaaagaaacttgctattattagcaagttgtttgtttatttgcaaatggatgccgaattagagaattaagccagctgaatacagtgtktatatctcactgttattactaatacagatttgaaatacacatatatttatcatgacactaaattaatatgtttatgttgctgagtagctaattgctgacatgaaaatcccagtggttcaaaagaacatagtttggaagtttagttagttttgcaaaagaaggactgagagaagggggttgttctgcattctggtcctcactctgctgtaactgactaggtgaccttgggcttcttcattcctatttctaaaaataattagatcattttaagtcccttttcagctttgtttatgcaactcatatctctgcaaacataagtgtttactatcagtatattgtggtaggctaatatgattccttccctcaataagatgactttcctctgtggattttgtagatttggcacctttctgtgaca

SEQ ID NO: 645389 - DNA, 649 bp, Homo sapiens
agacttttatggtcttatgtctattgggtttttgcagttttccattgaccagaactattgagtacagactattgactatataattaaaaaattcccccattaaatcccttgagttcctttgtactttttgctcccattgagtagcagaaatcatatttcttcctggtaattggaataagacacctcagatacaagagcgaccctcttctctgccacgaggaacccaaaatgrctagagtgttcagtacatcagaacaatgactgcttaatgggaaaattattcattctttttactctaggtccttccaaaccactgaacccaaaattgcagagatagagaacaaatgtttcccaagtagagtgttaaatataatcatgactttggctcacttttttgatccaggagctatgtattctagctaagaaagaaattacctaagacagctgtttgcttatggtatcaaccacattttatcagacagcaactcagcttcacaagatatttcccaccagaaacataactgaagctttcagcaggccctttcacccttgaccaagccaagtgcttctcagcaatgaggcacatgacaagaccatgggtgtgtgcctgtgtttctgcacttactttgtggtaaaatgtgcccccccg

SEQ ID NO: 645390 - DNA, 531 bp, Homo sapiens
gtaatttgcaaatgttttctcccattctgtacatcatctcttcaccttgttgattgtttcatttgctatggagaaggtttttaactttatgtgatcccatttgtccatttttgctttgtttgcctgtgcttgcggggtattgttcaagaaatttttgcccagactgatgtcctggggagttttcctaatgttttcttgtagtagtttcatagtttgagacaatatgtagttttttaaaaatcaccttatcctctttcctccctcctcccttctgagtctccaatatccactataccactctgtatccctttgtgtacccatagcttagctcccacttataagtgagaacacatgatatttggtttttcactccygaattactttgaataatggtctcaagttccatccaagttgctgcagaagacattatttcattcttttttgtggctgggtagtattccctggtgcgaatatacctaattttctttatccactcttcagttgatggacacttaggttggtttcatatct

SEQ ID NO: 645391 - DNA, 531 bp, Homo sapiens
gtaatttgcaaatgttttctcccattctgtacatcatctcttcaccttgttgattgtttcatttgctatggagaaggtttttaactttatgtgatcccatttgtccatttttgctttgtttgcctgtgcttgcggggtattgttcaagaaatttttgcccagactgatgtcctggggagttttcctaatgttttcttgtagtagtttcatagtttgagacaatatgtagttttttaaaaatcaccttatcctctttcctccctcctcccttctgagtctccaatatccactataccactctgtatccctttgtgtacccatagcttagctcccacttataagtgagaacacatgatatttggtttttcactcccgaattactttgartaatggtctcaagttccatccaagttgctgcagaagacattatttcattcttttttgtggctgggtagtattccctggtgcgaatatacctaattttctttatccactcttcagttgatggacacttaggttggtttcatatct

SEQ ID NO: 645392 - DNA, 531 bp, Homo sapiens
gtaatttgcaaatgttttctcccattctgtacatcatctcttcaccttgttgattgtttcatttgctatggagaaggtttttaactttatgtgatcccatttgtccatttttgctttgtttgcctgtgcttgcggggtattgttcaagaaatttttgcccagactgatgtcctggggagttttcctaatgttttcttgtagtagtttcatagtttgagacaatatgtagttttttaaaaatcaccttatcctctttcctccctcctcccttctgagtctccaatatccactataccactctgtatccctttgtgtacccatagcttagctcccacttataagtgagaacacatgatatttggtttttcactcccgaattactttgaataatggtctcaagttccatccaagttgctgcagaagacattatttcattcttttttgtggctgggtagtattccctggtgygaatatacctaattttctttatccactcttcagttgatggacacttaggttggtttcatatct

SEQ ID NO: 645393 - DNA, 600 bp, Homo sapiens
atttttcaaaacatggtacgtttgacggagataaaaaataaaagacattcttaatgattaaaagaacagaaatattttataattaagatatcagatttttatttatattttatttatatattatttatttatattttatttattttttatattttaaaattttaatattataatattaaatttataaaattaaaattataatataaaaatataatattttataatatatatttatatatattattttaaataayacaaaatatcatttatatattttttatttataaattattttataatttaaaatatcagagttctgctggggttttgccacatctcccatagaaagacagcacctacatttccctccagcatacattcctacgaaaaatgctgttttgttgggaagagagtaagccttctaaaatgtaaatgaagataaatctgtgcctatttatagcaaacagtaagctgatggcatgtaattaattgtacacagtaatgaggagatattttttgcagctcaagaacattctaagccagtcgttcccacagtcaggggagatcatatcacacaatcccatctggcacatacaaaat

SEQ ID NO: 645394 - DNA, 607 bp, Homo sapiens
gcaacagccgaaagaagactaagtaaaactatgactcaggctgggcagggtggcccacacctgtaatcccagcmctttgggaggccaaggcaggtggatcaccagaggtcaggagttcgagactagcctggccaaggtggtgaaaccccatctctactaaaatacaaaaacttgctgagtgtggtggcaggtgcctgtaatcccagctactccagagactgaggcaggagaatctcttgaacccgggaagtggaggttgcagtgagctgagatcattccattgcactccagcctgggcaacaagagtgaaactctgtctcaaaataataataataataataataaactgactcaaaaaactatctgggtctcctactaaatatgattacacacaatgttgagtgttcccaatatccttaaggcttcagaaagttctccatgctttaatattgtcatcagatgtggtcaactgagcttcacattcccaatccatttccaattctgtttagaataacaatcacggtcctataaaaatgacatttgtttctctgagtgcagtcctcatcctttagcagtcctcatcctttagcagtctccatgccccaca

SEQ ID NO: 645395 - DNA, 596 bp, Homo sapiens
aacctctacgatgtgggtgagscttatccaatcagttgaagccttaagagaaagcagactgaggttcccccaaagaaaaggagttctgtctccagactgccttccaactcaaactgcaacatcaattcttccttaggtctctagcctcccgaccttctctgcagattttggacttgctagctttcacaccagcatgagtcaacttcttaaaataattctctctcatctgttttttatctctctttttatctatctctttgtgtgtgtgtgtgtgtgtgtgtgtgtgtgtgtgtgtgtgtgtgtgatgtatatatccacaaaactaaacagaatttccactaagatcagtggagcatttgagtatcaagacttagctctgctagaataggacactgcagatgataatgtttctaaccaagtcatgaaacttttcttcctctctaatgatattatatatatatgcacatgatgtatataactatataaaaattataacattatatatagttgtattaatccatttatacactactataaagaaatacctgagactgggtaatttataaaggaaagaggtttattaattgactcacagt

SEQ ID NO: 645396 - DNA, 518 bp, Homo sapiens
gcaggggacgcagagtgatggagcatgcaacccttgtagacagaccattctagggtctttatttagatgcatggaagccattggaagctttgagmagagggggccatgacttagtacaggtcaaagagtcactctggctgctgcactgaggacagacattgggaggaggagcccctggggagctgcttgtggggaatcacagtaaaccagcaggaagttcacagtgaaaacggtgtggggtgaagaatggtcagattctggattcactttcaagatggagccaaagggacttgctggttaaattgaaagtagaatgtgagagaaagacaagcatcaggaacgtcttccatgctttttgactgagctacacaaatggggtctgaagggctgttgttgtgggaaggttgagggcaaagctagtgggaagaaaaccaggagaggatgaggcaacagaagtccaatgaaggtggggcttcaagggagagttgtgaactcttcccagtgcagctgatggggta

SEQ ID NO: 645397 - DNA, 518 bp, Homo sapiens
gcaggggacgcagagtgatggagcatgcaacccttgtagacagaccattctagggtctttatttagatgcatggaagccattggaagctttgagaagagggggccatgacttagtacaggtcaaagagtcactctggctgctgcactgaggacagacaktgggaggaggagcccctggggagctgcttgtggggaatcacagtaaaccagcaggaagttcacagtgaaaacggtgtggggtgaagaatggtcagattctggattcactttcaagatggagccaaagggacttgctggttaaattgaaagtagaatgtgagagaaagacaagcatcaggaacgtcttccatgctttttgactgagctacacaaatggggtctgaagggctgttgttgtgggaaggttgagggcaaagctagtgggaagaaaaccaggagaggatgaggcaacagaagtccaatgaaggtggggcttcaagggagagttgtgaactcttcccagtgcagctgatggggta

SEQ ID NO: 645398 - DNA, 518 bp, Homo sapiens
gcaggggacgcagagtgatggagcatgcaacccttgtagacagaccattctagggtctttatttagatgcatggaagccattggaagctttgagaagagggggccatgacttagtacaggtcaaagagtcactctggctgctgcactgaggacagacattgggaggaggagcccctggggagctgcttgtggggaatcacagtaaaccagcaggaagttcacagtgaaaacggtgtggggtgaagaatggtcagattctggattcactttcaagatggagccaaagggacttgctggttaaattgaaagtagaatgtgagagaaagacaagcrtcaggaacgtcttccatgctttttgactgagctacacaaatggggtctgaagggctgttgttgtgggaaggttgagggcaaagctagtgggaagaaaaccaggagaggatgaggcaacagaagtccaatgaaggtggggcttcaagggagagttgtgaactcttcccagtgcagctgatggggta

SEQ ID NO: 645399 - DNA, 582 bp, Homo sapiens
gatggagaaaagtacagaaatagcaagcatcacctgtgtgtgaattagaaccgaatctaggtcatttttcaactgtaaataccaaatacttctgggaaagaagcatattaaaccattctgtttccactcataaattttcacaggtaatttagacagttagaagaacaaagaaagaaaaccaagagtgggaatgtcatttaaaatgaaagtgaagagcaacagacatattccccaccatcacatcccagtgattcatgattctaagcatctrtgaattttttccaaactcagaatttaaagcaacatttcaggtgttgaagacaaccttcgtaaaaataatttgacctcaggagagttattatctctatgttggatgaacgaaaattatagaaaactgaagcttgccacatgggatacagagcaagaattagatttcatcttaaggggaactggcttcaacttgataaatcagctaatcaaaggtcttggttaaattttagtttccttatcaactgaaagcaaggcttttcagagcacaccatctgtgtaaacacagcagttacaggtgaggggagacagctt

SEQ ID NO: 645400 - DNA, 550 bp, Homo sapiens
taatggaatggaattaaatggaaatgaatcaaattgaatagcacggaattgaattgaatggaatsgaatgcaatggaatctaatgaaacggaaaggaatggaatggaatgggctggaatggaaaggaatcgaaacgaatggaatggaatcgaactgaagagactggaatggaatgcactggaatggaagggagtgtaatggaaggttctcgaaagaaatggaatcgaatggaatggaattgaattgaacggaatagagtcgaatggaattgaatggaatggaatggactagagtgaaatggaatcgaaccacaaggaatggacaggaatagaatggtctcgaattgaatggaatcgtatggaatggcatcaaacggaatggaatggacagccacggaatggaatgcactcgaatgcaatggagtcgaaactaatggactggaatagaatggactcgactggtacggactccaatggaatggaatcgaatggaagggaatcgaacggaatggactcgaagggaaaagactgcaatggaaaggtctcgaatg

SEQ ID NO: 645401 - DNA, 550 bp, Homo sapiens
taatggaatggaattaaatggaaatgaatcaaattgaatagcacggaattgaattgaatggaatcgaatgcaatggaatctaatgaaacggaaaggaatggaatggaatgggctggaatggaaaggaatcgaaacgaatggaatggaatcgaactgaagagactggaatggaatgcactggaatggaagggagtgtaatggaaggttctcgaaagaaatggaatcgaatggaatggaattgaattgaacggaatagagtcgaatggaattgaatggaatggaatggactagagtgaaatggaatcgaaccacaaggaatggacagkaatagaatggtctcgaattgaatggaatcgtatggaatggcatcaaacggaatggaatggacagccacggaatggaatgcactcgaatgcaatggagtcgaaactaatggactggaatagaatggactcgactggtacggactccaatggaatggaatcgaatggaagggaatcgaacggaatggactcgaagggaaaagactgcaatggaaaggtctcgaatg

SEQ ID NO: 645402 - DNA, 533 bp, Homo sapiens
gaaactaatggactggaatagaatggactcgactggtacggactccaatggaatggaatcgaatggaagggaatcgaacggaatggactcgaagggaaaagactgcaatggaaaggtctcgaatggaatggaaattaatggaatggaatggaatcgaatgaaatggagtcaaaaggaatggaatcgaatggsaagaaatcgaatgtaatggaatcgcaaggaattgatgtgaacggaacggaatggaatggaatccaaaggaatggaatagaatggaatggaatcgaatggaaaggactcgaatggaaatcactcgaatagaatgcaatttaataaaataggatcaaatgtaatggaatggaatggaaaggaatcgaaacgaaaggaatggagacagatggaatggaatggaacagagagcaatggtatagaatggaatggaatcatctggaatggaattgaatggaatggaataatatgaaatggaatggaatggaatggaatgcccttgaattaaatggactggaatggaa

SEQ ID NO: 645403 - DNA, 595 bp, Homo sapiens
aagcttgaatactgacaaaacttattttgtttgtttctcacttctcagggatcactaatcttggctgaagtccagtgacttgaaagccattgcttctcattacctgacatttttaatttttttcagaagggaggtaaatctgatccctataactacatcttgatcatcaaaatcttgaagtagaactactatccacagctttttgacctttgcaatttccaraatcagaaaatattgaaaacaataacattttcctcacctcctcaacattcaactgtttcatgttctaacacattttgaatcataagttacatttctgaaagacgtttagtcttgataggatgaataaaactgattgctcagcctttaacttttccaaatacattgttatcatttttaattattattgatgctgttgaaatggcaccactatccatctccttatgcttgtcaaaaaactgggagccattgacattcctgtccttcatcatccttattcatttattaccacgtttagtcaatttatgtcataaatttttctgaaatattttgactcctctcatttttcacaaccacattcggccatcatcttcat

SEQ ID NO: 645404 - DNA, 595 bp, Homo sapiens
aagcttgaatactgacaaaacttattttgtttgtttctcacttctcagggatcactaatcttggctgaagtccagtgacttgaaagccattgcttctcattacctgacatttttaatttttttcagaagggaggtaaatctgatccctataactacatcttgatcatcaaaatcttgaagtagaactactatccacagctttttgacctttgcaatttccagaatcagaaaatattgaaaacaataacattttcctcacctcctcaacattcaactgtttcatgttctaacacattttgaatcataagttacatttctgaaagacgtttagtcttgataggatgaataaaactgattgctcagcctttaacttttccaaatacattgttatcatttttaattattattgatgctgttgaaatggcaccactatccatctccttatgcttgtcaaaaaactgggagccattgacattcctgtccttcatcatccttattcatttattaccaygtttagtcaatttatgtcataaatttttctgaaatattttgactcctctcatttttcacaaccacattcggccatcatcttcat

SEQ ID NO: 645405 - DNA, 593 bp, Homo sapiens
gaattcaggaagaagttacaggaaagcatattttatgtgaaagtattttctaacaactggtgttgactaacaaagaacattaccaaaattatttgagtcagaagaattgtatactggtgtgcgggttgaagtctgtttataagaaggctttacattgaagaggttaagagtatgtgttagagtcagacctgggctcaaatgtgaaacttactattagctttctcgtcttgggcaatttactactctctctaagcctgagttcaatyatctgtatagcaggacaacaatgtctgcttgaggaattatgtggatggttaaataagataagatagaaagagagtttagagcagtttctggctgtgaaaagatttgttattctactgtttttagcatagatacactaatgagtatacataaattaaggaattatcttgatttcaataactacagctctcattattcataatctatagctacatatttcttatttgttaagtataatattaaagaaataaactttagattatccactttaaaatcctggaaagagattgattccaaagaatgaaattcatagaaaactaaaatattca

SEQ ID NO: 645406 - DNA, 538 bp, Homo sapiens
gaattccagctgtctccaggatcctcaggattgtaaaggatttctgcctattaagatccaaatgttaatggaaagaggggacagagagctgggctttaggatccatgccagttctaggatccttcaattcttggttgatagtgtctgagatcacttatgtgggccttactctgttgtggagttcaggggcttcattgtcaacctgttgatggtgattttgtagagatgttaagaggagtgggtcatttcattacgaaatgattgggaaaaaccagatgggatgtccaagcagataaaacgggcgcatcctcacyatagtttactccctgaccttcaatcagtaagactgatgatcattactaatttaatgcctctgtaaaaagctgccctgtaccttatcatagagcaataaatatgtattacacaacatgtttttccaaaaagcttaacagttatgaagctctttaggttgatgaactccactagtctctaggcaggcttggatttctagtaaatattcagtcatgatgttaataaa

SEQ ID NO: 645407 - DNA, 644 bp, Homo sapiens
ttgggcaccattatcgtcaatgtaccaatactgactatagatatagatggcatttgtttcctgttatctaacaacaacagtagagtatagaagaagaaatctcaatgctcatgcccatcatattggtccaattgtttcgaaactttgcaggatgcaaacatcaaggaaggagagcagagacagagcagatctcattcctgagtgtgtatgtagaagtgagtggatcatggaaggcttcgtgtaatatgtagaattttaactgatgactacaatttacccagcattattattatagtagtaccatccttaaattctgccaatcacctcaatttttgtattggggaagcagagataaataggatctggacagatggaaatgagagaagagataatttacagtggcactgttaataaaagcatagagttttttagggaatggtgaataattcattgatgagttttattccttgtgtcaccccatgtatttggtsatggtggcaagatccctgttaaatagaaggaaagatatggtatttttcagacaaacaaatactgagagaatttgccactaccaagacagcactacaagaactgctaaaaggagctctaaatcaggaaataaaacatcaaaatacaacctcctt

SEQ ID NO: 645408 - DNA, 490 bp, Homo sapiens
gattcttggactggacttgacacttccctaaactctcatgaaatgctttaakttggcttagggaagttctgaatagccatggagtcacataaccatgcaatcaggagtctggaaatggtgtatctcatatttccagatacacatggtatgtgtttatggagaatagttagcagttattaaaaacatacacttccaacaataatcatattgatacatttaaaagattaaataatggcatctcacctgtaacaaccttagtcgttgttcattgttgaatctttccactgcagcccagaaccaccgaattacaatatgattgtcatggtatcctatcaaaccaatcataaaagcccatgttactttgactcttctatattaagccaccaagatacgtgacacgaagagtccccagacataaatcatcctcttgaattctttacaagttgtctataattttaagactaaggaataacactgtatatatgatcat

SEQ ID NO: 645409 - DNA, 583 bp, Homo sapiens
atttaaggtgaatgtgtctgctgtcaggtaggcaggtagagtagaagatggggatctgagaagaatgggaggagtttggaacaagaaagtgagggtactagagatagtcaaagaattgtctggcaagattcctacttcatttttctgacattttgtttccctttgatggtaacataaataactcaaatatatgaactatttcaaatatatattttcaaagttaaaaaattttagctgggcgcagtggctcacatctgtaatcccagcagtttgggaggccgagtcgggcagatcacttgaggccaggagtccgatactagcctagccaacatagcgaaatcccatctctactaaaaatacagaaattagccaagggtggtggcacgtgcttgtaatcccagctactcgggaggctgaggcaggagaatcgcttgaacttggtaggtggaggttgcagtgagccgagatcacactactgaactccagcctgggtaacagagcaagactctgtctsaaaaaaaaaaaaaaaaaaaacaaacctttttgcagagcacatgtactattttatctcaccaactatcaa

SEQ ID NO: 645410 - DNA, 519 bp, Homo sapiens
tttaaaacaaatttaaaaaacaagacttaattataaaattggaattgatcaccctgaaaagcagtgaaggtccaatggccactaaattcacaagagtgtatacgtctcatcgaagattgttatgggggtccatctgacccatttccaaccctgaatgactatgatgttatgattcaagacttcctttttatattgaaagatgccttattggtttgtatggatttgaggacataggatgtacaatagcatttgagtttatttgtagcaagctttttatccccgctttgcatagaatactggtgcagaaaatacaatttacatccttttcaattgtttcagattgagcatctatcacttaagtaaggtttgcattcttggttaccatctctttactaatttatctattattttggattcaatgtaaaatgggtaggtacacaaatgagaagcagacagaatacctgatcctcaggaatttagattataaygggggtgacagacacataaaacccagcacct

SEQ ID NO: 645411 - DNA, 608 bp, Homo sapiens
ccaccacttcatgcactcctgtgaaaactcaagtaaaatatgggattacaacagtttcaaagaataatagaagaaatgtaataagctaaagatgggtagtatttgaataaattggacgggtatatcttggaaggaagtcatgaaggcaaaaagactatcataaataaagtgtgaataaacakattttgttgaagaagaaggattaggtaagggagataaaagataaagagatagagacaaaaagagataaagagataaggaccaagatataaagctagaaatacaggtggaactagaccatcatacaggcacattttcttatggactgaatgtttacatccacctcccaaatttttatgttgaagccctaacacctaagagatgatatctgagatggggcatttggaatgtaattagggttagatgagatcatgagagggaagcttcatgatgggattagtgcccttataaggagagacactaaagaactcttccatgcaagtatacagtgagaagccagccttctacaagccaggacgagccctcaccaggaactgaattggcctaaaccatgatcttggacttcccagctaccggactgtgagaaa

SEQ ID NO: 645412 - DNA, 616 bp, Homo sapiens
gaatgtgtttgtactctactcactctctagagaacgtgagatggaagtaaccaatggtgctaggcccatgaattaccaataaagcacaagatctgtttmgctatttgggaactaagggtagacctagctatctgaaagcctctgctaagttgtggtttgaatatttgtaagataggacttctgtttatttctagaactagacatcaaggcaatcaatagtgattgaaagcagctgcttcaggagaaatgtcaaactctttactctttaaaaatgttaatgggaaattttaaaatctgtgaactcttttcaacacctctacttttatgaaatccaaaattactagtataaaaaaatgcaatgcaatttagtcaaatccacagacacttcctggcacagctgccatttgcaccagaaaatgaagcaaaattggcaggatacacaactagctatttgcagaggcacttgaaatccacagcctatgtttgtacagattcctgcgacatggtgctcagtggcaaaccatggtcatctgagaacctggcttaggtactcatcaccctataaaccttaaatttatttcacacctgcttttgaaacctggaaataatgccaagt

SEQ ID NO: 645413 - DNA, 460 bp, Homo sapiens
ttattgtgatttttgtctaactagtaagcacttttgagatacactgtgggacacgcattttaaaaaataccctgctctcctttgagttagcaaaaaaaaaaaggaaaactatttatagctataaaatatgttaatatcagaaataactgctttaattgatcaaataatgrcacgcagcttgtcttacatgaatgttaagcattttctaagtgtttctttcaatacaagaagagactcttaatgcaatttcatttctttgcttttcacatttatcacatgctctatcctgacttaaaagtgcagcaattatttgtatacatttttccttacccagttgtgacacttctccactcaaacctaacatcccacctagttatgaacctctaaaatgatagaagagtagtagttatgattcaaaagcagtatttatataatttctgataaaaaagaaaaccttgga

SEQ ID NO: 645414 - DNA, 622 bp, Homo sapiens
atttttaaaaatactgaaaatgtaaagggtccatataaagagttgtgttaagtacatacttcctattttaataattcacttgctgtgttcttaaaatctctctgagagaagcagatattttactcatgtattttggcaagagattcaaaagcaaaagtagcagggctgtaaaatttcataaagtttgtgggatttttaaaagctaaattattcaatattttgtattgttattgcaatcatatattgcccggaatatatatacagcaacccagcaacaatgattgcaacgaaagtaaggtaaacaggtctacaaacatttgatttccttattagatagatgaagttttcatagaggaagtgcaaattcagatcaggttacataagcttaacaattatttaaacygtatataaaattaaatctaaccctcaccactacaaatctgtaaggaatcactgtcaggaatctacaggacttggctcttatttacattcgacgcacacttagaaagttcacaaatgatgagatgcaggccaaggggattcctcaaagggctccacccaaaaggaaaagaaagagagctaaacagagaattaccacttatgtatttgtgggtaatcagct

SEQ ID NO: 645415 - DNA, 583 bp, Homo sapiens
ggcagccgtggaagctgcttgtggtgtgcctggtccagccacaacctcacagagagccagtgcccatgcctgcacccggagctgcctaccctgctgcagcagccagtgtgcctgactgggcatggtggctggactccaggctcactcacttacacaccccttattgctccatgcctggctygcccttggcaggcatgggatccaggctggcagcatgagccaagcacagcctgctaggccaagtgggtggaatgagcccagcaggcctgagcaaaacttgggcaaaggcatctccagctacagaggtttccagccagaaaagtgacatcccgaagagcccataacatttggttctacaatagtgatgttatctgcaagaataattggggaagttgcaagtcttatgacctccagaataatgaactggtaattattgaaaattcaagcccctctcatcctcctaacttgatggattttcattagttttacaagaacagtttgggagaagggttattatcatttaaactataaatcaaaaaaaataaaaataaaaaaataaactataaatcaaattctcacaaag

SEQ ID NO: 645416 - DNA, 583 bp, Homo sapiens
ggcagccgtggaagctgcttgtggtgtgcctggtccagccacaacctcacagagagccagtgcccatgcctgcacccggagctgcctaccctgctgcagcagccagtgtgcctgactgggcatggtggctggactccaggctcactcacttacacaccccttattgctccatgcctggcttgcccttggcaggcatgggatccaggctggcagcatgagccaagcacagcctgctaggccaagtgggtggaatgagcccagcaggcctgagcaaaacttgggcaaaggcatctccagctacagaggtttccagccagaaaagtgacatcccgaagagcccataacatttggttctacaatagtgatgttatctgcaagaataattggggaagttgcaagtcttatgacctccrgaataatgaactggtaattattgaaaattcaagcccctctcatcctcctaacttgatggattttcattagttttacaagaacagtttgggagaagggttattatcatttaaactataaatcaaaaaaaataaaaataaaaaaataaactataaatcaaattctcacaaag

SEQ ID NO: 645417 - DNA, 592 bp, Homo sapiens
gcatcaagtgatttagcttctcaaaatttcttcatggttaattgtaatttactcattcaatatgtaattataaagagtatattcagtgagaaatatcttttctgaagatacaaatgttaaaagataagtatggaaactcttacacaaataataaacgttcagaaatttggccaggtgcggtggctcacgcctgtaatcccagcacttttagaggccgaggctgatggatcatctgaggtcgggagtttgagaccagcctgaccaacatggagaaaacccgtctcgactaaaaatacaaaattagccaggtgtggtggcacctgcctgtaatcccagctactcaggaggctgaggcaggagaatcacttgaaaccgggaggcggacgttgttgtgagctgagatcgtgccattgcactccagcctgggcaacaagagygaaactacaactcaaacaaaacaaaacaaaaataaaacttccagagatttacatataattatatctatgtaatcataggtatcatatacatattacaacttgcaattttaaaatgttgagaaaatgtacaatattgtggaataattaaatgagca

SEQ ID NO: 645418 - DNA, 593 bp, Homo sapiens
aagccatatctataatttactctgctttagaaggatgccaccaatctcaccaatcttatcaactctcctcaacttttcctctggatttttggttactggtattcctatgtcaaggtcaacttttataatattagtatttagttgttaaccacaattctaataattggttttactcctacatttagttgatatactagtgttaaacaaaatttatgaggaccatttttttggactagcctcctgtactagatcccagcaggccagaccaaaccagaatgaagccactcatactaggtgccatgtaatcaaactgaacgttgaagtgggccagttttcccaaataatgcaaaacaaaatgcagatctcggtcmacttaagtcagcgtaataaggaaggcccttgtatttaaccctataaggaaagtaactttgaaatgatcaatctgtttcttattccctgtttctgcttttttcagcccttttctgtctataaaaccaagcctctgctcagcgcatcaaatcactaattatattttatagaatgtattgcccaaatctagaatttccaatagaagccaattaaatctttaaact

SEQ ID NO: 645419 - DNA, 593 bp, Homo sapiens
aagccatatctataatttactctgctttagaaggatgccaccaatctcaccaatcttatcaactctcctcaacttttcctctggatttttggttactggtattcctatgtcaaggtcaacttttataatattagtatttagttgttaaccacaattctaataattggttttactcctacatttagttgatatactagtgttaaacaaaatttatgaggaccatttttttggactagcctcctgtactagatcccagcaggccagaccaaaccagaatgaagccactcatactaggtgccatgtaatcaaactgaacgttgaagtgggccagttttcccaaataatgcaaaacaaaatgcagatctcggtccacttaagtcagcgtaataaggaaggcccttgtrtttaaccctataaggaaagtaactttgaaatgatcaatctgtttcttattccctgtttctgcttttttcagcccttttctgtctataaaaccaagcctctgctcagcgcatcaaatcactaattatattttatagaatgtattgcccaaatctagaatttccaatagaagccaattaaatctttaaact

SEQ ID NO: 645420 - DNA, 627 bp, Homo sapiens
gtcatgtattttataaactttgagtatattttttacaatcttgtagagaatatttccactttaacagctactaattataatgatatctgtttatatacttgtttttctcacttgccagggactaagcaagaactgcatctttttcatatttatgtattcatggcacgttgcctgttagcataggacacatataaaacttactgagtaaatgctcattgaaatgtgtttatataagaaagtatgtgaaaatgtataatacatatgcacatctacatatgtgtatgtatctgtgtgtctttgctaatatttatttatttattttgagayggaatctcgctcttgacatccaggccagagtgcagtggcgcgatctcagctcattgatctgcctccagagttcaagtgattctcctgcctcagccttctgagtagctgtgattacaggcgtctgccaccacacctggctaagttttgtatttttagtagagacagggtttcaccatgttggccaggctggtcttgaactcctgacctcaggtgatctgcctgtcttggccttccaaaatgctgggattacaggtatgagccactgcgccagcctgtctttgctgacatttaaactaccat

SEQ ID NO: 645421 - DNA, 637 bp, Homo sapiens
ataatttaaggtaacatatttagtgagtcacattatttcctggctcttaagtaaatgtatttgtaacttggatgccaatgaattgacttattctaaaacttctcacactagtttcctagcattgaaaatactagaacagtttctcctcctcaccattcccttcctggggctcagcctaaatctggaagatgatctgaagtccaggcttactggaactgtttctcaggatgagcactgttgatgctgactccagaaactgggggaaagcccttctgctctcagtgctgatacaaaacctgttcatcacttttgctaacaaaggctttccaggacaatctgcagttccaattagcttttcatatctcttccctttgggcatatgctagagaaacagaattacagaatctcacacttaacracaaggcttaaacatcacttagtcctacaaagaatccaggggtcaaatccccccaagcccattcctgcccagaatgtcccatctcccagagcaacctgtgcttttgtcaggcaactccaaccctaggaaaagtttccttgcctgcaataagaactcgtccactggttcaacaaaaatgtatcgaatgccaacaatatgactcatgctagttgctctttt

SEQ ID NO: 645422 - DNA, 570 bp, Homo sapiens
tgctattactaatgttttaaactatataaactaacaactaccttttgccaaaacttagacttgagtatcttttgaaaaatcaggtaatagtgatatttccttttcaagcactatcctggttccttatattaaaactagactccatatcaggatgaccagagtttgaactctggaggcatggcccatgaatacaaatatcttttctgtcccctaccatttcttttctttttcttttcttcattgtttgttttcttgtcccctaccatttcttattgctttctaacaaaattaaaatttctaaattattatatattgtcttttattttaaaaaaggaagggggttaattcacaagcttatatatttctttgcacagcwtccccccaccccagctctcctcccaccacaaatcttctgtccttaggacatagatctttggaactaggaatgacattagagattgtttcctttctggtcctccagaaggtctgtgacttgcccaacatggctagggcaggaaccaggagggcaggaccagaattctggcctcgagtcccctgtctagagatcag

SEQ ID NO: 645423 - DNA, 581 bp, Homo sapiens
aattttagctacagtctcagttttaaccccgtcttcatccaagaaagtggttgttgaactctgcctgggctaggcttgggaccagacaccagtgaggctgtgatcttgcagacatccagcacttccctttaccccaaagcaatctaaaaatcttgctccaacaccttatctatccagtgggccatctagcatataggtaactcagccatggctgagaaagaaaataaataaacaactttgctgttagctatcatttcttacacacacacacacacacacacacacacactcacctgcacacacayacactaattcacacacaaacatagacacacatacctgtaccacactcactcatatctaccacctcctctccactcttcaacactcacatgtttccacacaggcggtgtgatgcaatggaaagatccttgactttggaattaaaccaaatggccatgtgattttgggcatattcgctaaagtctcacaggctccatatctttctgtttttttttttttctttgagataaggtcttgttatgttgcccaggctgcagtgcagtggctattcacaggca

SEQ ID NO: 645424 - DNA, 574 bp, Homo sapiens
taacctgcacaaaattgacaagtagctgaaagaattctgaaatgaaactgcagattgaaggtagcactaatacaaacaacaggcagagtatgggcagatggcagagcaaacccctctatttctagtgcgaggtctttgtcaaaccccacacgaggtaaaaacagtggcaatggaatcatctcacaagaagttggcccccaaaatagaaatcgagaagattatttaaaataygaatttatatccactgttgctactgtcaaaccttaacctaaatgtatattggccaatagtaaattcagcaagatatttagtagaaatgttattggcttctttattatacttttcaaaaatatcttttttaaaacgagtgttataatatatatattattagaacaattacatatgtgcataatctataaataagtacatatatatgcatatatatataaaattagggaatgagctttcagaatttttactgaattggttttccattacaaaattttgaagcctactgctttaggcaatgagaaattgcaataaacacacagactgcctataggtccctcgttgc

SEQ ID NO: 645425 - DNA, 574 bp, Homo sapiens
taacctgcacaaaattgacaagtagctgaaagaattctgaaatgaaactgcagattgaaggtagcactaatacaaacaacaggcagagtatgggcagatggcagagcaaacccctctatttctagtgcgaggtctttgtcaaaccccacacgaggtaaaaacagtggcaatggaatcatctcacaagaagttggcccccaaaatagaaatcgagaagattatttaaaatacgaatttatatccactgttgctactgtcaaaccttaacctaaatgtatattggccaatagtaaattcagcaagatatttagtagaaatgttattggcttctttattatacttttcaaaaatatcttttttaaaaygagtgttataatatatatattattagaacaattacatatgtgcataatctataaataagtacatatatatgcatatatatataaaattagggaatgagctttcagaatttttactgaattggttttccattacaaaattttgaagcctactgctttaggcaatgagaaattgcaataaacacacagactgcctataggtccctcgttgc

SEQ ID NO: 645426 - DNA, 598 bp, Homo sapiens
acataacccaactgtatgctaactacaagaaatgcactttacctatagaattacaacaaagagaagggaaaacataytccatgcaaagagacagactccaatacaataatagtggggggcttcaacaccctactcttaagcattagatcatctagacaaaaaaaaacagccaacaaagaaacattggatttaaactgacctttggatcaaatgggcctaacattaacacagaacattttatcaaacatttgcagaatacacattcttctttttagcacacagaacattctccaagatagaccatattttaggccaaaaaaataagcctcaacaaatttaaagtatcttttcagaccacaatgggacaatactagaacataatgctaagaggaattttgaaaactatacacacatatagaaattaaataacatgatcctgaacaacctaattaggtcaatgaagaagaaataaaaacatttattgaaacaaatgaaagtggaaatacaacatcttcaaacctgtgggatacaggaaaagcagtactaaaagggaaatttatagcaataaatgcctgctgcaaaaaagatttcaactaaa

SEQ ID NO: 645427 - DNA, 538 bp, Homo sapiens
atcacattatcattagattctcaacatacggattttgggaggattcaaacatttagatcatcgcagtagcttactatgttataaaccttacaacaaatcttcaaggtatatattgttagtaccacacttcaaatgtgaacattattctcagtgaagtcaagtaattcaacaaaatttataaatataacatcatcggcacaagtattcaaatccaggatattttctcttgctatcttaagcaacacaagcataaagaatctccagtgcttatggatgtgacctattcggaatatcatctttggaagaaatctttcatcttcccagataggctcagtctgtgatgatagtatcttacaacaatacagaaaaagttgtaagaataaaatagattttgacacaaatgtcaggtagaatggattattctttatagtttatagaataactcaaagggttataggagagaaaaaatatctgtagaaatcttatatgtttccaactawttatcagtaagaataatgtaagagcattctcatttttg

SEQ ID NO: 645428 - DNA, 540 bp, Homo sapiens
aaatgcatacagatgtgtaattgctaacacaatcaagatacaggacagtcccatcaccccaaaaggtttccttgtgctgcccctttgttgtcagccctacccactgctccctggcaaccactgatctatgtgcagtgcccacagttttgcccacatctaaatggaatcatggtctgtaggcttttgagtctggcttccttcattttagcataatatatttgagatgcatccatgttgtacrtatcagtgatttgtttctttttatagctgagtatttatgcaaagatttttgtgtgaacataacttttcatttcatttgaaaaaaaaaatacctaagagtgaggttgctgggtcatagggcaagtgcatatttaacttgatgagaaattgctgaactgttttccaaagtagctggaccatttctcatttcgaccaggaaagtatgagttcagttgttctgcattctcaccagtacttgttatttcattctttcttcttttctttccatttttaatctaatttaacttcagccattctaat

SEQ ID NO: 645429 - DNA, 613 bp, Homo sapiens
tgtaattagtttgtttaaatttaataatctctaacaaaaataaaatggggatatctcttttgaagttcaagtgaaagcagcaaagggactaggctcatttgtaatagggcacatcccctgcttgataaacccagctttctctttcactgataagatattagctttgcaaacaaaattccttgytgaatggtaagactcacaggttccctgcagtaggtagcaataaaagcaaacacttgtgtagcacttactagatgtggggaactcttccaagccctttataaataataaatataaataataaatagctcatttgctccttacaacaacactatgagacagataatcttggtatccccattttgtggattagacacctgaggcacagtgagattgagaaatttgtccaagttcatgcatttagtagggggcagaacaggcatttgaacccaagcacctggcgccagagctgctattcttaaccactaggccctcttgcctcctgtaagcagtcaaattggctgatgggaaaggaaaagtaaaagttgggataacaaggggaaaagttgagagccgctaccacatatgtataaaattaaaatattctgtaata

SEQ ID NO: 645430 - DNA, 613 bp, Homo sapiens
tgtaattagtttgtttaaatttaataatctctaacaaaaataaaatggggatatctcttttgaagttcaagtgaaagcagcaaagggactaggctcatttgtaatagggcacatcccctgcttgataaacccagctttctctttcactgataagatattagctttgcaaacaaaattccttgttgaatggtaagactcacaggttccctgcagtaggtagcaataaaagcaaacacttstgtagcacttactagatgtggggaactcttccaagccctttataaataataaatataaataataaatagctcatttgctccttacaacaacactatgagacagataatcttggtatccccattttgtggattagacacctgaggcacagtgagattgagaaatttgtccaagttcatgcatttagtagggggcagaacaggcatttgaacccaagcacctggcgccagagctgctattcttaaccactaggccctcttgcctcctgtaagcagtcaaattggctgatgggaaaggaaaagtaaaagttgggataacaaggggaaaagttgagagccgctaccacatatgtataaaattaaaatattctgtaata

SEQ ID NO: 645431 - DNA, 471 bp, Homo sapiens
tggacttctcctcttctctcttggttcctttggatgtggcacttggccacgttgctaaggggcgggggrgggggggtgggggaaatgattggttaaaccattgaattaaaggctcagaaataatgtggcccaaagagtcttaaagaacataaaagtattggaggagagttcattaaaccaataactgagccagagccttcattcatgttatatgaggaaccctccactatttagctgtttgtggacccagcaattgctgtgattatcccatcattgccagtgtccaatataatgtttgtatccagactgtgttattaactttatttttcatttattcgaccctacgtaatgttaggtcatttgtgttttgtttggggctgtgtgggttttttttggagcagtccggttttgtcataacatgcatcacatagttaagatttcatatctttgcttcatctaccccattatgga

SEQ ID NO: 645432 - DNA, 572 bp, Homo sapiens
tgtcaacagccttatagttttattaatagttctaatcaaaggataatcaaaggaaaaaaatcactaattgatatctaaatacaagttaaaagacataatacaacttaaaaaactatagttaggctgggcacggtggctcacgcctgtaatcccagcactttgggaggctgaggcaggtggatcacttgaggtcaggagttcaagaccaacctgggtgaaacctggtctctactaaaaatacaaaaattaaccaggcgtggtggcaggtgcctataatcccagctacttggaaggctgagaaaagaaaatggcttgaacccaggaggcggaagttgtggcaagcytagatcacaccactgcactccagcctaggtgacagagcaagactccatctcaaaaacaaccaccaccaccacaaaaactatagttaaaaaccaccatgtacaaggctaacactattttaaaaatcaccatataatttctagaaattgacaggatgtcagtgtcacattcatcctacagttatcggaacaagccctgttcctccctggcttgaaactgtcaagcatact

SEQ ID NO: 645433 - DNA, 572 bp, Homo sapiens
tgtcaacagccttatagttttattaatagttctaatcaaaggataatcaaaggaaaaaaatcactaattgatatctaaatacaagttaaaagacataatacaacttaaaaaactatagttaggctgggcacggtggctcacgcctgtaatcccagcactttgggaggctgaggcaggtggatcacttgaggtcaggagttcaagaccaacctgggtgaaacctggtctctactaaaaatacaaaaattaaccaggcgtggtggcaggtgcctataatcccagctacttggaaggctgagaaaagaaaatggcttgaacccaggaggcggaagttgtggcaagcctagatcacaccactgcactccagcytaggtgacagagcaagactccatctcaaaaacaaccaccaccaccacaaaaactatagttaaaaaccaccatgtacaaggctaacactattttaaaaatcaccatataatttctagaaattgacaggatgtcagtgtcacattcatcctacagttatcggaacaagccctgttcctccctggcttgaaactgtcaagcatact

SEQ ID NO: 645434 - DNA, 601 bp, Homo sapiens
caccgaatctgccagtgccttcatcttgaacttcccagcttctaaaactctgaaaaataaatgtttgctgtttataaaccacctagtttatggtattttgttatggcaacccaaatggactaagacagaagggaaagctaaaaagataaataacagcactgaatagaatgaaagacataggytgagagtatttgcaaattcaacatctgatccattgatgaagagcactattctataaaataaaaaaagccagagctttcctaaaaagggcaatcttcctgtgtaaagtttcatctttcaccttattatatgctgtgatgttgtgtttgtgtgtgtgtgtaacttttctctaagtcagaaacttgctatttatttattttttaaatattacaaaggggctgacagagtgccatgcatacagtaggccttttgtaggctgacatttaataaaatatttgttggataaaataacattggaagaaaggctttgcaaaactgttaaaaaccaaactatgtgaaagctataatctattttttctgtacaccagtcataatatttcttcaatgtaaaaagaaactgacattttaaaggatgaggcta

SEQ ID NO: 645435 - DNA, 567 bp, Homo sapiens
ccattttgtgtgtgtgccccgaagtggggattccactagtaaaagttctgttcatgtaactcatgaggcctctggygtactatctgaagaaagatctggagactcaggataactgtgtccaaatggcaggtttattcttgctccattattgtgactgtgcttagttattggcacacagtgcactttgccttaatcttggactagtgtggcattatcttctgcttgggttctctcagctgagcacaacctattgaggatgcagcagcagactattccttttgaagtcagacgtgttaagcctttgggtctcttttgctggagcacatacccagccacactgtgagagtttcatactactaagaagtgattttgtgagcagttgtgagctagttattaacagaagtgggtgaactgggtcagccccaagaatgaggcacataatttttaacagagagcacaacctctgtatcaagttttaaattatgttgttttgttgctgttatttttaaataacaaaagagttgtccacagggttagctcagagaactcatgaactaattggatgag

SEQ ID NO: 645436 - DNA, 600 bp, Homo sapiens
atttaggctacctccagtatattacacttaagagtaagggccaacagacagatttttagccacgtgcctcttctgtatttcagtgcgttygcagcatgctcctgggtgagggttgggaagcctagagaggaaggttgggaagcctagagatgaagcctaggaagctcatgcttccccaaccaggtctccttccggtgtctgccccagaagctggcctgaacatctagttttgtcccaagccttctgtgcccagatgcctgggctgttaggtgttctgctgggttccctcaggcagaggctgcagttggcaaagagggttcacctttcatagactgctcttgagaagaggggcacgtccagctcccacaccagtccatgaaacctgggactcactcttctcagtgttctgaggatgggggctccttccccacttaagctgcatctacagatctcagctagatactcctgatctgtgtgcacgaacctgggggtttgggaccagacctgcagctttgtcctttggcccctttgtcctctggtccctttgtcctttggcccccatggggccaaaatgctcccatgcctcagcatagcactaag

SEQ ID NO: 645437 - DNA, 564 bp, Homo sapiens
gtggtgtcagtgttctggattttggccattctgataggtgtgcagtggtagctcactgttgttgtaatttgcatttccctgacgacatgtgatgttgagtattttttcatgtgcctatttgccacctgtacctcttccttggtgagggacatagtgtgtcttttattgctggctgattttgagatgttctctttatcacaggtttttagcaatttgaatataatgacattgcccatgatgctttttgcattmattcttcttaggtttcaatgcattctttagaatagtgtgtttatatttttcatcaaatgcagaacattttcagttatcgtttctccatacattttctctgcccttgaccccttctaggactgcaattagagataagttacaccccttgacattgttcatctttagagatgttacactccttaacaagttcatttttttccagtcatttccctctctgtgctttagcttggatagttcgagtaccttgtcttccattttactgcctttccttttgtcacatcacattttctgttaagcctatctggtgttttt

SEQ ID NO: 645438 - DNA, 546 bp, Homo sapiens
tttttattgagcaattttcaaatgytgtttttgtagaatcagtgaaaagatatttgggagtccactacgtttatggtgaaaaaggaaatgtcttcggataaaaactagaaaaaagctttttagaaactgctttgtgatgtctgtattcaactcacagagttaaacctgttttttgattgagcagtttggaaacaccctttttgtaaactctgtaatgggataatttaaagtgcagttaggaatttggtgaaaaaggaattatctttggttataaactagaaagtggttttttgagtagcagctttgtcctatatgcattcatctgacagcgttaaacctgtttgactgagcattttggaaacactctttctgtagaatttgtgaagccatattatgcagaagaaaaaagtatatgtttataaaggaaatatctgctgataaaaatttgaaagaagcattaagagaaactgatttctgatgtttgcattcatctcacagagataagtccttcttcaatggaacagtttggaaacactgtttttgtag

SEQ ID NO: 645439 - DNA, 293 bp, Homo sapiens
ctcagaaaacttctgtctaatttgtatcagaagatatttcatttttcactataggcctcaaggtgaatccaaatatcccttcacagattctacaaacactgtttttccaaacttctcaatcaaaaaaatggttaaattctgtgagataaatgcacacatcacaaagcaatttctcagaaactttctttctagtttgtgatgaaaaacatttccttttycaccataggcttcaatgcactcacacatatcccattgtagattctagaagaagagagtttccaaattgctcaatg

SEQ ID NO: 645440 - DNA, 390 bp, Homo sapiens
gaattctttcagggctcagctgaaactgttacttcagaacccttccctgatcaaggtcaggccttccacgggctttttgtagcttcctgtgcttgtctctaccagcacttattattattaccatgaattacttgtgtaaatatttattatctgtstcagtggatgataagcttcatgagagcagagattggtgtctgtactatttatttttgtattcttatgcaggaggcctgagacaaagtgctaaataaatatttgttgaatgagtgagtgaggcaacaaatgaatcaatgagatacacaagaacatatgtataagaatgttctttggaaataacctagagtctagcaagagggaaacaaatcatggagatccatttgtttgaatatg

SEQ ID NO: 645441 - DNA, 581 bp, Homo sapiens
atcatgcccattttctggacagccatttcagacatcatacttgacagagagaaaacaccatcaccaccaaaaagaaaaatgaaatatttttctttctcaactacaaatataaaacattcccatatctgcatactcttttctctttcccactcgtaggatgtaagtggtgttcctcgttttatgtgagaccagttgctcttttagaatgttgtgggaagttttctcttttccttttattagttgatattctataaataaaggttttccctttttaatttattaatttactgttcagtgactcatgcatgcattcattcatatataccaatatcaacttatagatttttactttattcaatgggctataatcaatttctatcattattttggaagtcaaattttcctggatttggttaagagagattcctctcaagttaaatcttgtgtccttttgagtattcatgtcattctttaagaactttctttttttkcctcccacaacgagatattcctagctcttcttgtacttttccctgccccagctttggaagcaggcttttctttaagaggtcctggtactt

SEQ ID NO: 645442 - DNA, 581 bp, Homo sapiens
atcatgcccattttctggacagccatttcagacatcatacttgacagagagaaaacaccatcaccaccaaaaagaaaaatgaaatatttttctttctcaactacaaatataaaacattcccatatctgcatactcttttctctttcccactcgtaggatgtaagtggtgttcctcgttttatgtgagaccagttgctcttttagaatgttgtgggaagttttctcttttccttttattagttgatattctataaataaaggttttccctttttaatttattaatttactgttcagtgactcatgcatgcattcattcatatataccaatatcaacttatagatttttactttattcaatgggctataatcaatttctatcattattttggaagtcaaattttcctggatttggttaagagagattcctctcaagttaaatcttgtgtccttttgagtattcatgtcattctttaagaactttcttttttttcctcccacaacgagatattcctagctcwtcttgtacttttccctgccccagctttggaagcaggcttttctttaagaggtcctggtactt

SEQ ID NO: 645443 - DNA, 574 bp, Homo sapiens
aagattcttttcaaatcggcctttgtccttcaaccttcaatgcatttaacacataatttttagccacacacgctgtcctgttcacagggtgccaaacatctgcttgaaagaagaaaaatatcaaccctaaattgacatttccaaatactcacatgtttagatatgtgaaaagaaaacatttgggttttggggacggtatttatccaagtgatttgacaattcatattgttccatctgaatgttcctaggaaaatgtggattcttattatttgtccataatttattgttattttagtattaccactacattgaaaaatagcaatttggtcttgaaaattaacattaactttgtaccacaatccaaattttaaaaacttttttttaaaaaaacaaagtacctaatttgccttctcctcyactgagtggtagaactacttaacatcattaatgtataaatagtttctcattttgggggaatagtcaattagcaagcttaactacccaagcacatacataaaggacactatattaatgcttttaattctgataaccttgacagagaccatgacatcaa

SEQ ID NO: 645444 - DNA, 570 bp, Homo sapiens
cctgtgggcagctacggatgagaacctggtttacaccaagttaaaatggttctcattgtaagaagcaaaaattaaaattcacattttaaggtcagtggttggccaaattgtttcttccctctaaaacttgaaaactactactatgaaattctaaaggtaatagtgagctcactatgtcaaatgggggcggggaagcaagtcttctttaggagcagatatgagagtagtttgagccatatgccccaaagctgcacagcagatttgttaaggccccccagaggggtataagccctggttaggaattgttcctgtaggaacattcatttgatttctcatttactggagtatcctggtgactttaatgaaagcaaatcttatgcaaattaaacaaaaatgatgagctttgacaatagacagaagctgaatcttagcaaatgaatctgcttctatkctgatgaccttagcttccacttggcctttagccatggaaggcgaatgtttatatgtagcttaattggttaacaatatttaagtgcttcaagagctcctcaacttggcattaaagaacaa

SEQ ID NO: 645445 - DNA, 487 bp, Homo sapiens
aaaaaaaaaaaaaaaaaaaaaaaaaaaaaaaagggagggtggcaggaggtgggacaaataaatcacagtttgtgaaaagccataaaataattcagcatggctaaagagtaaaaagagcagttagtaaaaagcaaaaggtaaggtagaaaaagattaatccaaagaaggcatgaccaaccaggtttcaaatgcaggacttatgaattctgccttcccactactaagcttcttagcatttttttgtcctggcccaatttaraaaaccattttgtgggggtcccattaggttcagctttcagttgctggaagagcatggactgacatatgccacaaagcaggtcagaaaatgactttctgtcaacattcatccctactccacgctccccacctctacaacattaacaagaaaatgagaacgcctgcccagatgtcctgttggatgtcactgggtaaattatcttttattaagaatctgtaattgttcttc

SEQ ID NO: 645446 - DNA, 522 bp, Homo sapiens
tggagtccagagtctgttagaacataaaaagcatgtggtttgtattttagagacataagacagtgcatttagtctgcatatctgaacactttttccttagagattttccctgttaaatgggacatttgacatggtagaacagcatgtgcaggcaaagcacattcagaacttcattgttttgaattggctataacaaagcacaaagttctttytaggcactccagcatagctctttccaagtctgggctccaaaagggatagattaaacaggaagggtaccatgtaatgctaattcagtcttatctaattcagttcagtaaaaatctcagtatttttggtgttcaatataccaggtagacattgtggaaaacggaaaggcaagtaagacatcactcatgacttccagaggtttatattattgtaagggaggtggacatggatgaattaaaggtcctagaaagcagactctgagaacaatggaaatacaggtacaagggcaatgagggctcaggagagaccaca

SEQ ID NO: 645447 - DNA, 484 bp, Homo sapiens
taaaaatcaaaatccacaatgggatttatcctatcaaaatgactacactaaacaagaggcaaggaaaaatttaaacttttatatttgtatataaaaatgtataaatatataaaaatgtgtgtgtatatatatatatatatatakagagagagagagagagagagagagagaacaaactggtatatacatgaattaagtgttagaaaaactaattttctttgtattctctgttttccaaggaaagtgtctgtcttccaaggagagtgtctgtctctcaagctatatggatttcattggtctggcaagagaactatcttgaaaattcatttttctaagagaatttgttaccgaactgaaataacgtcctgtggattttcacactcttgggtgagcctgccagggatgcaggtgctcacacttccttgctaactagacttagggcaaacagaaaagagatgttcaagtagctccttcacaggagaaa

SEQ ID NO: 645448 - DNA, 571 bp, Homo sapiens
aggcacctgttcttcatcaaactacattgaaatttaaacagaaaggaattttatgtttgaaagtaaactcgtcccattctctgggattctgatgttttcctggggccgtagtaagggaagccaaaaatggcattagggcattccctctaaaaaagtatcttgcctaaatccaactactgcataatctctccccagccactggagtaccttgagagccttttgcgctgagtgggtctagaaaaccagcaggatggaaagctagggtcttgagaaggtgagcacaatctgtcctgcctatgaactcctccggaaccatgggtaaaggtcatgcttccatccatgggtaacatctatgatggttgctgggacacagaggaaaaaaaggaaggttgagaagtggtatgycctttttctctttccttccaccctaggccacactgaaaagagaaaggggactgaggaacgccttgtctcccctctttctctagataggtaacaaaccatcgacagtctgcattcccctctagtgcattctgaaacactggaacttctttaaccctgaaattctaaa

SEQ ID NO: 645449 - DNA, 546 bp, Homo sapiens
tgactcatggctaaatatagtctaaacccaacctgtgtcactgcagccctgcctggcagcttattgcaaaacgttcgtggtttaagctgagtctaaagtgaaagaaaaatcagctttgctgtcagctacaaagacaaagggaaagccacaggaaaaaccagttttgcaggaactgtcagaggagacagaaattcttcctccatatgccccaatctaccccctttaccaaggccggctcccaaggagtcaaactcagatgataaccaaacccgggcctcgccccaaaaggaaaaatcaaagccactgccccaggaggtcaaggaggaaagtcaggatgatcaggccagctgcctctggtctggctacgcccaggctgtgcagatgcctctccgggagactcagagacccctttattatgattaacatggccaggttcaagaggggagaaaaggaacccctcctctgggakgttgaccaggagaaggtgtttaaacaaatcaaagaagccttaggactccctgacataactaagcattcctttctgta

SEQ ID NO: 645450 - DNA, 376 bp, Homo sapiens
ttctagtatttatctgaagatatttcctttttcacataggcctcaatgtggtcccaactatccctttgcagattcttaaaaaacagtgtttccaaactgttcaattaatagagtttaattctgggtgatgaatgcactcaacacaaagcagtctcacagaaagtatctttttagtttttttccaaagatatttactatttcctcataggcttcagagcactcccaaatatcccttcacaaattttgcaaaaacagtgtttagaarctgcacaaggccaggcatggtggcccatgcctgtactcccagcaccttgggaggctgagacgtttggatcacaaggtcaggaaatcgagaccatcctgactaatacagtga

SEQ ID NO: 645451 - DNA, 376 bp, Homo sapiens
ttctagtatttatctgaagatatttcctttttcacataggcctcaatgtggtcccaactatccctttgcagattcttaaaaaacagtgtttccaaactgttcaattaatagagtttaattctgggtgatgaatgcactcaacacaaagcagtctcacagaaagtatctttttagtttttttccaaagatatttactatttcctcataggcttcagagcactcccaaatatcccttcacaaattttgcaaaaacagtgtttagaagctgcacaaggccaggcatggtggcccatgcctgtactcccagcaccttgggaggctgagacgtktggatcacaaggtcaggaaatcgagaccatcctgactaatacagtga

SEQ ID NO: 645452 - DNA, 599 bp, Homo sapiens
cttgttaaggtggaaagatgtggtgaacagaaatgttcttttcaatttgaaacttcatggaggacgatctctttgtgggactggtactacacaccatggctccacgtgaccttttcgaggatcccatggtggttttatcttgattaaaatggttctgttcacaggaggggaagggctgtgccatcatcctccaaaagaaggtggaaaaggcaaaagatggaaagaagataccactttctcgtggaaaggcgggaggagaagagaaggagtgagcacaacagagaggcatgttggagaatgagggagagacagagagaaggaaataaagagaaaagccagaggctcaggaaatggcagggaaagtgatctaactaattgtatgaagagacattctgtccatttcttcttagtgcaaggcaagaaggaggcactatcaatcccagtttgcagatggggaaactgagtcccagtgtaaattaccrtgcccaagttcactgggatcatgtgtagccaaaccaagattcagtcttaagtttgctagacttcagactctgccctttccataagagaaggaacacctgtgtttcattttgatgaat

SEQ ID NO: 645453 - DNA, 640 bp, Homo sapiens
gtattgccctaaagtcattgccattcccaagatcagttaggttttctcctgtgttgtcttccaggagttttatagtgttccattttacatttaggtctacaatccattctgagttaatttttatgaagggtgcaaggtctttgcctagataattttttttttttttttgagacggagtctcactctgtygcccaggctggagtgcagtggcacgatctcagctcactgcaatgtctgcctcctgggttcaagtgattctcctgtctcagcctcccaagtagctgggattacaggcacccgccaccacacctggctagtttttgtatttttagtagaggcaaggtttcaccatgttggccaggctggtctcgaactcctgatctcaattgatctgcccacctcggcctctcaaagtgctgagattacaggcgtgagccaccgtacccggcctgatacatttttatgtgtgtgaaaattcagttgttccaacataatttgttgaaaaacctatctttgctccattatattgctttaactcctctgtcaaagatcagttgactacgtttatgtgggtctacttctggattgtttattctttcaccaataccacattgtcattattactgtagtttatagtaag

SEQ ID NO: 645454 - DNA, 544 bp, Homo sapiens
catcttaataatcaatcctttggctgcttgctgtgaattacaaatttgagtacccctgagcagtttctccacaattatattatttwgcacgtgctcttttctgccaatggctgaagcagctcagactataaggatgaaaaaaaaattcctggggtctcagtggaattcaggaccccagctctattgcaaaaaggtgaatttctttcacctggagctatgtatgcttacttgccttgcctcaagcccactataatctggctaacctcctgggttaagtgtttttggtatacttaagacaaaggacaataaaacatgtagcttgcagataaaatagataaaacacatgtaggggtaaggcagagagaaatgaaacatgacagctggtctttccttggctaacttcttcgagtgtccgaggacagcctcaggcatgacaacattatcttctgtattacgctgatatagcaaaaagccctttccttaatcatgctcctcttttaaactatcccatataaatcttggaacaacatagaaaagcacaagc

SEQ ID NO: 645455 - DNA, 587 bp, Homo sapiens
cttcgcatagcctgggactgcttgggaaaaacagagatggtaacatggaccccattttgggaaaaacctctgttttcttcatggaatcccaggaattaaaaagtagatcaatccctctcaaaacctgttttttcttccagctatgcctgattattaggccctagaaactgcatgttttcctarccctgtttcttgaaggccagtggtccaattaataaattggcagatgaaaaatcttacaactactgaatcttcttctgtctgtgtagtaacatatgtgttatatgtgtgattttatattaaaaagagttctaattagctgacttaaagaaaagtgcctaaatcaaatatttttaaaggaaaaaaaaagatgtaatgcattttaatcttcacatgattaaagttcacattattttaatctttgagaaaataaaaaatagttttaaatattattagttaaatagatatgtcttcaaaatgtaaacatgtggtctaaatcatggtcagattctaggtttcctaaatgctttaaggtcataaattgcttctttggctttttaaaattgttcaacttgcctactttaaag

SEQ ID NO: 645456 - DNA, 582 bp, Homo sapiens
tttggcattctaggcaggcaaggatgcttgagaaaaatatgagaaaactacagaaacaactcaaaacttttctgacttccttaaaagaacatctccacggaggtttacagtgagctggtaacagagctgctgcactccagcctgggtgacagagtgagactgtctaaaaaaaaataaaaataaaaaaaagaacgtctccaattttaatgcatttctttgttcatggaaatatacaaagtgtattaaggaagtaaaaacactttaaatcatgtctcttcaacctaagtgctggagcagtttttctttctataggttttctattattcttatgtgaatcagcacagcagagtgtttctattcatcttgaaacctgttcctaattcctattctgccaagaccatagagatgttttcaaatagtaagcccctttgcatacgttgtttatagataaacaacaataatcaaacttaatttatagtgaattatcattgatcatagtaatygcattgtgcaattagcagtggtttctacctttgctggaaaccacaaaacattttaaatcacaaagatattcacactttt

SEQ ID NO: 645457 - DNA, 401 bp, Homo sapiens
atgaattcagttgctaagtcaggcatatgytttgagttatcagcatggccagggacctttcccgggtgcctgccttgagccacttgcctgggtcaggttagaagaatttctacaataatagctacaatttccttctgtacaggcattgttcattagatcaagttattaaccagttactgctatgagaaggcagagaggaataagccagacagacttaatctgttagcctggccatagccttgctgccagctcacagatccctgtccaagtttgggtcctagtcctataccatgcctcagaatggtgtaaatacttccctcttagcatctttcattccctctagtgatctgcttctccttccttcttttttactctctcttgttttctcccactctttatca

SEQ ID NO: 645458 - DNA, 593 bp, Homo sapiens
cccctttctccacatccttttcagcatttgctattttttttgtgtttcttataatagccattctaattggggtgaaatgatatcttgtggtggttttgagtggcatttttctgatgattagcaatgttgaacatttttccatatacctgttggtcatttatatgtcttcttttgagaaatgtctacttatattctctgcccacttattaatagcagtatttgttttttgccgatgagttgtttgagttccttgtatattctagatattagttccttgttagatgattagtctgcaaatattttctcccattctacaggatgtattttcactctgttgattttttcctctgttatgcagaggcttttgagtttaatatagtgccatttgttcctttttggttttgtttcctgtccttgtgaagtcctagccataaaatatttgcttagagtaatatcctaaagtgtttcctttacattttcttcaagtagttrtataggttttaatcctatgtttaaatttttaatccattttgaattgattgttgtatgtggaaaagataagggtctagtttcattctttagcaagtggatat

SEQ ID NO: 645459 - DNA, 474 bp, Homo sapiens
ttttgttgagaatttgtgcatttatgttcaccaggcatattggcctgtagttttctattcttctagtgtttttgtctggcttaggtaactgagtaatgctggtcttgtaaaatgaatttggaagtattacctgttctatttttcagacgtatttgagaagaattggcattcactgttctttcagtggtaaaattcaatgatgaagccaatagattctgggcttttctttgatgggagactttttattacwgattcaatctcttcactcatttttggtctgctcagattttctatttctacatgattcagtcttgttaagttgcatgtgtctaggaatatatatcttctatgttatccaattgtttttatataattggtcatataatctcttatgatcctttttatatctgtggcatatattgtaatgttttctatttaatttctgatgttacttatttgtcttactttgaattc

SEQ ID NO: 645460 - DNA, 535 bp, Homo sapiens
taaacatacacaatgcatccttctaaaatttagtgtttctcttttgttttattttttccattgatttttattcattaggacctaactgatatttctgtctttattgaaaaaaacatgccgggggttgaatcataccataacaaggtgaccttttattcttaggcaaaagtctgcaatttcttatgtcactaaaatgggtcattccatttcttttcctaaaatcttgtgatattgttaggctcctagtgagggacactgaaataatgaagatttgtgagtgaatagtggcaagcagcgaattaaatttctaagatttactctctttcagaatgctaagttatcatctccactgaggtagggatgagacaacatgatgaktatggaagtacagatggttaatttattcacaaatattgtgtactttgtactttatttttgctggttactttgattggcacagagatgaccatgatgggacttttctttgagaagttcactgtccagttcactttcctaaatcatagctgaaaaaact

SEQ ID NO: 645461 - DNA, 587 bp, Homo sapiens
tgatgttctattgtttggtgcaagtaagtctataattttgaatctccctgattaatgtttaattataaatgttgctctttatttccataatattttaatgtctatgttatggtatttcatatagccactctagtttcataattgttatttgcatgacacattttttcaattcttttgctttcaatctatttgcatttttgaatctcaactgtgtctattgtagacagcacatagttggagcttttatttttaattatatcttattctctctgacttctgattagaagctattatccattgcaatttaatgtttttatggatatagttggatttaagcctgaaattttactttttgtttctatatgacttccgtcagrttttctttctcgatctcctttattgctttcttgcattaagtgaatatttatttcataatctgatgtcttacttattttaattttttttactgattttttgagttgggagctgaaggaagtggaagccctgtgttcttgactgccctcccctggactggaatttgtcactctgctttagaaggtggagggaggcagtggattgcagttcat

SEQ ID NO: 645462 - DNA, 587 bp, Homo sapiens
tgatgttctattgtttggtgcaagtaagtctataattttgaatctccctgattaatgtttaattataaatgttgctctttatttccataatattttaatgtctatgttatggtatttcatatagccactctagtttcataattgttatttgcatgacacattttttcaattcttttgctttcaatctatttgcatttttgaatctcaactgtgtctattgtagacagcacatagttggagcttttatttttaattatatcttattctctctgacttctgattagaagctattatccattgcaatttaatgtttttatggatatagttggatttaagcctgaaattttactttttgtttctatatgacttccgtcagattttctttctcgatctcctttattgctttcttgcattaagtgaatatttatttcataatctgatgtyttacttattttaattttttttactgattttttgagttgggagctgaaggaagtggaagccctgtgttcttgactgccctcccctggactggaatttgtcactctgctttagaaggtggagggaggcagtggattgcagttcat

SEQ ID NO: 645463 - DNA, 557 bp, Homo sapiens
gggtcttcctctcccaggccacgaactcaaatgttaatcttttctggaaacaccctcacaaacacagccaaaaacaataatttgcacccttcartctgatcaaattgacaatgttaaccatcacaggtaccatctcgcaccagtcaaaatggcaattattaaacagtcaaaaaataacagatgctggcaatgctgtagagaaaagggaatgcttatacgctgctggtgggaataaaattagttcagccattgtggaaagcaatgtagcaatttctcaaagaactcaaaacagaattatcattcaacctggcaatcttattcttgggtatatacccataggaataaatcattctagcaaaaaacatatgcatgaatatgttcattgcagcactcttcacaatagcaaagacatggaatcaacttaatcctcatcaatatagactggataaagaaaatgtggtacatacacactatggaatattacgcagccattaacaatgagatcatgtcctttgcaacaacatggatgcagctggaggctattattctaagctaac

SEQ ID NO: 645464 - DNA, 560 bp, Homo sapiens
aaattgcagaaggtgaaatctttggcagcctcttatttctctggagaatatgatattgtcaggctgaggtggaagaatcacatggtcatactgtaagtgctatggttccaagtggtaatgttattgatcaattttcaacctgagatttgtaatgataatccccacaagttgcttgagatccttaacaatgaggtttttagtgagtttaaccaactgtcagtgcttgaaaactcgcctacagggggcagcacaaatacaagtaaacttaggggtaaagcatgaaatgcatccagattcacaattgtttcaggatctgcttgcaactgaagcactgtctgcacaagattcggctgagggaatatatataaaacagaatgttcctgtatgatgttagttttaaaggtagatttttggcagtgggagggttagcattaacattcataatgtcacctgttatatatgtgttatttttacattttaatattttagaatacagaaatgaatatgctaataycattttgaagagacaatgcccgtatatatatcacttggaattgtta

SEQ ID NO: 645465 - DNA, 633 bp, Homo sapiens
ttagttttttgaggagcttttatactgttttttatggtggttgcaccattttacatttccatcaacaatgtgtaggggttccaattgatccacaatctcaccaatacttattttctgtttgttgttgtttttggtggggtgtgtgtgtttgtttatagtaatcatttaaataaatgtgaagcgatatctcattgtggtttcctttgcattccctaatgattagtgatattgaacatcctttttttgtgcttgtacaacatttgaatattttttaatagaaatctattcaagttatttgcccatttttgaatcaggatttgtgtgtatgtgttgacttgcaggaacccctcttggttttcatttcaaaaggtcattgtagaacaaaaatgagcacatatatatatatatayacacacacacacacacacacacacacacacacatatacacatatatagacacatagacacacacacacacatatatatatggatagtgctttaagatgctgatagaatataataaaatttataggacaacacaagctatataaggtatgctattttaatccaatggaatattaaattttccaaatacatagtaaatagtattaaatattatatattgaaaata

SEQ ID NO: 645466 - DNA, 580 bp, Homo sapiens
atggctgatcttcttatatagatcctgaaatacaaatccaaattaatttcatatggtgtcttagtcagttttggatgctctgagaaattccactctggggactgttgtggggtggggggaggggggagggatagcattgggagatatacctaatgctagatgatgtcttagtgggtgcagcgcaccagtatgtcacatgtatacatatgtaactaacctgcacattgtgcacatgtaccctaaaacttaaagtataataamaaataaaataaataaataaataaataaataaataaataaataaaaagaaattcccacagactgggcagcttagacataacacaaatttatttctcacggttctggaagctagaagtctgagatcagggtgtcagtatggtcaggtattaggaagggctttcttacatgtgaagacgacagactgcatttcatgtgcaaactgcattgtattctcacatagcagaaagcaaaagaagcaagctctctcccaacccttacaagagcactaatttcatgctcattagacttcatctaatcttaattacctccaacgatgcca

SEQ ID NO: 645467 - DNA, 478 bp, Homo sapiens
tggattaagaaaaaaagagggcaaactgaaaacaaacaaattactgtttggtatgagtcatatgttatagattctttctagaattttgcatgcaatcctggttgccatacatgagatgctaattgtatctcaacatgaatacagaaaagagtagagattcttgaacaatctaaaatgttaagtgtagttaagagggatgtattctttcctgttagaaacatcagaagctgacatggtctggatttgttaaagtatacgtgtatgaaaaagatatttttaagtaggttttcaactccatagtgttgcataatttcaaattaagaaaaagaggctgagtgcagtggctcacgcctgtaatgccagcactttgggaggccaatgtgggtggatcacgaggtcaggaratcgagaccatcctggccaacattgtgaaaccctgtctctacttaaaaaaaaaaaaaaaaaaaaagattagctg

SEQ ID NO: 645468 - DNA, 478 bp, Homo sapiens
tggattaagaaaaaaagagggcaaactgaaaacaaacaaattactgtttggtatgagtcatatgttatagattctttctagaattttgcatgcaatcctggttgccatacatgagatgctaattgtatctcaacatgaatacagaaaagagtagagattcttgaacaatctaaaatgttaagtgtagttaagagggatgtattctttcctgttagaaacatcagaagctgacatggtctggatttgttaaagtatacgtgtatgaaaaagatatttttaagtaggttttcaactccatagtgttgcataatttcaaattaagaaaaagaggctgagtgcagtggctcacgcctgtaatgccagcactttgggaggccaatgtgggtggatcacgaggtcaggagatcgagaccatcctggccaacattgtgaaaccctgtctctactwaaaaaaaaaaaaaaaaaaaaagattagctg

SEQ ID NO: 645469 - DNA, 537 bp, Homo sapiens
ccaagatacagatgctttgttaacttccaaatacagtccaagtgtgtgcttgtrcattcattctggccattaattaaaggccacttggagagactttaagctcttaaactggattagtgaaagtgatcaaaaggaccaactgagttttggaaattgagttttacaagacagggggtggactttgaaaagaacttcctaaatcagacattattgattgcctcatcacagccctaaaatgaaggtcgtcattaagaggactggagtagaatcatcgactgaatgttgatactatctgcacagtagatgaaacgtgatgtaacaacaatcagtggcaaaattccaaaagtaaaatccaatgatacttcatgagctggaagttcattttgacactgaaagttgctttccctgtaatagtgacttatttagaacaaaatttcatagctattctcaagggacactaaaaatattttttacaggcctacattgatgaatttctgaattgaataattggaatgttgttagacacaaacatgatgc

SEQ ID NO: 645470 - DNA, 597 bp, Homo sapiens
tggatttaatccggtttaggtctcatttaactgagttctttaataatgttttgttttaaatagctaggagggaacattttctctgcaaattttaattctttggctctcctttcaggtaggctttgctattgagctggcttgacatttcacttctaatttctgggcaaagattgcagctctttrgcatgtaaagaaaggcacaagttttttgttttttttttttttctgttgatgtttcatttggttatttcctatctctttgaaaaaaatgacctcctaactttgttttttatctctttttcctgtcaatttctgcttcccccaatttttattccctggaactgatgatgtctttcatcagcacattcctccaagctttaaagttaattctaatctgaacaaggagcatattaacagcttctaaatcaaagcctggaattattcttgctattataatctgagtatctggtgctgcaagctactctgcacaacctttgccccaaaggaagacattatctttattatcctggtcagaaaacaaatcagcccctgcccaggaataagaccctaacttcctgagtactcaataaattgaat

SEQ ID NO: 645471 - DNA, 597 bp, Homo sapiens
tggatttaatccggtttaggtctcatttaactgagttctttaataatgttttgttttaaatagctaggagggaacattttctctgcaaattttaattctttggctctcctttcaggtaggctttgctattgagctggcttgacatttcacttctaatttctgggcaaagattgcagctctttggcaygtaaagaaaggcacaagttttttgttttttttttttttctgttgatgtttcatttggttatttcctatctctttgaaaaaaatgacctcctaactttgttttttatctctttttcctgtcaatttctgcttcccccaatttttattccctggaactgatgatgtctttcatcagcacattcctccaagctttaaagttaattctaatctgaacaaggagcatattaacagcttctaaatcaaagcctggaattattcttgctattataatctgagtatctggtgctgcaagctactctgcacaacctttgccccaaaggaagacattatctttattatcctggtcagaaaacaaatcagcccctgcccaggaataagaccctaacttcctgagtactcaataaattgaat

SEQ ID NO: 645472 - DNA, 616 bp, Homo sapiens
taagataaatgtgccttattctattaaccttctcatccctggtatcaaaacataccgcttatccttatgcttaaattaaaaattcttttgagggtacaactcttttgcatgctatatccccatataggccactgttagataaacaatctaattgtctttttgcagatcctgtttatgaaaatactttatacatggaaacactataccagtggttagcagtgcctatgtggatacctaccatgtgaagctatacctaagggcaagtgccttttctrtctgtccaagtgggctgcccactctacagatacacacagcccagctggccttcaccacgtggagacctctcttgaaaaactgggaagtctttggctctttttcttaccatttccacgcaccattgactaagttgtcttgtagagatccgtgctttttcaccctaagcacacaggtgcatagcacagcatattcagggccctaaacagatgccatttttcacacctggatatgttcctcctggctcagttaacaggtcatttactattggagacatcataaaataaaaatggttttcataatcatcctatttttatccattttcctctggaacccaggattc

SEQ ID NO: 645473 - DNA, 616 bp, Homo sapiens
taagataaatgtgccttattctattaaccttctcatccctggtatcaaaacataccgcttatccttatgcttaaattaaaaattcttttgagggtacaactcttttgcatgctatatccccatataggccactgttagataaacaatctaattgtctttttgcagatcctgtttatgaaaatactttatacatggaaacactataccagtggttagcagtgcctatgtggatacctaccatgtgaagctatacctaagggcaagtgccttttctatctgtccaagtgggctgcccactctacagatacacacagcccagctggccttcaccamgtggagacctctcttgaaaaactgggaagtctttggctctttttcttaccatttccacgcaccattgactaagttgtcttgtagagatccgtgctttttcaccctaagcacacaggtgcatagcacagcatattcagggccctaaacagatgccatttttcacacctggatatgttcctcctggctcagttaacaggtcatttactattggagacatcataaaataaaaatggttttcataatcatcctatttttatccattttcctctggaacccaggattc

SEQ ID NO: 645474 - DNA, 609 bp, Homo sapiens
ttccgattgttttaaagtaaacatatcaataaataaaaagccatattgtgactgttatctagcttcctggaaaattaacctctatataattcctggcaatactaatccatacaaaactggaatgttctgatggggaacatttagtgaggaaccagaatatgacataatgttatgaactggaagagggtaccaaggtggtgacggggcttggaaatcatgacatgtgagaatgtgtttgaatgggccagtgatgccagggggttcttgcaaattattaaggatgatcatgcggaaactgatttgcttggtgttgctccagggagcagagcttgtacttgtggatagaatttacagggaatattttggcttcttatgaagaagcactcccaagtaaatggacttatccacccgtgaaatgagcygccatgtgaagaagtgagcttcctatcattggaaaacgatcaatcaagggctcactggccatttcttgttggttccttccctaagacagaactcatattctgttatttctagttttcttccatccctgtgatttctggattcttttgttaacctattgacatatgcaatatttatttggaaatatct

SEQ ID NO: 645475 - DNA, 527 bp, Homo sapiens
agacatgaaagtggaaaattactctttgatctatgaactacagaatgaatgttgtgttagcagaaatgaaaacattaatctccttgtatatatccataagagctcttggctgactaggtgcattgtcaatgagcaataatatttgaaagtagtattcttttctgagcagyaagtctcaatagtgggtcaaaatattcagtaaaccatgccataaatagatgtgctgtcatccagctttgttgttccattcataaaccacaggcagaacagattgagcgtaattcttaaaggccttaggatcttcagaatgataaatgagcattagcttcagcttcaagtcaccagcttcagcttcaagtcaccagcttcattagcccctaacaagagagtcaacctgtcatttgaagctttgaagacagacattgacttgttctctgtagctatgaaagtcctagatgacatcttcttccagtggaaagctgttttatctaccctgaaaacctgttttttagcacagctactttcat

SEQ ID NO: 645476 - DNA, 591 bp, Homo sapiens
atggtgaaaccccgtctctaataaaaatacaaaaattagccaggcatggtggtgggcacctataatccagctactcgggaggctgaggcaggagaattgcttgaacccaggaggcagaggttgccatgagctgagatcgtaccactgcactccagcctgggtgacagagcaagattccctcttaaagaaaaaaaaaagtcatggatagtagtgacatctatgtctcaacataccagtgcagaaagagttcagaacttcaaggtataccaggtggggcacacagggatggaaggagatgatggctatcaggtgttattatgggacatagtgagaggcaaggactgtaaagtggtaatgctagaaaattaagctgatgcccagtcatggaggcccttgtgtgcccagttacatgctcctgcaggtgttaaagagccagtaaaggattatataaagggaagtgatgtagacgcagctctgtccaccacatactgaggggacagactgggatgctccacaggcttckgaagccaaggaaacaagctttaattggagatattagtttgggcatcattagggtataagtagatgata

SEQ ID NO: 645477 - DNA, 574 bp, Homo sapiens
cagttcctttatatttgctttctctttaccttcaagtcaacataaacattctatctatcttgatagaaakatctttctatcttgatagaaatatcatgttttcaaagaaatagtttgtatacattctttcaaaatcttgatcgcatatataaaatcttgatcaccccctctttatttaatcttcttctgatatcgctgcatttcagaaatatatataaaattgaattacaaaagtaaactctgatcattttggcactttccattatccttgacctctagtagttgtttaacctgactgcatacggcagccagcatgtcccctagtgatccctacctgctggcattcatacttttgtgtagcctctctccagactgtaacagcatttatctatatgaccaataaaatatggtggaagtgatgacatgttactattgagattgttacgatacacatccactctgggagaagccagctgctatgttttgaacagccctatagtgatgccttcttgatgatggtctgacatttctatcctattctgtttattttttgctagcacttacaatctaagtg

SEQ ID NO: 645478 - DNA, 651 bp, Homo sapiens
tatgcatataagaaagaaaatatggttatttcatcactacagttattcattcattcaaaaattcatttttgagcatctatatgaaccaggaactatgatgtataccgcagacacatcttgaaacaacaacaaagacacaattttgtcttcttggaagagagaaatacataatcaaatgcataaataagattatttcagagagggatgagttctacaaaagatatcagaggggcaatactccaattttaggagtacagaaacccaacgggcagtggaggttagtgcagtttcattttatctcttgatcaactagaaaatcctcatctaatttatttttatttatctattatttatttatttattattattttttctgtcttcgtgacactggcttcaattaaggaccatccatatgtactattaacatgcagagmtcctgggtcatgctcattttccacaccctgctttttctatggccaatattcaagaaacacagatgttgtgatgtttttttggtttgattatttactggatggtttctgcttagaagttctgttttttctaagttctcattacagtagcattaattgggttatttaagaatcttgaatttgacaattgcatattctgattttgcttaaaatatagttt

SEQ ID NO: 645479 - DNA, 532 bp, Homo sapiens
gtcttcaagcaaaaggaggcacaatgcaattacttagaaattgattattcattctattatacttttaccaaaacagatataatagtgttatttatcaaattaggttttgatatcattataaaatraataaatttcatgggaagataaaatacaaatatttacttcaagaggaaatataatgctgcttaaaggaaaagctaaataatgataaaataatagcaataaaaactataataaatcttcataggatttttaaatgtagatatgtgtaaagaagaaataacatagattacaggttttcaaatcagaattcaatagttacttgggcaaggactgaaaaaatatatttgtaatctgctttaaatatgtataattattgtattttacatgttgagtaatattttacatattaaaaatatcaaatataatttttatgactcacaacataaattaaaattcaagtgttaaataatcaatggcagaaatatatttttctgttacgtatacaacaaaatctttatattgtctaaaa

SEQ ID NO: 645480 - DNA, 522 bp, Homo sapiens
taaatatgtataattattgtattttacatgttgagtaatattttacatattaaaaatatcaaatataatttttatgactcacaacataaattaaaattcaagtgttaaataatcaatggcagaaatatatttttctgttacgtatacaacaaaatctttatattgtctaaaaatacggagatagggtttttaactaagtatcctgtatctttgaagcatgattgaatctcaactgtttcctaaaaatatgtggtgtgatacaagatagattatgtaaaatttacaaattcagtattgttaatgattaaatgtttataaattaaggtgttggatcagaagcataaagttattgttcaaatttacttttaggcatcctaaatgaaaaagataaacttatcaactccacgtcagataaagccaaataagagcaaaccaaggycagtcacttgacaaataatccaagagagaaaaaaggttaccatataaaatcgtactgattaataaactgataagcggcacatt

SEQ ID NO: 645481 - DNA, 577 bp, Homo sapiens
tgttatactgagatgagtactactttgtaaggaataaaataaacattgagtagtctttatgaaggaaaccattcaaattattcctttatttgaaactactattcataattttcactgggtagcataaaatattaattctttgaaaagaatattatgaacatcatctcgaaccatattatctagtcaaaagtggtgatactagaaagaaagcatattcaatcaaatcagaatcaatctgattccagcaaagacagtacttcatgtgaagtcagaactttaaaattatctacatattttaataggcaagtttagaaaaaaaattagccaggcrtagcggcatgcacctgtagtcccagctactcgggaggctaaggcaggagaattgcttgaacccaggaggcagaggttgcagtgagctgagatcgcaccactgcactccaacctgggcagcagagcaagactccgtctggaggaaaaaaaaaaaaaagagtgagagggggaggttacaaagaaaaaagagagctacaacaaggaaaggacattaatgagaaatggacaggtgtctagcttgactgaa

SEQ ID NO: 645482 - DNA, 577 bp, Homo sapiens
tgttatactgagatgagtactactttgtaaggaataaaataaacattgagtagtctttatgaaggaaaccattcaaattattcctttatttgaaactactattcataattttcactgggtagcataaaatattaattctttgaaaagaatattatgaacatcatctcgaaccatattatctagtcaaaagtggtgatactagaaagaaagcatattcaatcaaatcagaatcaatctgattccagcaaagacagtacttcatgtgaagtcagaactttaaaattatctacatattttaataggcaagtttagaaaaaaaattagccaggcgtagcggcatgcacctgtagtcccagctactcgggaggctaaggcaggagaattgcttgaacccaggaggcagasgttgcagtgagctgagatcgcaccactgcactccaacctgggcagcagagcaagactccgtctggaggaaaaaaaaaaaaaagagtgagagggggaggttacaaagaaaaaagagagctacaacaaggaaaggacattaatgagaaatggacaggtgtctagcttgactgaa

SEQ ID NO: 645483 - DNA, 592 bp, Homo sapiens
ttttatttcttttctttgcttttaatcatagctgtaaggactgaaaaattttgtccacattagtagatgggaatggaaagagatttattatagcaacatcactcaattctttcaaattatttgccaaaaattatgtggtgatctatcatcaaaaatatttttaatgctctaccagctgacaactccatcagatcctcattcaattttgttgaaagcaaagaattgaaaaccggttgacttacaaaaggatttgtaacccaatcattagaatgtttcactttctcaacactgaaacagctagattttgaatcactcctttgttgggagacctgtttttttttttttttttctttttcctggggcaatacaccacaacgagattcaggatgagttagaggtgggcgtttcttttgtaaaaggggaaaaggtagttgtgaaaggggaagtggcagaggacccgctgaagcctaccacacaaccgaaggatcatcatctttaaygttgtgtctctgcatgtcctgaaggaggtgctcaggccccttgaggccttggaaggagaactcgcatgtcgcagtcatgctctcagacatag

SEQ ID NO: 645484 - DNA, 330 bp, Homo sapiens
tgagtatgtttagaattaaggatatatgtcattaacttaaggatataaagtttatccttaagataaactccctgaggagaattattggatcaaatgcttggtattttaaagctttaaagctcttgacaaaatagcttgattaaatctttatcattattttaaaaaactattttactgcacttttcataaaactgtcacatttggcagataartaatatctaataggtctaatttcccttaataggttattaatgaagaacatacttcttttgcatgtttgttagccatttcttattttgtaaattatcaagacatttgactgtttatccg

SEQ ID NO: 645485 - DNA, 289 bp, Homo sapiens
tgctgaattccagaaggaactactgagatgcaaagaagcacagcagcttttgcacacatgcgtggggttagatggaaaacaagtggattgagggtctgccaatgaaagcgacccatactgaagtccactggctctggttgagacccagaagagtcatgcatcagaataraggtggacaggaaataccctggcctttgtagggactgagcctgcacagacgacctcaattgcagcctgtatggaggacccctgaccatcccccagaagtagactcccatctcttctgcag

SEQ ID NO: 645486 - DNA, 510 bp, Homo sapiens
ttgagcctctaatagagtctttygaaattgccttacaggtgaccttttggatgacaatccctagctgtgtttatctgtctattatgtgttagacattaaacatatcctgcatttttaaatctaagggtgctggagtgaatcaagttcaaacagagtttctactacattataactgaaacaatgttaagcaattgctactcaggaaaatcttgaatttcatcatctttgcttatcagctccttaagcccagactacatttagtgatcatcaggaatacgaatacctgggctagaacctgagatagagctgtggactcattttcctcagacagaagatcttgaaactttctcttcatgtcttcatcctgtgagggaattaaaaacataagtagctgtgtctgaaggatagcaaactcctagaatgacaggggtagcatgcccctgtggaaagagggaggaaaagatgtccgtccaagaatcacgcccttgatgaagctcccacagcgaaggc

SEQ ID NO: 645487 - DNA, 510 bp, Homo sapiens
ttgagcctctaatagagtctttcgaaattgccttacaggtgaccttttrgatgacaatccctagctgtgtttatctgtctattatgtgttagacattaaacatatcctgcatttttaaatctaagggtgctggagtgaatcaagttcaaacagagtttctactacattataactgaaacaatgttaagcaattgctactcaggaaaatcttgaatttcatcatctttgcttatcagctccttaagcccagactacatttagtgatcatcaggaatacgaatacctgggctagaacctgagatagagctgtggactcattttcctcagacagaagatcttgaaactttctcttcatgtcttcatcctgtgagggaattaaaaacataagtagctgtgtctgaaggatagcaaactcctagaatgacaggggtagcatgcccctgtggaaagagggaggaaaagatgtccgtccaagaatcacgcccttgatgaagctcccacagcgaaggc

SEQ ID NO: 645488 - DNA, 510 bp, Homo sapiens
ttgagcctctaatagagtctttcgaaattgccttacaggtgaccttttggatgacaatccctagctgtgtttatctgtctattatgtgttagacattaaacatatcctgcatttttaaatctaagggtgctggagtgaatcaagttcaaacagagtttctactacattataactgaaacaatgttaagcaattgctactcaggaaaatcttgaatttcatcatctttgcttatcagctccttaagcccagactacatttagtgatcatcaggaatacgaatacctgggctagaacctgagatagagctgtggactcattttcctcagacagaagatcttgaaactttctcttcatgtcttcatcctgtgagggaattaaaaacataagtagytgtgtctgaaggatagcaaactcctagaatgacaggggtagcatgcccctgtggaaagagggaggaaaagatgtccgtccaagaatcacgcccttgatgaagctcccacagcgaaggc

SEQ ID NO: 645489 - DNA, 346 bp, Homo sapiens
tagcctatttgcatttaaagtagttactgatagggaggggcttactattgtcattttgttcattgttttatacatgtcttccaggtattttttccacttttcctctctttctgcctccctttatgtttcacygatttctttttttggtagggacgtgctttggttcctttctcatttttatttttgtatcttctgtaggtcttttctttgtggttactgtagaattacatgaaaacatcttatagttataataatctattttaaattgacaacaacttaactttaatcacatacaaaaactctacttctttacacctccttctcacttgttatcaatgtcacacaa

SEQ ID NO: 645490 - DNA, 500 bp, Homo sapiens
tttcatctcatcttttcatctcatcatttcatcaactcatttcatcttatcgcatcatttcatttcatctcatcatttcatctcctcatatcttctcatctcatttcaatttcatttcattatttcatttcattatttcatgtcatktcatctcatcatttcatctcatcacatctcatcatttcatcattttatttcatcatttcatcttatcatttcatctcatttcatcttatcatttcatctcatcatttcatctcatctcatttcaattttatttcaatttcatttcatttcatttcattatttcatttcatttcatctcattatttcattatttcatttcatttcatttcatctcatcatttcatctcatcatttcgtcatctcatctcatcatttcatctcatcattcatatcatttcatatcatcatttcatatcatcattttatgtcaccatttcatttcatctcatctcatcatttcatctcatttcatc

SEQ ID NO: 645491 - DNA, 532 bp, Homo sapiens
tgtgagttggcaaggagctctccctggagagtagatggagatggagctgtagcaggcacagagccaggactttttakcatgggtcagatctggtggagctcaaccataaagtcccacctccgtggctgcctatctctctcagaggctttggccccagctaaactgcagggagaaagcaaggcctgcttacccgcaggattgggacatgtctatcctgtaggcatgcctgtccaccagcctcttacatggcccctgcctggcttcctgggagaagcatgtatacattgtagtttctgctacccaacctggatgcttggctccacctgaatgcattctggcggcgccagaaatccctcagatccctcaccacacttggaacctggccctaagcatcaggaagagggagtcataagcaagtcgtggcactccagtgctgtggcctgtggttcaggagtgccaagctgggatctgtgctgggcagttgaattggggaggaacccacactcttcagaaactgagaggccagattcac

SEQ ID NO: 645492 - DNA, 532 bp, Homo sapiens
tgtgagttggcaaggagctctccctggagagtagatggagatggagctgtagcaggcacagagccaggactttttatcatgggtcrgatctggtggagctcaaccataaagtcccacctccgtggctgcctatctctctcagaggctttggccccagctaaactgcagggagaaagcaaggcctgcttacccgcaggattgggacatgtctatcctgtaggcatgcctgtccaccagcctcttacatggcccctgcctggcttcctgggagaagcatgtatacattgtagtttctgctacccaacctggatgcttggctccacctgaatgcattctggcggcgccagaaatccctcagatccctcaccacacttggaacctggccctaagcatcaggaagagggagtcataagcaagtcgtggcactccagtgctgtggcctgtggttcaggagtgccaagctgggatctgtgctgggcagttgaattggggaggaacccacactcttcagaaactgagaggccagattcac

SEQ ID NO: 645493 - DNA, 532 bp, Homo sapiens
tgtgagttggcaaggagctctccctggagagtagatggagatggagctgtagcaggcacagagccaggactttttatcatgggtcagatctggtggagctcaaccataaagtcccacctccgtggctgcctatctctctcagaggctttggccccagctaaactgcagggagaaagcaaggcctgcttacccgcaggaytgggacatgtctatcctgtaggcatgcctgtccaccagcctcttacatggcccctgcctggcttcctgggagaagcatgtatacattgtagtttctgctacccaacctggatgcttggctccacctgaatgcattctggcggcgccagaaatccctcagatccctcaccacacttggaacctggccctaagcatcaggaagagggagtcataagcaagtcgtggcactccagtgctgtggcctgtggttcaggagtgccaagctgggatctgtgctgggcagttgaattggggaggaacccacactcttcagaaactgagaggccagattcac

SEQ ID NO: 645494 - DNA, 548 bp, Homo sapiens
catcttcctgggagccccatctcacctgccctccatccccaggrctcctgctcagcacttcttactttcccaggacaagcctggctccaacagacatctctagatgctgtgtttctctttgtggtgagcaaagaaacagaatgagttccattttttaatttttttctaattttacctataacttatttattgtaaaaaggtttgggctgcaggagacctgacccacccacgcaggaggcctcagtagcctcccaatccaccctgttactaaatatttccactcctaacaatatagggggaagcaggagcaagtgcagtttcactgcaccagtgctgtgaggatggggccagaagggtcctgcccagtaggattcaataggaattatatagaaataaacatctcaatgtttgtttggacggattgacatggagaaatttaattttgataggttctagtacacagaagttaagcttcctaacagccatgagtttacagcttcctctttctgaatttggcagtgttttttgatgtccaaattgccacgatg

SEQ ID NO: 645495 - DNA, 559 bp, Homo sapiens
agcctcccaatccaccctgttactaaatatttccactcctaacaatatagggggaagcaggarcaagtgcagtttcactgcaccagtgctgtgaggatggggccagaagggtcctgcccagtaggattcaataggaattatatagaaataaacatctcaatgtttgtttggacggattgacatggagaaatttaattttgataggttctagtacacagaagttaagcttcctaacagccatgagtttacagcttcctctttctgaatttggcagtgttttttgatgtccaaattgccacgatgtccacacatatttacaatagtttatattattcattttgtattactaattgtgcactttggccaacagtgtttcatacatcatggttggtttccaaccttgcttgaaaattggaagtgacagccctttatggaatgttgcttttgacactcttccatttaaggctctgtgtccccacagtgctacgaagacaaatagtcatcactcttccattttgagggggccagggtaagcaggtgcaatttgagaatacaaagt

SEQ ID NO: 645496 - DNA, 426 bp, Homo sapiens
gattcattttcacagtctttcatgttttggtcatattacattgtattttgctgccatatgactgatctctttttgttaaatgtgagatactcgttaaaaaatatttagcaatgaattgaggcctagtrgcatgttatcttgctgcagaagagatgggagtctacttctgggggatggtcacgggtcctccatacaggctgcaattgaggtcatcggtgcaggctcagtccctacaaaggccagggtatttcctgtccacctctattctgatgcatgactcttctgggtctcaaccagagccagtggacttcagtacgggtcgctttcattggcagaccctcaatccacttgttttccatctaatcccacgcatgtgtgcaaaagctgctgtgcttctttgcatctcagtagttccttctggaattc

SEQ ID NO: 645497 - DNA, 309 bp, Homo sapiens
gcctagtggcatgttatcttgctgcagaagagatgggagtctacttctgggggatggtcacgggtcctccatacaggctgcaattgaggtcatcggtgcaggctcagtccctacaaaggccagggtatttcctgtccacctctattctgatgcatgactcttctgggtctcaaccagagccagtggacttcagtaygggtcgctttcattggcagaccctcaatccacttgttttccatctaatcccacgcatgtgtgcaaaagctgctgtgcttctttgcatctcagtagttccttctggaattcagc

SEQ ID NO: 645498 - DNA, 610 bp, Homo sapiens
ggacagcaggagtagtgatgtcctcactggcttctcatttgcattaagctgtgagcttctttaccgtggggacaggaccctgctcccattgcattctcagcaccacaccacacactccttgttggaggccactccagacagcatgtgctgaaggatgccctgtggtcagaaacaagttcattaactttctctttgaagtgttttcrcccctgtttcctagcgttctgggaattttacacatccttcctataaaaccaagtatcaggtgagatccttaggatcaggaccatgaatcaagtggtgtgagggcaacacagcaaacttaccctttttaggccatttcctttttctgccctcaatgtctgtgaagtgaaccttgttaaagtcagtcaacaccagggtggatggtttgccgttgtcacctattttcaggacataacaccctgacttaggagccattccgatcatttctaattcaatagatgcgcccagcattcagattgccttttctctcaaccaggatctttaaagtcgatgacaagagttccagtcctgaatcatggcaaagtgcagtagtgaactgcggggttaatgacaccatattctggaa

SEQ ID NO: 645499 - DNA, 558 bp, Homo sapiens
tgaattaaagatgagaatgaaaacctcaaagcttttagaaagacataggggaaaggtttgatcttccttttgttggtgaaggtttgcctttaccaccaatcacctgatctatctggctattatctgtactattgcaggtctataagaagtacaaagagaagaagatgtacataggttctataattctattgttcaatcaagccttaaggaccattgagtaaaaggtctttatagactggaattctaagacaaaatttgccttgggtcacaataagaacctagtaagaacatttctctttctggtctgtgtatgagaattgggctttcaaagcactcctctctccaggcattcagtctgcaaaggattgatgatttcttgagtctgaagtcaggatcagcttgatcttagggccaaaccaactgtcagacatgtttgttagtaaattgtgctacctcctggaataactctggtttatgtattctcattcttgcatatatctctctaaatgtaatggtttcatccaggacaatttrgaattgcgctagctaccaaaacca

SEQ ID NO: 645500 - DNA, 437 bp, Homo sapiens
gtgttatccctagagtctctgagtatgctaggctatattgcatatgacaaattaactatgccaaagtacaatgtcagaagttatagtttctagaactctatcagccgttccttagagaagggagtttstgagcttatgtaattggctgggtgtctcttctgtcccattttctggcatttcttttctctgtcctctactgcatccattgactgcttccccactccatctcctgcctctaagctttagtaactttaatatacaaatttagtcaacttagttctttctagatttaactctttaattcttgataatgcaggaagagtaaggactgtttaccttaccacccccaaaaaacaagcagtgattcttaaacaaacaaaactcaactgctctgaagtgaattattctatttcccagcaattagtgatggttttaat

SEQ ID NO: 645501 - DNA, 529 bp, Homo sapiens
ctccagggacgctggcctccttttgtcatcttgccattaatgccaaaragagttaggcagggatcctgctcacaggacccccaagggacaaaggtagatcacattacagtaatggagggagcactggcttgaattctgttgggaagatataacgttagtacagtgaaggaaaaggagagggagggcttcatcccactgcgttttctgctgctgcaacaacagatctgtgctggcgtctgggtgcagctcacaggtccagcagtaagtgacatggtatcagacttttctgtgcgcttgtctgtctcccccgactagaaaatgagtactttgagggcagggacactgtttcctttgttttaaaatgctgttttagtgcatgtaggaccttgggaaatttcttaaccatctcaagtttcctcaactgtaaaatggggataataatagtaccttcctcataatattggtgtgaagattagcacatgttgaataaataacacaatgaatgaagtgactttccttccatttttat

SEQ ID NO: 645502 - DNA, 609 bp, Homo sapiens
tgaactaggcccagagacagtgcctgaaggagggaagggtgacatttacccactccccattcccaggctgcaccacttgcagctccaaaagagaccccttccatccacttgagragaggagagggaagagtggagaaggctttgtcttgtgtcttggataccagctcagtcacagcaggatagagtactcatcagagttttgaggctccccttccaggctctagttcccatacaatgtttctagacacaccctgggccagaagaaaggccactgtcttgaaggaaaggacttggtccttgaaacctttatcttctgctcaccaaagagcccttgggccctgaataatcagcaggaatacccaggtaatatgtcaagggccttgggtgaggctctgagacttgctggcttcaggtaacagcatggcacaggagggtagggcactaagtgagcttttaggatgtctgattccaggacttgacacagatggcatttctggacctgctggggcctagaagggagcccactgccctgaagggtgagtccaggtaacatttaccacaggctgacgtaagagcccttgggccagaagggaacatcggcagtagcct

SEQ ID NO: 645503 - DNA, 609 bp, Homo sapiens
tgaactaggcccagagacagtgcctgaaggagggaagggtgacatttacccactccccattcccaggctgcaccacttgcagctccaaaagagaccccttccatccacttgagaagaggagagggaagagtggagaaggctttgtcttgtgtcttggataccagctcagtcacagcaggatagagtactcatcagagttttgaggctccccttccaggctctagttcccatacaatgtttctagacacaccctgggccagaagaaaggccactgtcttgaaggaaaggacttggtccttgaaacmtttatcttctgctcaccaaagagcccttgggccctgaataatcagcaggaatacccaggtaatatgtcaagggccttgggtgaggctctgagacttgctggcttcaggtaacagcatggcacaggagggtagggcactaagtgagcttttaggatgtctgattccaggacttgacacagatggcatttctggacctgctggggcctagaagggagcccactgccctgaagggtgagtccaggtaacatttaccacaggctgacgtaagagcccttgggccagaagggaacatcggcagtagcct

SEQ ID NO: 645504 - DNA, 626 bp, Homo sapiens
ggttattcaaactagagttcaatcaaggaccacacattgcatttcattgttatgtctgttaagtctcattgccttatttaatgttaaacaacctccttccttttattccccttaacaataattggtcaaaaaccaggccactggtcctttacagtgtaccactttctggacatttggtcatttgtgatatcatttcactcatttccctaatctttgtatttcttgtaaactgaaagtcaaaactaaagacttgcttagtttcggcctaagtggttttggcaagagcatgtcatagctgatgttgtacttcacattgcttcattatggaaggcrcctactgtctggttgtcccactgaacactgagatagagccttgagtttaggtggcaacagccaggtccctcctttattaagtcagactttcccccctgtgactgggaaataatcttgggggtgacgttttggcaccaaactatcccattatggttttaacatgtattgatgacacatgcatgaatcatttctcttattaggggatacaaaatagtgatttttaaattctgtaaatctatatattattagctggggctttactgtaaagaagaatgttctatcatcatctggta

SEQ ID NO: 645505 - DNA, 617 bp, Homo sapiens
taccagcaaaacccagcaactttcttgctttgacaggggctggttaggtcaagtaatgtgacagcagaggcactgaatgtgacagggctggaactgagaaaatcaaaagaaaaaaatcaagaaagtacttaaaaatgtattatataaagttagactaaaattttaaaatagcaacactcagtattgacattataaattggcatacccctttaaaaaaaacaaaatgaaaaggacttaaaaatttttctagactttgacttagtaagagcactagtgagaataactctaagagaataatttggtggtgggggcgggggaaacacatataccaaaacatacacataagttctttcatttgtaccmtttctttaaatagtttggtaccacccacaacccccgaaaaaaagaaaaaaaaagagccatttgcaaaaatattctttgtagcatttgtaattctcaaaaattgaaaaaattaaatgttgaacagatgataaaatagtgattagatatttaaggtatacctaactactggatgaaacattacacagtattaaaaataagtataaataccatttagtaacatttaaaaacgctaattttatgaggtatagtgaaaa

SEQ ID NO: 645506 - DNA, 574 bp, Homo sapiens
acctcatacaggagagctccagctggcatctggcaggtgctcctctgggatgaatcttccagaggaaggaacagacagcaatctttgctgttctgcaacctctgctggtgatacccaggcaaacggggtctggagtgggcctccagcaaactccagcagacctgcagcagaggggcctgactgttagaaggaaaactaacaaacagaaaggagtagcatcaacatcagcaaaaaggatgtccactcagagaccccatcataaggtcatcaatatcaragacaaaaggtagataaatctacgaagatggggagaaaccagcacaaaaaggttgaaaattccaaaaaccagaacgcctcttctctgaaggatcacaactcctcaccaccaaggaaacaaaactggatggagaatgagtctgacgaactgacagaagtaggcttcagaaggtgggtaataacaaattcctctgagctaaaggagcatgttctaacccaatgcaaggaagctaagaaccttgaaaaaaggttagacaaattgctaactagaataaccggtttagagaagaacataaat

SEQ ID NO: 645507 - DNA, 427 bp, Homo sapiens
tccatgcccatggcatagagaagtctctcagctaggaagtcrctctgtgtctacttcttcccttgagttacgagcttgccaaggatcagccatgtttgtagccctatgtccttacatcagtagtgctttcacttaatagataaatttagagcacgtgaattaaaaaactgtttctacaaaaactgatttgaatgctgtgaaaagacacataaaattgaaccacacatacacaaaaacttcattctcaaattaggtgtgagaaagacaattcaaataacatagggggaaatatacgaaaaatctgtaagtcatccacagtcagcttgcatgaaaactgtctttatgttgttgagtcacttgaaagaaaccaaaactggaaataatagattattcactatggatatgatgtattccagaaagatcatac

SEQ ID NO: 645508 - DNA, 571 bp, Homo sapiens
tcctgttgttgattaaccacaatctccatggtcttcactctccccttccccctttttttgtttayttttatgttttgctttatgccccccaactttttttctcttgatttttattttctgttcctgtgttgcagcaagcctcaagttatttctcccattttgtctctagcttttagcaatttcttactcatcagagcatatcaacacctaagattaacgtttagatcccacatctctaggttaatgtgtttatagcaaaacatacaggtataaataacatcctgctgtaattaggcaaggtgactatgctttgcaattacaaaaagagagtggatctcctcctacagaggcaatgacctattgaaagctcatcgtgagtattaactggtacaacatttttggaaaacaattagacaatatttatcacgttggaaaatatatgtatctgttgactaagcaattccaacgttaggaatttatcttattgatataaacctgcaatatacaaagatatacacatatatttcattgagcattgtttgaatgagaataaaaattagaacaacttaag

SEQ ID NO: 645509 - DNA, 571 bp, Homo sapiens
tcctgttgttgattaaccacaatctccatggtcttcactctccccttccccctttttttgtttacttttatgttttgctttatgccccccaactktttttctcttgatttttattttctgttcctgtgttgcagcaagcctcaagttatttctcccattttgtctctagcttttagcaatttcttactcatcagagcatatcaacacctaagattaacgtttagatcccacatctctaggttaatgtgtttatagcaaaacatacaggtataaataacatcctgctgtaattaggcaaggtgactatgctttgcaattacaaaaagagagtggatctcctcctacagaggcaatgacctattgaaagctcatcgtgagtattaactggtacaacatttttggaaaacaattagacaatatttatcacgttggaaaatatatgtatctgttgactaagcaattccaacgttaggaatttatcttattgatataaacctgcaatatacaaagatatacacatatatttcattgagcattgtttgaatgagaataaaaattagaacaacttaag

SEQ ID NO: 645510 - DNA, 571 bp, Homo sapiens
tcctgttgttgattaaccacaatctccatggtcttcactctccccttccccctttttttgtttacttttatgttttgctttatgccccccaactttttttctcttgatttttattttctgttcctgtgttgcagcaagcctcaagttatttctcccattttgtctctagcttttagcaatttcttactcatcagagcatatcaacacctaagattaacgtttagatcccacatctctaggttaatgtgtttatagcaaaacatacaggtataaataacatcctgctgtaattaggcaaggtgactatgctttgcaattacaaaaagagagtggatctcctcctacagaggcaatgacctattgaaagctcatcgtgagtattaactggtacaacatttttggaaaacaattagacaatrtttatcacgttggaaaatatatgtatctgttgactaagcaattccaacgttaggaatttatcttattgatataaacctgcaatatacaaagatatacacatatatttcattgagcattgtttgaatgagaataaaaattagaacaacttaag

SEQ ID NO: 645511 - DNA, 571 bp, Homo sapiens
tcctgttgttgattaaccacaatctccatggtcttcactctccccttccccctttttttgtttacttttatgttttgctttatgccccccaactttttttctcttgatttttattttctgttcctgtgttgcagcaagcctcaagttatttctcccattttgtctctagcttttagcaatttcttactcatcagagcatatcaacacctaagattaacgtttagatcccacatctctaggttaatgtgtttatagcaaaacatacaggtataaataacatcctgctgtaattaggcaaggtgactatgctttgcaattacaaaaagagagtggatctcctcctacagaggcaatgacctattgaaagctcatcgtgagtattaactggtacaacatttttggaaaacaattagacaatatttatcacgttggaaaatatatgtatctgttgactaagcaattccaaygttaggaatttatcttattgatataaacctgcaatatacaaagatatacacatatatttcattgagcattgtttgaatgagaataaaaattagaacaacttaag

SEQ ID NO: 645512 - DNA, 454 bp, Homo sapiens
tggtatggactgtgctttataagaaactgaaatccagtttctattaggtttacatacatcattccacccttggggaaagaaatatgtatagtaaacctatgatcagagctgttgagaactgacaggtcttatttaatttgttttaaaatctgaaggcatactatatttctaaagagcctgaggcatccacattgtaaaagttgagcagctaacctgcaaaacagattaatatgtatgactggaatttagcattccatattttattcatacttcactcttcgatgtattgtggaaggctggtaatattattttaggtctcacttttttttcatggaagtggggataacagagggcaggatatggatgtgtaaggctgatggtgtcctccacaagaagaaatttaraaaacaaaaccttttgactgcatatgctctggaactgacctacacagctt

SEQ ID NO: 645513 - DNA, 581 bp, Homo sapiens
cactcaacaataggaaatggggaataatatagtggggagggaaagaaaggggaaagggttgaaaaatctacctagtgggtatgatgctcactacctgggtgacaggctcaattatacctcaaaccacagcatcatgcaatatactcatgtaaccarcctgtacatgtaccccctgaatctaaaataaaagttgaaattataaaaattaaaataaaacaaaactaaccacagacagattaaagtccaagaaacacagtagacaaatttcctttcatggaagctactctgcaaggaaatgccgatcctagcatcatgttttaagttttagcacactatttgttctcctcctggcttagtttggttctattattgttttaccaagaatgatacactttctttttaaatatgtgattttgaaaagctttccctacagatgcaattgtttcaaaattgcatgttggggctacatttctttgttcctgtgggaatacatctttacttatataatgtaagtcagtatgaaaataagatttgcttgaagaaaattgttttccagccatggttcaggaccacttgtagtc

SEQ ID NO: 645514 - DNA, 544 bp, Homo sapiens
cacctgctgctgtggaagatgtaataggagcaggaagcaccatagaaggggaaatgctgtttggcacaagtaagtaaacagataggttaacaggmcaacacatcttgcagcctttcactatatgaacctgttggctaatgttagtaatccacacttcttctacaaaagtcaagctggtggtcactttgcaggaaactctacaaggtttttctcaagacagtcctagcaatgaagcttccaacaaacttaacatggttctacatttccccaggaattgctgtaaactgataagcactgatattctttccattgactaaaacatcatgatcagtcaactgaggcctgggaggaatgatctttgtggctcatatgcaccaaggaggtttgcctcaactcgaagggtggagacactcagatttcagccttccctcatcagaaacacatttcctcatttggatatgtgttttccaaagcacttgggggttttcagcaaatctttatacatctcatggaagtaagaagaaaaaatactcatacttcacag

SEQ ID NO: 645515 - DNA, 570 bp, Homo sapiens
agctagataaatgaaacgaataagttctagtgttctataccattgtagaatgaccatcattaacaatatayagtttcgaatagctagaaggatgttgaatgttcccaacacagagaaatgataaatgtttgagatgatagatatgctaattaccctgatctgatcactatacactgtatgtattgaaacatcctatgtattccattaatatatacactatcatgtgtaaaaactaaaactaaaattaaataccaaaaaatagttgtgttttgaggtcctcccagaacatagactgttctaattctcccttcaagctccattttttattagtctaggcagttgggtatgggagctgccaggaagtgtcaaaatcatgcgactgagcagaatccagaacaaaatgtgaacccggagtgcaaaaaatcaaacagggaaatttaaatggttcactaaaatgggcttaaacaaagtgtgaaaaagaagctgcaaccctttgagatcaatgtgaagtagctttgcaaataaataaataggaaagacatcatggatactagggtccaagttttaggt

SEQ ID NO: 645516 - DNA, 570 bp, Homo sapiens
agctagataaatgaaacgaataagttctagtgttctataccattgtagaatgaccatcattaacaatatacagtttcgaatagctagaaggatgttgaatgttcccaacacagagaaatgataaatgtttgagatgatagatatgctaattaccctgatctgatcactatacactgtatgtattgaaacatcctatgtattccattaatatatacactatcatgtgtaaaaactaaaactaaaattaaataccaaaaaatagttgtgttttgaggtcctcccagaacatagactgttctaattctcccttcaagctccattttttattagtctaggcagttgggtatgggagctgccaggaagtgtcaaaatcatgcgactgagcagaatccagaacaaaatgtgaaccyggagtgcaaaaaatcaaacagggaaatttaaatggttcactaaaatgggcttaaacaaagtgtgaaaaagaagctgcaaccctttgagatcaatgtgaagtagctttgcaaataaataaataggaaagacatcatggatactagggtccaagttttaggt

SEQ ID NO: 645517 - DNA, 563 bp, Homo sapiens
tcaataaaccctctttctatttaccaattataaactacactaagagagcaaaaccatatgttttgatgatttgcattgatttgcccaaactaaggctctctttgttctgtgagtctaaagcttgttctcaccagaaaggaactggctgagatctgagagcttggagatgaaatccatccatttctctaatttttcttggcattaaaaaatgtatttgtaaaacctgtggactctrtggcttgtgcatagtttatgagcacagtagagatgagaattgctaccatttatactttattaaaatatctcatttaacacaggcagtatttggatgtcactgggtgtcagaatttgttttcttttcaaattcttaacatgtaaaatcataaattagaagtgaagaggtaaccaagataataaaatatattttaaataattcaattttctgttttgcaagaatttataataaataattttatccaaaaatgttcatatttttcttttatgactaatatacattggcataaaatatgactaatatgactaatatattatgtatatatatt

SEQ ID NO: 645518 - DNA, 487 bp, Homo sapiens
aaagacagacacttttcttcagttaataatgtaaaaaagactgtgttgacatggttaaattatcaggacccctagttctttatggatgaacaaaatggctggtattaccacttttaaaagtgtcttaaatttgatggagcttatattgagaaataaaaaataaartttatatttattatttttattttttaattccattttccatgaacttttcttttttttcttttctttttttttttcctgaggctaagtttcactctctcacccaggctggagtacagtggcacgatctcagctcactgcaaccactgcctcctagattcaagcaattctcttgccttagcctcctgactagctgggattatagatgcctgccaccacacccggctaattttttgtatttttagtagagatggggtttcatcacattggccaggttggtctcgaactcctgacctcaactgatccacttgccttggcctcccaa

SEQ ID NO: 645519 - DNA, 487 bp, Homo sapiens
aaagacagacacttttcttcagttaataatgtaaaaaagactgtgttgacatggttaaattatcaggacccctagttctttatggatgaacaaaatggctggtattaccacttttaaaagtgtcttaaatttgatggagcttatattgagaaataaaaaataaaatttatatttattatttttattttttaattccattttccatgaacttttcttttttttcttttctttttttttttcctgaggctaagtttcactctctcacccaggctggagtacagtggcacgatctcagctcactgcaaccactgcctcctagattcaagcaattctcttgccttagcctcctgactagctgggattatagatgcctgccaccacacccggctaattttttgtatttttagtagagatggggtttcatcacrttggccaggttggtctcgaactcctgacctcaactgatccacttgccttggcctcccaa

SEQ ID NO: 645520 - DNA, 628 bp, Homo sapiens
tgggtgaccctggcatgcatccccgaggtcatgtgataaaaatgctaaaattcccactatattcagggaggcactatttagcctattattcacatttttacatttaatatcttattttggtatttatcctgacagctataaaattagatgttttcattgcttttcatgctacccttagtctgtgccgctggcaaaatttctaatactgtagtaagctgaggaagaggaagactagcttaagcggatttagcccgagcttgctcttggagaacttgctaatttaaagaattagcaggagaatgtgagtttttcacatctaggtcacccttaggagcaaggtccgtctttctaataaggaacwgtggattagtcatacacagcctgtgggaaggaaggggcgttctcagcccattgcataacagaaagacagtccaagtcttggaaatcagcaattagcagttcacatcgcggactcagctggcctgccaagaagccagcatgcccaatagtgaaatagcctcattttcagacggcctcccgagggaccccgtggatatcacactgtaaaaatggcccctctttataaggcacttttctgccaacaacataatgtaagtaccagcaggta

SEQ ID NO: 645521 - DNA, 552 bp, Homo sapiens
agaatgcactcctgcagggcttcctgacttgtcaaaggtgcttcctgtagaatgtactcctrcagggtttcctgacccgtcaaaggtacttcctgtagaatgcactcctgcagggcttcctgtcccgtcaaaggtgcttcctgtagaatgcactcctgcagggtttcctgacccgtcaaaggtgattcctctactcatgctccattcaggtggttgactttttcagctcccacattcaaggaaataatgttggccccaccagcaactcgattggattttctgttaagcataaagttctgtaccagtaaagaatatagatacttataaaggagaaaaccttgagcacttaattaatctattcattgataaattaatacatcttaatctctaaaggaaaacacattgagggtgttgttgaaaggaaaacatattcctccagagtcgtagatatttccaaagtgatcaccaaatcaagctacgccaacagaaactctgatgcttgggccacactgaactcgtctcctacagaactgcctgtggttcatgaggtgc

SEQ ID NO: 645522 - DNA, 552 bp, Homo sapiens
agaatgcactcctgcagggcttcctgacttgtcaaaggtgcttcctgtagaatgtactcctacagggtttcctgacccgtcaaaggtacttcctgtagaatgcactcctgcagggcttcctgtcccgtcaaaggtgcttcctgtagaatgcactcctgcagggtttcctgacccgtcaaaggtgmttcctctactcatgctccattcaggtggttgactttttcagctcccacattcaaggaaataatgttggccccaccagcaactcgattggattttctgttaagcataaagttctgtaccagtaaagaatatagatacttataaaggagaaaaccttgagcacttaattaatctattcattgataaattaatacatcttaatctctaaaggaaaacacattgagggtgttgttgaaaggaaaacatattcctccagagtcgtagatatttccaaagtgatcaccaaatcaagctacgccaacagaaactctgatgcttgggccacactgaactcgtctcctacagaactgcctgtggttcatgaggtgc

SEQ ID NO: 645523 - DNA, 582 bp, Homo sapiens
ggggctaggaactgggtgctgctgactgtttagggatgcagtcgtgagggggtggagagagggtctcgtgggctgagtcggcctctgggtgggggccacaggactggttgagtcgtgagtcatggatgtgsatggggtccattggttgccagaatgaaaaagtctgaaaaacatctccaaagacaaatcttaggtcctgcaacagtgatgttatctataggagcaaccggagaagtcacaaatcttgtgagctctggccacatgactcctgagcagtaagggattctagaaactatgcccacgtttagcagagcccaggcccctcccataatcctgatcttgtggccttccattagtttccgtccctgaccaaggagggatctgttttagggagggactatggccatccttgtttgcaagtgaaatggtaaactacattcctcccataattagcttggcctatgtccgcaaatgagcaaggccagccagcctgtgaggcggaagcaggtggagtgggacacactaggcttctcttcactgccatcatctttgcaaaggtggtttcatgagtcgcagtgaaca

SEQ ID NO: 645524 - DNA, 535 bp, Homo sapiens
attttcacactgaagatgggctacccaagattgggtaatttataactggaagatactacccaagattgggtaattgataaacaaaggaggtttaattgactcacaatcctgcacgcctggaaaggccttgggaaacttataatcatggctgaaaggaggcaggcaccttcttcacaaggcggcgggagagwcagcgagcaagagcagggaaaactgccttataaaaccatcagatctcatgagaactcactcattatcatgaggacagcatgggcgaaactgccctcatgatccaatcacctctcaccaagttcctctctcgacatgtggaggttatgggtgttacagtttgagatgagatttgggtggggacacagagccaaaccatatcaatgaacaattaggggaaaaccacacttcaaacaaggatacccatacagcatacaatgtacaagcaagaacaggagggcttcagaaagggcagaaaacagttaggcaggtttttcttcctttacttttgtgagctttattgagg

SEQ ID NO: 645525 - DNA, 587 bp, Homo sapiens
caacattcttaaagaaaacaatcttaaattaaaaatttcatattcagccaaactaaattttctctgcaaagaataaataagatccttttcaggtaagcaaatgctgagggagtttattatcaccagacctgccttacaagagatctttcaaggaacactaaatatggaaaggaaagattattaccagccaataaaaaaacacacttaagtacgcagatgaatgagactgtgaagcaaacacacaaacaagccagcataatagccagctaaaaacaccatgacaagrttaaatccacacatatcactagtaaccttaaatataaatgggcttaatgcgccatttaaaaggcacaaagtgttaagctgaataaaaaagcaagacccaatggtatgctgtcttcaagagacccatgtcacatgcaatgatattcatagactcaaaagaaagaaatggaaaaaaatccaccagcaaagagaaatcagaacaaagcaggggctacaatcctaatttcagacaaaacatacttaaaaccaacaaagttcaaagaaaattaataaaagaaggacatcatatatgctagtaaaga

SEQ ID NO: 645526 - DNA, 563 bp, Homo sapiens
caactttggtgaatatagtatstttggcagatagatattgtctttttaaaactttgaaaatattatctcattttctcccagcttgtaagatccctgctgataaatcaattgactgttaatctgaagggagttcctgataagtcactagatgcttttctctttctgttttcagagttctctctttgtcttagacttttgacagtttgaccataatgtgtcatggagacatttttcttggtatctgtttgaggacttcccggctttgtttaaatctttagctaaatcttggaagttttcagatttaatttgactttattttttcaacttttattttagatgtagagcatataaatgcaagcttgttatacggataaattacatgttgagggggtttgatgtgtggattatttcattaccatacaataagtatagtaccaaataggcattttttctatattcacactcctccactcttaagtaggtcccagtttctatcgtaactttttttgtgttcatgtgttctgaatgtttagatcccacttataagtgagaatatgcagtat

SEQ ID NO: 645527 - DNA, 620 bp, Homo sapiens
acttggctttgcatgactgggttttaaattgctcagcaaagcatcacttggggctaacctgagtctgtgaagttccacaattcaggaatgatggttactgcagcactcttgtgtttcaaggttcgtcatgaagactagcatagattccactgttcaattaaagcaacgtttaccatgatattcctattttccatgatgcaggrtcctgggaagcatctctttcaggaagggagtatgtattcaaggtcagtcagtatatgaatgtgtctgagacttggatggctcaaggggatagagctaggtgttatctggcagtcgcaaaagtgagagatgatgacaaggccaaggtaggtaggagaatggggatccctcattcatttatcccatcattatttattgagcaccaactgtgtcccaggcattgttcaaggttcaagcacaaagccgtgttcaatgggttcaggtagaaacatgcacagttacatcacaacaaagtaaaccatgggaactgcatggtgcagagtagggggtatttgcatggcagttgaagacctgtgtcggacgctgatgcttctataataacccaacttggttcctctccacttttagagccaattaat

SEQ ID NO: 645528 - DNA, 556 bp, Homo sapiens
ctctgttacagtggtgaaatctacaaccataagaaggtagggaaaaagaagcaagaggtctggatgtgattaaacttcagagcttgttggttacgatgacattatatattctgtatcatgctttttactttgcaaagcattctatgttatctcatttgctctaagtatgtagatagggaactgatgaataaaatggtgagtgaaatcacttggtcacaaaaaaaagtgataaaaatggggattacacagtttctttgactcttagaattttttctccttctccccagctttttgttttgaaaaaaattctaacatacagaaaagaacagaatagtgagcacctagattgaataatcattaatgttttgccatatttscttgatttttctttctacacacacacacacacacacacacacacacacacacacagttttttgccaacacatttgagagtatggtgcaggttttgtgacactcctaaatatataagcatttatgtcctaagaataaggacatttttctacataacatcaatactattattaaacctaag

SEQ ID NO: 645529 - DNA, 559 bp, Homo sapiens
gttagggctgacagcttgcaaagaggctaggctaggccacttgccctagggcagggggctgggtcrtcaaaggaaacagcttcatgttcttatagctcctcctgcagctttaagggcacagctgggcagcacatgttggcctgtgtccagccatcagcgcccacctttttgaggccacagctgctctgttttcctcatcagaggttctctctttttctttgaaatttaagcattgttcagttatgaaacttagcattaatttctgtgcataaactaagactggttttgtccttttgatttctaatctcagttcttcgttcagttccaggaatttttctattgaggtgatgatcagctatgatcagtttcttatgtcttctttggaaatcgtgtccctgtaattgggttctccctgcattttctcttgtatgtgtcatctttcacattacaaaaagcctccacttacttagtctgttgtctggatatgtggagtagattgtttcattgttcaaaatatccactgcttctctctgtgggaggatttacaagctgcccttat

SEQ ID NO: 645530 - DNA, 559 bp, Homo sapiens
gttagggctgacagcttgcaaagaggctaggctaggccacttgccctagggcagggggctgggtcgtcaaaggaaacagcttcatgttcttatagctcctcctgcagctttaagggcacagctgggcagcacatgttggcctgtgtccagccatcagcgcccacctttttgaggccacagctgctcygttttcctcatcagaggttctctctttttctttgaaatttaagcattgttcagttatgaaacttagcattaatttctgtgcataaactaagactggttttgtccttttgatttctaatctcagttcttcgttcagttccaggaatttttctattgaggtgatgatcagctatgatcagtttcttatgtcttctttggaaatcgtgtccctgtaattgggttctccctgcattttctcttgtatgtgtcatctttcacattacaaaaagcctccacttacttagtctgttgtctggatatgtggagtagattgtttcattgttcaaaatatccactgcttctctctgtgggaggatttacaagctgcccttat

SEQ ID NO: 645531 - DNA, 480 bp, Homo sapiens
aattttactgaagacattttgtgttttatgagtcatgtttctattgttgcttttagtacttcttctttgtctttgaatagcaagaatttaattaagatgtatctaggttgaatctctgtttatccaactaaatttattgaatattcagattaatgtttttcatcacatttgataatttggggtcattattatttttatgtactttcccccatttctctctaacctattcttcyggatctcctgttatgcatgtgttagtatgcttgatgacatcccacaggattctgaggttgtcttcatttccttcattccttttgcttcctgtttctcaaacaagaataatctttttcctcagactgaatagtctgaagtgacctattttcaaattttctgattatttattttgtcaggtcatatcttctgttgaaatcttctagtgaattttttatgtctaatattgtacctttgttctgcagaatt

SEQ ID NO: 645532 - DNA, 619 bp, Homo sapiens
gtcactttaataaatggtgctgagagaatggaacatccatatacagaggactaaaacatgatttatttttaaaggtttaatgtaattctcgaccctctycttctgcctccccttccataaatacccacttttccctgtgacacaatctaccatggggctttcaacagcatttttaaaatacttttttaactctttaagttgattttttactaatgcttgttccactgattttatatgaagtagtggcaaacaccaaaatttatattactgaagtcttgtagtttcaaagaatgactgctgcatatcatttgtctgcaggaaagaggaacctaatagagtttctaatgttgagaatcctttctaaatcgggttagctcaagaatgtggtcagtcaccaatcataatagcgggtgttgcaactttgccttttcagaaacttctagctgccttcttgtgcctctctcccactctcctggagttctcccagaacaatatgctgagaacattgataagggtaagtcactattagtggaactgtcaacctgaattgtcttcttgcaggacaacttggctgtagctttcaaagttaaaattgaaaaggctttttaatccagcattc

SEQ ID NO: 645533 - DNA, 554 bp, Homo sapiens
gactgaaaaatactatcttcttaagtcattctgaagaattgagaggcacttagttctaagaaatcccattaaatgatgataactcacttttattttactattttaaacagtgattattatgatatgaaatataaatagacaactatttttatttgacatatgaacacgtaaaacaatataaagcattagttgcattcatttgattcatacttatttagtatctgcagaacagttctggccttcttgcagcgtttattctagtaggaagtggtggagagctacatgaagtgttaatttagataagatgatctgaaaatgcttcactaatggaactttgaaatttggaggagaaaaaagactgcacctatactgaaggaargagttatctggctatctagtaggggagaagaacatttgggaaagagggaagacaaggcagaattgtgcttcgcaattttaacaaatagcaagaaagctaatgtagcttgaggacattagaaagagagagagagctttagataaaataaagtcagatacatattcaggggtcaatt

SEQ ID NO: 645534 - DNA, 589 bp, Homo sapiens
tccaggccttcccctgcacttgtatctcctgatatcaaactttgcagcacaaacttgtctcattgtccagaatgcatgatgcctcgtaacatccagaaatgtctccggaattgggatatcagcctgccccagaccacactattagcattagatctgctcacatttgccagtcttaattcttacttctatggaggctgctagacctgcttcttgggtctctctgtcagcaggcaaagaaacaaatcaattgtcacttctttagtgccatgcacatggtactctttcattaactgccattaaattgaacttaaaattcccacggaaaagttagcacagggccacatttttacaaagagcatctctctctttctcttgcttatgtttatcctgatcatagaattcctcaaaaaactttttcactcccatcrtgtaaaggatagtccacaatttttagctttatattcagtactctgaaaaatctcattgaaacctttcttttcaacttcaatttttaccacctctgggaacatcttattttctactctggccaaatatcttccaaccatatcatagaaaagaaatctaagtc

SEQ ID NO: 645535 - DNA, 589 bp, Homo sapiens
tccaggccttcccctgcacttgtatctcctgatatcaaactttgcagcacaaacttgtctcattgtccagaatgcatgatgcctcgtaacatccagaaatgtctccggaattgggatatcagcctgccccagaccacactattagcattagatctgctcacatttgccagtcttaattcttacttctatggaggctgctagacctgcttcttgggtctctctgtcagcaggcaaagaaacaaatcaattgtcacttctttagtgccatgcacatggtactctttcattaactgccattaaattgaacttaaaattcccacggaaaagttagcacagggccacatttttacaaagagcatctctctctttctcttgcttatgtttatcctgatcatagaattcctcaaaaaactttttcactcccatcgtgtaaaggatagtccacaatttttagctttatattcagtactctgaaaaatctcattgaaacctttcttttcaacttcaatttttaccacctctgggaacatcttattttctactctrgccaaatatcttccaaccatatcatagaaaagaaatctaagtc

SEQ ID NO: 645536 - DNA, 642 bp, Homo sapiens
cgcgccacgcactccagcctgggcgacagagcgagactccgtctcaaaaaaaaaaaaaaataaaataaaawaaaataaaattctaggtgacatgttatttgttgttgttggtggtggtggtaatggtgggggtgctgcgtgtgtgtttgtgtgtgtgtgtatttcagccatttaacacactgtttatattgtcttctggcttttattgcatgttgaagacaattcagttgtaattttatgattgactcatacaagtaacatttctttctttgttaccctcaagatttttttttttatcttcaaatcttagctatttaactgggaagtgtatgtgtgtgtgtgtgtgttccttggtatttttcctgctttgggttatctgagattcttagatctatgacttattgtctttcattaattttggaaatttttggtcattatctcttcacatattttttctgccccatttcctctcttctatttctggctttccaattagatacgagttaaactatataatttttttccacagactttgaatgctatgggctgtttttccctttactcttttgcttccttgtatttcagtttagataatttctattaagctaacttccagtccactgattcttttttctgctgtgt

SEQ ID NO: 645537 - DNA, 642 bp, Homo sapiens
cgcgccacgcactccagcctgggcgacagagcgagactccgtctcaaaaaaaaaaaaaaataaaataaaaaaaaataaaattctaggtgacatgttatttgttgttgktggtggtggtggtaatggtgggggtgctgcgtgtgtgtttgtgtgtgtgtgtatttcagccatttaacacactgtttatattgtcttctggcttttattgcatgttgaagacaattcagttgtaattttatgattgactcatacaagtaacatttctttctttgttaccctcaagatttttttttttatcttcaaatcttagctatttaactgggaagtgtatgtgtgtgtgtgtgtgttccttggtatttttcctgctttgggttatctgagattcttagatctatgacttattgtctttcattaattttggaaatttttggtcattatctcttcacatattttttctgccccatttcctctcttctatttctggctttccaattagatacgagttaaactatataatttttttccacagactttgaatgctatgggctgtttttccctttactcttttgcttccttgtatttcagtttagataatttctattaagctaacttccagtccactgattcttttttctgctgtgt

SEQ ID NO: 645538 - DNA, 642 bp, Homo sapiens
cgcgccacgcactccagcctgggcgacagagcgagactccgtctcaaaaaaaaaaaaaaataaaataaaaaaaaataaaattctaggtgacatgttatttgttgttgttggtggtggtggtaatggtgggggtgctgcrtgtgtgtttgtgtgtgtgtgtatttcagccatttaacacactgtttatattgtcttctggcttttattgcatgttgaagacaattcagttgtaattttatgattgactcatacaagtaacatttctttctttgttaccctcaagatttttttttttatcttcaaatcttagctatttaactgggaagtgtatgtgtgtgtgtgtgtgttccttggtatttttcctgctttgggttatctgagattcttagatctatgacttattgtctttcattaattttggaaatttttggtcattatctcttcacatattttttctgccccatttcctctcttctatttctggctttccaattagatacgagttaaactatataatttttttccacagactttgaatgctatgggctgtttttccctttactcttttgcttccttgtatttcagtttagataatttctattaagctaacttccagtccactgattcttttttctgctgtgt

SEQ ID NO: 645539 - DNA, 604 bp, Homo sapiens
attttgacactgtctaaaggtaaagcagccctggaatgaargtatctgtctctgatcattaccattgcttaaaggaccactgatatgacatattgctgttttctgttgctaaagagttaaactttcttgtattgatgtctttttcttgggggtttagaggatctctcacatgctcaggctgatcttcattgttccagatttgtcatgatttctgggctacagagaggcaactagagataaagccaatgaaattttgagaacattacttgtgagagcctggctgactgtggcgatcaggcctctaggaatgccagttttgaagaggggttaggatgcatctagagtctagacgcgatgtagcaggcccagaaatgcacagttatttgaccacctagagattacgagactgaagggatatgccacccagattaactttccctaagctagtattaaaccaaaacaaaaaaaagtctagattttgcttaattttctaagaggacattgtagaataatcttttttgaaaatgagagtttaaatctcaacatacattcacaagcaaacttcaaaacctctaattgctctgattttggtgttctcctcttt

SEQ ID NO: 645540 - DNA, 604 bp, Homo sapiens
attttgacactgtctaaaggtaaagcagccctggaatgaaggtatctgtctctgatcattaccattgcttaaaggaccrctgatatgacatattgctgttttctgttgctaaagagttaaactttcttgtattgatgtctttttcttgggggtttagaggatctctcacatgctcaggctgatcttcattgttccagatttgtcatgatttctgggctacagagaggcaactagagataaagccaatgaaattttgagaacattacttgtgagagcctggctgactgtggcgatcaggcctctaggaatgccagttttgaagaggggttaggatgcatctagagtctagacgcgatgtagcaggcccagaaatgcacagttatttgaccacctagagattacgagactgaagggatatgccacccagattaactttccctaagctagtattaaaccaaaacaaaaaaaagtctagattttgcttaattttctaagaggacattgtagaataatcttttttgaaaatgagagtttaaatctcaacatacattcacaagcaaacttcaaaacctctaattgctctgattttggtgttctcctcttt

SEQ ID NO: 645541 - DNA, 604 bp, Homo sapiens
attttgacactgtctaaaggtaaagcagccctggaatgaaggtatctgtctctgatcattaccattgcttaaaggaccactgatatgacatattgctgttttctgttgctaaagagttaaactttcttgtattgatgtctttttcttgggggtttagaggatctctcacatgctcaggctgatcttcattgttccagatttgtcatgatttctgggctacagagaggcaactagagataaagccaatgaaattttgagaacattacttgtgagagcctggctgactgtggmgatcaggcctctaggaatgccagttttgaagaggggttaggatgcatctagagtctagacgcgatgtagcaggcccagaaatgcacagttatttgaccacctagagattacgagactgaagggatatgccacccagattaactttccctaagctagtattaaaccaaaacaaaaaaaagtctagattttgcttaattttctaagaggacattgtagaataatcttttttgaaaatgagagtttaaatctcaacatacattcacaagcaaacttcaaaacctctaattgctctgattttggtgttctcctcttt

SEQ ID NO: 645542 - DNA, 641 bp, Homo sapiens
actgaatccaactctggagatgggccaggcatcaragggcctcaaacctttcctggtggctttcattgcagccagggtttctaatcactaccctcacatctgctcctgcatccatattcctcccagtcagacaaggagggatgggggtttatgctgttcctttccttccaggcaacccatggccctgggactctgcaacagagtaggatgggatccataagtccatgcccctgtgaccacacctgcccagtgaagggcctggccgcactgaatgcactcaatctttctaacacccagacatgtgagttgtgttcctccatctcaagacacactgaactctttcttaagtaaaataactacactgaagttgtccttgggtcagcctcatctttccaaagatggagcaaataaaggccaaggtgctaggtggtggtcaagccttccctggatccagctcttctctcggatggccccatgccatttccactcaactaggaaatgccatttacacattcagagcacaacgagacaccctttgagacagattatttaactgctcctcatagcagcaattttcacctctcccattttgctgagagaagattccacaagggactgctggtcctaaagaaactgccctg

SEQ ID NO: 645543 - DNA, 526 bp, Homo sapiens
aattggaagaaaataaacacagccaggacctatgtgacctatgtgggagttaatytgggaaacagagtttttagctctccaacctttggcatgggtgctgagccagaccaccacatcctccacagaaaaggagaccatgaccttcttttagacaggagccaaatcatactagagttttgcaaactgtgacaagcagttgcacttttaaaacaataggaagccatcagaggggattaagtaggagttagctttttcaaatgtttagtatggttttaatgtagggagtagattagaagttaggagtgaaatcaaggtgattgaaggtgattacgtcagtttaggcaagaggtgatggtgacttggaacagtgtgggaatagaagtggtgagtagatttaaaatagatttttggtattctgaaaaaaaactctagacaaattaagtttagcaaaatttatctgagcaaagaacatttacaaatcaggtagcactcagaaccatgagaggctcagataactctacccagc

SEQ ID NO: 645544 - DNA, 608 bp, Homo sapiens
cattacttcaactttctcatctccctttcattcctcagctccctcaactctcaggtttacgactccctgtccctagagatgctctctgtaagatcagctgtggctcttcactagctgagataaccagcccaatcttctggggactttcagtcttgtttttattagatggaccactcctcttcatttgacagcaygttgatgatcaatcataatcttttttatatacttagctgtctcggttctctgacctcattttcttcctgcttttctctgcattcttatcttctcctttgaaaaatcctcctttctccaactttgtcatatgttggagctcttcccttctctattctttagttcttttctcaatttttattttcttggggtgtttaaattcactcttatggtcttacccagaactgatctattattgctttgtaaaaatctacttttcctgagcatctattcaactgtctattcacaaggccattttgtgttagtcacaatgggctagctgcccatatccttgagctttacaagggcctgccaatacctgtgagacctaaatcaaagaacaatggactccaaaatcaaaaacacctggtgaaggc

SEQ ID NO: 645545 - DNA, 563 bp, Homo sapiens
cctgccacattctttgagccagtaaaaacagccatttaaagaagcaaaggaaatgaaaaataatgagcaatgatgataatattttctccattgtcttttgttttaaatttgatttccctttggtctcaggtagattgtttgcactataaagtaatcccattaagcaatcaaacaataggactgcacctgccagctatcacagcaaagacagggaagacccacatcccacatcaactcttctgtgacaaacacagtatcaattcattatatcatcttggaactgatcagccaggraagtagtagttgtttggttccatttatgaaaagtatgagtgcacatgttttaagagttttgtatatgctcttgtccctgcaagcttatataacaggaacttaaagtacaagttaaaagttgttaaaaggcatttttttcacaaaatgccctacaaaacatggcattaatgtttactttttactattattcattagtcttgtgaagatttaagggataaaagtaccataagtaaggtaacacgagtgtataaaggtgtataaagacctga

SEQ ID NO: 645546 - DNA, 475 bp, Homo sapiens
tttagcctgctacaatttcatgaatgctggcagaagacacacactgctgggtgagaaacagagaatgttactactcacagcaatagctttgtatctgtggattatcaatgttggcaccagtacctcgggtcctaatgctaggcgatatgcatgcatatatattaagtttaattacagagaaagagccartagcttaagtaactcattcataattgtccaaaagcttgtctgagctttgtcatgattgaagacattaccattataacactgcacagtaaagaaacttgctccttgctccaaaggaagatgctatctctctcttttcaaagctgcatgttattaaaaaaaatcattgaaaagatagtccagaagaaagtcaatcaatgcctgggcttgcaagacatgtagaaatatgaaagatccatgaagaattctctctcaataattagtttggaacataaatatttaatacatg

SEQ ID NO: 645547 - DNA, 406 bp, Homo sapiens
taagaggtagaaccgtggccaattgtctttgggagaaagtgggatcaaggacaactccaggattctgcctgagatgggacacactagagcattacttgggaatgtaaataataatatcaaattattgaatgatttccatgggctactctcttcatataccagttctaattctgataagcttgtatcattatcttctttttaaaargcatgaaaacagaggctcacagagatcatattattttccccaagttgcaatgatggtaaacacagatgacagctggacatcaactaggtctgggtggcttccaactccagtgactcaatgctgctccacacggccttcttacaaggaaaaatgagaacaggccgcgggccggcttctgtaaatcgcgtgttgttggaattc

SEQ ID NO: 645548 - DNA, 569 bp, Homo sapiens
gctgctttaaccagtgtagagaagaccgttaaatgaggtcttctggatttttgtgttgttgaaggttgtctctggggggaaaatactgcgtgatagaaagttagaagcataagtgcaatgttgacgtttctttttgcagctgaagatagtacatatatttttagagctatatggggcgtttttatactgttagtaattcacgctgagttgggaagaatgcattatttatttttaaaaggaaaatgttatcagtgtcctaataaaccaaaagtgggttgatggaccatctcctgttatacttcactcaaatatataaattaataggatctagtttaaagtaaaaaaagtaacagtctctgctctcttcctatttcttcacatgagttctagagtttcragttcctttcatcttttacagtcactttttgctccttaaaactagcatagaagtaataagtagaaaaaacaatgatatgcctccaggttaaagaacctcataccaagaatttcaggcttaagaaatatccatgaatatctgaatgatctaggttaaactgtaatgtcacttt

SEQ ID NO: 645549 - DNA, 481 bp, Homo sapiens
tctccttattttgtagatcaggccatgctaaattactcttctgatgtcaaagagatatttaatgcagttttggagctaaaattaaactgtcctgatgtacacgccaaagcttcttcagtaggtattgtggatatgctctgtaatggacacactggagatctgatctgtttctgacccattggtctatgtcacagggtttagcatattgccttctcagtcaatttaaggattggaaagccaatccttaaatataaactcagatttgttcctccaatatgtgatgtatttgaattaagaggtaagaatatctttaaagactctggcacctcagtctcatcctcagagtcattttactgtgtgttaagtatgtctcttttattttctggataaaaacttttycctccaagaactggatgtcacatggagaaaggatgtgtctaattcccagacctttggtactcatagtaaacctcagagatta

SEQ ID NO: 645550 - DNA, 420 bp, Homo sapiens
ttaaacttaacttgataccaaattgacctaatagatatttagagaaaattccatccaacaactgaagaattacctttttttttttttttttttacattagcgcatggaacattcttcaggctagaccgtatgttaaccacaaaacaagtctcaacaaagtttaaaataytgaaatcatattaagtgtcttctcagaccacagtggaataaaactagaaaccaataccaagaggaactttgaaaactatgtaaatacatggaaattaaccaatatattcctgattaaccattaggtcaatgaagaaattaagatggaaataaaaaaattttgtgaaacaaatgaatatggaaacacagcatatcaaaacctgtgggatacaacaaaagtagtgttaagagggaagtttatagcaataaatg

SEQ ID NO: 645551 - DNA, 595 bp, Homo sapiens
gtacaaatttttatttttcttcttatttagtttggttcaatcctaacttttttcttcctgctccttcctacctttcaccatacacacctaagggtacccatgttgaaaacccaatatatgtccttccatattttttcctgcattcataaatcctcttttttaaacatgttttatataattttttactgttttataaaaatgaataaatattaagtagacttttggtataytgttttcctcattcaacaataatatgaacatttatcttaatctagattaaattcattcttatttaaaagctacacgatattatatatacaatggaggtaccataacattattggtggacatttctttatacctactttttacttcaatactcataatgtaataaatagctttgtttgcattattcagcgttttatactagtggtcttatttttaatatatataaaggctataatactacattctctgttcatatgcactactctgtttatttggcaatgctatgtaagtttattagttgttttgatatctggtgagagtacactcttacttttctacttcttattaactttcaagctatattagg

SEQ ID NO: 645552 - DNA, 585 bp, Homo sapiens
tcaggccaaaacaatatgggttgtgcaacaggaggagctggttgattaaattcagcatctcatctcataaaatggggtttaaaaatgtatctattttatacaggtgggactagggattaaatgagttcatttaaaaagaaagctgattttacataatttaattcttattccttctgcaatttcacattcattcaacaatagcagtaggctgagcttcatgctgtatttgaatggaacaaatattttgatttttaaaaaagccactrcaagtaatgcagggaactcctgagacatacacaggtaacggaatgcataaagaagtgcaggatttggaattccctggaaggaacaccggaagagaggagaatagccagcaagaccagggtctaacaggttatagtttaatttgaaagaactactagagttgaaaacaaagaaatatacttggattcttcattgtgtggaggagttaacataaaaccttccttaattttaatttgatttagaaagatgagtcaagagtgaatttggggaccactgaaagagcttcctctgtgtttggagattagtcaggggcacatcacc

SEQ ID NO: 645553 - DNA, 585 bp, Homo sapiens
tcaggccaaaacaatatgggttgtgcaacaggaggagctggttgattaaattcagcatctcatctcataaaatggggtttaaaaatgtatctattttatacaggtgggactagggattaaatgagttcatttaaaaagaaagctgattttacataatttaattcttattccttctgcaatttcacattcattcaacaatagcagtaggctgagcttcatgctgtatttgaatggaacaaatattttgatttttaaaaaagccactacaagtaatgcagggaactcctgagacatacacaggtaacggaatgcataaagaagtgcaggatttggaattccctggaaggaacaccggragagaggagaatagccagcaagaccagggtctaacaggttatagtttaatttgaaagaactactagagttgaaaacaaagaaatatacttggattcttcattgtgtggaggagttaacataaaaccttccttaattttaatttgatttagaaagatgagtcaagagtgaatttggggaccactgaaagagcttcctctgtgtttggagattagtcaggggcacatcacc

SEQ ID NO: 645554 - DNA, 442 bp, Homo sapiens
tttaaattaatcaatgaaaaaattttacctctaagactgatgtgtataaataaactataataaggtttctaagtcaagcccatgctgaaataatcatttttttcaccttctgtgggtccatctaactagtaccttcacctacataatttacgccagcattgagaaatagctaattatttcttcttcactccttttcctcaatgcatatttgatttasccttaaagactccagactttgacctacaaaggtacagacaacagatgtttttttgttgctaagtaatgttcagctaagaggaaagcaacctcagagtttggcacatgtaccctaaaacttaaagtataaaaaaaaaaaagaaaagaaaatgaaggtaaaaacctaatgaagtaaacacaaactcttttcatcagacttaactgagatggttctgttttgtatttt

SEQ ID NO: 645555 - DNA, 613 bp, Homo sapiens
cctccaaggacagacttccttgaccacagcagctgtcactgtgagttgctgtggccaagcctgaagtgccagcaaacagcatgctccctagtcacctatatacttaatgctgctgccactgaaagtgactctgccctccccagtarcaaggctgcagcacatcagcctctacagagactctccaggcccctccagagcattccactgtggacctagggtacttatcccacctctgcctaccacagccagcacctgtatgccaccaccagggagcccgaggacaagtatgccaagtctagctctgcccaaccctccggtgcccaggcatgctctccaggagcctggggctctcccagtttagtccactactcttggcacatgagcactctgcctaggggctgaggttggacccacctaacctgctgctaccaccacagtgggaacctactcacatgcatccatgggcttagggctgtccatccagcctgtcacagccatggccaacaccagcctggatcacttggacccagaggtttgtcccaccactgctactactgtcacccataccacacccactgccactcatctgcctggaccactgttaccactacta

SEQ ID NO: 645556 - DNA, 613 bp, Homo sapiens
cctccaaggacagacttccttgaccacagcagctgtcactgtgagttgctgtggccaagcctgaagtgccagcaaacagcatgctccctagtcacctatatacttaatgctgctgccactgaaagtgactctgccctccccagtaacaaggctgcagcacatcagcctctacagagactctccaggcccctccagagcattccactgtggacctagggtacttatcccacctctgcctaccacagccagcacctgtatgccaccaccagggagccygaggacaagtatgccaagtctagctctgcccaaccctccggtgcccaggcatgctctccaggagcctggggctctcccagtttagtccactactcttggcacatgagcactctgcctaggggctgaggttggacccacctaacctgctgctaccaccacagtgggaacctactcacatgcatccatgggcttagggctgtccatccagcctgtcacagccatggccaacaccagcctggatcacttggacccagaggtttgtcccaccactgctactactgtcacccataccacacccactgccactcatctgcctggaccactgttaccactacta

SEQ ID NO: 645557 - DNA, 540 bp, Homo sapiens
tcatatttgaggtctgttcataaagaaccgtttgaacatttctataaaatagctgtttctcccacaagactactgaataaaggtgcaatgatttaatccagtgactttcagatgggcctcttcaagttccttactttagaaattatgtatatagacaatgtctcatgaaatacacatctyatttataagaagttctctaggggacacaatcatacacaaggctaccttgatgtcatgcaaatggtacaatttaggacgtgcactattaacaaaggtgcaccccaaagaagatacaattttattgcctgtataagccttagtttataaaactaaagttttccccaaatcatagctaacatccatgctattataatagcctaaataatttctacttattaagacataatgcagaagtattttattttcgaagaagacatttaaagtctcatgatgtaatatggctgctgtggttccaagaaaacacttacattcttgagcacttttgatttttacagattaaattcatttaacaattaagtt

SEQ ID NO: 645558 - DNA, 540 bp, Homo sapiens
tcatatttgaggtctgttcataaagaaccgtttgaacatttctataaaatagctgtttctcccacaagactactgaataaaggtgcaatgatttaatccagtgactttcagatgggcctcttcaagttccttactttagaaattatgtatatagacaatgtctcatgaaatacacatctcatttataagaagttctctaggggacacaatcatacacaaggctaccttgatgtcatgcaaatggtacaatttaggacgtgcactawtaacaaaggtgcaccccaaagaagatacaattttattgcctgtataagccttagtttataaaactaaagttttccccaaatcatagctaacatccatgctattataatagcctaaataatttctacttattaagacataatgcagaagtattttattttcgaagaagacatttaaagtctcatgatgtaatatggctgctgtggttccaagaaaacacttacattcttgagcacttttgatttttacagattaaattcatttaacaattaagtt

SEQ ID NO: 645559 - DNA, 459 bp, Homo sapiens
aattttctattataaacaattttcaaacagaaatatttccaaaaaacatacacacacattaaagcaaaattaaaaaaaatataaacacaataattttctttggtacatagtcacattcttaactatacctgatctagatataactgtctccaaataccaagtcactggaatttttttttccaattttcagttatgcttttgagattatacggtattgtccagaattgttgtcacagttgaatttaatgatttaaaataacattttacctgtaagacactaacattttttaactgagaaaacactctgtctagaaaaactcagtaatatgagaattttctcaagtatagkgttcacttcatattgaaatgtcttaatatttcagcctaaatattttaatatttagtagttttcctgcctttaaatgtttttcaacaaatattttgaaaaacaaaactcat

SEQ ID NO: 645560 - DNA, 547 bp, Homo sapiens
aagaaaacaatacgaaactcactacccactgtgggctgctttcaagctttaacttcagatcctcctgctagtttttacttttcagagtgtttaagtgcttgtttttgtttgtttgtttgtttgttttttgtagtttgttcagttttagtggtgaacagtgcattagatagattctagttggcttatttcatcttagcaatcatcgaaaacttagatattttatctttaaaattacaaaccaatatggactactacaaacatctattagagcgtcgctrcctttaaatatgattccctaggttgggtgtgatacttctgtattttagaaagttcccctgccccaataaatctaaaatgtaaggttaaaaaccctcatttcttctttatttgcctagttcagccaatttgactctcagttggattttgagaatctcagtgatgtttcagtttggaggtcagttcagaatagctttttattctaattttaatacctctattatcctgataaaagtgttgttgatgaaataattttgaatatctcaataaa

SEQ ID NO: 645561 - DNA, 583 bp, Homo sapiens
aggccagtgctcccccaccttggcatcaccaatgccctttcatgctctttcctgtccccatgcagttcactaatcatagtagctaatatgtgttgacctctggctgtgtacccagcactattataagtgatctgttatgcttattttatttctcaaaaataaaattacaaaatattaatatcgccatttttacaaataagaaaaactgatttgtaaaaagtaatgtaagcttgccagcatttcacaaaaccagtcctggaaccagggccccacatctgctgggctccgaagctcaagctcttctcaccatgtcattctctaagtgccatcaaggcaagtgctccatctgcatcaccctccactgcacctgtgattcccagtgctcaacatggcatagagtgggcgggagtgtcaattaatatttgttgaatgagtgaatcatgatgggaaataaatctctccctgtagcaacattcataatggacrttggaatttgttttgggatgcaggctgagacacattttatgaacctccagccaatcaataatgtagcacatatttattgtaatatatatagccttat

SEQ ID NO: 645562 - DNA, 606 bp, Homo sapiens
gcccttgtcagtatgtttctttactacagagggttgctgctgctagaagtctctatgctcccatgatctgttggtcactgtacttcactttcccaactctcacccccagtagacatgcacactcacatttttaggatccaaagaagagagctgagcttgattttctgtcaggcagaagagcaagatagamaatgtaatttgaaactttttcctgctaatcctcaacacagaattctggattctcatctgaggactaagagcacctttaacactgatgaattagaaacgaggcaaggactaaaattgagttaattctctaatattagaaaatgaagaaatactcatcactggattcacttgcctcactaaatgtattttattacttgaacatatataataaatacataatttttcttatcctttaataacaaattcagagagagaaaacttcattcatattaaaaagtatagactagagatggaaattaaaaataatataccagagaggactgctacaaatgaatgacagcttgttagataaatacatctgtttttgtagatcaaataatgaggtatgaagtagacatggcttcaaagacgatgtta

SEQ ID NO: 645563 - DNA, 606 bp, Homo sapiens
gcccttgtcagtatgtttctttactacagagggttgctgctgctagaagtctctatgctcccatgatctgttggtcactgtacttcactttcccaactctcacccccagtagacatgcacactcacatttttaggatccaaagaagagagctgagcttgattttctgtcaggcagaagagcaagatagaaaatgtaatttgaaactttttcctgctaatcctcaacacagaattctggattctcatctgaggactaagagcacctttaacactgatgaattagaaaygaggcaaggactaaaattgagttaattctctaatattagaaaatgaagaaatactcatcactggattcacttgcctcactaaatgtattttattacttgaacatatataataaatacataatttttcttatcctttaataacaaattcagagagagaaaacttcattcatattaaaaagtatagactagagatggaaattaaaaataatataccagagaggactgctacaaatgaatgacagcttgttagataaatacatctgtttttgtagatcaaataatgaggtatgaagtagacatggcttcaaagacgatgtta

SEQ ID NO: 645564 - DNA, 606 bp, Homo sapiens
gcccttgtcagtatgtttctttactacagagggttgctgctgctagaagtctctatgctcccatgatctgttggtcactgtacttcactttcccaactctcacccccagtagacatgcacactcacatttttaggatccaaagaagagagctgagcttgattttctgtcaggcagaagagcaagatagaaaatgtaatttgaaactttttcctgctaatcctcaacacagaattctggattctcatctgaggactaagagcacctttaacactgatgaattagaaacgaggcaaggactaaaattgagttaattctctaatattagaaaatgaagaaatactcatcactggaytcacttgcctcactaaatgtattttattacttgaacatatataataaatacataatttttcttatcctttaataacaaattcagagagagaaaacttcattcatattaaaaagtatagactagagatggaaattaaaaataatataccagagaggactgctacaaatgaatgacagcttgttagataaatacatctgtttttgtagatcaaataatgaggtatgaagtagacatggcttcaaagacgatgtta

SEQ ID NO: 645565 - DNA, 560 bp, Homo sapiens
atccatgtacttacagccttgttcatttgctagtgaagatacccacatctgacacagcagctgcattgggagatactacctcrttgagttttggtaagttgtaatcctccagggagtttacgtagtggccaaatctgtaaattaaatggggatattagggaaaccatgacccctgcatcctttaggataccaatccgtgctgtttactatgacaatgtaatactcttttggctggggcagtgagcaatggacaaggagtttcagggatttccccactatggtgttcttagccctcaagccagagagtctcaggatccattgccatgtacattctcccagctgctgctagtacatgttggtgaaatcctgtagttccttcagggtagagtctctatccttccttagcagacccagcacctccacagctgagttgtattgtgattaaaccctaattaataggctgggagccgggatatgagataggggtagatcctgcaggagcttcatattgtcttgcacggaagaggcttctacattgtcttcaagcaaggagggaacac

SEQ ID NO: 645566 - DNA, 578 bp, Homo sapiens
tgttataattctaagaaaaagttatctcccaacatttcctccctttgccccaatgaccctctggcttctcttatcagggtgagggtagaatawgaataaatgtatttgtatgtcataaaccattccaaaggcaattatccctatgccccacatgttccagggctttgtatcactggatatggcaatttgaggaggaagagttgccacctaagtagtagggagatggctggtttcctataagctgagaatactaagtgttatgggttcctagaggagatctgtgtgcatcactggtgtacagcacctcaggggaagtaggaccttgaggcaaattgatcccatgggagtttttggacaccaggactcagagagtattcatgtttccagcatgaggagagggaaacagaacatctttcaatggcctgtgtgagtaaaagagcatctctgatagtggcctctacgataaatttaaaaccaatgggagcttctttggtttgtcaggactatgagagcacagagttttcttcacgaaaggatttcttgatccttccctcatctttgaagaactgaggtcagat

SEQ ID NO: 645567 - DNA, 578 bp, Homo sapiens
tgttataattctaagaaaaagttatctcccaacatttcctccctttgccccaatgaccctctggcttctcttatcagggtgagggtagaatatgaataaatgtatttgtatgtcataaaccattccaaaggcaattatccctatgccccacatgttccagggctttgtatcactggatatggcaatttgaggaggaagagttgccacctaagtagtagggagatggctggtttcctataagctgagaatactaagtgttatgggttcctagaggagatctgtgtgcatcactggtgtacagcacctcaggggaagtaggaccttgaggcaaattgatcccatgggagtttttggacaccaggactcagagagtattcatgtttccagcatgaggagagggaaacagaacatctttcaatggcctgtgtgagtaaaagagcatctctgatagtggcctctaygataaatttaaaaccaatgggagcttctttggtttgtcaggactatgagagcacagagttttcttcacgaaaggatttcttgatccttccctcatctttgaagaactgaggtcagat

SEQ ID NO: 645568 - DNA, 555 bp, Homo sapiens
cagctactgcataaaatgataaagggattgtttctagattgggaagctgatgaatctgagttctagtcatgacttactgtataacttggacttgtgctagacagcctctatcccttttctgtttccttttctctttgatgaacatatatcattaagggggaaaaattaataggaaacatgccagctctctgtattaattttctgtagctgtgtgagccagtgttttcagattttagggacagatttgtattcagcagaaaagaatatcaagatttctctttaattacgcccatgtctgtggaaaggagatgatgttataggatcgccatgtgtttttctgacaagatgacttccaaggttctttattctgtgacttctaagttttgctttgggtctttttcttgtataaaagaaytcacttttgatgttccttttctctagtgattttcactgctttattacaaaaaaaaaactggatgtgagatcagttgcaggaaatctggatcctttttcatgaaacattaaaattttcactaagtgttggcctggcacaaa

SEQ ID NO: 645569 - DNA, 471 bp, Homo sapiens
ccattccattgcactcgggttgattccattccattccattccattccattccattccggatgattccattccattgcattccgttccattacattcccctgcactcgcgttgattccattccattccattcyattccattcaattccattccattacaattcgttccattccattctattccgtaccattccattccattccataccattccattccattccattccattccattccattccattccgttccattccgttgcattccattccattccattctattcgggttattcccattccattccattccattccattctattccattccattgcaatcgagttgaatccattgcatttcattccattccattccattccattccattccggaagattccattccattgcattccattacattccaatcccctacactcgcgttgattccattccattccattccattc

SEQ ID NO: 645570 - DNA, 471 bp, Homo sapiens
ccattccattgcactcgggttgattccattccattccattccattccattccattccggatgattccattccattgcattccgttccattacattcccctgcactcgcgttgattccattccattccattctattccattcaattccattccattacaattcgttccattccattctattccgtaccattccattccattccataccattccattccattccattccattccattccattccattccgttccattccgttscattccattccattccattctattcgggttattcccattccattccattccattccattctattccattccattgcaatcgagttgaatccattgcatttcattccattccattccattccattccattccggaagattccattccattgcattccattacattccaatcccctacactcgcgttgattccattccattccattccattc

SEQ ID NO: 645571 - DNA, 561 bp, Homo sapiens
gaaggaaacattaagaggaatgaagaaagaaaaaaatgtaagtcctatgcttagcactgaggttgcaatgataggtaaatctacagtaggaagaaactattaagaagagaagatatggagggagaaagggagaaatgaagacttctctaatgtctactgtgtaccagccatgtggtaaaactttgatatccactatctcattcagtctttaccacatttgtataaagtgcatataaagaaagttaagctcagagtaattttgaaagttacataaatttcaaagctaatcacagaatccaatcttcactggtctttacattatagagtaaaccctttttgagcatcttctgaacaggtgtcatatgctgtgtcagttttccaratgagtggtacagtctctgcttttcagaacctcacaataaataagaacagacttttttgacaacaaatggaagtctaaccacaggtcgatatggcagggctaagaatctggagaagtctatacaatacaaacccatctctgggttttaagatccaaattagaagctcaagtttattcta

SEQ ID NO: 645572 - DNA, 621 bp, Homo sapiens
aagagtatcccaaattgaatcaggagaacagaatagtatgagttcactagttagactacagaatcagatctgatacctggcggagaagaaaaggcaaaggttcctgctgaggggagagtttttatggtgaggtgacagaaaactgcagaagaatgagtgaggggaacattctcttcaattctgtgaggagttcgccccagttatcagtgagctctccaagaacgagccttctcacaggagttgcatcagtggcagtggtaaagggmagggaaattttccaaaagtgtgaagacagcagacctgtaaaagccaccataatggaacaacatgaagcaagattgtgtgtgatcacttgtagatcacccccaaggatctctagacaaccagatagtttcgatggggtaaagtggtcttacatagcaagactgtttgggcataaaaaattactgacatatttcattactacctacagcaaatgaggcccaggatcattcagattacagaattttacatatttcatctgatagaataataataataaaaaattttcatgataattttttaaatacacattttgttttgaaatatttttggtttacagagatcgtgaaaggcagtaca

SEQ ID NO: 645573 - DNA, 609 bp, Homo sapiens
ttgttgtaaatgattaatgacacaagtcttaacttttcttcttaccataaacgattgcctaatagtttgtttctattgtcttagtatttacggttaaaataatcactgataaaatttttaacaaattttcattgttttatttaatgatatccacagtatgaatgcttttattatttttcatggtaaccatagattttaaaagataattagttycaatttattctcatgatatgtctaacatgactttacatgaacataaagtgtagcaacagtaccttatttccagagagttttctagttgaaaatctacatctattggtggagcttcataaaatagactaaaaccatgcaattatgccttccatggtaccaatatttgtattcctacagcctactgcatgtaatgtctgttgtgctgtttaactgtcttctgatagagattagaagagggaactgtaacagctgaactgctaaccatgctttggagaggagaaggcataaaggttccttttgtgatttgactaattaatatttcaagcaaatttaatggcattttattagtttagtgaaatgttgagtcttctttcaaaaaggaacatatgtaaagtt

SEQ ID NO: 645574 - DNA, 575 bp, Homo sapiens
ttggttattttgaatagtgctgctatgaaaattcatgtgaaaatgttggggtaaacttatgtgttcatttccctagttatatgcataagaatggaactggtaggtcacataatgtatttttaaattttaagtaaaatgtcaaatattttccaatatatcaatttaatatgtaaagtttgatattttcttatacatatacacagtgaacagattattatagtcaaactaacaatatccatgtcttcacatggttaacttttgtgtgtttgtggtgagaacacttaggctctactctcagtaaattttacatacacaatacaatattagtaattgtagtcttcatgctgtccttcacattgctagaggttattcattttacataactgaaactttgtaygctttaactgacatctccccatttctccttgccttttcctctggtaaccaccattctactatctgtttttgtaaattcaacttttaggattccacatataagtaatactatgaatttttttgtatctggcttattttacttatcatattttctcaagatttatctatgttgtcacaaa

SEQ ID NO: 645575 - DNA, 622 bp, Homo sapiens
aaaaaacgttagtagaagcttttttttttttttttttttttttttctgagacagtcttgctttgccgcccaggctgatctcggctcactgcaacctccatctccaaggtccaagcgattctcctgcctcagcctcccaagtagctgggactacaggcacatgacaccacgctgggctaattttttgtatttttagtaraaacggggttttgccatgttgcccaggctggtctcaaactcctgagctcagggcaatctgcccgccttagcctctgaaaatgctgagattataggtgtgagccaccacacccagccagaagctttattcgtattagtaatacctcaaaatttgaaacaacccaaatgtccttcaacaagtcagtagatggacaaatgtcatatatttgtataatagaatactattcagcaatacaaaggaatgaattattgctacatccaacaaaattaatatttcagaaaacaatcatgttgaatgaaagaagctggccaagaagagtgcatactgcatgatttcatttatttgaaacactaaaaaatacaaactaatctagagggagagaaagtagatcattggttgcctggggcatacaggggcagggctg

SEQ ID NO: 645576 - DNA, 622 bp, Homo sapiens
aaaaaacgttagtagaagcttttttttttttttttttttttttttctgagacagtcttgctttgccgcccaggctgatctcggctcactgcaacctccatctccaaggtccaagcgattctcctgcctcagcctcccaagtagctgggactacaggcacatgacaccacgctgggctaattttttgtatttttagtagaaacggggttttgccatgttgcccaggctggtctcaaactcctgagctcagggcaatctgcccgccttagcctctgaaaatgctgagattataggtgtgagccaccacacccagccagaagctttattcgtattagtaatacctcaaaatttgaaacaacccaaatgtccttcaacaagtcagtagatggacaaatgtcatatatttgtataatagaatactattcagcaatacaaaggaatgaattattgctacatccaacaaaattaatatttcaraaaacaatcatgttgaatgaaagaagctggccaagaagagtgcatactgcatgatttcatttatttgaaacactaaaaaatacaaactaatctagagggagagaaagtagatcattggttgcctggggcatacaggggcagggctg

SEQ ID NO: 645577 - DNA, 408 bp, Homo sapiens
tgatttcaattttctttattcattttttaaaattgaccaatgtattagtttcctggggctgccattacaaattaccacaaaccaagtggcttaaaacaacatacattttttttctcacagttctggaggccagaagcccaaaaccaaggtgttggcaggtttggttcactctggaggctctgarggagaatctgtcccatgactctctcctaccttctggcagctgctggctacccttggaattctgtggcttggggctgcatagctctaacctctgcctctatcttcacatggccttcttctctctgtgtagctctatgtcttctctttttctgtcccttataaggacactcatcattagatttacaacccatcttaaatcaaagatgatatcatcttaagatcatt

SEQ ID NO: 645578 - DNA, 622 bp, Homo sapiens
catcaatgctccctagagtttaggtctgctcccagtgtggccaagggcccaaggcccaggttccttcattgttttgcacagaaacatctggttttaatgtgtactaccagccttctcacattctaaagttgaacagatgcccggtaacctacagaacccaatgtcagaacacactagccatgaattccttctttctggaagaaacagccctccaaactctaagctctttgaagctaatacttgtgccttattcatctttgtatctaatgaagtagagatgtgagatacatcttttggcactaagcaggaactctgcaaacatttgtgatacctratattgggcttattattacttcaaaaagaaaagatagaaaatatcttatatatgaacaagatgtgacctttgatctaagagtaaagaattgatgtttatagttgcaaaaatacaactggaatattaatttttcccagcattattgtaaaaggccataaggtggtgatattactccttgaaaaacctgttttgtttttttggcttaggaatgagaagaagctgaaaagtgctcttgtttttctgtctctcaatttcttttttttctttctgtctctatattcctctatt

SEQ ID NO: 645579 - DNA, 622 bp, Homo sapiens
catcaatgctccctagagtttaggtctgctcccagtgtggccaagggcccaaggcccaggttccttcattgttttgcacagaaacatctggttttaatgtgtactaccagccttctcacattctaaagttgaacagatgcccggtaacctacagaacccaatgtcagaacacactagccatgaattccttctttctggaagaaacagccctccaaactctaagctctttgaagctaatacttgtgccttattcatctttgtatctaatgaagtagagatgtgagatacatcttttggcactaagcaggaactctgcaaacatttgtgatacctgatattgggcttattattacttcaaaaagaaaagatagaaaatatcttatatatgaacaagatgtgacctttgatctaagagtaaagaattgatgtttatagttgcaaaaatacaactggaatattaatttttcscagcattattgtaaaaggccataaggtggtgatattactccttgaaaaacctgttttgtttttttggcttaggaatgagaagaagctgaaaagtgctcttgtttttctgtctctcaatttcttttttttctttctgtctctatattcctctatt

SEQ ID NO: 645580 - DNA, 394 bp, Homo sapiens
atattccattgtgtgtatgtaccacacttttctttatccaatcatttgacgatggacactttgattgcatatcttggtgattgtgaatagtgckgcaataaacatgggaatggagctatttcttagataatactaatttcctttcactgggatgtatacccaggagtgaaattcctggatcatatggtagttctgttcatagtttttttagaaacctccatactgttcttcagagtggctgtactacttgtattcccacagagtatggaagttccccttttgttacatctttgccagcattcattattacctgtcttttgcataaaagccattttaactggggtcagatgatgtctcattgtagttttgatttgcatttctctgatgagtagca

SEQ ID NO: 645581 - DNA, 625 bp, Homo sapiens
tttttgatgatgaggctctagaatccacatattactagctttccttggggactgtgatagatttaaattgaaaaaaaaaaaacactgcctaatcagtaatacagaatacctcatttatttttagaagggatgtctctgaggagcagaatggtaaagtgacctgccagagtagcacagtatgttaatcaatattaatatgtttactgatttgaaaacttgtgcttttygcctacacaccattttttaaccttcatgcatcacctctaaataatgatagtcagttgtttgttatatactggtcacaataatgaataatgaaagaattgagcttaaatatgtttttttagtgggtactagagaaggcaataagaatagataaaaagggaataatggaagaatagccagcatatggtcaacatgtgataatataatctgtattccagtattgtgacacccctactgtagacgtaacctacattgtattccacagattccctgtctttatttgtcttcatgtttatcaaaatactgtgaaaattcaaacattgcagaaatatataatatgggagaggtcttccataattccatcactgatatcactaatatcaccactgtggtaaaaaag

SEQ ID NO: 645582 - DNA, 473 bp, Homo sapiens
gttcttggatcttgcacaagaaggaattcaaggagagtctcaaagttcagtgaaagaagcaagtttattcaaagttacatcattgcagagtacggtgtcctcagaaagcaagtggaggagcacaccatatttgttttaagttttttgtgtatagaggtctttcctatgcaaagactaractaagctgtgcctacgtacaggtgagcagacagaatgacaaaatttattattctgttgagttaaagaaaactacacttgacattttagtgtgtgagtacatcaaaacataagtgttattttcttgaaagcatatatttttatgggtattgggacatctggactctctactgttgtaggagtgtgtccttataggtttaggctgtttcctcaactataaacatctgagaaccatgggttgtgactgacaaggaatgtgccttgcttgtttaagatggagttgattttaaaatggt

SEQ ID NO: 645583 - DNA, 537 bp, Homo sapiens
ggtgcatgagctgtttctgctcccagcctttctgtcctgaccttcttgtctatcaaacacaaaagtgatcagttcctgctctgtgctccattatacattgcactttactagttgttatacctgacctgctctaaatgtagtatatatttgtgtgtctgcactccccattcctaccccagtgaaacatagtaagcactgaataaatgtttgtcgaatgagcaaataaataaataaataaataggggggggggtgagcatacatggaaaggttgtttatgtcctccttataatgtgctttgagatatatattcttaatatatatgtgggcatatattctaaggttattagtaggtaaaatgaaaatttaaagawattgagtacaagaaaggaaaacaaggaagaattttttcctttttgtactatttctaagaacaccaaatttctagttaaacacacgcacacacaatcggcatgatgtagaattagaaatatgttgaataaatcaattattagaaaatgtaaatatatattaatttg

SEQ ID NO: 645584 - DNA, 537 bp, Homo sapiens
ggtgcatgagctgtttctgctcccagcctttctgtcctgaccttcttgtctatcaaacacaaaagtgatcagttcctgctctgtgctccattatacattgcactttactagttgttatacctgacctgctctaaatgtagtatatatttgtgtgtctgcactccccattcctaccccagtgaaacatagtaagcactgaataaatgtttgtcgaatgagcaaataaataaataaataaataggggggggggtgagcatacatggaaaggttgtttatgtcctccttataatgtgctttgagatatatattcttaatatatatgtgggcatatattctaaggttattagtaggtaaaatgaaaatttaaagaaattgagtacaagaaaggaamacaaggaagaattttttcctttttgtactatttctaagaacaccaaatttctagttaaacacacgcacacacaatcggcatgatgtagaattagaaatatgttgaataaatcaattattagaaaatgtaaatatatattaatttg

SEQ ID NO: 645585 - DNA, 547 bp, Homo sapiens
tgtgacagagtcatgggaagaccagtaattatggaacagcatccaattctgaagcccacaacagaaaaatagtatggaaaacacttggaagggtaggaggagggccacagagacgttaaaaatttgagaaacagctgttttgttgccagaccatggggactcatctgatttaagatagaaaagaaaagtgggaaggagattaaataacagacctcaaagaatgaacactgtcgaaatgtacagtaagcataaatgtayttttcctattcgaataaaaataatttagacagtaactggaacttaggttaggtagttgaaaaactgtcaagtatagcagattggtagaactccatctgctcttcactttttaagaagagagttggcagttacgcttctaagattgcttctaatagaatgagagcctttcctgagatagtggaaaagaaagaatgactgttcaaatacttttcagaccacaatcttaaaatcgacaattgaagtacaaaactgctacaatttcctttcgaaatcttgtttctctctgaag

SEQ ID NO: 645586 - DNA, 288 bp, Homo sapiens
ccagcctgggtgacagagtgagaccttgtcttaaaaagaaagaaagaaaaaagaaaatgcatttaatacctcaataaatatattttaaagttgaaaatcattaagttgaaccaccttaagttcagatgcttcttgacttatgatggggttatgtcttgataaacccatcatgaagytgaaaaattttaagtaaaacctgcttaagtcagggaccatctgtgaatcatgggatatattttacaatgaaatagtattcaaaaatgaaatgaatgaactgtagctcacata

SEQ ID NO: 645587 - DNA, 572 bp, Homo sapiens
tgttactccttttcttttttcctgcccttccttcccccagtagaaatacaccctcagcaggagcggaggccttaggttgcacacctgtttctgaattatggtccctctgtctccttggcaaggggtgggtagtagtccatgagaatgtctgttagtctgttctcccactgctataaagaatactacctgagactgggtaattataaaggaaagaggttcaattgactcacagttccacaggcttaattggaagcatggctaggaggcctcaggaaacttagagtcatggtggaagktgaaggggaagcaggaatcttcatcacaaggtggcaggagggagtgtgttaaagaacaaggaagactgtcctctctgccctgtgccttggcctcctgctggcctgcttgccacccactgccccttccagcctggactttccattcctccaccaagaccattcctccagtaatgacccctaacttgcatgtgaagaaacagcattcaagttagccctctgcactgaatggccattatttacgcattaaaaaagtacataatgtatttttactcagac

SEQ ID NO: 645588 - DNA, 440 bp, Homo sapiens
gactgcagtaaatggagatagtacaattgagataacaaaaaacaaaatcagtgaactttagtagtaaacaataaagttcagtcaatctgagaaaaagagaaaaggtagactaaaaaggaaagagaactcagatctgagggacaataacaaargttccaacattcatattatcagaatctaagaatgagagaagaaaaaaagtaagaataaaagaggagataaaaatgcttaaaactctccaactttggtgaaatatacaaacatattcatccaagaagctgagagagagtctcaaacccaaggaaatccacgctaataaattgtatagtattgacaagaaaagtaaagacaagaaaattttgaaatcagccagagagaaataatgcattaaatatgaggaaactccacttcaaatgatagtgactttctcatctatgaca

SEQ ID NO: 645589 - DNA, 615 bp, Homo sapiens
ccagcaaagaaccacaccttcagctgaagtactggacttgaaaatgactagcagtccatgcttrgtttttgttcattgtctgaattatgacatccaagtttaagtactccccaactatgttaagtcttttaaaaataaaaactctgttaggaaaagtgagactagcatcaaggatttccctctaagaagtgaaaataatgttcgcacagagaaaaaacaaaaatgggtgttcccattttctgtggctaatcataaagaagaaaacattggaagttcaaaatgtaacagtttctattttaattcaattggcttgttacagctgtatacactggtccatacatagtgtactgaccctatggacaaattacaataaattatttcaaatgtaatgttaatgttttcttaaagacaacctgatgaaattactctgaaaaccccttcgacaagtccacacaaattcataccacacaagaaagaagtctgataaggcaaaacagaaaagagcaagttctgtaacattttctgcaaatacactgcatattcaactaaatgccaaagtaatattatatttgagattataacttcatttttaattttagaaactattatgaaagc

SEQ ID NO: 645590 - DNA, 592 bp, Homo sapiens
attgttaataataattccttattttccttttaatgtctttagttcttgtagtgatgttctgtttttccctgacttcagtattttatgttttctctatctttttcttgcttgatgtgtctactgatgtatcaattttattgttttcagagaacaggcttttctatttcatggatttgtttctattatttcccttttctcaacttcattgatttctatctttgttttattcattattgttacttcgcatcttattaagggtagaagtttagattcttgacttgcaatctttctggctttcttaccgaaggatttaatgcagcacattttgcccactgcaacagtttaactgagtcccacatatgctatgttgtgtttttattcaatttaaaaatattttataatctcgctttgactttcttctttgacatcccatgaattatttacacctgagttttagagtttcatatatttagggatatttcagatgtccrcatgttgtaagttgcaaacttaatttcattttgtttagagggaatgttttgttggattttaattctggtaaatttattgatatttgatttattttactgaa

SEQ ID NO: 645591 - DNA, 603 bp, Homo sapiens
ttgtatgcaacagaagttaagtgtcatcagctaaaaatagtagattatatctataagatgttttacgtaaacatctacagcagatatacaaatgataaagcaaaagaaatcaaagcttagcattacagacaactatcaaatcacaaaggcagacaasaagaaataaaaaagaaaggaacaaagaacccacaaaacaactggaaaacagataataaaatggtaataatagtacttaactatcaatatagccttgaatgtaaatggattaaattttccagtcaaaagacacagagtggcctgcctgcaagagactcacttaagctttaagaatacataggctgaaagtaaaaggatagaagaaagtatgttatgtaaatggtaactaaaagagagcaggagtggctacatctatgtctgataaaatagaattcaagtcaaacaccgtcataaaagtcagaggtcattatttaatgtaaaaggatgaattcatcaagaagacataaccattataaatatatatgcaatcaacattggagcacctaaatacacaatcaaatgttaatggaaatgaaaggagaaagagcagatagcaataatagtaag

SEQ ID NO: 645592 - DNA, 593 bp, Homo sapiens
agaatacataggctgaaagtaaaaggatagaagaaagtatgttatgtaaatggtaactaaaagagagcaggagtggctacatctatgtctgataaaatagaattcaagtcaaacacygtcataaaagtcagaggtcattatttaatgtaaaaggatgaattcatcaagaagacataaccattataaatatatatgcaatcaacattggagcacctaaatacacaatcaaatgttaatggaaatgaaaggagaaagagcagatagcaataatagtaagatatttcaatacctcaccttaaacaatagataaaacagacacactattaataagaaaatgcttgacttgatttgcgcttttgacaaaagggacctaacagacataaatagaattttccattcaacaacaatagagtgcacatttttctccagcgcacattaaatattctccaggacagatcacattctggccacaaaacaagtcttaacaaatttaagaagattgaaatgatgtctaccattgtttcagaccaaaatgatataaaactaaaaaccaataaaaggagaaatcttggtaaattcacagataagcaaaa

SEQ ID NO: 645593 - DNA, 593 bp, Homo sapiens
agaatacataggctgaaagtaaaaggatagaagaaagtatgttatgtaaatggtaactaaaagagagcaggagtggctacatctatgtctgataaaatagaattcaagtcaaacaccgtcataaaagtcagaggtcattatttaatgtaaaaggatgaattcatcaagaagacataaccattataaatatatatgcaatcaacattggagcacctaaatacacaatcaaatgttaatggaaatgaaaggagaaagagcagatagcaataatagtaagatatttcaatacctcaccttaaacaatagataaaacagacacactattaataagaaaatgcttgacttgatttgcgcttttgacaaaagggacctaacagacataaatagaattttccattcaacaacaatagagtgcacatttttctccagcgcacattaaatattctccaggacagatcacattctggccacaaaacaagtcttaacaaatttaagaagrttgaaatgatgtctaccattgtttcagaccaaaatgatataaaactaaaaaccaataaaaggagaaatcttggtaaattcacagataagcaaaa

SEQ ID NO: 645594 - DNA, 596 bp, Homo sapiens
aaaattatctaaaaattgccaaaattgtactatttcacctacttttaatacaccaaaaaagtacaagtctacttatttaatttaagaaaaacagaattggtctaatcctcactcttcctgggaaaactagcactttttctcaactctcattaattctgtggaacatctcgtgtgaacatatttgtgtcttgcattatttttcccattgtgctaattttacaataacctatgttagttttgccagcactattataggagccctaatgtcacaaaatcagagaacctacacatgtggacaaaaatatagaagtccaaactcttaaaggcagcaaccacggtgaaytggcaaaaacagtatacctattaatctaaagaacaacaacagcttaaggtgggcatggtggctcatgcctgtaatcccagcactttgagagaccgacagggcggatcacctgaggtcaagagttcttgagaccagcctggccaacatggtgaaaccccatctctactaaaaacacagaagttagccgggtgtggtagcccacgcctgtaatcccagctacttgggaggctgaggcgggagaattgcaaaaaaa

SEQ ID NO: 645595 - DNA, 596 bp, Homo sapiens
aaaattatctaaaaattgccaaaattgtactatttcacctacttttaatacaccaaaaaagtacaagtctacttatttaatttaagaaaaacagaattggtctaatcctcactcttcctgggaaaactagcactttttctcaactctcattaattctgtggaacatctcgtgtgaacatatttgtgtcttgcattatttttcccattgtgctaattttacaataacctatgttagttttgccagcactattataggagccctaatgtcacaaaatcagagaacctacacatgtggacaaaaatatagaagtccaaactcttaaaggcagcaaccacggtgaactggcaaaaacagtatacctattaatctaaagaacaacaacagcttaaggtgggcatggtggctcatgcctgtaatcccagcactttgagagaccgacagggcggatcacctgaggtcaagagttcttgagaccagcctggccaacatggtgaaaccccatctctactaaaaacacagaagttagccgggtgtggtagcccrcgcctgtaatcccagctacttgggaggctgaggcgggagaattgcaaaaaaa

SEQ ID NO: 645596 - DNA, 576 bp, Homo sapiens
tcaggggcccacaatgaataataaaaatactcctatcattcaggaaactccagggatttaaaagttatctcccaggaatcctggacaaagacaaattctttattatacaacaactctatttttttttttttttttttttttttttgagatggtctttcactcttgtcaaccaggctggagtgcagtggtgcaatcttggctcattgcaacctccgcctccagggtacaagcaattctcctgcctcagccctccaagtagctgggataacaggtatgcaccaccacaccctgctaatttttgtatttttgtagagacggggctttgccatgttggcgaggcgggtctcgaactcctgacctcaggtgatccacccgccttggcctcccaaagtgctgggattacaagcgtgagccaccgtgcccagccaamaactctccttttaaaagcaagctcaattttacatacacatatcactgaaatatttactaaatgagtttaatttttttaacctgctactgttcttttcaggaagaagagcataaatgaaattggggagtcagggaagaaccaagaac

SEQ ID NO: 645597 - DNA, 578 bp, Homo sapiens
gtatattaactcttgatcagctatgtaaatattatttatattctaaacatttaaatccgtttataattctatttgtattaaaaaaatctttacaatttaaattttgtaaattttatattttgcagtaaaatctgttagtcttttgtaaggatttctgccttggtatcatgcttaaaaaatctttttctatgcgagttattgaaattcttttcctaaaaataatttcatggctatattggaaactttaacctattttastatattctctcctgcccctctcctctcctacttcctttggtgaatgtttattaggtttccattctgttcaggcactcacttttttttggtactgaaaatgcagtcaacaaggatgacatggttcctgcctccatggagttaacattctaatgagaaaaacagataacagacacacaaccaaatagatatagattataatgtcacagagtgatagttgctataataaaaaatgaagagggaggagcttgagaattaggtggggtgtgtcatgcacatgagccagaaggcttctgtatattactcctgggtttatgacttct

SEQ ID NO: 645598 - DNA, 578 bp, Homo sapiens
gtatattaactcttgatcagctatgtaaatattatttatattctaaacatttaaatccgtttataattctatttgtattaaaaaaatctttacaatttaaattttgtaaattttatattttgcagtaaaatctgttagtcttttgtaaggatttctgccttggtatcatgcttaaaaaatctttttctatgcgagttattgaaattcttttcctaaaaataatttcatggctatattggaaactttaacctattttagtatattctctcctgcccctctcctctcctacttcctttggtgaatgtttattaggtttccattctgtycaggcactcacttttttttggtactgaaaatgcagtcaacaaggatgacatggttcctgcctccatggagttaacattctaatgagaaaaacagataacagacacacaaccaaatagatatagattataatgtcacagagtgatagttgctataataaaaaatgaagagggaggagcttgagaattaggtggggtgtgtcatgcacatgagccagaaggcttctgtatattactcctgggtttatgacttct

SEQ ID NO: 645599 - DNA, 595 bp, Homo sapiens
tactttttaaagtatctattggcatttgaatttcttcctctcaaatttcctattttcctttttsaatgattttataactgagagactttttagtttttctaagatctatttttagattaaagatattgatgcttcaaatgtcaatctgcttcattgtaagccatatttatgtatcatatgtatatttgatttaaaatattacatatatacatatttacatatatacatacttgttaatatgcattagatgtttataatatagatttagacacttcaactaagtctggaaggaatggattatttcataactggtattaggtttgatgtgctgtttctgagttcttaagattattttttattaatatatttttattctgatgctagtacttcaggtctaaattattatagctttatgtatatataatgcatttctagaaagctttatcctgctagattccatttgttagtagactcttttaggatctttgtatatatattcataagtaaaattttaatttttttcattggttttattattttcaggtcatggtaatgaagttattccatattcagaaaatgaatatggaatagttac

SEQ ID NO: 645600 - DNA, 656 bp, Homo sapiens
aaaagacacatatctgcagttgattttggagataaagaacactaacttttaatcttaattaagtaacagaatatgccacgaaagattccatttttcttatcagttgatctatattacaaatatatatacttattattctattattaattatatcaatacatatataagtacctacataatattcttattttacatcttggtctctttctgtgtataagtgtagatatatttatatatatattatatattatattatatattatatatatattatataattatatatatttatattttttatttatatatatatatatatattttgctgttttttgaaagaaaattttgtcaactccacgtttagaagactgactactcccakgttttaaattagaatttaaagctatatcatgatggtgcctaaatttccatttttagctgtgacctctcttttgagatgcagtcttttagatatgcatcttaacatattgtattgggtgtttaatgggtatgttaaaacataaagtgtccaaatcaaagccattgatcccttccctttcaaacatactgtaataactttatcaagatataattcatatagcataaaattcactcttttaaatggtaaaattaagtagtatatttacagaattgtg

SEQ ID NO: 645601 - DNA, 656 bp, Homo sapiens
aaaagacacatatctgcagttgattttggagataaagaacactaacttttaatcttaattaagtaacagaatatgccacgaaagattccatttttcttatcagttgatctatattacaaatatatatacttattattctattattaattatatcaatacatatataagtacctacataatattcttattttacatcttggtctctttctgtgtataagtgtagatatatttatatatatattatatattatattatatattatatatatattatataattatatatatttatattttttatttatatatatatatatatattttgctgttttttgaaagaaaattttgtcaactccacgtttagaagactgactactcccaggttttaaattagaatttaaagctatatcatgatggtgcctaaatttccatttttagctgtgacctctcttttgagatgcagtcttttagatatgcatcttaacatattgtattgggtgtttaatgggtatgttaaaacataaagtgtccaaatcaaagccattgatcccttccctttcaaacatactgtaataactttatcaaratataattcatatagcataaaattcactcttttaaatggtaaaattaagtagtatatttacagaattgtg

SEQ ID NO: 645602 - DNA, 630 bp, Homo sapiens
agcaagactaagcaaaaagagcaaatctagaggcatcacactacctgacttcaaactatactataaggccatagtcactaaaacagcatggtactrgtataaaaataggcacatagaccaacggaacagaatacagaacccagaagtaaacccaaatacttatagccaactgatcttggacaaagcaaacaaaaacataaagtgtggaaaggccaccctattcaacaaatggtgtggggataattggcaagctgcatataggaggataaaactgaatcttcatctctcaccttacacaaaaatcaactcaaaatggatcaaggaactaaatcaaagatctgaaactataaaaattctagaagataacattagaaaaacccttctagacattggcttaggcaaagacttcatgaccaagaacccaaaagcaaatgcaacaaaaacaaaaataaataggtgggacttaattgaactaaagagcttctgcacagcaaaaggaagagtcagcagagtaaagagacaaccaacagagtgggagaaaaatcttcacaacttgtaatcctacaaaggactaatatccagaatctacaacaaactcaaacaaattagcaagaaagaaacaaacagtcc

SEQ ID NO: 645603 - DNA, 578 bp, Homo sapiens
  misc_feature 555, 556, 557, 558, 559, 560, 561, 562, 563, 564, 565, 566,567, 568, 569, 570, 571, 572, 573, 574, 575, 576, 577, 578: n = A,T,C or G
ctctctcctctttccttgtcaaatttgcaattataacctgctctattttcctcttattccttcccaactcttcttcaactcactacaatcagtaccttttgaaaatacctttgccaaatccaccagtgaccatctcttgcaaaatctaacagacacttttagggcttctcttttctcttctctttggccctcaaaatactgtctcaactagttctctcctacctcattgacatttaagtatgcatcagtagatgtttttctctttttgtcttataaataccaactcctcaaggatctcatcctcagctcttttttctttacactctgctctaagaaatctcatataatttactggttttaactaccacctatacacataataaagacattttacaactgcatctgtgttcctggcttcttcccaaagttccaggattctatgaacagctgcaaatactgtatatatgtatacatatttgtgttttcatctgtcatataaccaaattcttcatcagrccatggaaaacatggactaacaaagattttttaaaaaannnnnnnnnnnnnnnnnnnnnnnn

SEQ ID NO: 645604 - DNA, 586 bp, Homo sapiens
aatatgatctttttgtcagtagacaattcctataggaataagacacctttaatttgtttatgtagctttactttttgtcatttctaccttctactttgtataaattattaacctacttaaataattatgtacacaacatagccacacacagtgtctgttttacctcagaaatgtgtcttgaatctgtttcctstctccatcctgatggctgctgccactgctttgactcttgcccttgtcttctcttgcttcgctgattgagatattctatttagtcttttctccccaaagtcctttcgtctcattaaaacgtatacaaaaacatagaccgattttgtcactgccccacttaaaatagcccttggatacctgtggtggtcagaacactgtgtttactcagtagttattatggcattggtggccattcccaatttggactcaacaccacactcatcactaactacacaagcagcatgctcctgctttccacatctgggtctatccctccagatgtgcatatttgtcaagcttttccccagattgattcattagagtcttttacaacactgtaccttttacaaatgtt

SEQ ID NO: 645605 - DNA, 577 bp, Homo sapiens
aagtgggattacaggtgtgtgccactttatctcattttttttaatgagaatatactgctcattaaaattatattctcattaatgagaatataatgagtatattttttatgaatatactgctttaatgaatagattggataaatatacactaaaatcttagcattaactatcttcatgtggaagaattatgaacattttaattcattaactgtgtaagttaatttatcactacttctgaaagcaaggcttggcctattttatttactgttatatttccaatgtgttgtatgtacctagagagtaaatagtaacagctcagtagatatcttttaaatgaatagttgaatgaaagtgatttttatttgctttatgctcatttatactttctaaactttctacagtgattatgtacttctttgcaatcagaaaagaaacaataaggagatctgtattgttgttgttcccagtgcctgytgttacttcattcagaagtctgaaatttgatatgctttcctaagaaatagtcccaactaatgtcctacggaaactagcgaaaactccattcatctaagaaagc

SEQ ID NO: 645606 - DNA, 583 bp, Homo sapiens
ccacctggcccttcccttgacatatggggattattacaattcaaggtgagatttgggtggagatacagccaaaccatatcagccacaatatcttaaaatatcccaaaatatttctactgtcataatttagaaacacaaatgatgataaaataacattttcatgagatgttttatacaaacacagctgttactgaagcatagctctgtatctaaattgtcattagtaaataacctttgaaaatgtccttgttaataatgtagactatgttttataaaatttgaaggacagggataagtgctgttcaaaaattgatttcaaattrtaaaatatttaggattttaatttaatatcaaattaatgtatttgaattgagcctatattaaaagatgtacagtcatattccattttgttgtgtttcacagttattacactttacaaattgaaggtttgtagtagtcctgcatcaagtaaatctattggtgccatttttccaacacatgtgctttctttgtgtctctgtgtcacattttggtaattctccaaatattgcaaaatttttcatgattatagtatcttttgtga

SEQ ID NO: 645607 - DNA, 590 bp, Homo sapiens
tatatcagaataatttcactggaagataaagacaggataataagtgctaatgattgtgccttacttatgtagtgccaggcactatgcttaagagctttacataatgagcaatcctgaggttagaaaagaaaaaatagatgtgaacacacacacttctgtgagtgaaattgcatgttaagaattaatgcttaagttacatattggcaaaatatattttcaatttatgcaacaagatttaggttaatagctataatttaaaatgaatgcctcaacaccaacaaggaaaagccattatcacaatgtacaatgtaagtaggaacaaagtaggaatacaaataaccaataaatgtattaaaatygggtaagcccatcaaagatcagaataaagaaataaaaaaatgattgtacatttttcaccaaataagattggctacaacattaaagttttataatgcctactgttagtgataagttaagaaataatgactttcttataatggtgataagaagacggattcctgtcctacttgttacattgagtaaaatgggtatgttttcctattacaaatcatttttataatataggaaaa

SEQ ID NO: 645608 - DNA, 590 bp, Homo sapiens
tatatcagaataatttcactggaagataaagacaggataataagtgctaatgattgtgccttacttatgtagtgccaggcactatgcttaagagctttacataatgagcaatcctgaggttagaaaagaaaaaatagatgtgaacacacacacttctgtgagtgaaattgcatgttaagaattaatgcttaagttacatattggcaaaatatattttcaatttatgcaacaagatttaggttaatagctataatttaaaatgaatgcctcaacaccaacaaggaaaagccattatcacaatgtacaatgtaagtaggaacaaagtaggaatacaaataaccaataaatgtattaaaattgggtaagcccatcaaagatcagaataaagaaataaaaaaatgattgtacatttttcaccaaataagattggcyacaacattaaagttttataatgcctactgttagtgataagttaagaaataatgactttcttataatggtgataagaagacggattcctgtcctacttgttacattgagtaaaatgggtatgttttcctattacaaatcatttttataatataggaaaa

SEQ ID NO: 645609 - DNA, 575 bp, Homo sapiens
gctatcaaattaaagatactccattgatatttggatacattttagatgtcaacaagatagataatagattatatattataaaatattttgtagaaataacgtttggattaaaaatcaaggcttttactcacttcttggtattacagaagccattatattctgacctgtctccattccctgtgcctcctgctcaattttcttaattatatggacatattggattatttgttgttgccagtgaactgaatctggtgagtcaatacatcaatcattgttctgtgttgctggcaacacggaaaagtaatcaaataagtaattacagatagcccacataatctctgggaaagcctataaccaggcttgaagactacctcacckggaataatacccgaaaacacactgcagggatgtgactccaatggcaacacagtgcaattcaccacagcttgtatctttgcgactgctggcttgggcatagacttctgctgccagaaccactggtggtgttgcctctaaattctaaatgtccttgtctccgtacctaggtgccagcctctgcacttgcctggttttat

SEQ ID NO: 645610 - DNA, 511 bp, Homo sapiens
attctcctgcctcaccctcccaagtagccgggactacaggcgcatgccaccacacctggctaatttttgtatttttagtagagacggggtttcaccatgttggccaggctggtctcaaactcctggcctcaagtgatcctcccaccttggcctcccaaagtgctgagattacagacatgagccgccatgccccacctctcagtgcttctttcgtggcctcttccttcatgtcatctcatcttccaggtccttyctttccagcagggccatcagacttcctgcacagcaactggcttccaagggcacaaagctaatgctgccaggtcttatgcatggacccagaactggtactgtgttcctttgagttaactgagtccacggccaggtcagagtcagtgtggcatggggactgcacaagggatgaatcataggcagcacagttataggggccaccaaagagtgggccacagtcacccagccaggaagtgtggagccaggtgtggcctcagat

SEQ ID NO: 645611 - DNA, 511 bp, Homo sapiens
attctcctgcctcaccctcccaagtagccgggactacaggcgcatgccaccacacctggctaatttttgtatttttagtagagacggggtttcaccatgttggccaggctggtctcaaactcctggcctcaagtgatcctcccaccttggcctcccaaagtgctgagattacagacatgagccgccatgccccacctctcagtgcttctttcgtggcctcttccttcatgtcatctcatcttccaggtccttcctttccagcagggccatcagacttcctgcacagcaactggcttccaagggcacaaagctaatgctgccaggtcttatgcatggacccagaactggtactgtgttccttygagttaactgagtccacggccaggtcagagtcagtgtggcatggggactgcacaagggatgaatcataggcagcacagttataggggccaccaaagagtgggccacagtcacccagccaggaagtgtggagccaggtgtggcctcagat

SEQ ID NO: 645612 - DNA, 512 bp, Homo sapiens
ttaaaatcagttatattttgtttagagaacatagtcaatatgacataatcctgattctttaatatttgtattgggcttgtttgaatgttaaatatatgcatgaaatgtgtatttttgaattttcaggtttgccattccttatgtgggatattttatgcatgttaatttcattattcaaatatgtatgtatctataattttttttcttctgtttgatctctcaattattgagggacttgcatttaattcttctctcggaagayggatttattaagtctcctgttaattctgttacttctagttttacttaatttgaagttatcttgttatatatgtaaaatgcccaacatattatatctgcagggtgaattacacagtttaatattatgtgggatcacattaattcctagtgatactttttgtttaaatatattttttcaaatgagctttacagtttttttagttaggagatattggtggtaaatttgctcctgttaaatttttaatataaaa

SEQ ID NO: 645613 - DNA, 512 bp, Homo sapiens
ttaaaatcagttatattttgtttagagaacatagtcaatatgacataatcctgattctttaatatttgtattgggcttgtttgaatgttaaatatatgcatgaaatgtgtatttttgaattttcaggtttgccattccttatgtgggatattttatgcatgttaatttcattattcaaatatgtatgtatctataattttttttcttctgtttgatctctcaattattgagggacttgcatttaattcttctctcggaagacggatttattaagtctcctgttaattctgttacttctagttttacttaatttgaagttatcttgttatatatgtaaaatgcccaacatattatatctgcagggtgaattacacaktttaatattatgtgggatcacattaattcctagtgatactttttgtttaaatatattttttcaaatgagctttacagtttttttagttaggagatattggtggtaaatttgctcctgttaaatttttaatataaaa

SEQ ID NO: 645614 - DNA, 610 bp, Homo sapiens
aattctacagaaaaggaagagataaaaatatggtataaaacagaaggggaaaaagatgtaaaagaaartaaatttaaaggttaattttaggcaaagaactttgtacatttaagtgaacacaatgatcttattattacttaatgttcttttttaacttttaagtttaggggtccatgtgcaggtttgttatgtaggtgaaattgtgtcatgggggtttgttgtacagattatttcatcactcaggtattaaacctagtaccaattattttttctgatgctctcccttctcctaccttccaccctctgataagccccagtgtgtgtaaaatggtcttggactttttttctgttaattgacttttttttttttggcttctgtaaatttttttttggagtccatatgtgccaaattttttttgattgttctgaattagttttcttatgaaaagattaatataatggtgaaagagaataatcttagagatctcaaaatatcctcctcccaaacacttccccacaaaagtagagagtaataaaatgaatgtaaactacagactggaaatgttgtttctaacttttttaaagaaaacaaaaatatggagatatgtgg

SEQ ID NO: 645615 - DNA, 554 bp, Homo sapiens
cctttggtgccaaactgaatcctgttgactaaggattcaagtcactcctctggactcaggcaccaggctagccttgatgtatacaaactgtcaaataaagartataaaattattattttaagcaagatcagtggaattcaaaaaatacagaaaaacaattgaatgaaattagaaaaacagtacatgatgaaaatgagaaatttaaaagggtaattgaaattacttagcaaatcaaacaaaaattctggagctaaaatatataatgaagtggaaaaagcaatggagagcctcaaaagcataattgatcaagaataaagaatctgtaagctcaaagacattatttgaaaatctacagtcagaggaaaaagaatgaaaagaaataaagaaacttatggaatttatgaaacagcagaataagaaaaattgtttgaattatagaagtttgtgaagaagagacagataaaaggatagaatccttattttaaaaaataatagcataacacatttcaaatttggagaaagatataaatatccacatacagaaaggtgaaaag

SEQ ID NO: 645616 - DNA, 549 bp, Homo sapiens
ccaatattaatccaaagctgttgggtatttattaatttgcttcaaaatcatattttgaatgtcaggacccttctgggcaaatatgaaaggggtgaaagggcagtaggggactcacaaatttagtaaggttattagcccttgaagaagagtccaaaagatgagctaaatcctatatgaataattaggatgctatagacaatgagaaataaagatattaaggcagactcatgggaatacatctgtcttagaggagggggctaggaaaaggaaaagacttcctgaaggagaggtgtgtttgatttgacccttgaagatggactggattttttagtggattgasacataggtctgagcagcagggagcatcctgggtaaagtaatatggatagaaaagggaacatgttttcacaaccccaaatcaggacctgtggtggggcaggggaggaagagactgttttgaagataattctacttcactgttactaatagcattgaatagagtgtggggttccaggaatatcatctccctttatcccaacaatcctggga

SEQ ID NO: 645617 - DNA, 582 bp, Homo sapiens
cttcaatctatattaacttctaatatcagtgacctaaagaacattaaatttgacatgaaactttttaagtatagaactccaaaatccaagcaagcaagcaaaaaactaaacagaaggaggaacatatcctcccaaagatgaggtatatgggccaatgcacctatacttcctgctacatttcagtcatcatttgtaaacctacatatatgacttaactcactggagtcctgataaaatagttgagaaaaatggtatttctaaaacrtttctccagccatagatcataagatatataatgactatcacatttgcccaaaatgtaataaaaaaatttatacagttcccaaagacattttccccttcctataaaggcccctttgcagcatgacacttagattttattcagctaccaccatcacaagaatgcaaatgtgttctaatggtgatttacatattttgtcattggatcataacatttctacatggaagaacaaaggccttaacagtaagtaaaattatctttaaaaaattattctaactcgaggaactcccctggaacttcttagcaacagagtcacttgc

SEQ ID NO: 645618 - DNA, 582 bp, Homo sapiens
cttcaatctatattaacttctaatatcagtgacctaaagaacattaaatttgacatgaaactttttaagtatagaactccaaaatccaagcaagcaagcaaaaaactaaacagaaggaggaacatatcctcccaaagatgaggtatatgggccaatgcacctatacttcctgctacatttcagtcatcatttgtaaacctacatatatgacttaactcactggagtcctgataaaatagttgagaaaaatggtatttctaaaacatttctccagccatagatcataagatatataatgactatcacatttgcccaaaatgtaataaaaaaatttatacagttcccaaagacrttttccccttcctataaaggcccctttgcagcatgacacttagattttattcagctaccaccatcacaagaatgcaaatgtgttctaatggtgatttacatattttgtcattggatcataacatttctacatggaagaacaaaggccttaacagtaagtaaaattatctttaaaaaattattctaactcgaggaactcccctggaacttcttagcaacagagtcacttgc

SEQ ID NO: 645619 - DNA, 546 bp, Homo sapiens
cggtccgagagatctttgtccaggatgccagatagcgaactgccggccaagtcaatctttggactgtcacccctacattaaaaacacaagcccagacatttaataattggtgtgtgtccttgtcattctgtcagttttcttgctgcacacgttaaggagtgtgctggtgtggagtggatggcactgttgcctgtgagggagccagagaaccaacgagctgtctagccacatgagatggggtgcagaccagctgacaggctggatgcgtccctctccagcacacgttttcaaaaatggctattttaataatgactgttcgcccatgtacttccagccacaaaccctcctgctgggtacacagggtgcagtatagggcctgctcctgccctgyggccaaataaacactggctaatgataactgggagctttccttttaaggaacaaggaatttagccaatgctgcttgtcaaaggtcagctactttcaaccttgagaaaaggttttctggcctggggttgtggcatcagccaggctgttgaaaggcac

SEQ ID NO: 645620 - DNA, 624 bp, Homo sapiens
gtaagtagcatccttacataatttctgtggacaaatacaacaactttgtcagataacttccaaaatagtacttaaagaacacttgaatgttttacctatcttctccactttatatcagtgatgagcatatattagcaatagtactcatcattgctagttcgattttatttctccattaaattatacatgtagaagtatacatgtagaattatacatatatactgacttatatatatatatatatacacacacacatatatacatatatttgctggctacagtttgagccttggaaggagtaacattccatttagggaaagaactgcttctttatttaactgcttttgattatgcaaagatagaattgatgggctatctgaatattgcgatatgagaaaacaaagggcaaaatagctgtacatattatgtcagaaacattataatttccagctagtagcatgaatgatagagagagggtggggatctcaagtcaggttatataarctgctcccagccccatctgaactgtgtacattctctagtgaattgttgagctccagaaatacaggattcccaagaacaattgactggtggtgctaactgttcttaacccacacgtgctaa

SEQ ID NO: 645621 - DNA, 624 bp, Homo sapiens
gtaagtagcatccttacataatttctgtggacaaatacaacaactttgtcagataacttccaaaatagtacttaaagaacacttgaatgttttacctatcttctccactttatatcagtgatgagcatatattagcaatagtactcatcattgctagttcgattttatttctccattaaattatacatgtagaagtatacatgtagaattatacatatatactgacttatatatatatatatatacacacacacatatatacatatatttgctggctacagtttgagccttggaaggagtaacattccatttagggaaagaactgcttctttatttaactgcttttgattatgcaaagatagaattgatgggctatctgaatattgcgatatgagaaaacaaagggcaaaatagctgtacatattatgtcagaaacattataatttccagctagtagcatgaatgatagagagagggtggggatctcaagtcaggttatataaactgctcccagccccatctgaactgtgtacattctctagtgaattgttgagctccagaaatacaggattcccargaacaattgactggtggtgctaactgttcttaacccacacgtgctaa

SEQ ID NO: 645622 - DNA, 420 bp, Homo sapiens
acagagttgagaccttgtctcaaaatgaaaaagaaaaatacaactactggtcatgacatgcaaggcaagcacttgctgcctttaacaaaatgacaccaaggtgtccatctcacaaaaggcagcagggtgaaggagacactgttcagcattactaatatgccagctcagatgacgcagacccacccacccatagctcatgtgtctatacagccttatggaaagtgaggtgttacagcccttgctcaccacactgctacaagtgataatcctatccccagttctatattaaattacattctacatacagaagcttacattacattttaagacttgctcttgcagttcctttaacctaaaggatctttgcmccaatggtcttatctgtacaaatacagataaactctgcagtaatatgaattc

SEQ ID NO: 645623 - DNA, 538 bp, Homo sapiens
cttacaagagagaggcagagtgcaattacaaacacaaagaggagaagcttatgtgaagatggtgtttaaaaggccacaagccgaggagtgctagagcatgctggcagccaccagaagctggaagaagcaaggaatagattctccctcagagcctctggagggggaatggccctgctgacaccttgattttggtcttctggcctcagawctgtgacagaatgcattaccaccgaatttgtggtaaattcattacagcggccataggaaactaacacagccttatatcagaatttacttaaaatggatcatggacctaaatgtaaaacctgaaactgtgcaacttctagcagataacataaaggaaaaattttgtaaggctgggttaggcaaagatttcttgcatatgacaccaaacaagaaaagtgacaaatcatacttcatcaaaattaagaaattacgttcttaggcagtgttgtgacaatgaaaagccacagatttggagaaaacatttacaaatcactatttaataaagcactag

SEQ ID NO: 645624 - DNA, 538 bp, Homo sapiens
cttacaagagagaggcagagtgcaattacaaacacaaagaggagaagcttatgtgaagatggtgtttaaaaggccacaagccgaggagtgctagagcatgctggcagccaccagaagctggaagaagcaaggaatagattctccctcagagcctctggagggggaatggccctgctgacaccttgattttggtcttctggcctcagatctgtgacagaatgcattaccaccgaattygtggtaaattcattacagcggccataggaaactaacacagccttatatcagaatttacttaaaatggatcatggacctaaatgtaaaacctgaaactgtgcaacttctagcagataacataaaggaaaaattttgtaaggctgggttaggcaaagatttcttgcatatgacaccaaacaagaaaagtgacaaatcatacttcatcaaaattaagaaattacgttcttaggcagtgttgtgacaatgaaaagccacagatttggagaaaacatttacaaatcactatttaataaagcactag

SEQ ID NO: 645625 - DNA, 538 bp, Homo sapiens
cttacaagagagaggcagagtgcaattacaaacacaaagaggagaagcttatgtgaagatggtgtttaaaaggccacaagccgaggagtgctagagcatgctggcagccaccagaagctggaagaagcaaggaatagattctccctcagagcctctggagggggaatggccctgctgacaccttgattttggtcttctggcctcagatctgtgacagaatgcattaccaccgaatttgtggtaaattcattacagcggccataggaaactaacacagccttatatcagaatttacttaaaatggatcatggacctaaatgtaaaacctgaaactgtgcaacttctagcagataacataaaggaaaaattttgtaaggctgggttaggcaaagatttcttgcatatgacaccaaamaagaaaagtgacaaatcatacttcatcaaaattaagaaattacgttcttaggcagtgttgtgacaatgaaaagccacagatttggagaaaacatttacaaatcactatttaataaagcactag

SEQ ID NO: 645626 - DNA, 604 bp, Homo sapiens
attcctttatgtttattcatcctcccataataatttaatgtacattgtagaatgctacatagaaggagtattcgtccttttttgttcaatattgtatccccagggtttggcataatagttggtatggggtcagtgctcaaaagyatttgttgaattactgcatgaataaatgaataaaagcattgttctaggttctctagctgagagctgaaatgaattacacagtgaccatagatacacatttcctccttatttctctaccaaatgccccctcatctgctcaggctgtaaatattgctagctgtcaaggtttccactttctagactctacataggcaatttcatcaaactcaatttttttcttttaaaaaaataaattgaaagtatacattcagaacaatacacagatcataagtcaacactatcatagatttgtacaagatgaatacactcataaaactggacatcaggatatggaatattataagcaaccccaaagcgtccatcaagcccagtctcagtattattccctatctttcacaatgatttcggttttcacaagaatttagttttacctgtttttgaactttatataaatggaaac

SEQ ID NO: 645627 - DNA, 660 bp, Homo sapiens
ctgcacgttgtgcacatgtaccctaaaacttaaagtataatttttaaaaattacccatttcatctagatttttaaatgcaatgagaggattgtgcaaaatagtctttagtgactttaaatgtcctctgttttaaagagtatttcttctttgtcatttctaactttaagtgtttattctcctttttattacttaggttagctagtgctttgtatatatttacttttgttttcaaagaatcagctttgggtttgcttattaattctgatcttctctgtgttttctttttaacttttattttaggttcagggatacatgtgtaagtttgttatatagataaattcatgtcacaggggtttgttgtacagacgatttcatcacccaggtactaaacctagtactcaatagttattttttctgtttctstctctcctcccacccttcatcctcaagtagatcctagtatctgttgttcctttctttgtgtccatgagttctcatcatttagctgaatttcactcttctctgttttctgatggaattctgcttttatgaatttctactgttttcttttggtcaacttgttttttcctttctagaatttgaattaagtttctagtttatttattttcagaatttagtttttaatattatgtgtattt

SEQ ID NO: 645628 - DNA, 561 bp, Homo sapiens
gtttccggggccacccatcacctcccaaataaatgacttgcactcaaatccttgccacagggtcatcttcaagaaaaaccctaaaagttagttagattctcagcagattccttccatgggctaagtcctaggacacccacatttattctccaatgtggaattaaattcaacaaatagctcccagacagaagacttagaagtcacagtgacaggggccatcaggggaaatacagcagcgggaatacagatgcgcatttcagatactaattaacagctcccacacctcaaagccgaggcaacgtctagcactaaaggaaacagtgtgattgaaacttgccacagtacctgacagcaacggccagcaactctgtagatgccacctytgctaacagcactaattacagaacgcggcatcacttaaaaacagtgcacagctgaatgataacacacttaaacaaacaagccagggttcagtcgtctccagggataattgtgtgggaactaggtaaggagacaggtgagaggtaagttagaatccttgtagattgtcctctatggagc

SEQ ID NO: 645629 - DNA, 583 bp, Homo sapiens
agcagcactgtcccacggagggggagacagaagaagggaagatggtgagcccagccactcctcagcccaattgggtttcctcagcaacatcttaccccagactgtcctctctcttcgctcctctgctccagacaggatggtttccatgtgctgcttctctgcgatctttctttcctcttatgtctttcattatgaaaccaaagtgctagagggatyggggactatgggggaccgacaaaatcccatgttcatgaagaaggaagagaatgctcgtgggaggggggctgaggcctgcagacatggggatggaaagttgccgccttagtcatctgaggctgctctaacaggataccatacactgggtggctaataagcaacagatgtttgttcccacagttctgggggctgggaagctcaagagcaaggcaccagcagattcagcatctggtgagggtctgtttcctggtttgtatagaaggtgccttttccctgtgtcctcatatggtgggaagggcaaggcagctctctggggccttttttataagggcactgatcccactcatgaggactttcatgccctgat

SEQ ID NO: 645630 - DNA, 583 bp, Homo sapiens
agcagcactgtcccacggagggggagacagaagaagggaagatggtgagcccagccactcctcagcccaattgggtttcctcagcaacatcttaccccagactgtcctctctcttcgctcctctgctccagacaggatggtttccatgtgctgcttctctgcgatctttctttcctcttatgtctttcattatgaaaccaaagtgctagagggattgggractatgggggaccgacaaaatcccatgttcatgaagaaggaagagaatgctcgtgggaggggggctgaggcctgcagacatggggatggaaagttgccgccttagtcatctgaggctgctctaacaggataccatacactgggtggctaataagcaacagatgtttgttcccacagttctgggggctgggaagctcaagagcaaggcaccagcagattcagcatctggtgagggtctgtttcctggtttgtatagaaggtgccttttccctgtgtcctcatatggtgggaagggcaaggcagctctctggggccttttttataagggcactgatcccactcatgaggactttcatgccctgat

SEQ ID NO: 645631 - DNA, 583 bp, Homo sapiens
agcagcactgtcccacggagggggagacagaagaagggaagatggtgagcccagccactcctcagcccaattgggtttcctcagcaacatcttaccccagactgtcctctctcttcgctcctctgctccagacaggatggtttccatgtgctgcttctctgcgatctttctttcctcttatgtctttcattatgaaaccaaagtgctagagggattggggactatgggggaccsacaaaatcccatgttcatgaagaaggaagagaatgctcgtgggaggggggctgaggcctgcagacatggggatggaaagttgccgccttagtcatctgaggctgctctaacaggataccatacactgggtggctaataagcaacagatgtttgttcccacagttctgggggctgggaagctcaagagcaaggcaccagcagattcagcatctggtgagggtctgtttcctggtttgtatagaaggtgccttttccctgtgtcctcatatggtgggaagggcaaggcagctctctggggccttttttataagggcactgatcccactcatgaggactttcatgccctgat

SEQ ID NO: 645632 - DNA, 639 bp, Homo sapiens
tctaataataataattaacagaggagatagaagttaatacatatagtattcattcatatttaataaacatctacaatcccagatggataaagatcataagacttttgtagtatacataattttatattcccacattttctgccctgaagataacacatttacacacacacacatacacacacacgtgcacacaggctcaccttaatttagggagttagagtagcctcttggttaagagaacagactggggtcagatatatrgagatttaatttcctattctacaatctatgtatatgactatagacaaattatatataagcctcagtttcctaatgtataaaacagaaataaacccattttatacagttgttacatgtacatcaaatttttgacttagtagcaagtctgaaaatgtcatacaacctgacattttgcctggttaaactgaattaacttagtcctttttagttcctgtttcatgaggaaagagggcagaaccatgctaaatgaatgaactaggcctagatagaacctgatacctggaaaatcagaaccctctcccttcaagcttcatagcatttgaagaacagccactctgctagagctgtctccaaaaaacatctgcccagttaaagtat

SEQ ID NO: 645633 - DNA, 581 bp, Homo sapiens
aaactggatccactcaagtcaaagccttgctctgttttgcaacccttaatgaattcatggatctaggcattatcatacagcagatagataacatcacaaatgaggctgggcatggtagctcatgcctgtagtcccagcaaattaggaggccaaagtgggaggatcacttgagcccaggagttccagaccagcctaggcaacacagygagaccccatcactacaaattagttttgtaaaaaactaaccgggtatgttagtgcatgcctgtggtgccagctactcaggaggctgaggtaagatgactacttgagcctgcaaggtcaaagctgcagtgagccatgatcatgccactgcactccagcctgggcaactgagcaagacaccatctcaaaaattaaataaataaataataaaaataattttaaaaaataaaaacacaatgggagataaccagacatcagttacctcctcatggaaaaacataacaatctaaaaagtggtcttgctaaaaaaaaaaaaaaaaaaaaaagaaaaaatcagacctaaatctgataaaaatgtatagatacaacttatcaac

SEQ ID NO: 645634 - DNA, 581 bp, Homo sapiens
aaactggatccactcaagtcaaagccttgctctgttttgcaacccttaatgaattcatggatctaggcattatcatacagcagatagataacatcacaaatgaggctgggcatggtagctcatgcctgtagtcccagcaaattaggaggccaaagtgggaggatcacttgagcccaggagttccagaccagcctaggcaacacagtgagaccccatcactacaaattagttttgtaaaaaactaaccgggtatgttagtgcatgcctgtggtgccagctactcaggaggctgaggtaagatgactacttgagcctgcaaggtcaaagctgcagtgagccatgatcatgccactgcactccagccygggcaactgagcaagacaccatctcaaaaattaaataaataaataataaaaataattttaaaaaataaaaacacaatgggagataaccagacatcagttacctcctcatggaaaaacataacaatctaaaaagtggtcttgctaaaaaaaaaaaaaaaaaaaaaagaaaaaatcagacctaaatctgataaaaatgtatagatacaacttatcaac

SEQ ID NO: 645635 - DNA, 531 bp, Homo sapiens
aagtttgagaccaacctggctaacatggtgaaaccccgtctctactaaaaatacaaaaattagccgggtatggtggtgcacgcctgtaatcccagctacttgggaggctgaggcaggagaatcacttgaactcaggaggcagaggttgcagtgagccaagattgtgccagtgcactccagcctgggaaacagagygagactccatgtatattaaaaaaaaagaagtatatgaaaggtggcagatattgatagaattatcattcccatgcttggaaaattgtatttctttagtgactagtctatacctcactagaaggaaagactttttcctcttctagcctgttgtctttgagaaacaaaatagcattgccatatgtgagagctcctcctccttctccatagtctaactcctcctatgaatccaattacacttaaatcacctttggggtccaaagccaatgtagttgattcctgacttagcagggaagaatggaaaaccaatattatccaagaaacagggaagtgggaatt

SEQ ID NO: 645636 - DNA, 531 bp, Homo sapiens
aagtttgagaccaacctggctaacatggtgaaaccccgtctctactaaaaatacaaaaattagccgggtatggtggtgcacgcctgtaatcccagctacttgggaggctgaggcaggagaatcacttgaactcaggaggcagaggttgcagtgagccaagattgtgccagtgcactccagcctgggaaacagagcgagactccatgtatattaaaaaaaaagaagtatatgaaaggtggcagatattgatagaattatcattcccatgcttggaaaattgtatttctttagtgactagtctatacctcactagaaggaaagactttttcctcttctagcctgttgtctttgagaaacaaaatagcattgccatatgtgagagctcctcctccttctccatagtctawctcctcctatgaatccaattacacttaaatcacctttggggtccaaagccaatgtagttgattcctgacttagcagggaagaatggaaaaccaatattatccaagaaacagggaagtgggaatt

SEQ ID NO: 645637 - DNA, 531 bp, Homo sapiens
aagtttgagaccaacctggctaacatggtgaaaccccgtctctactaaaaatacaaaaattagccgggtatggtggtgcacgcctgtaatcccagctacttgggaggctgaggcaggagaatcacttgaactcaggaggcagaggttgcagtgagccaagattgtgccagtgcactccagcctgggaaacagagcgagactccatgtatattaaaaaaaaagaagtatatgaaaggtggcagatattgatagaattatcattcccatgcttggaaaattgtatttctttagtgactagtctatacctcactagaaggaaagactttttcctcttctagcctgttgtctttgagaaacaaaatagcattgccatatgtgagagctcctcctccttctccatagtctaactcctcctatgaatccaaytacacttaaatcacctttggggtccaaagccaatgtagttgattcctgacttagcagggaagaatggaaaaccaatattatccaagaaacagggaagtgggaatt

SEQ ID NO: 645638 - DNA, 495 bp, Homo sapiens
ccactgtaagaatgtgtagtgccattgctctaattttaaaaaggggcctcctctggctgctgcagaccctatccaccccctcggttgggcctgtgctgtaaacaaactgtaaacttgttcagggcagcctggagggtatttgtccctaactgaaatcatcttgtttattcactgacytttttttttttttttttttttttttgccaatctctcctattagttgtatgagagcagaaatttatgcgttttaaaactatccaacactttattgtggcttttaccccagaactttaagtactgtaggaattcaacaaatattggtaacatgaattaatgaattctgtgatgccttggttgatcctgtttctgtactgccttaggcctctgcatatacatcttctagactatttatcacattgtattgccattctctttccgttatctttctccttcactagactgtgagactcctgaggtcagagaatctgcctcatc

SEQ ID NO: 645639 - DNA, 392 bp, Homo sapiens
tttaaaaggtcacagaggaaaaaagaagggattctaggtggtgagatccccaaaataaatagctgagagtaattcatgaatagtctatatttagggtattataagtaaagtaacctggtgttgatacaggctttttgagttggcawgatgggaaagaagcctggagaagtaaggttgggacagatccatatactgcttccttcaaagacatgcaaaggggaactacttaagatgtgaagccaaagcaataaaagggaaaggttgcttctaggtcacagtgctgctgacacttaggaaaaaaaaaaaagcttcagaaatcagtgcgtggctctctgctttgcaagcctgttatatgtggcttttatatgtatctgaaaataattttaacagtc

SEQ ID NO: 645640 - DNA, 573 bp, Homo sapiens
tgagtatgtgaataaggtgaatctttttctgttttctttttctttttcttttttttttttttttttgagacagagactcgctctgccaccaggctggagtgcagtggtgcaatcttggctcactgcaacctccgcctcctgggttcaagcgattctcctgcctcaccctccagagtggcagtgactactggcgcatgccaccacgcccagctaatttttgtttttgtttttagtagagatggggtttcaccatgttggccaggatggtctctatctcttgacctcatgacctgccrgccttggcctcccaaagtgctgggattacaggtgtgagccaccgcgcccagccagaatcttatttttattttatttttccttcatattttactttgtgtgaatgaggactttttttcttttcattttgcttctatgcaaaacttgtaactttttccagaggttaataagtccctgatgaatctaattagaaactggcaacaatgagctgcttatgcaatgcttgcataattgacctgtggcacctaccctgagaacactgtcacactgcgcatctgt

SEQ ID NO: 645641 - DNA, 623 bp, Homo sapiens
atgccatttctttggatcactccttgtttgtttgtttttttccacacaccatttctcagtcagaatgatttctatttaaccactttaatggaggtgaattagaagcagtttttaggcaaggaaatcagaaaaaccacaagaattcttgacatgtttccacagagacccctgcatggtgcctgacacaggtcactcataccagaccctcgggcccctgrccctttcagctaatttttaggtgtatagactgtggtagtttaaagaaatcctgcgaattagttatatcagattatctcttgtaaagatgtaagtgaagtttaggtctctcctttaaaaagaaactcagctaatgataattatgacagaggtaggagctaaagtagctgaagtagaggaaggagaattgtggcaaatgacggccttgcccctgcaggtctggtttctagtagaggtgacatcagacaaactcaaccttgaacggtggggtgggtgaaatgtgtccctctcccttccaaaggtctgtccacccagaacctgtgactgcaagcttatttggaaaaagggtctttgcagatgtagttaaattaaggaatccagggtgagctcatcatggattaggatgg

SEQ ID NO: 645642 - DNA, 609 bp, Homo sapiens
tactgaacacttggcaattagaacacaatggttaaatatttgtgtatctaaacatatctaagcatagaaaaggtacagtataaaagataaaaaatggtcatctgtatagggtacttaccatgaatggagcttgcaagagtggaagttgttttggttgggtaagtgagtgagtgagtgctgagagaatataaaggcctaggacattacgctaccgtagacttaataaacactgtacatttaggctacactaaatttatttaaagtatttttcttcctttaataataaattagtcagcttactgtaacttttttactttataaactttttaaattgttttaactttttgagtcttttgtaataacacagcttaaaacacattgtacagctgtacaaaaatattttttctttataaccttataagctttttctatttaaattttttttttttttttttrgtttttaaacttttttataaagtcgcagacacacacacacacacacacacacattagcctaggcctacacagagtcaggattatcaacatcactgtcttccacctccacatcttgtcccactagaaggtcttcaaggtcactaacaggcatgg

SEQ ID NO: 645643 - DNA, 560 bp, Homo sapiens
gtgagtgtgaaagcaaggaaaagattcagattctattcagagtcttagtgagttgagctagtcttactgtcctctaattagaaccatataaatcacctatttatgaaaaaccaaccaactaatagacattccacacctgctcatgaaaacctagtggattcatgggtgaacaacataaaacaacaatgcagtatttctgtgtttttaaaatacctctcccattgttagcagtggtaaatttgtatgggtctgcaacaacctcaattcttgcatccttagaagaaataattcgaccgagggggcataaggcaaagtgagacactgaggcaagttttagagcagaagtgaaagtttattaaagagttttagagaaggaacaaaaggaagtaaagtcatttgaaagagggccaagtgggtgacttgagagattcaagtgcactatttgacctttgacttggggctttatacattggcwtgcttccaggttttgcatctcttctctcctgacttttcccttggggtgggctgttcccatgtgcagtggcctgccagcatttggg

SEQ ID NO: 645644 - DNA, 449 bp, Homo sapiens
gatgtgaatacagacctctttggttttctccaacaatagtctcacactgacagaggaaagtagttcaacaaagtaaacaaaatggtacaaccaaaccatgccctttagaatggaaatgccatcactacagtttaaacttgcatccattaacatcactgagattgctgaattacaaaattcatcacttaataataagagcactttcagaaagaactcagatcagggttgttgcagccattgctcagttggcctcatttcatgaatagaattcatcgtgcttgcccaaattgcttttttattttttctctttgccaaggagcttaatcaaataagttatttatttatttatttatttayttacttatttatttattgatttcagagacaggatctcactctgctgcccaggctggagtgcagtggcacaatcatagatcactgtagcctta

SEQ ID NO: 645645 - DNA, 601 bp, Homo sapiens
aatctacattcttgagtaggattttgtatttccaaaatcataaaatgtgcaaaatgttgtatttctttatgttcattattatcagaaggaggtacttacgttttatcaaaatatccaaggaaagtgtcactccaaagtattcatttcctcaacataattattttaaataaaataataaaaatacagtataattgtaaaaataatatgcatttatatatcattttataattcattacagtaacagtatgagttctgatttcactttttgcacttgagaaatgagggacttaagaaaattagacggcttgtttagggtaggtaaggggcagatccaggtattaacaagcgtcttcttaccctaaagcatacactgtcctgatttcctttaaggagaggtaagtaaagggcccccagagctctgagggaaggcttgatcctaagtggtcccttagacwgagttttaaaggaagttagtgtttgaactgaggcttgaaacaagacaagaatttcattggaaaggggaaaaaaatccaattcatggtaccaaaataagcagaaactaagaacagtacttgtgaagacaggctgagtcatctgatgc

SEQ ID NO: 645646 - DNA, 601 bp, Homo sapiens
aatctacattcttgagtaggattttgtatttccaaaatcataaaatgtgcaaaatgttgtatttctttatgttcattattatcagaaggaggtacttacgttttatcaaaatatccaaggaaagtgtcactccaaagtattcatttcctcaacataattattttaaataaaataataaaaatacagtataattgtaaaaataatatgcatttatatatcattttataattcattacagtaacagtatgagttctgatttcactttttgcacttgagaaatgagggacttaagaaaattagacggcttgtttagggtaggtaaggggcagatccaggtattaacaagcgtcttcttaccctaaagcatacactgtcctgatttcctttaaggagaggtaagtaaagggcccccagagctctgagggaaggcttgatcctaagtggtcccttagacagagttttaaaggaagttagtgtttgaactgaggcttgaaacaagacaagaatttcattggaaaggggaaaaaaatccaattcatggtaccaaamtaagcagaaactaagaacagtacttgtgaagacaggctgagtcatctgatgc

SEQ ID NO: 645647 - DNA, 622 bp, Homo sapiens
ttttctgcatctgttgagataatcatgtggtttttgtctttggttctgtttataagctggattacgtttattgatttgcatatgttggaccagccttgcatcccagggatgamgcccacttgatcatggtggataagcttttgatgtgctgctggatttagcttgccagtattttattgaggatttttgcactgatgttcatcagggatattggcactcccgcctggacaacaagtgcgaagctccgtctattaaaaaaataaagaaagaaagaacataaagaacagaagtttattttctcacagttctggaagctgagaagtccaagatcaaggtgctggactaatagtaccttctaatggcagtcgatccaaagctgcccaggaagctgtaatgggagcgcaggtccatgctatgactctcctttgacaagcaatcccataactcacactccttttacagttactctgaagcatctccaaaacgttctcaccctttcctgaaagttcaggttttgcaatgtgcccctgtaaaaacagagtattctggggccaggagactgggaacctctgtgaggtctagaagcattaagaccaaatggcttctccttagaggagaggct

SEQ ID NO: 645648 - DNA, 622 bp, Homo sapiens
ttttctgcatctgttgagataatcatgtggtttttgtctttggttctgtttataagctggattacgtttattgatttgcatatgttggaccagccttgcatcccagggatgaagcccacttgatcrtggtggataagcttttgatgtgctgctggatttagcttgccagtattttattgaggatttttgcactgatgttcatcagggatattggcactcccgcctggacaacaagtgcgaagctccgtctattaaaaaaataaagaaagaaagaacataaagaacagaagtttattttctcacagttctggaagctgagaagtccaagatcaaggtgctggactaatagtaccttctaatggcagtcgatccaaagctgcccaggaagctgtaatgggagcgcaggtccatgctatgactctcctttgacaagcaatcccataactcacactccttttacagttactctgaagcatctccaaaacgttctcaccctttcctgaaagttcaggttttgcaatgtgcccctgtaaaaacagagtattctggggccaggagactgggaacctctgtgaggtctagaagcattaagaccaaatggcttctccttagaggagaggct

SEQ ID NO: 645649 - DNA, 622 bp, Homo sapiens
ttttctgcatctgttgagataatcatgtggtttttgtctttggttctgtttataagctggattacgtttattgatttgcatatgttggaccagccttgcatcccagggatgaagcccacttgatcatggtggataagcttttgatgtgctgctggatttagcttgccagtattttattgaggatttttgcactgatgttcatcagggatattggcactcccgcctgkacaacaagtgcgaagctccgtctattaaaaaaataaagaaagaaagaacataaagaacagaagtttattttctcacagttctggaagctgagaagtccaagatcaaggtgctggactaatagtaccttctaatggcagtcgatccaaagctgcccaggaagctgtaatgggagcgcaggtccatgctatgactctcctttgacaagcaatcccataactcacactccttttacagttactctgaagcatctccaaaacgttctcaccctttcctgaaagttcaggttttgcaatgtgcccctgtaaaaacagagtattctggggccaggagactgggaacctctgtgaggtctagaagcattaagaccaaatggcttctccttagaggagaggct

SEQ ID NO: 645650 - DNA, 622 bp, Homo sapiens
ttttctgcatctgttgagataatcatgtggtttttgtctttggttctgtttataagctggattacgtttattgatttgcatatgttggaccagccttgcatcccagggatgaagcccacttgatcatggtggataagcttttgatgtgctgctggatttagcttgccagtattttattgaggatttttgcactgatgttcatcagggatattggcactcccgcctggacaacaagtgcgaagctccgtctattaaaaaaataaagaaagaaagaacataaagaacagaagtttattttctcacagttctggaagctgagaagtccaagatcaaggtgctggactaatagtaccttctaatggcagtcgatccaaagctgcccaggaagctgtaatgggagcgcaggtccatgctatgactctcctttgacaagcaatcccataactcacastccttttacagttactctgaagcatctccaaaacgttctcaccctttcctgaaagttcaggttttgcaatgtgcccctgtaaaaacagagtattctggggccaggagactgggaacctctgtgaggtctagaagcattaagaccaaatggcttctccttagaggagaggct

SEQ ID NO: 645651 - DNA, 557 bp, Homo sapiens
tcactttcattgttatctatttatgtcatcagaaaatattgaatattagaaaagtagaaaaagaatgatgattaaagatggaaactattttgctcctaaaatttttaaaccaaagtaatgatctgtgttcttttttatgaatagactattcacagaatatgtttattttttttagtaaccttttttggtctggaaagtaaaaaaaatggtgtgttayacagttctgcaaccaagttggctcattgtaagtgtatattgactttttatgtataatgtggaaccaataaaaaataacagactgaagttgcttgtaatcatgggtgttggccattaaaaaaagcttcatgcatatggtaactggcaacttgaaagtgtcatgaactgaaaatgtaaaccatataaagtgagagaaaaagagagaaactatgaggaaactgagtgctaaatgtgttcatcttcatctaagcagaatcattgttataaccgataaataatacctttcccttttccaatcaggacagcagcaaaatatatacaacacacatttcctatttgga

SEQ ID NO: 645652 - DNA, 402 bp, Homo sapiens
gaattctgtcatgataccactaaccaagagaagaaagctaggaatgcaaccaraatattgagcatgagcatggatacgattggcataagctggtggcagcaattcctggggaaatttccaattaaaatttagtcctgttatgtggtgaaaagggaacacttatacactgctggtggaaatgcaaattagtttaacctctatggaaaacagcatgagatttcttaaagaactaaaagtagatctactattcaatccagcaaccacactagtggatatctacccaaagggaaataagtcattacatcaaaaagacacctacatgcatctgtttattgcagcacaatttcaaagatatggaaccaatctaagtacccatcaaccaacaagtagctgaagaaaatg

SEQ ID NO: 645653 - DNA, 333 bp, Homo sapiens
ctttttaaaggatgttaaagacatataaagtaggcattcatcacaataattgggtgtcctaggactcagtgccaaatccaaagtatgcatcacacttttttggggccagctctcaatgtgatagtttagccgtcatagtataaatgtaatggaatcrgttctcaaattgttattatttttgataggtgactttgcttggttaacacatggttgcagtacaaacccatggttaacaatgtcaaaatcaaacattattatttgtctataatttggaaaactcaaatgatgattaattttggaagggaatggggcattggtccttaaaaatgtatt

SEQ ID NO: 645654 - DNA, 590 bp, Homo sapiens
cctgccggcctctccagaagcttcctatctggccattcccatggaaagggccgacccttcctggtggcagatccacaaggcagctgttgttgccctgcctgagtgttcctccagtggcctgggaccagcctgcccctctctgtcacagytagtgcttgagtcaagaggtcctgagaataagttcactgctctgatcccatcaatcctggtctcgggccctccttccggggatatgagaatgagatttgcaatctgttctcaaccaggagaggagcccccatggtcaaaactgggaagacaatgtggcgcaggttcctgctgcaacagtggagcttagcaccccttccttcacaagactggactgggaagggtatagcctgaaagctgcgctttctgccctgggaatgcagtctcacagcctgggatagcttcatgatctgaatgcagactgcttgggacagggctagccgttctggtctgctgccagcagctagacactgaagggagacccactggtttgggggcttatgtgggtcccactggcacctggtggactgtggcttcttggcaagccatgtccccagagcagc

SEQ ID NO: 645655 - DNA, 588 bp, Homo sapiens
ttactcagtatatgaagtgttctatcataacgtaacatgcttttcctttatttgtggtattttagtttcaaactaaaatataaatcacctaaagatctacgacagttcttttgaaaaaaaatcttgcttttaatttcccaggagtttcaaccttaatcctctctttagtgtttctttatttggtagtgatagggactatcaaagcttcttaccatcaaatacatttactgactaaaaatagaaaaataatttacattgtaaaaatgtacaaattgaatgacagtcaaaaggtacaggtaatgaagatatgcattaacatctacttttaaaaaaaagtttattaaaattctcttttagactaatgcagtatctgggaatttatataaatagatatgtatataaatgactattaaacaattttaatgtcagttatattttaaacattttaataatattgttataactatgggggtaaaattttgtatatatctgracatttttgttcttaaggaaataatcatttttacatatccaggaatttgaattactctcaagtcacctattaattacaagtcattttgaactcat

SEQ ID NO: 645656 - DNA, 586 bp, Homo sapiens
ctttcaaaaagaaattcatttttggccaaggatttccaaattttgccccatatataggtatagtttattatagacttcgtttgcaaaatattaaatccttatatccttttagggacacaataaaattttataagtttgagataatgtacttgcagttctacctcaggccgtggtgagagattgaagtgcctcttcattttaacattttgggttcaagttgttgcataagggcatgcaaatggaaactggcctatttttgagctttaataaaatcgtcaaatacttcttaatcttaagagttatagttatgtactacaatatgtataattctctaatatttaaaayaaaacctgaaagccacaaaagcttactgtgaaataaaatgtgatggaatattatttctaactggcttacctgtatttccttcattgaagggaatatgaagtagaaaagcccttttattgaaaagagtttggaaagtaaagataactcttttcaattcaattctttgtaagtagaaaaagagtaaagataatgttctagctgtcagcagatgtctgacacttgatggagcgtatcattacaa

SEQ ID NO: 645657 - DNA, 611 bp, Homo sapiens
catttatctaataccaaaactatatgagacttaagtatcatgatttctatactctcctgaaaattaagttttcaaaaccatctagattagtgactgactcaaatactactttaatctacattaagcattactatatgggtttcatagtggttagaaacattatagattaagaatatatcaacagagtgtaggcttcagtttatttcatttttaatctggcgttatttcctcataaatcatattataggyttttgatttccttcagagggaaaatttatgccttgttttcagacagatgggggagggcagaaacttgccctatgcctcctttttcttaattgccttcagctcaaaataatccttatgccagactggcatattttttggaggcatattttaatctcctacaacaataagatctttcaaagagtagataaatatctactctttattaaaataaaatgaacattattcgtaaagtactttaggctaaaagcaacatactctatactaaaaatcaaactaaatcatacaaattaaccattggaatacttttaaagagcaaggaggttctaaatatgtcacatattcattaaatataatagacaaac

SEQ ID NO: 645658 - DNA, 611 bp, Homo sapiens
catttatctaataccaaaactatatgagacttaagtatcatgatttctatactctcctgaaaattaagttttcaaaaccatctagattagtgactgactcaaatactactttaatctacattaagcattactatatgggtttcatagtggttagaaacattatagattaagaatatatcaacagagtgtaggcttcagtttatttcatttttaatctggcgttatttcctcataaatcatattataggtytttgatttccttcagagggaaaatttatgccttgttttcagacagatgggggagggcagaaacttgccctatgcctcctttttcttaattgccttcagctcaaaataatccttatgccagactggcatattttttggaggcatattttaatctcctacaacaataagatctttcaaagagtagataaatatctactctttattaaaataaaatgaacattattcgtaaagtactttaggctaaaagcaacatactctatactaaaaatcaaactaaatcatacaaattaaccattggaatacttttaaagagcaaggaggttctaaatatgtcacatattcattaaatataatagacaaac

SEQ ID NO: 645659 - DNA, 457 bp, Homo sapiens
ttctcgggaggctgaggtgggagaatcccttgagcctgggaggcggyggctgtggtaagctgagatcatgccactgcattccagtctgggtgacagagtgagaccctggcttgaaaaaacaaaacaaatatgtttgtatgtgtactgttttataccaagagtactcaacctgtttgtgtgtgtggttacacttataagtctgctctacggacagatatgaaagtgcaggggtggaatggaaatctgtgtaaaccctcatggtggatgtggtataaagtttttctccctttaagagaacctgctgcaagagctggcttaacattcacaagtcaataaatatgatacactgcataaacagaattaaaaacaaaaatcacatgatcatctcaatagatgcagaaaaagcattcgacaaaatccagcatccttttatgattaaaactctcagcaaaattcg

SEQ ID NO: 645660 - DNA, 599 bp, Homo sapiens
tttgcatccttcaatctaatcaaattgacagkcagtattagctatcacataaagtgacattctgaagtactgagggttagaacattaacatatcccttttagaggaacacaattcaactgatagcatatgcatatacttataaaatattaaatataggcacactataaaaattagtcccatagagtatatgatttcctcatggacatatctcctgagttctttaatctactaaaaataaatactggagaaagaatagccactgaggaatctgaactcagcttctctactctcacttactctatgatagggaaaaattataacttccctgaacctgtttccttatttttaaaaatgaagagattggcatagataatttccaagatgttataaatacatatacttctaggttattttttcaatttaaaaactaatatacggatgtggttttctataataagtcaaacatcataaaaggctttattatgaaatacaagatttttccccattcaaaattcttgagaagaggcaaagaaagacggtagaatagaaggctccaccaattattcccttggcaaggacaccaacttaacaactatct

SEQ ID NO: 645661 - DNA, 594 bp, Homo sapiens
taaaggtcaaaaagacgcaatataaaattttattttggaaatgtatcaaaagctcaaaagggtttaaacaattgaatttattttggttatatatttaatcaaagtgacaataaaagattccaaaagcaaatacagaaagttacacagttgtgatttaaaccatgagctgttttagttttgagaagactcagttttcttacataattgaagacctaataaaatacatcaaattcaagaaattttcttgataaaacacaaaatctttgcttcctaggccaattacttaaaagaaaamaaaaaaaaacctggatattctcacccacatacttcaagaaaactttgtcattttaacagagaagaccagattctacttttgtatcaatccactattaaaactaatttttattaaaatagtataaatacatttatgcaatctcaatcagctttgatgacacaagattttcacaacattttcacagactctctctttttttcaacttttacaactgacgtgtttcaggcaattatgcaattcacttttattgtgcagtctgctctcaggtgcgattgacggttttatggcctcaaacatct

SEQ ID NO: 645662 - DNA, 445 bp, Homo sapiens
aaattatatgttaaaatgtttaacatttaaaatatctctctttagtgtgaaaaagagaactattatgcattaggcactgtatttgtcattgtgttaacttagaaatagaagtactgtattcaattgctatggtaattttggagcgccaaagacaaattttytaaaactcagttcttccaatctctactaaaaaatatttaccctataatacctttcagctttgaagttccacattaacattaaataggttttgttgataaatataaaagccctctataaatatcatttacataattatgttcatttgtgcagaatattttaggtatgtaatattttagagactatatgtgcatacatatatgtgtgtgtgtttagatatacagagagagaaattaatatataaattataacatgacttagaacactgataattttttaccaataa

SEQ ID NO: 645663 - DNA, 645 bp, Homo sapiens
ttgacacaactcattctagtaaactcctttaagttagtcatatatgggctactctgcttgctcataaaggggcacggcatactagaattcaagttgaaaggattcttctttggtgttgcactgctggctagcacactcctttaaaaatcacatttcaataattcttaaataaattacctgtaaacayttaaagaatcattatcaagtgcccaacactatactatagactgttatgcttaaccaaatagttatgttcatatatagataccgattcaacatactctgccaataatttctagtggtctggtgcctgtggacatacatgcccagttcacagaggtctgtgttatacggccaacgtgtacttttctagatttcagaataggagtccaaaaaattgaataatcctagctgcaatgttttgtgcaatatttctcctctggaagtatgaccttaattattagcaatactgatttttaaaaactatttcacccaattaatcctagtgcttatgttcaggactatgtattcctttattatcaacagtcttcataataattcttagaatcaatagcattttcaagtttgtaagatgagaaacaagtttcattatacagcagtggtacaattatgggaattcaagtt

SEQ ID NO: 645664 - DNA, 602 bp, Homo sapiens
catttttttttttaagagacaggttgctgttctgttacccaggctgcagtacagtggtatgatcatggcagcctcgaactcctaggatcaagtgatcttcctgccttagtttcccgagtaactgagaatacagatgtgtgccatcacacttggcttatttttgtattttttgttaagatgaggtctcactatgttacccaggttggtttcaatgccattccattatttttgaaggattttttttttaaattttgcttgcatttgatgctccataatctttgtaactttacagattttgctgtatttcttgatattttgtctgttcacaacaaaatctattgctttttattttggtccccattcytgataattgtagcctttactatatcttctttatgtgcatgtcattgacagacccatcagtttgaatgacacataggatttcagatgccatgactaataaaattagaataatcagtttaagtcttagtctgagagcatgattggctaactacttcaaatctaatgcaaaataaagaatgtgagaccccttatttcaaaatcagatataaaagattttatagtgtactaaaatataaaat

SEQ ID NO: 645665 - DNA, 542 bp, Homo sapiens
ggcagatcacctgaggtcaggagttcaagaccagcgtggccaacatggtgaaatcctgtctctgctaaaaatacaaaaattagccaggtgtggtggtgcacacctgtaatcccagctacttgggtggctgaagcaggagaatcacttgaacctcggaggcagaggttgcagtgagctgagatcrtgccattgcactccagcctgacaataagagcaaaactccatctcaaaaaaaaattgtttttaattaaaaaatcagccaggatggtggtgcacacctgtagtcccagctactcgagaggctgaggtgggaggattgcttgagcctggaaggttgaggctgcagtgagccatgattgtgccactgcactccagcctgggtgacagagggagacctggtctcaaaaaaaaaaaaataaaaataaaaatagaatcatcttcttgccgacaaaatagcaacagtgagcactagaagacaacagagcaatgagaaatttttagtagaaattattttcaaactataattccatgttcagctaacc

SEQ ID NO: 645666 - DNA, 576 bp, Homo sapiens
aagcatgaggatgccagcaacagaggatattccttttaaggtctgtccattgcaaagtacacacgtacacgctcacacaacaaacacgccctgttsccttttgcttgtgttaaccactgagggcagatctctgaataataatacatttagtgggtccacaagagctgcatttcctctgctccagaattcatgcaaggagcacggctggggcttctccactgtcattgttatggcctcaaatgaaggccttgtcaccaggcgggggcgggaaggcactggagcgcagcagcattgagagcatccgaattccctcctctgtccctgattggttgaagaactggggagcaccgaccagccccctgcggctcgactcgccattggctgggaagaggtggcaatcagggcgggccaaggcggctgttctcgctccagctcgatgctgcctccccggcccggttgcgctgtagccgctgccgcctctgcctgggtcccttcggccgtacctctgcgtgggggctgcctccccggctcccggtgcagacaccatggtaagtgctctcagccgggtgcggcccg

SEQ ID NO: 645667 - DNA, 346 bp, Homo sapiens
tgtatcaagggtcctaacagtcraaacaaatcaatcctttccccccaaaaaatgattttcaatactattgcttcatactgttttaagtagcatgtgttctaacaaaaacagagattggttgcagttatccttgactgaaataaaatgtagatattacttccagaatggcaaagtgaggaagtccataaactctatccccttcaaaaccaaccataactggtgaaaaaatatttatcttaaaaggcaaacttttcttttaaaaaagaaacatttaaatagtatctcctcaaattcaagtctactggaacctcagaatgatcatattttaaaattgggtcattacaaa

SEQ ID NO: 645668 - DNA, 596 bp, Homo sapiens
cgtgggtagcaattattccaactttatgtaacaattaagattgggctcaggaaaactcctaaacatgattgttatggtttgattgcctttacaggaaagaaaaataaaataaataaatgagtgcttgtttagccaatcaggaaatctaagtcstaattctggccatgccactaaatgactgtgggatcctgatcaagtcactacttttgtaaaaataatactaacagttatatagaaagcattcactatgtaggattttaagtgaaacatatttttttttaaaaaaaccttcaaatattctatatctttccacctctatctctacctatatttttttgtaatgggtgacattgaaaaaccatacatctgcataatttatctgatatggtttggctgtgtccccactcatatctcatcttgaattgcagctcccataattcttatgtgctgggggagagacctggtgggagctaagtgaatcatgatggcaggtcttttccatgctgttcttgtgatgagtaagtctcatgggatctgatggtttaatagggagttcccctacagaagctctcttgccagctactgtgtaagatgtg

SEQ ID NO: 645669 - DNA, 590 bp, Homo sapiens
tatgtgtgtgtgttgcaaatttgtatttgtttttcttaaatgcaattctggtatttaaaagagatacctaaaaacattaggtcacaaaagtttgaaagaaaaagacaggaaaaatataatcaaaataaacctggtgaacctgtattattatcaaataaaatggactttgatacagaaaaaaataagaggtatatatttatgagagttttaatttacctgacaaaggtaaactcaagtgaactaatcatataattaaaacatatagatgaaactgaccaaaaaaccaggttaaaagagtaactctattatcataatgggacaataaagcatatttcaaaaatcaatccttgaataataaatctcaaaaaatgaatcttttttttwaaaaaaagaaatgtatttgttttaaaatatataattaacaaacttgacatactagaattatatagagagctatgctcaacaactgaggaacatacatatcttttcaagtacacacaaaacattcataaaacagcagtgttgcctgtgttcctccaccaaatcatatggaatattttgtttgcagagttattgaacattgttgctca

SEQ ID NO: 645670 - DNA, 590 bp, Homo sapiens
tatgtgtgtgtgttgcaaatttgtatttgtttttcttaaatgcaattctggtatttaaaagagatacctaaaaacattaggtcacaaaagtttgaaagaaaaagacaggaaaaatataatcaaaataaacctggtgaacctgtattattatcaaataaaatggactttgatacagaaaaaaataagaggtatatatttatgagagttttaatttacctgacaaaggtaaactcaagtgaactaatcatataattaaaacatatagatgaaactgaccaaaaaaccaggttaaaagagtaactctattatcataatgggacaataaagcatatttcaaaaatcaatccttgaataataaatctcaaaaaatgaatctttttttttaaaaaaagaaatgtatttgttttaaaatatataattaacaaacttgacmtactagaattatatagagagctatgctcaacaactgaggaacatacatatcttttcaagtacacacaaaacattcataaaacagcagtgttgcctgtgttcctccaccaaatcatatggaatattttgtttgcagagttattgaacattgttgctca

SEQ ID NO: 645671 - DNA, 590 bp, Homo sapiens
tatgtgtgtgtgttgcaaatttgtatttgtttttcttaaatgcaattctggtatttaaaagagatacctaaaaacattaggtcacaaaagtttgaaagaaaaagacaggaaaaatataatcaaaataaacctggtgaacctgtattattatcaaataaaatggactttgatacagaaaaaaataagaggtatatatttatgagagttttaatttacctgacaaaggtaaactcaagtgaactaatcatataattaaaacatatagatgaaactgaccaaaaaaccaggttaaaagagtaactctattatcataatgggacaataaagcatatttcaaaaatcaatccttgaataataaatctcaaaaaatgaatctttttttttaaaaaaagaaatgtatttgttttaaaatatataattaacaaacttgacatactagaattatatagagagctatgctcaacaactgaggaacatrcatatcttttcaagtacacacaaaacattcataaaacagcagtgttgcctgtgttcctccaccaaatcatatggaatattttgtttgcagagttattgaacattgttgctca

SEQ ID NO: 645672 - DNA, 526 bp, Homo sapiens
gtatgcctgtctaagacagttataatgaatggagcttgcaggactgcaagttaccccaggtgactcagtgggtgagtagtgagcagatgtgaaagccaggatgttactgtacactattgtagactttataaatgctgtacacttaaacaataaacttatgaaaattgttcccctatattcaagtattaaaacatatcttagtttaactttttaacttaataaactttttgatgtttaaagtttttgctgttttgcaataayaattcgcattatacattgcacatctgtacaaaatattctctttatattcttatttttgagcttttatccattttaaattttaaagtttttccttttaaacttttgcttaaaactaagatgcaaacacacagaatttcttaggccttcacagagtcagaatcatcagtatcaccatcgtccacctccacatcttattccactaggtggtcttcgggggcagtaacaggcatggaactgtcctctcctatgataaaaacaacttctc

SEQ ID NO: 645673 - DNA, 526 bp, Homo sapiens
gtatgcctgtctaagacagttataatgaatggagcttgcaggactgcaagttaccccaggtgactcagtgggtgagtagtgagcagatgtgaaagccaggatgttactgtacactattgtagactttataaatgctgtacacttaaacaataaacttatgaaaattgttcccctatattcaagtattaaaacatatcttagtttaactttttaacttaataaactttttgatgtttaaagtttttgctgttttgcaataataattcgcattatacattgcacatctgtacaaaatattctctttatattcttatttttgagcttttatccattttaaattttaaagtttttccttttaaacttttgcttaaaactaagatgcaaacacacagaatttcttaggccttcacagagtcagaatcatcagtatcaccatcgtccacctccacatcttattccactaggtggtcttcrggggcagtaacaggcatggaactgtcctctcctatgataaaaacaacttctc

SEQ ID NO: 645674 - DNA, 610 bp, Homo sapiens
ttccaaggataggttatttttctaaaatcaaattcatrtaactattaatgtaataagtttattcaaatgttgccaaggttaatataagcacatgtaacaaagtataggaaccactaaaaatgcttcctatatattcctttttcaggggttatggcaagttaggataaatctattacacgagtttttattcacaataaatgcaataaatgcactgccttttgagttctaaaatacctgatttataaaggtgttccaggttcttgtattgtcatagtgcagagcaatggaggaagattgagagtatggtcctttgcatttaaactgggacccagtgtcatgacgaactccagttgatggattgattgccaatgactgcctaagctggggtgggagacagatgagagaagaggaccagagtcctaatattcctgactcctggggacagccagaaagagggtaaggggtatcatccccaggtagtcttcctgcccaaaggtgaggctctgcagagcttcactgggctatttctgtactgtattggataggactataaaatggagaggctgttttccataggacggctataaaaccagtcttatttcatgatttc

SEQ ID NO: 645675 - DNA, 605 bp, Homo sapiens
ttaaatccaccaaggaagcttcaggccaggtggcttcmcaggctaattccaccaaacagtcaaggaagaaataatgtcaatcttacataacacttccagaaaataggaaaatgaagactatcattcaacttcttctgtgagcctaaaataagcttaatagcaaagcctgacaagaacattttgaaaaagaaaaattactagccaacctcattcatgtacataatttagaaatgccaaacataaaatattagcaagtaaaattcaacaacacatggaaagaataacataatatgagcaaggcatgtttactacagaaatgcaaggctgtactaacacactaaaaccaatccataaaattcagagcattaacacaataaaagagaaaaatcatattatcattttgatagagaaaaattacctgacaaaattcgatatctcatcattatttttttaaaaaagaactttcagcaaactacaattagaagtgaacttgcttaatctgataaagattatttatttaaaaacctatagcattatacttaatgaaatattgatagctttccctcaaaatgtagaatgagataagaatgcccactgtcatttct

SEQ ID NO: 645676 - DNA, 556 bp, Homo sapiens
accttaatgtctatctgtgaatgaatggttaaagaaaatatgtatatacacacacacacacatatgccatatttataatatatataatatatatacacacatataatattcctgtatgcatacatatgtgtatagaatgtttatatatattatatataatattgtttatatattagaatataggatattgttatatatttatacatatgtatacatttatatacattatttatatgtacacacatatgtatatagacataaaaaagaattgctgcatgatctcacttatatgtggaatttaaaagaatcatactcatagaagcagtgagtaaaatggtggttgccaggagtgagagataagggaagtgaagaaatgttggtcaagggatacaaaatttcagttatgcaagatgaatgcattctagagagataatgtaccgcattgtgactataattaataatgccatattaatgatacatatggatatgtgctaagttaataagaaatgtaactatagttaacaatrcatattaaaatgtactaagaggctacata

SEQ ID NO: 645677 - DNA, 580 bp, Homo sapiens
attcatcatgattatgtggggtttatcccaagaatgtaagagtagtttaacatgtgcaaataaatcaacattccgttgatacattataacacaggaatataggatagcagaataaaggattaaaaactatataatcatttcaattgatgctgagaaactgttggataaaattcaacattccttcatgataaaaaccctaaaataactggggatagaaaggacttacctcaacataataaaagccatatatgacagacctacagctagtataataccgaatggggaaaaactaaaatccttttttctaagatctgaaacatgacaaggttgctcattttcaccattgttgttcaacatataataatattgaagttctagcttgagcaatcaggaaagagaargaaataaagggcatccaaattggaatggaagaagtcaaattatacttgttcatgtatgatatgatcttatgtttggaaaaccctaaaaactgcacaaggaaactattagaattaataaacaaattcaataaatttgcaagatacaaaatcagcatgcagaaatcagtagcatttctaca

SEQ ID NO: 645678 - DNA, 558 bp, Homo sapiens
atgagccaccatacccagctggttacatatatttttgaagtagataaatgaggaaggatttcagttgattagttactggagatatttctcacacaaatttaaaattaatatgaaagatggtgtcagtatctagtccattttcttttactataacataatatcacctattgagtaatttataaagaaaaaatatttatcatagttctagaggccaggaagtccaaggtgccagcattttgcaaaggccttcwtactgtgtcatcccatagcagaaggtaaaagggcaagaaagcatgtgcatgcaacagacagcaagagattgaacttgtgtagcctcaagcccttttataactggcattatccgttattgagggcggggcctttatggcctaatcacctctcagaggtcccacctcttaccactgttgcattggggattaagtttctgacccgtaaactttgaggggcacattcaatctatagcaggcagcaacttttaactgtaaaagttttgaaagttatgaaatatgggataaatccaatcatctgaaaacatta

SEQ ID NO: 645679 - DNA, 558 bp, Homo sapiens
atgagccaccatacccagctggttacatatatttttgaagtagataaatgaggaaggatttcagttgattagttactggagatatttctcacacaaatttaaaattaatatgaaagatggtgtcagtatctagtccattttcttttactataacataatatcacctattgagtaatttataaagaaaaaatatttatcatagttctagaggccaggaagtccaaggtgccagcattttgcaaaggccttcttactgtgtcatcccatagcagaaggtaaaagggcaagaaagcatgtgcatgcaacagacagcaagagattgaacttgtgtagcctcaagcccttttataactggcattatccgttattgagggcggggcctttatggcctaatcacctctcagaggtcccacctcttaccactgttgcattggggattaagtttctgacccrtaaactttgaggggcacattcaatctatagcaggcagcaacttttaactgtaaaagttttgaaagttatgaaatatgggataaatccaatcatctgaaaacatta

SEQ ID NO: 645680 - DNA, 569 bp, Homo sapiens
ggtgctataaaagggtagcaaaagaaattcttaggatgaaactgttctgtatcctgactgtggtgacatcacaggaatctacaggtgacaaaattgcatagaacaaaaaatacacacagacacaaatgagtgcatgtaaaactggtgaaatctgagtaaggtcaatggatcctatcaatgtcagcctcctggttgtgaaatcatactacatagttacacaagatgttaccatgggggaaactgrgtgaggggtatataggttgtctgtgtgttatttcttaaaactgcatgttcataattaatttagaaaaattaagtcaattccatatattaattcttagaaacaaaattaaaataaaatcacacctggacacacagtggtgaaactgcaaaacattagggatgagaggaaaatctaaaagcctaccagaagtaaaagacacctgccctaccactttaaaaaaattaataggagacttcttctcagcaattctattgtccaggtgttttcaggcataaagtctaatctcaatttaaaaataactagaattcccagaataaccagaaat

SEQ ID NO: 645681 - DNA, 610 bp, Homo sapiens
gttatttcacttatttattttttgtttatttctgctgtgtgtcctatactacacattccatataaaacagcaactttgttttatattcattactgtctcaaataatacctggccatagtaagcactcaataaacatttgttgcatgcaagcatgcatgcatgaatccagaatcatgtgcacaactaggaggtccattttcatacacaccagtcaatctggactatcaggtcttccctaaaagtcccatctttttcttgttattcactcattttacacacacacacacgcacwtgcccacatgcatacacacacacacacacacacacacacacacacacacacacacctattcctagaaaccttacctatgcttttaggctcttctaaaatgtaatctactctacgaagcatttttaattcactaactaaatgcaatctcctcctcactttaaatcaacattagaattatactagttgtaggacatttatcttacatagatattcatttaaattaatctggacatttgcttttctcttctaagctacagtcatatgtcacttaacaacagggatacatctgaaaaatgcattgttaggtgatttcctcct

SEQ ID NO: 645682 - DNA, 378 bp, Homo sapiens
aagggaagttgtttctgcctcatggttgtcctcttctccaaatctttccaacctcgccccaatgccgaagattggtctttttcctttgaattgcactgatgttttttactctttactgtgacttttataggaaaaccctatgctgagacccttaacctttgctctggctttgcagtgggaagatttgtgaactgcaagatgatttcttctttcaacaacgactagtatccaaaactttcatttttttatgaaagtatatatctaaaaaggtaaatctgagactcaaagttgagcaataamtactttattttaggacctgttcacccttgcctatgaagtaagaaattaacaaattaaataagtatggagactaggaaa

SEQ ID NO: 645683 - DNA, 589 bp, Homo sapiens
ggcttagaaagaagaaaggggattcatgtcagggtattctgggtatttattttgctagctctttccctacaggattttcttggattcagttgtgatcgtccaactaatattattgttccttccaaagtgattttctgtgtatacctyttttcttctagttctggtaatgtttcctttctctctttgtctctttagttctaaagagttacagcagcctcgcagctactcatgtcagattactgcactattccttttggttctcctttactcacacagagtgtctttgtaaataactcattcttggtttactataatttaagtgtaccgtttctttccttttgggatcctgactgttacatacacttttgaagcctagaatttttttcttaattgtatgagttatattcgcctgaaagtgaagagccatgacttggtcactaagcatgatactaaatttgttccagatttaattaacatcaagtgacttcttttttgcataataatatacttccaaatttatatttcttatgtcactgtgatgcttcaagtcagtcttattccttacatacttgtatatgtcagaaaaaag

SEQ ID NO: 645684 - DNA, 589 bp, Homo sapiens
ggcttagaaagaagaaaggggattcatgtcagggtattctgggtatttattttgctagctctttccctacaggattttcttggattcagttgtgatcgtccaactaatattattgttccttccaaagtgattttctgtgtatacctcttttcttctagttctggtaatgtttcctttctctctttgtctctttagttmtaaagagttacagcagcctcgcagctactcatgtcagattactgcactattccttttggttctcctttactcacacagagtgtctttgtaaataactcattcttggtttactataatttaagtgtaccgtttctttccttttgggatcctgactgttacatacacttttgaagcctagaatttttttcttaattgtatgagttatattcgcctgaaagtgaagagccatgacttggtcactaagcatgatactaaatttgttccagatttaattaacatcaagtgacttcttttttgcataataatatacttccaaatttatatttcttatgtcactgtgatgcttcaagtcagtcttattccttacatacttgtatatgtcagaaaaaag

SEQ ID NO: 645685 - DNA, 589 bp, Homo sapiens
ggcttagaaagaagaaaggggattcatgtcagggtattctgggtatttattttgctagctctttccctacaggattttcttggattcagttgtgatcgtccaactaatattattgttccttccaaagtgattttctgtgtatacctcttttcttctagttctggtaatgtttcctttctctctttgtctctttagttctaaagagttacagcagcctcgcagctactcatgtyagattactgcactattccttttggttctcctttactcacacagagtgtctttgtaaataactcattcttggtttactataatttaagtgtaccgtttctttccttttgggatcctgactgttacatacacttttgaagcctagaatttttttcttaattgtatgagttatattcgcctgaaagtgaagagccatgacttggtcactaagcatgatactaaatttgttccagatttaattaacatcaagtgacttcttttttgcataataatatacttccaaatttatatttcttatgtcactgtgatgcttcaagtcagtcttattccttacatacttgtatatgtcagaaaaaag

SEQ ID NO: 645686 - DNA, 589 bp, Homo sapiens
ggcttagaaagaagaaaggggattcatgtcagggtattctgggtatttattttgctagctctttccctacaggattttcttggattcagttgtgatcgtccaactaatattattgttccttccaaagtgattttctgtgtatacctcttttcttctagttctggtaatgtttcctttctctctttgtctctttagttctaaagagttacagcagcctcgcagctactcatgtcagattactgcactattccttttggttctcctttactcacacagagtgtctttgtaaataactcattcttggtttactataatttaagtgtaccgtttctttccttttgggatcctgactgttacatacacttttgaagcctagaatttttttcttaattgtatgagttatattcgcctgaaagtgaagagccatgacttggtcactaagcatgatactaaatttgttccagatttaattaacatcaagtgacttcttttttgcataataatatacttccaaatttatatttsttatgtcactgtgatgcttcaagtcagtcttattccttacatacttgtatatgtcagaaaaaag

SEQ ID NO: 645687 - DNA, 565 bp, Homo sapiens
taagaaaatttgaactgtatttaatgatactattatttcaatgctaagcttctttaggatggtgctgtggctttttattttgtattgcatttagtgatactattgtttcaatgccaagtttctttagtatggtgctggagctttgtatttagggatgaaggccatgatgtctaacatttattttccaatagttccacaaaatgtgtctgtaattaacaattactgatttagatgaaaagtatatatttataatatttataatagcaattctacaacttttttgtatattggaaattttccaaatgtaaagttaggggagaaagaaagagataaaaaaggaagaaagaagggtgggagagagggaggtagaaaaagatagaaagagaatatcatatcttttggaaataactctctaaagtctctatcatacataagatgtgaacaggttctgatttacacctacatttttttcattatgtggatagcagttctctattactgaayagtttgtgtttaatctttttttttttactacaaacaatggtgtaaaataattctgtatata

SEQ ID NO: 645688 - DNA, 565 bp, Homo sapiens
tgcttatgagctaatggtaaaggttataagatgccaaaaaaatttacaaagataaaatgacagaatctctcctaggaaaaaacaaaaggatctggaaaagtagttttaaccagcctctctaataatacacgtcttgctctgccactccattacacacaataaatggtatgtcaggaggcctaaacttgaaagaagcttgtttaatattcgggaaggaaagaggtgttcttgtgaactatgtaaatattggacaratattctggcaggggagaggacttcttgtgaactctgtaaatgttgagcaagaaaaagtctatctacacactgagacaaacttaaggtcctggattgtttgtttttaatgaaaatgtatagcagtataaggaacaacaaaaccactcacattaacacttgccaaattgagattaattctaaagtattcttagatttcaaatgaccattttttttaaaagagtggtgatatatctattaccaaccattataaatactagctgaaaagacagatagataaagttacaagtatatgaatagggactgggtgcag

SEQ ID NO: 645689 - DNA, 441 bp, Homo sapiens
aaacaagcccagagtaagactacagtaaatactaactcttcaatacccagacacagacaaacaccaaaatgcatcaagatcatccaggaaaacatgacctcaccaaacaaactaaataaggcaccaggcaccaatcctggagaaacaaagacttgtgactttgccgacagacmattttaaatagctgttttgaggaaacaaacaaacaaaaaaaccagaaggaattcagaatcctatcagataaatttaacaaagagactggtataatttaaaagaatcaagcagaaattttggagttgaaaaatgcaactgacatactgaagaatgtgtcagagtcttttaatagtagaactgatcaagaagaaaaaagaattggtgagcttgaagacagactatttgaaaatacacagagaagacaaaacagaaaagaacaaaaaataa

SEQ ID NO: 645690 - DNA, 624 bp, Homo sapiens
gcatttttattgtttataaatctagggtattttgttattgcagcttgaatatattaacacaaggagtaactcataagataattagactttggagcttaaatatcttaacatagggtaataaattattaaaaagtggcgaaacaaagaaaaaagtggtttggcttctagggatgataaattgtaggaaagtgacttggggatgcatggaaaatatggtttatttagtacaatttttatgccaattagttgttctcttttttatacaggagaaggaaacacctctatgaatgtaaaaagggaaatttatgccctgattttaggcagaaaagaagaggtcagagtgttcttcctgtgtttgctgtttttcaattaccttaagctgaaaakaagttttctgctaacttggcatattctgatcccatttcccactttccacttactagaaccaacccagctgcctcccactaatgggcaatcattagcttgacatctatcaccattgtttttttttaaactccctttgaaatatatattaaatgaaaaaataaaatatatatgcttttgtgcttgcaatattctccgaatgttgcattatattgtctgtgatgttcatccaggttaata

SEQ ID NO: 645691 - DNA, 624 bp, Homo sapiens
gcatttttattgtttataaatctagggtattttgttattgcagcttgaatatattaacacaaggagtaactcataagataattagactttggagcttaaatatcttaacatagggtaataaattattaaaaagtggcgaaacaaagaaaaaagtggtttggcttctagggatgataaattgtaggaaagtgacttggggatgcatggaaaatatggtttatttagtacaatttttatgccaattagttgttctcttttttatacaggagaaggaaacacctctatgaatgtaaaaagggaaatttatgccctgattttaggcagaaaagaagaggtcagagtgttcttcctgtgtttgctgtttttcaattaccttaagctgaaaataagttttctgctaacttggcatattctgatcccatttcccactttccacttactagaaccaacccagctgcctcccactaatgggcaatcattagcttgacatctatcaccattgtttttttttaaactccctttgaaatatatattaaatgaraaaataaaatatatatgcttttgtgcttgcaatattctccgaatgttgcattatattgtctgtgatgttcatccaggttaata

SEQ ID NO: 645692 - DNA, 582 bp, Homo sapiens
attgtattttaagatctgcctttggttgaaaaacaaatccacatataagtggacccctgtagttcaaacctattttgttcaagggtcaaaagtatatttaaaatcacatcattcaatattaagtgaaatttgaactaaagaaggaagaagagtagaaagaagagaaggaaatagaggatgagtaggagaggaggagaaggagaaatagaaaggagggcagaaaagcatgcaagatgcaaaagatagttgaagtgaacactgtaggagattgactccaagaaaacaaagaagaaaataatgacaagaaagacaaaggaacataaataaagaaataaaagtgacaagggtgaaaataacagagataatcagaaaactagaaatttaayataaaaataattatatatctaaagaaaagactagaaaaaaattgtaagacataaaattcaactaggatcttttctacagtgaaagaaaaaataaatataattcaaaggtttactgtaccctgataaaaagaatataggatgaaatacaccaagatttgtccaaaaaagaaccacagatacttttgagaaagtaaaa

SEQ ID NO: 645693 - DNA, 582 bp, Homo sapiens
attgtattttaagatctgcctttggttgaaaaacaaatccacatataagtggacccctgtagttcaaacctattttgttcaagggtcaaaagtatatttaaaatcacatcattcaatattaagtgaaatttgaactaaagaaggaagaagagtagaaagaagagaaggaaatagaggatgagtaggagaggaggagaaggagaaatagaaaggagggcagaaaagcatgcaagatgcaaaagatagttgaagtgaacactgtaggagattgactccaagaaaacaaagaagaaaataatgacaagaaagacaaaggaacataaataaagaaataaaagtgacaagggtgaaaataacagagataatcagaaaactagaaatttaatataaaaataattatatatctaaagaaaagactagaaaaaaattgtaagacataaaattcaactaggatcttttctacagtgaaagaaaaaataaatataattcaaaggtttactgtaccctgataaaaagaatataggatgaaatacwccaagatttgtccaaaaaagaaccacagatacttttgagaaagtaaaa

SEQ ID NO: 645694 - DNA, 642 bp, Homo sapiens
ctacttgactttttaggtgataaacaagaataatagttggtcatttattatttataaaaaggcaacatgattctatacaaataacacagttcttgtaataaaaatccctaagttaaattcctcctgtctctttgggacgggtttggggtatcggtttcattttttgctgcttgtttgtttatttgcttgcttttgaaagatggagatactataatatgtcaaaaatattttgtgagcgtctactaagttaacaaacgagaawgattctaacatagttctggcccatggtagatagtaaacaaatgttaattttttgattactttatattagatggtaggtatgggtgctattctctagcagaaatctgattttttttccctaaatttaggcaaggtggaaacacagcacatccccctcttcttgaagcaaggggaggccttatgacttcttttggcaatgaaatgtgggtagatgtgatggttggtggaaatgccatatatcacttctggatagaagcattaaattgctaatattccacactctagtttatgcttcactctgtgaatatgatagtgaaatgtgtgttgataagaggtgttggaaatttaaagccacctaaaatgctgaaccaacccatgtgt

SEQ ID NO: 645695 - DNA, 584 bp, Homo sapiens
gaactgcagcctagaggcactgtggcatcttacagcttggggtcaggttttggctgcactgggggatccaatttgctcttgggttaccaggaaagtactcaggtgaaacaatgcacttatgttgagtttcagaagctgtgctatgtacacattcacccaaggtggctaggcatggtcccttttagaacagacataccccagtcccacagggaagctagccccactctctactggcttggaggtcagctgggaaaagcccctcacagagggggatagagagctctgggaaatgtgcatctgtggcctctctctgcctgagctgcctatcaaaaaatctcctaagctctatgccatctgatactktccaactgtatgtcttttttgaattctaatattgtatgctttcttgatgcaatgtaaacaaaatacagtttttttgcacgttagaaaaacaagatagagaaaaatcattttatacatgatagatatttcaaagatttagtcacattgatatttaaattatattttctatttacacaggagggtgaaatttggtcaagacctgctcatatttattcagctaa

SEQ ID NO: 645696 - DNA, 584 bp, Homo sapiens
gaactgcagcctagaggcactgtggcatcttacagcttggggtcaggttttggctgcactgggggatccaatttgctcttgggttaccaggaaagtactcaggtgaaacaatgcacttatgttgagtttcagaagctgtgctatgtacacattcacccaaggtggctaggcatggtcccttttagaacagacataccccagtcccacagggaagctagccccactctctactggcttggaggtcagctgggaaaagcccctcacagagggggatagagagctctgggaaatgtgcatctgtggcctctctctgcctgagctgcctatcaaaaaatctcctaagctctatgccatctgatactgtccaactrtatgtcttttttgaattctaatattgtatgctttcttgatgcaatgtaaacaaaatacagtttttttgcacgttagaaaaacaagatagagaaaaatcattttatacatgatagatatttcaaagatttagtcacattgatatttaaattatattttctatttacacaggagggtgaaatttggtcaagacctgctcatatttattcagctaa

SEQ ID NO: 645697 - DNA, 634 bp, Homo sapiens
ttgctgtaaaaatacttcatgacttctcaattttcgttaggtttaaaaatttattttgggtcttgagactgtgaatttgtataatatgctaatatctcaagtgacaaatcagtaataggaaattacaatacactaaggttttttttgtgtatttgtttctgctattggaatctttctctggggctttatctgagatgcactggatgattgcaggcatatatttctgctcagctgaaccccagatataaacatttctgctagttctttgtatttggtggcccttttaaactgaggaagcccatgtttctccactgtcaaaagctgagctaagttagagaaatgtcacaccttcagaaaaggggaaacttagatacccctaacaagtgaccacttctcaggtgcctacagattataatgcttcctgtctttaccgtagcgtagtgccactatacattttttcaagtagaacagcaactattttacataamaaattctattctctggattactcatttttgaggccagccaaataaagttaatttaattattgagtgctgctgcttcaaccaaacatgaattttgaaatctaacatgactacagagcaaaacgttgacttcaggttgaagataattt

SEQ ID NO: 645698 - DNA, 528 bp, Homo sapiens
cagcctcaggcatgtctttatagcaatgcaaaatggactaatacaagctatttgcagggaaaaaaataaaattattgaaattgattcagtcaattaacgtatattcatcaagcacctaataatatgtgccagtgtagagtgtacattctaatggtggaacaggcaaaaaaaaaaaaaaaaaagrcgtaaatgagtgaaatatatagtcagatactgtcagatattgataagtgctaaaaacataatttaaaatgtgatgggcttgttttcaacatgtgctcagggaaatccttatacataagaataaagagagaaacaagtcattaataatatttgtgtaaatttccttatttcctcctaggaagacagaatagcactttcaaaaacagaagcatattggtgtcttacaaatacagcaaggatgccattgtggctattgtgaatactcaaattggctagcgggaggggacatgaaatcacaccaggtactatatttgtaagacagaattttgactttaattcagaatg

SEQ ID NO: 645699 - DNA, 528 bp, Homo sapiens
cagcctcaggcatgtctttatagcaatgcaaaatggactaatacaagctatttgcagggaaaaaaataaaattattgaaattgattcagtcaattaacgtatattcatcaagcacctaataatatgtgccagtgtagagtgtacattctaatggtggaacaggcaaaaaaaaaaaaaaaaaaggcgtaaatgagtgaaatatatagtcagatactgtcagataytgataagtgctaaaaacataatttaaaatgtgatgggcttgttttcaacatgtgctcagggaaatccttatacataagaataaagagagaaacaagtcattaataatatttgtgtaaatttccttatttcctcctaggaagacagaatagcactttcaaaaacagaagcatattggtgtcttacaaatacagcaaggatgccattgtggctattgtgaatactcaaattggctagcgggaggggacatgaaatcacaccaggtactatatttgtaagacagaattttgactttaattcagaatg

SEQ ID NO: 645700 - DNA, 528 bp, Homo sapiens
cagcctcaggcatgtctttatagcaatgcaaaatggactaatacaagctatttgcagggaaaaaaataaaattattgaaattgattcagtcaattaacgtatattcatcaagcacctaataatatgtgccagtgtagagtgtacattctaatggtggaacaggcaaaaaaaaaaaaaaaaaaggcgtaaatgagtgaaatatatagtcagatactgtcagatattgataagtgctaaaaacataatttaaaatgtgatgggcttgttttcaacatgtgctcagggaaatccttatacataagaataaagagagaaacaagtcattaataatatttgtgtaaatttccttatttcstcctaggaagacagaatagcactttcaaaaacagaagcatattggtgtcttacaaatacagcaaggatgccattgtggctattgtgaatactcaaattggctagcgggaggggacatgaaatcacaccaggtactatatttgtaagacagaattttgactttaattcagaatg

SEQ ID NO: 645701 - DNA, 611 bp, Homo sapiens
taacatctccatctggtaagggcctcaggattcttccactcaccgtggaaggcaaagagtagccagtatgtgcagaaattacatggtgagagaggaagcaagagagggcaggggtaggggcaaggagtgccaggctctttttaacaactarctgtggcaggaaacaatagagtgaaaactcactcaccatccctgtccaaggaagctgttcatgacagatccattcccattacccaaatacctccattaggccccacctcaaacattggcgattaaattaaagataggatggggacagactgggcacggttgcgcacacctgtaatcccagcactttgggaggccgaggtgggcgaatcacatgaggtcaggagttcaagaccagcccggccaacatggtgaaaccccctctactgaaaatacaaaaacttagcctggcatggtggcttgcacatgcctgtagttccaactacttggttggctgaagcaggagaatcgctggaacccaggaggtgaaggttgcagtcagctgagatcacgccactgcactccagcttgggaaacagagcgaaactccatcacagaaacaaacaaacaaaacaaaacaaaaa

SEQ ID NO: 645702 - DNA, 507 bp, Homo sapiens
caaacaaatggaaaaactttccatgctcacagcttggaaaactcaatatcactgaaatggccatacttcccaaagcaatctatagattcaacagtattcctgtcaaattaccaacatcatttttcatgaaattagaaaaaaaattctaaaattcatatggaaccaaaaaagagctcaaatagctaaagcaatcataagcaaaaagaacaaagccagacgcatcacattgcctgagttcaagttacattataaggctacagtaaccgaaacagcataatacttgtacaaaaacagatrcatagagcaccaaggacagaatagagaactcagaaattaagctgcacacctacaaccatcacacctacaatcctaaatcacacctacatcacaatcctatatcacacctcaaatcaaatcacacctacaaccatctgatctttgatgaagtcaacaaaaataaggaatggggaaaggacttcctattcaataaatggtgctgggatagct

SEQ ID NO: 645703 - DNA, 577 bp, Homo sapiens
acagatctgtcttatgccttttacaatatattgaaagtttaacaagtttaaataaatagagtatcaataaaaggaaatttggttrtaagtgacagaattatacagaaatggtcagagtaagaccttagccattcacctccaagaactatccaaagggaaggaatccctgtgccaaggagcttgagatgtctagtctagtgcctgatatttgtcttttgtgggaaaaaatgttatgttctgatgcttttaaacattcatctcaaataaacaatatttctgttgtgattcttctttcagcctgcagaaattccctgttcataatgttactttttctataatttgcttacagagagagaatgcactggttggaggacttgaagtgtctgaatattttagcatttatacttatcagtatacactattaaaaatggcattttaatttctttatatttgtctcatgagccttatctgaatgactcaaactcaagtctgattaagtctgaaacacctaaggtgacacttttagactgtgttctagggagtacaactgccccagcagttgtaaagggatgttttt

SEQ ID NO: 645704 - DNA, 591 bp, Homo sapiens
gtttgctgttcaccataatgtgctgtttcacttaacaaagtggaagcaaaaaatcttttctccagggcattcgcaatattcaccatcacaccacatacacagcacacatgagcactcacacacacacacacacacacaccccaacatcatcaccactccctctgcattatccccaccagcatgccacacctacacacacagacacacacacacactctcacacactcactcttcttattttaagattctgtttgtccataacataaactaatggctctttcaacatttttaggctagtgtataactcagggactgagtaataggcactcgtgtttgttaagtaggataaagaaagaggtttaggtgagtatacaaggaaaattgtattgccaggaagtcattgttgcctctgcttgtgttgcttagggagcaaaagcctgccccttccaacagtggaatggctcagtgccttcctgaatcactactyccccagccacacacactttcagagccactccccctcacatcctgctgtaaatatttctgaaggctgagccatccctccctcgtaacatgtccatcaagcaggct

SEQ ID NO: 645705 - DNA, 565 bp, Homo sapiens
gcactgtggcccctgcctttgaaagactctcatccacttgccttaaattatagctttctgagctcagacagttttatatacaattctcattctgtcaagcttatgcaagtcatttgggaagagtatttggcaggaagcaatgttcagaaaggcagcccacagagattgccttgaggggcagcaaagacaaagaacttttagaaaaactatgaaagatatcccttaagttttctgtattttacatttgcacaccttggcaattgccacctattttactcataagggactgtcaatcagatatagatttcttttctttttttatttttcccaaaatagaccagtttgtaaacatggcatttttttctctttttgaggttaattctgtatgtttttccctgaaattactgagcttcaacaattctgtacttttaaaactccatagtctttacttcaagggagacatactgcttattctaacattctatattattttaaaaatattgatgrtaattaataccatgtaagatttaatgccacatagtccacgacttacaaaagtagctgt

SEQ ID NO: 645706 - DNA, 466 bp, Homo sapiens
tttctgacactaggcagagttagttacatttaatgagcagaggagaggccaggagaaggaattcatccaagtcacatttaaaggcaagaacaactccacattacagttacatgaagtggggcagccaaggcctaaacagtgccttgtggctcatggaactcatgggtccagtgatcctcagctagagcctcatttcttcctggaggatgagagaagtttgattcctaccagaattcaaatggaatctattcaatttgaccaaaaaatggcacagataattctgaaacaacacctacaacatttcccctgctgtcccctgttgctgcttaatggagactataaacccagatagaatgctgggatgctgtgtggccattawtttctccacttgagtcaataaattttggtgttaaattatatcgcaaaatagtaaaaatgtacttctactaagagactgataagttcc

SEQ ID NO: 645707 - DNA, 596 bp, Homo sapiens
cggtggttcatttactcagcctgcagctctcaaccgcttgcgggaaggggagcactcaagtgagcggatgcaggggccaggatgagtgcttctgagctccaggtggagtagagctctgtgcagccctgccgcaaggtctgaggggtacccgggacccctggagccccagagggcatgtgttacagtgtgctcttttagctttgctgtccacagacagcttaagcgtttaacagctcaatgtgacagccctctgcatcctgagctcttgttcagagtccaggaagaatcaggtcacgcgaatgaattcaagacagtgaacaccacgggggattttattgccaatgaaagtgtctttcagcgggatgggagctggaaaaggggtggagtgggagggtagttttctcctggaattcagccaygcccggctgaactctaatctgaggtcccatagtcaagccatccctctgaagtcaagctgcttctcaccaacgtctggctgctgcttctcttttctccttctctgcctctcttctgccagtggagcctcgggtttttatgggtacaggatggtgggtggggcaggccaggctggcttt

SEQ ID NO: 645708 - DNA, 621 bp, Homo sapiens
cccatatacagggattgttttgcctacaagaaagtagtttgtataacagtatatataatatgtcttacttacatgtgtctttaaaaactcagatgtcttatacctcagcacactgaatgaagcagcaggcttcccttttaatgaagctttaatgaaagacattctcccatacatcttagaagatacctgagggtggtggtgctacaaccagcagagtttcaagggcagaattgggaaatggtaatgagtataggtatttatactcactgtctacctaaaactgtgtgacaactacagagagtggtgctcgaggtgggcttttttcttaaactcagtaaatacttcaaattcattcttaaaaattgaacaatttaaaatatgccaaaatgaaaccttttctatgaactacattttaaacatcaataacaaagttgtggaaccttgtagttagaagggaccttcgacgtttgttagaataacactatctttggtttctcatttgccttctggagtgatacttacakattttattattcaaaataatttgaaagtatctaccatggcacttctaagcttttcttgtctccagaacagaacatccccagatccttcagccacatg

SEQ ID NO: 645709 - DNA, 594 bp, Homo sapiens
atatctgcatgaacaattagttactgttcttgttaaaaatttgtatttcaggttttaagggtaggaattttgagtcttccttgtgaaaatgataaggctgtgatgctgccatactgtttatatcaaagttcaatggttgcaagaaattaaaactcaragcagctctggtcagaagagctccttagcataggaagcatagtgagcaggcagcacactccctgggatctagcagccaagaatgtgagatctggagtcttgtttgagtttgtctctaccacttacaacactggaaactgataaccttttttatctttggaggttttctgagcttttctagtatttgagatgttttttcagctgctgcagatcaacccctaaatcaacaagtaattactggtggcttgctgttcacccagcattgcactaagttggtgggatagataagatactgtttgcttaatggaaattgcttatagttggcaaattcatatgtagttaatataagcacaagtttatcttaaaattttttttttttatctatggggtctcactgttccctcaggttggtcttgaactcctggcctccagcgatcc

SEQ ID NO: 645710 - DNA, 604 bp, Homo sapiens
ggaggaggcaaatttgaggacacagagactttctcaagaggagcatctcagctcacagtcagctgactgttgtcttgggatggtgtgggcccactgtttccaagtctgttttatttctttaagtggaattagaaaaccagttttgcatgtgaaatctctgaattttaaaacttggtttatattttaaaaagaaaagagttcaggccaaacagaacacatctgtgctctgtgtccagctcttgtacccactgtagcaatttctgctttagcttctcagtctgtgcccaagttatttggttgttagaaaccaagcgccttggacctcgttatattactttttaaagggatgcctttcccaaatatggtagtactctggcccttttccagagaaaatatggaaatcatctgttttgaccaatattttcacatgtttaataaaactgtaattgaaaaacctttcaggtaccaggcatgcacaagaaccccgcagcatattttgaaaaactgaagcaaaagcctccacrgagaaatttatcagtgaaaattctgctctcacagaacattgatattcggaccaaatcccatgcttagttgaggcaaatgg

SEQ ID NO: 645711 - DNA, 484 bp, Homo sapiens
cagtatacaaacatgctttagattatctcattttacaaaaatcctgtgactccattctttcagctagtacccacttttttattttttatttttatttttwttttcagacagttttgctcttgttgcccaggctggagtgcaaaggtgtgatctcggctcactgcaacctctgcctcctaggttcaagtgattctcctgcctcagcctcccgagtagctgggattacaggcgcctgccaccacacccagctaatttttgtatttttagtagagatggggtttcatcatgttggtcaggctagtctagaactcctgaccttcctgacctcaggtgatccacctgcctcggcctcccaaagtgctgggattacaggcgtgagccactgcacccagccttattattttttaattttgtggttatcactttatgtatcttgtttatgaaattttatcctcttctggtaataaaaaaaagttcttctatg

SEQ ID NO: 645712 - DNA, 573 bp, Homo sapiens
gaatatttcaaatgtattatttttactacagatgacttgtggtgatgattaactatcattttcttctctccttctaccagctactatggaaaaacaaattacttgctatataaaatacaggttatcagcaatattgctaattgatggtgtagctgccaaattccaagtcacattctgacaaagaatatgacctaatgttactcaataacatttcatcaatcacaagccagaaaataaccaacagtcagtattttctttggatcagtaatgcaacctaatagtggcagttaacattaaattaaaggccagtaaccagattaaaaagtcttagtttgtgatttttttwaactaaaaatggatatgtattaaatgatgtttgagctgaattcaaaatatggggaaaatcccaccaatttgattaaaaactttcaatgagtatttaatgagtacctacccttgcccagtgaaggacgctcttagggatataatggtagagaatataatctctgcttaccatgaatttacaatatgactgggtaaagaaaacaagcagatttaaagcaaaacacaaaa

SEQ ID NO: 645713 - DNA, 526 bp, Homo sapiens
tttccaactaggtggtcatcgtggttttgccacatcactgagaytttattattaataaacattgttttatgttagcctacaaaaaaagactggaaagatccttataccattgagtgtgttaagcactgttatatccattttaaatttctaagacttgaacttgtgtttgacttgtgagtgctaaactcctgagaagggaaacagggccacctctttttactgtgcagcttgcacacggcacagctggatttggtgttcctgtctgaagctctcagtgtggttcccattctcctcatcattctatgctataaaaatctcatcggaacacctgtaacattattttgattcattttaatttgtgatccaaagttgcttttaggtattttttcaaattggggccttaacatactggtttttgcccttcttttcttcctttcaatcatcctgggcacctggcaactcctttctgtctttcttattcccctgcaacatttatttccaggaaagaaggtccttacattcactt

SEQ ID NO: 645714 - DNA, 569 bp, Homo sapiens
  misc_feature 553: n = A,T,C or G
gttttgccacatcactgagactttattattaataaacattgttttatgttagcctacaaaaaaagactggaaagatccttataccattgagtgtgttaagcactgttatatccattttaaatttctaagacttgaacttgtgtttgacttgtgagtgctaaactcctgagaagggaaacagggccacctctttttactgtgcagcttgcacacggcacagctggatttggtgttcctgtctgaagctctcagtgtggttcccattctcctcatcattctatgctataaaaatctcatcggaacacctgtaacattattttgattcattttaatttgtgatccaaagttgcttttaggtattttttcaaattggggccttaacatactggtttttgyccttcttttcttcctttcaatcatcctgggcacctggcaactcctttctgtctttcttattcccctgcaacatttatttccaggaaagaaggtccttacattcacttgcaccatttgaaccatatacgtttgctccatcgtagtatccgaactttanctagagatgatgcctt

SEQ ID NO: 645715 - DNA, 470 bp, Homo sapiens
atttgtaagcacaagggagagctttgattcttttgtttttcaatcagggagaaaaatgatagttccttcaaccaacagtggccatgcatcctgagtgacagagggaagccagtcgtcagggaacatccttgcccttcctaygattttctcttgtaatatacatgccaaggcagagacacggactcctcctcagatcagagttgtggatcctcccttttaggtggagaaactcctgccctgcagcttccagtggcatctgttccctccccaggaacatggggctctcggtcacacgccctccattaacctagaatttaaaatcagggatatcctggttcctcgagttacttctagatcctgtgggtaccagattgcagcccccacccctcatatcatatgcatagatttgattccacacatttcaatatagcagacctgcaggggcacttttatgcagtagttataagagc

SEQ ID NO: 645716 - DNA, 563 bp, Homo sapiens
cctttccttttaatggcttaatggctgattgacactcaggattggcgttttcatatgccatyaactccactatgaccttacgggctttttcatcggcaattgacttttgagcaacatcttggagccttgccacaaaatcaggatagggctcttttgaaccttgtcttactgtattaaatgaggggcaggtacttcctgggtcttggattttttcccaggctctaaggcagatagctctaacttgctcaatggcctcattttgcattaatgcttgttgactaatagtactccaattttgacctattcctaatagcttgatctgcatctatgttaactggaggattggcagccctatttcttcggacctgttcttgtaccccatcaatccaccaagtcttaaattgtaaaaattgagagggtgagagagacgattttgccagaatctcccaatcataaggaatgagtttatgtccatgagcaatggaatctaataatgtcctcatataaggggagttgggtccatactgttttactccctctttcatatcttttagcatttttat

SEQ ID NO: 645717 - DNA, 417 bp, Homo sapiens
gggttagctgtttgatccgctcccagtccctccccgctgtacctccttctccccatcccaccttcaggtttgtttgtttttcatttgcatgcattggctcctagcatgtgcccatgtgcccagactgttaattgccattcctagcagagcctccttcaggccctggtaaagctcaggcagcatcagccagtacagatttaaacacagcctttcctctttacaccaagctcatccaaatatccaaaatgttaacactgcttgggaaggcagggacagtgtcttagtcacctttgtacctttagtgtctttttataaaattaaattgatatctctttggaagagtcatggatagtcaactcccatcaggaacctcctgtgcrtggctggcagagtgccccagtcgccacagcagaattc

SEQ ID NO: 645718 - DNA, 579 bp, Homo sapiens
gatggggaaacattggttggattaagcatcatttgtttttgagataccttcatacacatcactgttcatattatacttcatacacatcaggactgtttactagcagaacacygagttgcatttcaattaagtcattagtgatgggttttagagatgaaaattaacaagatcctatgtttatacaaatacacacatacacaaacaccttcaaaagtcaacactatggaagattctagcaagaagtggtggtcataattcggatctacctggtcatagaggcaaagcccacacactttacatatttttcttcttatattaacctttttgagcttagaagattgcattaaaatctggatgcccaacagccaaatacctagtgtgaatttatccctgtgctacagtgacagtgattcaccctccaatgctccatcctgcactgtcctcttgttcttacacactccatatccaattcatccagaaattgtttatctataaaatatatccagaatatgatgacttttctccacctccaccttggtccaagttactctcatctcttgcctgtattattataatgtc

SEQ ID NO: 645719 - DNA, 540 bp, Homo sapiens
ccattcttgtgcgggtccatttatatatgttcctgaacagctaatatttcatttagtttccaattaaacttgctcaaatacatttttgaagtgcattgcttaaaatttacattcaaggcaagaaaacgagtttgtcagtaaatgtwgtaattaaggaagtcccaagtctgtatttttaagatactagaggtaattgtaactaatcactttaacttaaagaaatagaattggaaatacccccctccccccgccaccccctaccaaaaccataccttagtcactttggaattataaccgtcttttacgtctatcaatataaatgtattgcatttggcattcaaattactttcaaagggataaatttcgaatttttttttttcattgtagcttctgatctttaaatgtactgaacaggaggatttggggagcttgtcttgtctgataggtgttaagtatctatgacgacaaatttgagctgaagcaatgtgcaatatggactagtaatatcttcacaagactattttggaaattctcacgttg

SEQ ID NO: 645720 - DNA, 405 bp, Homo sapiens
ccgacggcccggcccggccgcccctcacccgccgctccacgcccytccaggtctggggcgaggcgacccgcagcgccaagaagccgctgcgcgcgtcctcgagccgggagcccgttcccctcctctccatccgcggctgcgcgacgctgctcctgagccccaagggcgaggtcggtgcgggtccccggtggggcggccggggctggggtgtgggggtgaccgacgcgccccgcaggtcctcagtgagcaccggatcccacgccgcgagactccggccccgagggtcttcgccgacggcaccgacttgtccatcgaccgcttcccgctccctgaggccgggcccggcgccgacacccgcaagccgccgcgcccacctcgacccctgcgcaaaggccgggtgcggga

SEQ ID NO: 645721 - DNA, 585 bp, Homo sapiens
ttaacattacaaacaaatggtgtcttcactctgccacagtaaattgtatttgctatccaatgtgatttttttgtatatacctatttctcatttcatttttttcttcagtcttctacatagatgatatggtttggctgggtcccaaccaaatctcatcttgaattgtagctccctaatccccacatgttgtgggagggacctagtgggaggtaactgaatcatgagtgcaggtttttcccatgctgttcttgtgagaataaataagtctcatgagatctgatggttttgtaaagggcagctcccctgcacatgctctcttgcctgccaccatgtaagacatgcctttactcctctttcgccttctgccatgattgtgaggcctccccagccatgtggaactgtgagtccattaaacctcttttttwaaaaaaatgacccagtctcaggcatttcttcatagcagtatgaaaatggatgaatacaacatatcacagctactctgctgcatttccactcaattatgcatcatggatatgcttttgctttaatctaaaaatgtgttcatgcttttatgctggaaacatt

SEQ ID NO: 645722 - DNA, 501 bp, Homo sapiens
tcttctacatgatattacaactgctcatccaaacctaacacagctaactttatcatgccctatgccaacgttcaacctaatttcaaaccacttgctcactgcttaggtatcatctgagggcaggagaaaaataatatgggtcaaatgtgctatttccaggtcagaacttatctcaatgcattatgatgactcactgctgctaccactgcccaaatataattccttcattctcaattgtcataaatgtgacggattgtgctaaaaaatgaaattaactacataaattataaaggcaatattaaaacaattcattctgtgaaagtttgaaattaataacaaaattttatagaacaaatttatastacttattttggccaactttatgctaaatgccatgccaagaaaagatttttcacctccttgacaaattatattgcctaatttgttatatctctactttgctctttattgtagttatcttgtttgtgttaaccataattt

SEQ ID NO: 645723 - DNA, 522 bp, Homo sapiens
tcattgaaatcttactaaaagctcagacgagcagtctttcctcacgtaagctttgtatatatcttgttatactcgttcctaggtattttttcattgtattgctaatataattgcaatctttgcttcctttgtaggtttgcttcctaatggctattctttgcttatattggagacaattgctttctgatgttacttgaaaactcagttaccaaactaaattatcttattcttgtagatcttgtataattgattttctttggtttccaggcacacaaaaatttcagccacatgtaattatagtttaatctcttctattttaatgtttcaatatatttaattttcttctttcatatcagtgcattgtttaatacctctggtaaaatgttatattacagtgctgtcaggaaacctgtttgccctatcaatgtctttagcttaaatgcctccartgttttcctattcagtataacactggcatgttgtaagaaactacctatcagttcttattttatggaggatttt

SEQ ID NO: 645724 - DNA, 566 bp, Homo sapiens
attatatgccgcactactgtaataattttgtagctacctccaattgtcattgcagtgagctcaagtgttgtgagtatctgcttaaaacatcatgtgatgttaattttctccctcgagtaaattgagggtggcagtaacaagtgatctcttccagttcttgcatgtttttcatcatgttgaatgcagtaccataaaccttaaataataccatgggacccatccaaagtgccactagtgatcctggaagtgctaccaagaagcagagaaaagtcactatattgtaagaaaaagttgtattacttgataygcacaatagattgatgtgtctgcagctgtggttgcccaccatttcagacagataattaatcttgtaaacagaccacataggcttaccctatcgacaaatacagaatagtactatgaatgtattttctactccttatgattttcttaataacattttcttttctgtagcttactttactataataatacaatatataatacacacacataaaaatatgtgttaatagactgtgctatcagtaaggtttctggtcaacaat

SEQ ID NO: 645725 - DNA, 618 bp, Homo sapiens
cttgaacataattatacatatttgacatattttcaaacattaacataatgtatctgtatttaacatgatgctctttattccataatttgtctttaatattttttctttcattaatatgtttgcattctgttaaaaagtgtgctaagtgttgaagataaagtgaacaaaacttgcacattacaacatatgcatacatatacatatatatatgtatatattaaacaattaaagaaaatgggatttccattagtaaggaggaagttgggaatacatttttcaataagtaattaatagtgtttaccatagcctatttgctgcctagatgaatatatatatatatagacacacacacacacaaacatatatatataaatttcaataatgcacacacattatacttcaaaaaaaagaaaatrccaagttgcttccatgaactacttcatcctaaagttaagtatttctgggtaagcttgctattctctttagaacattttgatacgtttctatggctaaaaaccaaattatctacctttggatatgcatcgtgtgatgacataaaaggaacaggacatctgtataaaaggttcctttctaaaagggagattgaaaaattaaaaa

SEQ ID NO: 645726 - DNA, 447 bp, Homo sapiens
gcaaatattttaatgaaagaaagaatgaattagaacatgaaactacattaagtaactcagtcttcataaaactctatttaggtcacacagtgtgataagttttaccttctattttgctagactccatattgatctaagaattctgggcttacatagtttatgaggccagtttaatgttctattcacaaagtctaatcactttggaaaactactgcttcctgagacaaatttactccttatctggttcacagaaaacctctacctcctttctttatatttgattccatttaaagaggaaaaaatattctagtgagtaagagtattgaaaagattagaattaatgcatgcaacgttcccgaaatattgttgatactcaataaaacctaacagtgctagtagcagtaatcacaggagcagttgctattattwttcagctatattgtattt

SEQ ID NO: 645727 - DNA, 598 bp, Homo sapiens
ttcaaaaagatgaccatgtatgcttcttcccttctttgtatgtcaggattcrcccaaaatgaggacttccctgcaggcagtggcactctggggacagaaggcccctccccacagcatcactgccatcatgatcactgatgaccagcgaacgattgtgactggaagtcaagagggtcagctctgtctctggaatctctcacatgaactaaaggttagtgaaagctactgatattgaaacagacaccactcacaaaatacggacaacttgcattttctatctgcaatgacagtggaaggtttgcatgattgttaaaaagatgtttattaaagtaataaattgattttacttctgaattttgagaaaataaagtattatatgattgatcaagatcatatttgaaaattatattatgaatattgctaatcttagctacagctaagtgttatcatcctttaagctatgctgagttttactattttatatcctgaattatatgtttaagtaactgaactacaggcatgtaagtataattttaaaaattatggctcattaatctaaacaaagggcacccttgaaagccacgattaactaaatgag

SEQ ID NO: 645728 - DNA, 598 bp, Homo sapiens
ttcaaaaagatgaccatgtatgcttcttcccttctttgtatgtcaggattcacccaaaatgaggacttccctgcaggcagtggcactctggggacagaaggcccctccccacagcatcactgccatcatgatcactgatgaccagcgaacgattgtgactggaagtcaagagggtcagctctgtctctggaatctctcacatgaactaaaggttagtgaaagctactgatattgaaacagacaccactcacaaaatacggacaacttgcattttctatctgcaatgacagtggaaggtttgcatgattgttaaaaagatgtttattaaagtaataaattgattttacttctgaattttgagaaaataaagtattatatgattgatcaagatyatatttgaaaattatattatgaatattgctaatcttagctacagctaagtgttatcatcctttaagctatgctgagttttactattttatatcctgaattatatgtttaagtaactgaactacaggcatgtaagtataattttaaaaattatggctcattaatctaaacaaagggcacccttgaaagccacgattaactaaatgag

SEQ ID NO: 645729 - DNA, 564 bp, Homo sapiens
aaataagtacgtttactcagaaaaattcaagggctgtacccttatgacttgtatgctttatgtacgatatatgtcaataaaaacaatttactttttacaaaagtctaaagagacatgaaaaccaaatacaatgcagaaccttaactggttattgcattctgaaaaaatatacacaaaagatacttggagataactggagaaaccacaccatgttatagaattatttttaatcttgttagatgggatcatattgtagcagttatgtagaataatgtccttaacttaaggatgtgcatgctggaatatataggaaaggagtgaatttatgtctgaaacttatttccaattggygggtgagggagaattaaatataaataaaaatatatattaggagagagaaagcaaagagactcatatgtaaataattgatgactctaggctgaacgacatacaagtatgcaccgtatagctttcaactttcctgtaaatttgaacggtatcaaaataaaaaattggtggtggggagatatacttactgaaatcttcaaagcaccattgtgaagg

SEQ ID NO: 645730 - DNA, 544 bp, Homo sapiens
actaagctttctactaaaccgctataagcaaagctcagaaatagaacctggaattttccatttttatcctgttctgagcagaagattacattatatctttgggaattatctgtaatagcattgtttaaaagaaaatgcagtaatgttgcaggaaaaaagggtataggatatggataaaatcataacaaaaatctctattgcaaaagatttttgttgcacctgcrgttcactttagaacatcagcaatctgttttgaactggtccataatttctagtgcaattcaaaaataattgctaatgtgctttttaacttgcaattttcagagccataaaccataaaattcactctggaaatgctgaggctctttattttaaaatgtgagaaaagaaatgccttacgtcttttctgtatgttcctactcaaagacgaacagctctctggatctgtaagaggaagttatgatttggttcataacacaaagaaacaagggagggaaaaaaagaaaaagaaaaaaaggcaaacagagatgagtacttggcggcc

SEQ ID NO: 645731 - DNA, 595 bp, Homo sapiens
aaagatttaaaggggtaaaatcaatttttttgccatttttaagaaaaaaaaaaagatgattttcctgatttgmggggtccatgattcctaacataaaatctatgagacttctgtttctagtaacaaagaaaaatatcctatgctaagattatataaaattctggaaagatgggaacccctttttccctctcctcttgactccaatccagctactaacaacatccccctaatggagcagctgtcaccttcttctcctccacctacactctcctcgtaatacgtcccagcagtcagagagagaatgaacaaacacaccaccttgtgagacacagctaccagaggaaaaaaaatgactactgaacaaaaattgaatgcgattaagattcagtatgacaaaagattttctaaaaatagacatgattttcaaattaaaaatgcagtaaatctcaggattggaagaatttgctaaaaaaaaattaattcagtaaatgaatttaacacaaggattttttaaatctcttaggtcactaactcaggtcccaaaagggcaaataagagaaaaggggcttcaagggcagatcacaaagggtaggtg

SEQ ID NO: 645732 - DNA, 584 bp, Homo sapiens
tctgttttgaatgggtcaagagccaagtgtgtttagcttttgccaccacatactttctcaaagagaaggaggtgggggragggaagaggttgatttattattgtaggggatttctccttgattttcttttccttgattttatttccagaatggagctaatggtattgaagatatgcaaaactaggtggtattgttcaagtatactgatttaacacttccattttacagcttttattttaaaaagggagactgagaaaatttattttacaaaaaaagtgaggctactgaacttcttgatttcttaagaggaccacaaggatttaataaccttagaagtataagctaccttgtagatggctgcaggatggcagaatgtctataagagtcatggatatggattcttttaagaaatcaatcatcttgggtgatcagaccgtattacaacagacaaggcaatgacctttttcctggttaacctatttatttttcctcttgtgtttattaaagagtctattttcaaggtggggaggataatataggcatattatttagacctaataaatgactggtaacatggctttttt

SEQ ID NO: 645733 - DNA, 584 bp, Homo sapiens
tctgttttgaatgggtcaagagccaagtgtgtttagcttttgccaccacatactttctcaaagagaaggaggtgggggaagggaagaggttgatttattattgtaggggatttctccttgattttcttttccttgattttatttccagaatggagctaatggtattgaagatatgcaaaactaggtggtattgttcaagtatactgatttaacacttccattttacagcttttattttaaaaagggagactgagaaaatttattttacaaaaaaagtgaggctactgaacttcttgatttcttaagaggaccacaaggayttaataaccttagaagtataagctaccttgtagatggctgcaggatggcagaatgtctataagagtcatggatatggattcttttaagaaatcaatcatcttgggtgatcagaccgtattacaacagacaaggcaatgacctttttcctggttaacctatttatttttcctcttgtgtttattaaagagtctattttcaaggtggggaggataatataggcatattatttagacctaataaatgactggtaacatggctttttt

SEQ ID NO: 645734 - DNA, 584 bp, Homo sapiens
tctgttttgaatgggtcaagagccaagtgtgtttagcttttgccaccacatactttctcaaagagaaggaggtgggggaagggaagaggttgatttattattgtaggggatttctccttgattttcttttccttgattttatttccagaatggagctaatggtattgaagatatgcaaaactaggtggtattgttcaagtatactgatttaacacttccattttacagcttttattttaaaaagggagactgagaaaatttattttacaaaaaaagtgaggctactgaacttcttgatttcttaagaggaccacaaggatttaataaccttagaagtayaagctaccttgtagatggctgcaggatggcagaatgtctataagagtcatggatatggattcttttaagaaatcaatcatcttgggtgatcagaccgtattacaacagacaaggcaatgacctttttcctggttaacctatttatttttcctcttgtgtttattaaagagtctattttcaaggtggggaggataatataggcatattatttagacctaataaatgactggtaacatggctttttt

SEQ ID NO: 645735 - DNA, 584 bp, Homo sapiens
tctgttttgaatgggtcaagagccaagtgtgtttagcttttgccaccacatactttctcaaagagaaggaggtgggggaagggaagaggttgatttattattgtaggggatttctccttgattttcttttccttgattttatttccagaatggagctaatggtattgaagatatgcaaaactaggtggtattgttcaagtatactgatttaacacttccattttacagcttttattttaaaaagggagactgagaaaatttattttacaaaaaaagtgaggctactgaacttcttgatttcttaagaggaccacaaggatttaataaccttagaagtataagctaccttgtagatggctgcaggatggcagaatgtctataagagtcatggatatggattcttttaagaaatcaatcatcttgggtgatcagaccgtattayaacagacaaggcaatgacctttttcctggttaacctatttatttttcctcttgtgtttattaaagagtctattttcaaggtggggaggataatataggcatattatttagacctaataaatgactggtaacatggctttttt

SEQ ID NO: 645736 - DNA, 506 bp, Homo sapiens
tttttaaaaaagaatccccaaaaactaatcatagttttccttggaacaaatggaaaaataaaaagtctcagcaaggaaacaagatacaaggaaaagccaaatgaaaattttagaatttaaaaatattataactgaaattaaaaactcactgggtgggttcartagcacaatggagatgacagagtaaagggtcatcaaacttgaagacagttcaatagaaattatctaatcagaacaacaaagagaaaaatagatttaaaaaaataaagagaacctcaggagatttgggacaataataaaaggtggcagaggagaggagagtgaagtgttaataaaggaatcaaaaaaaccaaataagtgaagaggcacaccacattaatggattggaagattcaaacaaaaaagatggtaatccacccccaaaatgatctatagatttaacacaattatgatcaaaatcccagtagtcatctttgtagatataaacaagctgactctaaaatata

SEQ ID NO: 645737 - DNA, 599 bp, Homo sapiens
gggggtgggcaagaggcctctgctgagttrcccaccaaaaggactgtggccctgtcagcccagggcagtgacaagtgcctccttgttctgcctcaggacacaactggacatgcccccaacccaagcatccccacacccatgttcctgtctccatacagcatttctactactctctccccacccccagtcacaccccaggcagaaagcaacaacagtttcacggcaaggacagagatggggaggcctgggggaccaggacatgaaggagagggaaaaggcaaccaagaacctgtgtgggggaggaaaggggcagcaggatgtgggtttgttcaggggccaaggctctgagccccttgttcatgttccatttacccatcagactttagttccgcaacaaaaattcaaagataaaacaaagaagttcaacatggcaccttccaagaattaaataccaaatgtggagccctcctgagtacaggctctatacaactaccctggtcacatgtccagggagcagaacttcttgctgggcaagaggaacccagcagcaacaggccgcaaggtagattgtccatgctggggactgggagtcagggagg

SEQ ID NO: 645738 - DNA, 540 bp, Homo sapiens
agactccaccttaactgggccctgatcccggggaagccagagcccatgggtccatttggaagtggtcacactaagtcctatgcctgttgtgcaggtgccctcaaatgtaaacagccttcacatgcctgggaactgactaagggagcaaaccctttctgccttctttctgcctaggtctctggtaccttattccaacctagagggtctccaatatctggggacctgcagtgaagtcatctagtagattaacagaacctgattttctagcattcctatccaagttgctctaggtgtttttatttacaacgagatcacaatagcatattttacatgcagattaataaaactttattaaatgatatgtggttagagatataatcttaagaataatcttgaaaactaacttcccccacatatacaacataggatagacatgactcctcatgatctgggtacagacattccttacagaaattccctgaccccaaaatagatamtagattgcttttccatctaccatggctttgataaaaacgttga

SEQ ID NO: 645739 - DNA, 450 bp, Homo sapiens
tgcaccaccacacccagcaagtttttatttttggtagagacagggtctcactatgttgcttaagctggtctagaactcctggactcaactgatcctccttccttggcctctcaaagtgctcggagtgcaggggtgagtcaccacacctgggccagaaagatttatatattacattttatgatatctacaaagggaaacttttgctagaagaaaatatgtctattaggcaatcattcatgtmccaaattgcaattacaagaatcaaaaaggatggggagaaataaacatatgttgaaaactttctgtgtgttgggtgctttccatatatggtcatctatttaaacttcacaaaagccccatgaggaaggcattgtcctcaattgacgggtaggagagtttaggaaactttcccaaggtcacacatcaagaaagagttagagtctgagttga

SEQ ID NO: 645740 - DNA, 457 bp, Homo sapiens
tagctgggtgtggtggcacccaccatagtcccagctacacagaggctgaggtgggagatggcttgagcccaggaggtcaaggcttcagcaagccatttcatgccattgcatgaactccagccagagaagtcagggctgcagcaagccatgattacacaactgcactccagccttggtgatcgaatgagactctgccaaaaaaaaaaagaaagaaagaaaaagagagagagatcttgttctttttgcttcttttaggagttttatggttctaggtcttggctaaatagatatatgagaaggtacttaacatcactaatcatcaaatgcaaatcaaaaccacaatgagatatcacctcacacttgttaggatggctgttatcaaaaagtcataagataacaggtatacagtcattatggaaaacattatagcagtwcctcaaaaaattaaaaagaaaac

SEQ ID NO: 645741 - DNA, 374 bp, Homo sapiens
ggctctcagtaaatatttgctaaatgaatagttgtattgaaatggcaataatcaccttatatgtgtattttatccaggaacattcaactgttcagaactagccttagaaaagtaagaagataattaggcccacacaagtttggatttgtgtgtggaagaagacacatgcataggagtaaaggatgtttttaaaaggatgattttaatagttaactatggaatttaaactagtcatgatggcaagtgaagatgaacatagtgatggataatgaaaacttatgaaagtcaagggacttgcggtcttgaggagtcaaagcattgatgtaagattgctagagttggaagctggmgagcctggtggtgttgtttatagt

SEQ ID NO: 645742 - DNA, 588 bp, Homo sapiens
gcaaaatgatatagatgcaagccttcactggagcttgactggtcctcttttattctaactggcctttataactttcttactaggcacctacaataagtacatggcttttcctccttattttatctaacagcttacatttgtggtttgtcactctcccttccttgaaaacatgctccctattttagcatctatggtctttcaccatatgacttaaaccgcatttttaagttgacagtccttagtaatttctctgtgattttcatgtccaatattgaaagtagcccatgaatttaagcacatttaaaagttaccacttctgtgatttttttctcgtgctgctcctcttgccagagttcagaatgaccaatacgtataaattgcttactatgttccaggctctccatgagcttttggcaygttttatctcaatgttcataaaaatcctatgaaatagaaatggaaattatgcttattttacaactaaaggaactgagacgcaaatcacataagtcacatgctcacagctgtacagctaataagtgaaaaagatccagaatctgaccatagagagtctaaaccagcaacaat

SEQ ID NO: 645743 - DNA, 600 bp, Homo sapiens
agacatgatgaacatttttataatatatattactttttgatgttctgatactatgataattggtatttttctatttcagtgtccaacattccattatcagtatagaaaaatataacttatctctgcataccgattttctattctgcaatcttgttcagattacttattaattacactagcagtttctagatacacgaaaatgtcattgacaaatgaagagggttttactgtttcctttataatcattttggctttttttcttatctttctgcaattaatatcayttccagtagatttttcaaaagaggtggtaagatcagatattggcattttattattgttaagggaaagagtttaggctttccatacataaagatgctatttataatttcttagtaggtaccctttatcagattaaagatgttcctttaattctcggtttgttgagatttttctatgatcaataagtgtttatcaaattggttttctgaatctattgagataattataggatttttaggctttattctgttaggctgatatactagcttgtctgtggccataccaccctgaatgcacccaatctcatctaatatacta

SEQ ID NO: 645744 - DNA, 547 bp, Homo sapiens
gattctaaatgcattggatctttaaaatttggtaaaatgctacattatccttaaagtatattttcaatgcccatttcatccaaaggagtttttcttttgtaaatcccaattcctctttatctgtatctctcaaaagaaaaacctcagatctattttgtactatttacttgtgtgcagtgttgttaatagtatacatttttattatcattatatttcccacattacctaaaaagttacttcgaatatcacactgttggcattcattttgttgaaaaaacaaatgaatgaataaatggataatcactcaaaggataataatgatgtaaaaccagtgtaatgtattagaatactaactgaaccaggagttaagatatttagctcaagcctcttttctgctgttaagtcaagtatgacctcaaatkaatttctcctttataccaactatttttgtatgattattgggtgagatattttaagactttttctatacatatgaaatttgaaacaaaataattagctgttttttgactaaattatcttatagctt

SEQ ID NO: 645745 - DNA, 566 bp, Homo sapiens
cagtgtattaaatcaagaaacttaagaaatgtcatgggaggcatgtttgtacatatacagcatatttttcatttcaaccccaaccagaggaagactttttcataaaaatcagagcagggtaatccaccttccccaattattgagccaaaagttgggtcgcaaaggtatcaggagcgaagaaatgatacctttagtagtaagactgtgtaatagttatttagcagagaacattagagggtaaaaatctctttaaaacagtggataaagattaaaaataagccctccaatttgagatacaataatttttctgaggttaagacttgatttaaagaaacaaacatttttgtaattataggtgatcatcactaatttcatcatagtaccagctatcatttgctaagaaccagctatgcatcaggcatttcmataattactttacatgtcataccattttatgtaaacctcatctagctataaattagctttagtagcattaaacatacaaagaaatgatgggtcagaaggggatgaatactgtaaaggagaatacagagaagaccaggttt

SEQ ID NO: 645746 - DNA, 620 bp, Homo sapiens
caagtaactccaaatccatggaaagacaagtatatctaaggacagatgcagatcaagcagttgcttatctgggacagacaccagtggtcagctaaatattttgagaaattcttctccataatgctatactttgatgtttgtcccttccaaaattcatgttgaaatgtggttgccattgtgttggtgttggaaggtggggccttcgggaagcaattgagccatgagagctctacccttataggtggattaatgccattataaaaagtccagtttgttcctctcatgactttttgcctgttcacctttcaccatattagggatgcagcaagaaggctctgaccagaagctaatgccctgatcttggacttaccaacctctagaacggtttgaaaataaatttctgtttgtttttaaaatataaattacctaatctgtggtattctttgtacacaaaatgaacttttaacacaaaatgtactaagataggtggggtatgtactaacgacagaatatagatcctctgggaaggagaaygcatatacaaagtgaatgcatacctacttacaggctattctttagagacttctccaagtgctcaagaaaagtattggccaccgtag

SEQ ID NO: 645747 - DNA, 633 bp, Homo sapiens
aatagttcaaaaagaaagaataaaaaggatggaagaaaataatatagagcatagtcccaaaagtatgaaaaaatgaaaatgcaaaaataaaacagcttcaaacaaatttctaaaagcctataaaaagtaaagaaaattcttaaaattcctgagaaagagagaagaatgagcaacatattgaycgtagaattgacacaggtattctgatcaccaagaacaaactaaacccaaaactggcagaaggaaggtagtaataaagattagtacacagacaaataaaatagacattaacaaataatagacaaaattaaaagttcttcaaaatatcaacaacattgacaattaggcatattgccatagacaaaaaagagacaagacccaaactgttaaaatcagaaaaaaaaatggagacattagtaccattttataaaactaagaaggatcatgagagtgtactatgaacagttgtatgccaacagattggatagttttcttagtttctttgtgcttctataacaaaatactaaatattgggttatttataaatcatggaaatttatttctcatagttgtggaggctgggaagtccaagatcaaagtactggcaggttcagtgtctggtgagggccgagt

SEQ ID NO: 645748 - DNA, 536 bp, Homo sapiens
aattcatttggagggtttgagataatggtagaagaaacataaagttggattaggccaaatttattgatgtaaagtccataagcaagtattctgcatttaatcttgcacattggagaattaggaaggactctgagtttgtttcgttgattgtctaaaacataaatcaaaagctggcccacagtaagtgaattagatatgtcagaccttctctgattttatgtaaaggaaggattcaaagtttagggaaattggtgtgttacagtggatttgtcacttaagccctactaacccacactgcatgggttgagaagacatatcttctatcactactctaagaaataaatttatgagggaagccacagcatccttgaagagcatatgattactcttcccttgaactccagtcattgaattgggaaacttaaatgcaaacrgagtaaataattacctggtggtggggaccaagtggcagcacttgactaacaaagccaaggtgggcataggtaccatcataacagagagcagtcaaattgtct

SEQ ID NO: 645749 - DNA, 536 bp, Homo sapiens
aattcatttggagggtttgagataatggtagaagaaacataaagttggattaggccaaatttattgatgtaaagtccataagcaagtattctgcatttaatcttgcacattggagaattaggaaggactctgagtttgtttcgttgattgtctaaaacataaatcaaaagctggcccacagtaagtgaattagatatgtcagaccttctctgattttatgtaaaggaaggattcaaagtttagggaaattggtgtgttacagtggatttgtcacttaagccctactaacccacactgcatgggttgagaagacatatcttctatcactactctaagaaataaatttatgagggaagccacagcatccttgaagagcatatgattactcttcccttgaactccagtcattgaattgggaaacttaaatgcaaacggagtaaataattaccyggtggtggggaccaagtggcagcacttgactaacaaagccaaggtgggcataggtaccatcataacagagagcagtcaaattgtct

SEQ ID NO: 645750 - DNA, 597 bp, Homo sapiens
aagttgtagttatatatatgccttcaaaaatattctgactaatcacagtgaaagaagttcttattatccatataattctgtattcaaactataaaaaatactcatccactttwaattgtttttaagtctgagagccagtttgtggagttgaatataataaagtatttctgtcataattttctaatgatttttaatgtcaacaaacacatattctttttttgtgctgtttaaaatagtatcaggaaaatatttctagctttgtcttatggcaaaatgccatcacataggtccattcctaagcagccatatggcaatggcactgccatctgcttatcttgatatttctttcctggcaaaccttgaacccatatgggttctttgtggtctcatccgtgaacatcaggaagagaggtaaaatcaatatctacacttttccctggaaacagctttttataattactctgcacatgaagatcattttattttctatttaccttcttcttcctctagttttcacacacctgccttcttctaatagaagcaggaacaatttgatttcaggaatatgtgaaagctgtcagggcaagctgtcaggtt

SEQ ID NO: 645751 - DNA, 561 bp, Homo sapiens
gcatggagaccatgggcatttgagccacttcctcatgtaacttacttgtgccttcaggacctgctcgagcctgatcatgtatacaccacttccatttgatgatagaatgctgctgtgcatgacccactttatggctagattggttatgataggcagctcaggttccatggtgacttgatgacccatagtcaaatgttcagtttccaccaaagcctggtaacaggccaagagctgtctctcaaaaggagagtagttgcctgcagaagatggcagagccttgcttaaaactcctagaggtctctgctgtgattcacctataggggcctgccaaaggctccaaacartatccctatctgccactgacacctcaagcaccattgaatctgctgagtcatatggcccaagtggcagagcaacttgcatagcagcctggacctgttgcagagccttctcctgttctggaccctactcaaaactggaagcctttcaggtcgcttgataaacgggctggagtaacacacccacatgaggcatgtgttacttccaaaatccaaataggcc

SEQ ID NO: 645752 - DNA, 561 bp, Homo sapiens
gcatggagaccatgggcatttgagccacttcctcatgtaacttacttgtgccttcaggacctgctcgagcctgatcatgtatacaccacttccatttgatgatagaatgctgctgtgcatgacccactttatggctagattggttatgataggcagctcaggttccatggtgacttgatgacccatagtcaaatgttcagtttccaccaaagcctggtaacaggccaagagctgtctctcaaaaggagagtagttgcctgcagaagatggcagagccttgcttaaaactcctagaggtctctgctgtgattcacctataggggcctgccaaaggctccaaacagtatccctatctgccactgacacctcaagcaccattgaatctgctgagtcatatggcccaagtggcagagcaacttgcatagcagcctggacctgttgcagagccttctcctgttctggaccctactcaaaactggaagcctttcaggtcgcttgataaacgggctggagtaacacacccamatgaggcatgtgttacttccaaaatccaaataggcc

SEQ ID NO: 645753 - DNA, 549 bp, Homo sapiens
gtgtgttgcagccatatccctttccataacacagaccagggacctgtgtttctctatatgttatgttggagtactaggctctcacatgcatgacagagagagcaccctgtgcatatgtgaagctgatttactagatgatcatttatttcatgttggtgggagcagagattgtaatctagtttatgtgaccatttggtgttctcagtcaggtggatgatagaatttatactttgttggataagagatcgcaaataatcaagtttttagtctatgttattttagcctgtgatatttgccaygcattagaaaggggaactgcttcttgagatttgaacctgtgatttttctgtgtttctgtctacttgactttggtttaactctctaagatctctataggtctgtgatctataaatagaatggattttatgtcttattttatgagtgtaaaatttttttactttcagaaggtatgaatgaactatattacagtttcacttaagaaaactcgattctaattggtttatagagttatacaagaatatacatatc

SEQ ID NO: 645754 - DNA, 551 bp, Homo sapiens
aaacatagtacaattgtgtagggcacttaccataaatagagcttgaaggactggaagttgttctgggtgtcaatgagtggtgaatgaatgtgggcctaggatattattgtacactactgtgaattttataaacactgtacacttaggctacactaaatttattttaaatcatttttgtcctacagtaataattaactgtagcttactataactatttgctttataaatgttttaattytttaactttttactcttgtgtaataacacttagcttaaaacatattgtacagctgaacaaaagtattttctttctttatatccttattcttaaagtttttctgtttcaaattgttaaattatttttttctttttcaacttttttaaaaaaaattaagacacacacacacacacacacacacacacacaaacacacacacacagattagtctagtcctacacaggttaggattatcaatatcactgtcttccagctccacatcttgtcccactggaaggtcttcaggggcagtaacaagcaaggagctgtcatc

SEQ ID NO: 645755 - DNA, 544 bp, Homo sapiens
gaccagtaaccctccatggcctgttaggaacctagccacatagcaggaagtaaccagccagcattaccgtctgagctccgcctccagtaagaccagtggtggcattagattcttaaaggaatgcaaaactcattgtgaactgcgcatgctagggatctagattgtgtgctccttatgataatctaacaaattcctgatgatctgagktggaacatttatcccgaaaccatttccctcctccctttccttctgcctgtggaaaactgtcttccacaaaacccatccctgatgccaaaaagttggggactgctgaattataagacactggtcttaatatccacattctgagcattctgagtatgtaagtttgaaaactccaaaaggtaaaagtaacttactttgttcaataatttaagaaaaaaaaaaaaaaacagaacaggctgattttcaatgacccaaatggatctccaagtagaagtgttctatttcaaaattcacagaaggatggaattctatttttggactgtaatgtgaaatgctgtgt

SEQ ID NO: 645756 - DNA, 624 bp, Homo sapiens
tcctcaagaacagctctcttcaaatagtatgctttgagaaacacataaatatttatcaaggggaacttggacattttttctagatcctcaaattctattggcattctttcttcatactctaccacctactgtcttacaaaaaaaaactttaaaaaatgaagggacatttaaaatcttttccttaacattacaattgcctctagtttaaaacctttagagcacccattaaaagggtacttgaaaacacggagaggggaattcgctaattggtaactcacaatcattaaacttgggctgggtaaaactgcttgaatttcttstttcatacatactttgccaagtgtaaagaatcgcttaaaatataatatattttgacttttggtgggaaattctaaaatcagatgtaatgtagtttgagcacgtggagtaccctgcttttgttgttgttgttacaatctcagttctctcatcaggcgccattgtcagaaaagcattgcttttgagaaagtatctgagagcaggatggaagcagagcaaataagcaacaaggagagctaaaaatggctttttcacaaatctaaacaaaagtttgtctttccagttacttttttttttttactattc

SEQ ID NO: 645757 - DNA, 624 bp, Homo sapiens
tcctcaagaacagctctcttcaaatagtatgctttgagaaacacataaatatttatcaaggggaacttggacattttttctagatcctcaaattctattggcattctttcttcatactctaccacctactgtcttacaaaaaaaaactttaaaaaatgaagggacatttaaaatcttttccttaacattacaattgcctctagtttaaaacctttagagcacccattaaaagggtacttgaaaacacggagaggggaattcgctaattggtaactcacaatcattaaacttgggctgggtaaaactgcttgaatttcttgtttcatacatactttgccaagtgtaaagaatcgcttaaaatataatatattttgacttttggtgggaaattctaaaatcagrtgtaatgtagtttgagcacgtggagtaccctgcttttgttgttgttgttacaatctcagttctctcatcaggcgccattgtcagaaaagcattgcttttgagaaagtatctgagagcaggatggaagcagagcaaataagcaacaaggagagctaaaaatggctttttcacaaatctaaacaaaagtttgtctttccagttacttttttttttttactattc

SEQ ID NO: 645758 - DNA, 624 bp, Homo sapiens
tcctcaagaacagctctcttcaaatagtatgctttgagaaacacataaatatttatcaaggggaacttggacattttttctagatcctcaaattctattggcattctttcttcatactctaccacctactgtcttacaaaaaaaaactttaaaaaatgaagggacatttaaaatcttttccttaacattacaattgcctctagtttaaaacctttagagcacccattaaaagggtacttgaaaacacggagaggggaattcgctaattggtaactcacaatcattaaacttgggctgggtaaaactgcttgaatttcttgtttcatacatactttgccaagtgtaaagaatcgcttaaaatataatatattttgacttttggtgggaaattctaaaatcagatgtaatrtagtttgagcacgtggagtaccctgcttttgttgttgttgttacaatctcagttctctcatcaggcgccattgtcagaaaagcattgcttttgagaaagtatctgagagcaggatggaagcagagcaaataagcaacaaggagagctaaaaatggctttttcacaaatctaaacaaaagtttgtctttccagttacttttttttttttactattc

SEQ ID NO: 645759 - DNA, 568 bp, Homo sapiens
tgcagtagcctgcagtggctgtctgatagacataaaccttactatttattattagacttcagagcattaatattagattttaatttgcttatgttaggcatgagaaggtagcattatccttgctgccctaaatattgttccttgtcactttttcccattgaatttaaaggtaatttggggaatgtgtctaacgtaaccttatatccatgtgtttgccataggtttctggagctcccattctgaacatgctccccagttgattcttcatgggcataaatttaaatttatggaggattgtttcgtacctctcaaggaatgtggattcagtaccaagmgcttgtagagtttatcaaaaagaagataaagaggaataagagttcctgctttatgggaacatattatcttctttgggtaatgcctatcagtactccctgaaaagctggagtgttaaatgtttgtaaccagttcacaatgagagaagtagcttccactagaaattaaatcaatacattacttctttcattgagtaactattgctacaaaaaatatgtctgctgaataaattagc

SEQ ID NO: 645760 - DNA, 493 bp, Homo sapiens
ttatctttgatacttcttcccaggatcaagcaggctctttgaaatacctaaagaagaaaataaggccgggcaagacatatgaagggacgttattctatgctcaacctgtttcttagctgtaagagcccgtcttagagacttcttagagataaaactgacagtttctgctgggaaagtaattgtaacatggaagaagtgtgaatgctgacctaagcgatcttcaactcagttcgtagtgcaataggcaagtatagtccaaaatggagcacacagtcaatttcttccttcagtagttctaggcagtgaggcatacattcatttctttatataaattttaaattgttcaagtatgaattcttctgagggttaggwaaatagacttataattcaatttttttactctttgattacacctaagattattttttcactctttcctccaattatttccccagtgattattatttttgttcatcagttgattacttggtca

SEQ ID NO: 645761 - DNA, 588 bp, Homo sapiens
tccaaattacagtggacccagctggtccatggacctgctttgcagttattccccaggttctgaatgtataattgaaatagacacacttagcaactggaagaattcctatgggatgagggccgctggaacttcccttttctaccaaggtagtaaatctggggaatttcagagactaatacctccgtaacagtcttgaaagaagcaaagatggtacctatcacacactcatttaactcaccaatttaacctatgcagacattcatggattatagagaatgactgtggattatcgcagtcttaggtagtggcagctgcagctactgacctacatgtagtatctttgctagagcaagcaaacatggctatgggcacatgacatgtaactaatgccttttgcgtcatactaatttgcaaagacccccagaagtagtttgtttgtaccttacaggggaaatagtcttccttcagggctatatcaattctcctgctctctgccatgtataatctgcagagaccttgattgtctttaygctacattgacaacattatgctgatgggctctaatgagcaggatggaccaagtactta

SEQ ID NO: 645762 - DNA, 588 bp, Homo sapiens
tccaaattacagtggacccagctggtccatggacctgctttgcagttattccccaggttctgaatgtataattgaaatagacacacttagcaactggaagaattcctatgggatgagggccgctggaacttcccttttctaccaaggtagtaaatctggggaatttcagagactaatacctccgtaacagtcttgaaagaagcaaagatggtacctatcacacactcatttaactcaccaatttaacctatgcagacattcatggattatagagaatgactgtggattatcgcagtcttaggtagtggcagctgcagctactgacctacatgtagtatctttgctagagcaagcaaacatggctatgggcacatgacatgtaactaatgccttttgcgtcatactaatttgcaaagacccccagaagtagtttgtttgtaccttacaggggaaatagtcttccttcagggctatatcaattctcctgctctctgccatgtataatctgcagagaccttgattgtctttatgctacattgacaacattaygctgatgggctctaatgagcaggatggaccaagtactta

SEQ ID NO: 645763 - DNA, 590 bp, Homo sapiens
tcactgtgagttccagcatctccaagcttagcccagcctcagcccctacagaggcagagaaatcaagataaggaagaagttatgggaattgcccttgattatgcaaatgtccccagtcacactaggatgcattctttttttaaaaatttaattttaggttcgggggtacatgtgcatgtttgttacatgggtatattgcatactggtgggcattaggtttctagtgtacccatcacccaaatagtgagcattgtacccaattggtacctttttaaccctttccatcttcccaccctcccccttttggagtcmccagtgtccattatttccatctttatgttgatgtgtacccgtattcgtccattctcatactgttataaagaactacctgagactgggtaatttatgaagaaaagaggtttaattgaactcacagttctgcaggctgtacaggaggcatgactggggaggcctcaggaaacttaacaatcctggcagaagggccaaatcaagtgcttggaagccagcacttcttcacgtggcagcaggagagagagagagagaagggggaagtgctacacaattttaaa

SEQ ID NO: 645764 - DNA, 581 bp, Homo sapiens
tccgttcctcaacagctatgtgtgcctaaagatcatgttaattgacttttctaaaacttgggttcctcatatataaaaactggtataaaacagtacctagtacatagagttattattgacgattaaatgagattatatatgcaaagcaccaaaatgccyagcatgaagtactatataagtgttcacagcatttactactatcctaatgtccattaattattagggcttgaaaagaacaaaatccagaaatcagtattacagaaagcataatatctatgtctgtactttaagctttttaattagtcaatactaggcttagaaactttttgtttgctgaacaccttttagacttaaagagctgtgtgttcgaatactctgtataccatctttgtccttaagtatgctagctagaaaggaaaattactagttactactaaggataatgactttccttagcaacaacacacaaaatactcagtttgctaatttagtttataaacacaaaatacacacacaaagttttgtttttgttgtttttatgaagagtagcaagatacatacatagtctcaaagtatctccc

SEQ ID NO: 645765 - DNA, 606 bp, Homo sapiens
tttttagaaagaactgttatgcctattgattcttaaaataatgatgtataacttattattataagtcaagtcacggaaaaaatacctaaaaatagcaagatatgagttggatgaatacaaaagtcatgtacttaggacctcggtaataatatgtttaaacaaataagatatttgttgacatacagcatttatctgcgtgggtatggatatgcccaaaaagctcatgtgacccatgtttcgctattattctccactttacatgtaccaatccattctaggagtaatactttctaggcaccgtacttgaagaaaatcatgtaccagaatggstcctgaacagtgaggtgacttaaaagatgccaaaggtgtaatagctgaaagactggagtatgttcaacttggtatctgaaatgctgaatttaaaaagcatatatttgttaaagggataatactattcagaagggaaagtaggggccagaaggtgaaagtttcaaggggaaatattttggttcaatattaggaagagcgttctaaccactagaactgttgtaagtgcaattaactatctgagtaggtagtaagtttctcattcatggaggtaaaagt

SEQ ID NO: 645766 - DNA, 600 bp, Homo sapiens
tcatttagtttaaaggacgccaggactgtgttttctaagctgcttccttaagcacccctcacacaaggagctgaaggtgatttacataacataggattcaccggtccgcgattatcactgtgggtgaactgggcgccctggaatgaataatactctagtgcaagtactgcttgttgctgcaacacagtgattttctattacactgaacacgtgaaatgaattgccttctgtagctgaatcctttcagtgatcgtagacgcccctcattgttgaagcgagaattaagctattcggagaagcgtgttttccatccccgaaatttttttatggaaatgacctatagagagggattgcaaataacagtacatttttgtgcagttcagccgattttaatctaggcttgggggatatatttattttatgggagtaatatatttaactatttttcagtgaattttaaaaaaatatcatttgacctattaaactagttatgtcaaatgattatgtagtacatagagatggcttaatatacatttrtgtattaatgtgaaaagtttttttaaaaaactccagttataccagtcttgcaatattttttgt

SEQ ID NO: 645767 - DNA, 534 bp, Homo sapiens
ttgaggtcaggagttcgagaccagagtgacccacatggtgaaaccccatctctacttaaaaaaagacaaaaaacaaaaacaaaaacaaaaaaaacttaaccgggcatggtggcacaggcctgttaatcctagctactcaggaggctgaggcaggagaatgcaggttggagtaagccaagatagcgccactgcactccagcctgggcaacacagcaagactccatctcaatcaatcaatcagtcaatacatgctatgatagagatatcatcaaattattgagaagtcattcaaataagactaggaatgtcagtgtgagaagagctgtccttacagagaacatgacatttgacccatgtctygacaggtaaaaaaggagacaagtagattgcaagctttggaaacaggataaagaaaggatgttaagtgtgaaatatttggaggaacagcaaaaatggctggagtatagcatgtaaaaaggagttgagagactctctccttgaccaaactttagccagactcctataataggagtc

SEQ ID NO: 645768 - DNA, 565 bp, Homo sapiens
tatggaaatttatttattataaggggaaaaaaacacctcttaagtctaaacatggtatacaactactccctctactttcaaaacctttccatagatgctaataatagaataagtggatcttttactgagaaagacatttcaacaagattgaaaacaaagagaaaatatataaaacatgtaagaatgtaaagtggttggaragattgagaagatgactatcctagaaatcctagcatgagaaagccctctgattttagcagaaaacattattttgaatgtttgacagcaaaagcagagagggaaagtgatggacaacatgacttcatagtagttggtcaggagaggcaaagttttaaagctctaagctccatcagaaatttgcagtgtggatgaacctctgtataatgaatgttgaggtacaacatggataatgttaatagcagtgtattagtctgttcttgcacccctatacagaaatacctgagatagattactgggtaatctataaagaaaagaggtttaattggctcacagttctgcaggctgtacaggaagcacagcatca

SEQ ID NO: 645769 - DNA, 621 bp, Homo sapiens
tgtattcatatactccgacccaggggaagatatgtggcattctgcttaacataatcagttccttgctttccacaccaatttgtgcttgatttgtttcttttcttctagaacttttcagagtgagaacctttagcagaaaaaaaaagcttaacaagatagacattttagttcaatagmagaatttttctggtgtgaaaaagtaaattacaaaaaggactttggttctgaaagataattaataaaaaccttcccatgtgatgacaaatctgacatcttgtctaatgtctggcagagaagaaagtgttgagagctgcacagttggaataaaatgttccactttacagcaaggccgggtaggatctgataattatttctaggcaacaaaagttcatagtctaattgttcaattgacacaacaccaggcctggctctgtgactatgcaccatcagtgaggtcttcgtttaggctttcctgatttcacaggtaaatattgccaggaatgtgggtggatcatggaatgactccctcgtggatattttggactacagctgtacttatagaactttcctttccctcttgtaagcttctcatgggctgtggtaggctgagtaatggtcccg

SEQ ID NO: 645770 - DNA, 584 bp, Homo sapiens
tttctcccgtctagccctcaggactggcttcgatcctttgtgtacagtagatatcggtacccattggtcaactcatggttcctttgccatggaacatttttttccttgacaaatccagatttgttctcattctgtccctctctctctatcccacctctctctctctctctctctcacacacacacacacacacacaaagatattttaactgtgaatagaacagtaaaagagaaaagttgtgcttacgtagtctctaggtttgatataagcgttattatccaaaggacgattcttagtgttataattgagaaagtatgagctgaagtctgtaactaaaacatraactcaaggtttggcatctactagtaactgattggacaccaaaaattaaaggacttaccagaaccagtcttataaggcaggtattgttctctataagaaatctgcaggacaggggatgtgacagcctttgagatgtaagtctcaaattctgggagcctttgacatggcgtctgatgcatcttgatatcctagaaacaaagcctttaaaagggcagaggtgagctgatcatcaagcacatgtg

SEQ ID NO: 645771 - DNA, 549 bp, Homo sapiens
tgggtgcagggggtcactctcacagaagatatctgtgactgcaaataattcctggattttgccattttttattgtgtttctcacccctaccttccttcagttacctacatttttttctttatccaactgataccagcccaatcctttttttttttttaatatttcaccttgtttacaaaactcagaacaacaggatgagaataaaatagttttttactcactgtttcttaatttctaaaattagtctcgatggaattgtcacttgttctatgaacttggcactggaagtgtcgttgatgaacatggctgagaaggtggaatgggacttcctrcaatgctcttcttccaggggtacaaagacaaaataagtgtttccactggagattgtgaaggactccatgtcctcatagtatatctcctctagaccctcttccttgtcttcttcctaagcaggcaataacactaaagttgacttgatatcatcaaatggacttgggaatgccaaccacaggttccttgatatcagaggttgtaaaccaaattttgggc

SEQ ID NO: 645772 - DNA, 573 bp, Homo sapiens
cgtatgtatacatgtaccatgttggtgtgctgcacccattaactcgtcatttaagattagtttgtggctctaattttcttgactattgttttaagctattattaccttcttacttatcagggtgctcatctacttcttgaggctagccaggtggctggaattttccttggagggactcaagagtttcctttatttttcgtgccttaaatgggtctgttctccctcttcaaagctcaagctcttaaggactatgctattgttagatttttcgtattggagcagaccttccctcctactcaagaacaccccttcttcagacagcctggctgggtcttcatcctgggagagctcatgaaacacaaaccagatcttggccctcacgtgtgtctaggcagagcggagcctgggcaacaccaagcgttcccccgattttgcatgccccagccaattcggagtcaagatccatgctcagctccttccctgcaaagtgctaatgatgaagsatggggatcaagtcagcaaactccagaaatggtcttagactaggagtcaagccttgagatcctattacac

SEQ ID NO: 645773 - DNA, 466 bp, Homo sapiens
acccagcgtggttttaactaatggatcaaaagatgctcatcaaaggctctgagctttcctgagtgccaacaggaaacatccagcatcactggtctctccaaggctgcaggtgtctttgcccatagtgcctgttttgtgtcagggaaagaatcaacctgggagccaagcccaggaatcaggatgaccaagacatactgcacaaggagggaacaaagccatccgaggacactcaaggacaaatcaagcaaatgaatttaagggagacgtgctcatggtctgctttgctgctcagcatggctgggaggcacagtggaagatcatgcatcctgcccctgggactcctctgccagagcctgagagctttctcctgcccacaggctaggggtaggrcagttggaattgatccatgccttctagctagactgtgggtcccctcagtcttgggcatggtgacagcccagcatca

SEQ ID NO: 645774 - DNA, 542 bp, Homo sapiens
ggattgcaatttcataccatccttgaagttagagagagccacgtgactcatttagccaatgaatggtgagcagaatgacatgtcacttccagcwgaagctttaagaatctgagagacattcatacgttttccatgtgctgtagccttatacccaaagcctgggtcccaagtgaccatgacaggcagagctcccagttgagccacagagatttagagaatggctgttaacacagcataatccagcccatcctgactaatctgatattaacatgtataataaagaattctatcaatgctgagggaagatgattagttaaggtcctaggttgcaagtctcaaaacctcttccaaggattgtagacaggaaattaaatgacttctagtccctagagttcccaatctcctaccatcccatcctaatatgacagaagtaattcctgagttgcttctgaaaccagagcttccctcagaacccttagcctgccagatggcttcttggagagccctcactcacttttctccttctgctattgctgctcatt

SEQ ID NO: 645775 - DNA, 542 bp, Homo sapiens
ggattgcaatttcataccatccttgaagttagagagagccacgtgactcatttagccaatgaatggtgagcagaatgacatgtcacttccagcagaagctttaasaatctgagagacattcatacgttttccatgtgctgtagccttatacccaaagcctgggtcccaagtgaccatgacaggcagagctcccagttgagccacagagatttagagaatggctgttaacacagcataatccagcccatcctgactaatctgatattaacatgtataataaagaattctatcaatgctgagggaagatgattagttaaggtcctaggttgcaagtctcaaaacctcttccaaggattgtagacaggaaattaaatgacttctagtccctagagttcccaatctcctaccatcccatcctaatatgacagaagtaattcctgagttgcttctgaaaccagagcttccctcagaacccttagcctgccagatggcttcttggagagccctcactcacttttctccttctgctattgctgctcatt

SEQ ID NO: 645776 - DNA, 589 bp, Homo sapiens
tgacgccacagttgttcttatctcaattgtcttaaaattcatttaatttttttttcctttggtttcattattcaaattttaacttcagttctcaagattttatctgatggaagagatggagtccattactaaggactccattgtgctccatcatgccagagttgtaaaatagatcttttaaaggaaatttattatgatttttttctatttaagagcttcctctccagttgagcatgtaagaaaattacaccaggagaatacagtaaactctatgaggcaagctataaacatgtagcattgtgattagggctggttctccttctagagacatggtaggattgcaatttcataccatccttgaagttagagagagccacgtgactcatttagccaatgaatggtgagcagaatgacatgtcacttccagcagaagctttaagaatctgagagacattcatacrttttccatgtgctgtagccttatacccaaagcctgggtcccaagtgaccatgacaggcagagctcccagttgagccacagagatttagagaatggctgttaacacagcataatccagcccatcctgac

SEQ ID NO: 645777 - DNA, 400 bp, Homo sapiens
taggattgcaatttcataccatccttgaagttagagagagccacgtgactcatttagccaatgaatggtgagcagaatgacatgtcacttccagcagaagctttaagaatctgagagacattcatacgttttccatgtgctgtrgccttatacccaaagcctgggtcccaagtgaccatgacaggcagagctcccagttgagccacagagatttagagaatggctgttaacacagcataatccagcccatcctgactaatctgatattaacatgtataataaagaattctatcaatgctgagggaagatgattagttaaggtcctaggttgcaagtctcaaaacctcttccaaggattgtagacaggaaattaaatgacttctagtccctagagttccca

SEQ ID NO: 645778 - DNA, 532 bp, Homo sapiens
gagccacgtgactcatttagccaatgaatggtgagcagaatgacatgtcacttccagcagaagctttaagaatctgagagacattcatacgttttccatgtgctgtagccttatacccaaagcctgggtcccaagtgaccatgacaggcagagctcccagttgagccacagagatttagagaatggctgttaacacarcataatccagcccatcctgactaatctgatattaacatgtataataaagaattctatcaatgctgagggaagatgattagttaaggtcctaggttgcaagtctcaaaacctcttccaaggattgtagacaggaaattaaatgacttctagtccctagagttcccaatctcctaccatcccatcctaatatgacagaagtaattcctgagttgcttctgaaaccagagcttccctcagaacccttagcctgccagatggcttcttggagagccctcactcacttttctccttctgctattgctgctcattcattccagcttttaaaaattcatct

SEQ ID NO: 645779 - DNA, 530 bp, Homo sapiens
agccacgtgactcatttagccaatgaatggtgagcagaatgacatgtcacttccagcagaagctttaagaatctgagagacattcatacgttttccatgtgctgtagccttatacccaaagcctgggtcccaagtgaccatgacaggcagagctcccagttgagccacagagatttagagaatggctgttaacacagcataatcyagcccatcctgactaatctgatattaacatgtataataaagaattctatcaatgctgagggaagatgattagttaaggtcctaggttgcaagtctcaaaacctcttccaaggattgtagacaggaaattaaatgacttctagtccctagagttcccaatctcctaccatcccatcctaatatgacagaagtaattcctgagttgcttctgaaaccagagcttccctcagaacccttagcctgccagatggcttcttggagagccctcactcacttttctccttctgctattgctgctcattcattccagcttttaaaaattcatc

SEQ ID NO: 645780 - DNA, 568 bp, Homo sapiens
aagttttttggagtatctactctgggccaggcccgcaggatactaacatgaaatagagacagttcctgcctttgaagggtggtgatttactggtggggagaaaggaagaagcccatgaaaagtcgtgtctgtagaaggtaagaaggggcacaaccgccatggcaggggagtcacaaaggagaagcattcagcctgccgagaggtcccaggactttcctggaggatcagtccccaaactgactgtgacagggagcaatacccagataacagcagaggcccagaataagaaagagtctgtgagtgggcagaattccctccagggtcatgaggggagctgacttctgattagggcatttcatccttctctgaaatgcagctgagaactggtcaagcctcactcccttgctgagaccaatagcaayccctgatgatctcgccacaggtccagcaggtgccccatccacactttgtccccagcccctacctggaagctccaaacacctacctgaggggccaactctgattcccaaggaggtgacacctcctgccccttgttgatagaacattg

SEQ ID NO: 645781 - DNA, 566 bp, Homo sapiens
cttctcccttctttttcacttaaaatgctgtgtcccacctcacttttcagtgtctcttcacactgacwagacggttggctaatacttcagagcttgcagagcatctttatacacttttaatcctcctaacatccgtgagagatggagcttactattatcatccgtgtttgcaaatgaggccctgagaagttgagtgatttctgtaaggtctcagagccaatagacactggtaatgaaataaaatgcaacgccccttatctttggagcccagtgttccttccacataggtggttctccacccaggctgcccaggagaatgtggaatctccagcagttctgacttaactggcctggtgtggatgtctgtgatgggtgaacattcccagacccttttaagaacctgatagaagtggtggacccacttcccagaaaaagggacgcacaacaaaataattgtcctgagtgggtctgacagaatcaagtgaaccctttaaatctggatctagaggtcagagactgagaatgtcagagatgcaaaagagattcagtgcaagagaaatcctcct

SEQ ID NO: 645782 - DNA, 566 bp, Homo sapiens
cttctcccttctttttcacttaaaatgctgtgtcccacctcacttttcagtgtctcttcacactgacaagacggttggctaatacttcagagcttgcagagcatctttatacacttttaatcctcctaacawccgtgagagatggagcttactattatcatccgtgtttgcaaatgaggccctgagaagttgagtgatttctgtaaggtctcagagccaatagacactggtaatgaaataaaatgcaacgccccttatctttggagcccagtgttccttccacataggtggttctccacccaggctgcccaggagaatgtggaatctccagcagttctgacttaactggcctggtgtggatgtctgtgatgggtgaacattcccagacccttttaagaacctgatagaagtggtggacccacttcccagaaaaagggacgcacaacaaaataattgtcctgagtgggtctgacagaatcaagtgaaccctttaaatctggatctagaggtcagagactgagaatgtcagagatgcaaaagagattcagtgcaagagaaatcctcct

SEQ ID NO: 645783 - DNA, 568 bp, Homo sapiens
tctctgtgcgtcaatttcttaccctgtaaagcatggatagtaatgcccttctattccttgacatttccaggaggctggtaggctaatgtaaaacaccctagcctttggcgctcttgccaatacacttttgttgttgttgttcttgttaaagatttaacataattgaaacctgggctcaaaaaatatttttcctgcctgaggtattaactcaaaatagcataattattcattccaataatttgtacaaataatactaagaaactacgttccagaagacaacaaccagctctttggaactctcctggagtcttcctttcctgacactctgagaactggattcagttcaacatttcttaaaagcatttttatgccaacccttacaaggaatacttaaggggaaaaagaagatctgccttcaaggaccttgtgrtaggcagaataatggcccccaaagacattcacatttgaatctccagaacctattaatatgttgcattacatggataaagaaacctgcagatgtgattaaattaagggccttgagttggggggatttttttggattaac

SEQ ID NO: 645784 - DNA, 468 bp, Homo sapiens
attctcttgacttccttagtccctgtcaagaatcacacagaycagtcctcctaaatcactactttggttccaacaccccctttctcaactactcaactttgaggatgttggcttatcagaacccaagtggctaccaacagctgatgcagtggctgtcaatcaagaatgcatgcacatcagaattaccgaaggagtttttcagtctttcagaaatgtcaaatctgaatgtccagtggtggggccaggcatttgaatattttttaaataagccatatgtctttaactcacctctgcttagaagctccaagatcttatagttgcggagtagagtatggtggtcaggagcccagatcatatagttaccctgccttggtccaaagattggctctgccatgggaaaactgagattttgggcaagtcttttaacctttctgtgctcagttccctcctctataagtgtggatagga

SEQ ID NO: 645785 - DNA, 592 bp, Homo sapiens
tatgcattagaaagaaccttagagcgctatgtatttccaataagacctctgctgaaaattccataaatctaagagcaattagtgcacaagaaccctctgccactcactctatttctccagtagttcattgtcttactattatagtctgattgaaaccacaaggatcaattttgttgtgccsttttttgggacagtctccatggatctcttgcatttcggcatgtcttgtgagtagaggcactgaaaatatttgttgtagactatctttctgatgcttctacagcaaacggccttggaagacagataccatattaccttctgaatcagagggcagactcatttattatctagtaaaatgtcttttccaagtcaaattcgatgcaggttaacttgttgccaaatataaatgatttgatttccttaatattggtgtttcttatttatgatgcaaacactgcatgcacagtttctacttggatcaagagaaaccaatgtgaatatgaagtgcatgctgcttgctgtactttgagttaaaaagttctttatttctgatgcaggaatctaatgtcttctgccagcattcagaaaacag

SEQ ID NO: 645786 - DNA, 530 bp, Homo sapiens
ctgaattcactgtctagtggagttctaacatgggttagccgtgtgactactgctatggtttggatatggtttgtttgtccccaccaaatcacatgttgaaatttaatccccagtgtggtggtctttgaaggtggggcctggggagaggtgtttcaatcatcaccggggtagatctcccataaatagatgctccccctgggaggaaaggagctcttgctctatttgttccagagaaagccagttgttaaaaaaacccctcactttccccctcctcttgcttcctttctcattatgtgatctctgcacgcactggctccccttttccttctgctgtgagtgggagcatcctgaggccctcaccagatacacaatcttgaaccttccagccaccataactctgaaccaaatgaactgtttttcttcataaattacccagcctcaggtattcctttayagtaacacaaaacagactatgacaactgcaagttaaaggtatttctgctaaaaggtgatgcacaggttcccagaaa

SEQ ID NO: 645787 - DNA, 632 bp, Homo sapiens
tgcaggttttattctatgtttttaccaatagattcaaaattgcagtgaacatgaatggataagtatacttatccattcatgataatttgttgagtacatacccctagaagcaaacttacttgattgaatatatgccattttgcatagcagttttatatattgtcaaactgtcctctagaataactattttaaacatatattttgaatgtgtaaggcagtaattccagaaacttaacagtaaaaagttatgttttacttccatatattaaaattttaarcaaatagcaaatatctatagctgtgcctcttttgtcaagaatttttaaactttaaaatattttaatcatgcaatatcttaaacatttataagaaatcaaggaaaataataaaacaaacaccaaagtacccatcactgcaattatatggataaaacattcccacatttttgaaaataaattaaactttacaaatacatattacttttatatttacttttctgaatacatttgaaaatgagcagaattgtctttgattccaacaatttcttcttttaccatgactcacatttcatttctattttgtttccttcttcttttgtgatttcatgagttgaaaaaataattcttttaaaa

SEQ ID NO: 645788 - DNA, 578 bp, Homo sapiens
aagtccaggcagatgttaacaaatgattgttggttggaggatgattgaatcgtttactattttctcagcctttcattttgatggatctttgctcattcgcttttgttcattttttatttaacaattaacaacatgcatcaagtayctcatgtttgctacaggttctctgaacaccaagatgaacactacattgctgtgccttggggtttgtaaagcaagctgacaagagttagtaatacataccaagaagttgcaatgtacagcattttatgcagtgtgaaggagatggaatgagagaatatgctttattctgcttgaagaaatcagttattagagtcaaaatggcatgttacctgaacctggtaggctgaaatagctctgacaattgggcaggacatgaaggtaacactggagaaagaggatgaagggaaaggtttgtgaaagaacatagtgattacatgaaaaacaaataaattggtgttgcagagcaaaaatgtcataagcacacactcaagaattagtcactttcaagctgcacttaagatctgaatagctaaggacaagctacttagcatatc

SEQ ID NO: 645789 - DNA, 578 bp, Homo sapiens
aagtccaggcagatgttaacaaatgattgttggttggaggatgattgaatcgtttactattttctcagcctttcattttgatggatctttgctcattcgcttttgttcattttttatttaacaattaacaacatgcatcaagtatctcatgtttgctacaggttctctgaacaccaagatgaacactacattgctgtgcyttggggtttgtaaagcaagctgacaagagttagtaatacataccaagaagttgcaatgtacagcattttatgcagtgtgaaggagatggaatgagagaatatgctttattctgcttgaagaaatcagttattagagtcaaaatggcatgttacctgaacctggtaggctgaaatagctctgacaattgggcaggacatgaaggtaacactggagaaagaggatgaagggaaaggtttgtgaaagaacatagtgattacatgaaaaacaaataaattggtgttgcagagcaaaaatgtcataagcacacactcaagaattagtcactttcaagctgcacttaagatctgaatagctaaggacaagctacttagcatatc

SEQ ID NO: 645790 - DNA, 578 bp, Homo sapiens
aagtccaggcagatgttaacaaatgattgttggttggaggatgattgaatcgtttactattttctcagcctttcattttgatggatctttgctcattcgcttttgttcattttttatttaacaattaacaacatgcatcaagtatctcatgtttgctacaggttctctgaacaccaagatgaacactacattgctgtgccttggggtttgtaaagcaagctgacaagagttagtaatacataccaagaagttgcratgtacagcattttatgcagtgtgaaggagatggaatgagagaatatgctttattctgcttgaagaaatcagttattagagtcaaaatggcatgttacctgaacctggtaggctgaaatagctctgacaattgggcaggacatgaaggtaacactggagaaagaggatgaagggaaaggtttgtgaaagaacatagtgattacatgaaaaacaaataaattggtgttgcagagcaaaaatgtcataagcacacactcaagaattagtcactttcaagctgcacttaagatctgaatagctaaggacaagctacttagcatatc

SEQ ID NO: 645791 - DNA, 582 bp, Homo sapiens
gtgtatgtgtgagtgggggaagagagagagaaaaaaatgcacaaatcagaatctagcatgaagactttgcaaktatgtgagaatttgatacattggtagggttaagtccaaatgacagacaatgcctaggtcaacattctttatgatcttacagttgcagtccaatgttttttaaatcagtttaatttatacagcccattctttcattttataaatctcttaagatacatgaagacaaattgaaatgctttctctaacttaatcatagcttttcatggttcattaaatctaatataatatatatcaatatcctgctgtagcttataagttggaaataatgaattatcttggtatttttatactgctataaaaataagtatgttataatatgatttttcataacacacaaataatcacttgtggaattaaaattatcattaaatgccttaaaaatatattaacatatactttaaatgagataccatctcacaccagttagaatgacaatcattaaaaagtcaggaaatgacagatgctgaagagtatgtggagaaataggaatgctttcacactgttggtggg

SEQ ID NO: 645792 - DNA, 441 bp, Homo sapiens
tagactatccctgttcctcccctgccatgttatgccccacccatgcaaccactatcctaaattttcatagttagcattacctttaaaaactagatctatcatatatttatttacacataacacagtattacctctggttttgctgcattttgagctttacaaaaatggcataatattatttagagtcctattttcttttttcattcaatattttctgagaattatccatgttttagctgtagatgtcattcatttattctcactgtgtatagtagctcccattgtgaatataccacaatagatatattcattgtcctctttatgtaaattaaggataaaaagtgtttgctactatgaacaatgctaygaaagctctttgcatatatcttctggttcatgtaattgaaagcttttctataatagttatctatagtgttatta

SEQ ID NO: 645793 - DNA, 544 bp, Homo sapiens
tataaagagcaaatttatcaagacgggaattgcaatggagaaaaagtaattsatgcagagctggctgtgcgggagactggagttttattattactcaaatgagcctcccggaacagtcagagattcgaattcttaaagataatttggcaggcaggggcttgggaagaggggagtgctgattggtcaggttggagatggaatcatagtggatcaaagtgaggttttcttgccgtcttctgttcctgggtaggatggcaaaaatggttgagacagattactggtctgggtggtgtcaactgatccatccagtgcagggtctgcaaaatatctcaagcactgatcctaggttttacaatactgatgttttccccaggagcaatttggggagttttagactcttggaaccataagttgcatgacccctaaaccataatttctaaacttgtagctaatttgttagtcctgcaaaagcagactggatcccaggcaagaaggaggtctttttgggggaaaggctatcatcaattttattttagaatgaaac

SEQ ID NO: 645794 - DNA, 573 bp, Homo sapiens
gtgggctgctttcaagctttaacttcagatcctcctgctagtttttacttttcagagtgtttaagtgcttgtttttgtttgtttgtttgtttgttttttgtagtttgttcagttttagtggtgaacagtgcattagatagattctagttggcttatttcatcttagcaatcatcgaaaacttagatattttatctttaaaattacaaaccaatatggactactacaaacatctattagagcgtcgctgcctttaaatatgattccctagrttgggtgtgatacttctgtattttagaaagttcccctgccccaataaatctaaaatgtaaggttaaaaaccctcatttcttctttatttgcctagttcagccaatttgactctcagttggattttgagaatctcagtgatgtttcagtttggaggtcagttcagaatagctttttattctaattttaatacctctattatcctgataaaagtgttgttgatgaaataattttgaatatctcaataaaaatctcaagtgcctaccaaatattctttaagctttcaacttatatattttatacat

SEQ ID NO: 645795 - DNA, 564 bp, Homo sapiens
caattacatttttgtttataatccttcttcattatatagcaaagtacatcattagcagttctaataatggcaattagtccactttgctctttaaattaatacattctttcattgttggggtttagttataatttgtcaaaaaggtgaaataactatttccagtttgccctggaaatgttgctttgtagaaagtaaacatttttcagttctgccaaagtatgttccactatattatcagagtctaaaccaccaacttcaatactgaaacccaagttgagattattaatttaaaccatagttcttgttgtttttccttatattttggatggacagagtcacataaatgtttattcttcccatgaaagaggatactaaaaacttgtacaggatgggaatattggccctttttaaagaattcccttcacacttccacaaaataaaagaamaaaagaaaagtctaataaacaaggaatttacaacaaaataaagtctcaaacaaccttcggcctagttcctaccatcaggtgcccaatgggtgatctgaccattcttacacctctgttt

SEQ ID NO: 645796 - DNA, 551 bp, Homo sapiens
tatggacagcagcttcagcctgtactgaaagttccagcttgccctttctggctgcctgccctatgatttctgacttgcctagccagccgccacaatcacatgagccaattccttgcaataaatctttaaatttatacatcctgttggttctctttctctgggttgaaccctgactgatgcacttagatattggcaatctcatgtggttccatccgatggaaggtcatttggcaaaggaaatatcacacatgagaaaaaacgtaaagtttactgaaaacaagaaaatgattttaaatttagtattagaggctgcgttgtaattcaatattaacttttctgtatttcatgctcttatcattttgtactttcttgtatttgttattttaatataaatatctgaatatatatataattaatatgatccataattaaaacattattttattgattaattacaacttartgaggcttaaaatatttccctattttctagtcaattatgaaaaatgggacaaaggaggcaaacattatcataaaaatgttaagaaaaa

SEQ ID NO: 645797 - DNA, 572 bp, Homo sapiens
gatttatcaaatacatttatgaaacttataaaacatatatgatagtttttgtttaaaattcatttgtgtcttttatattcaacatctgtctcccccactagaatgtaagcttcggaagagcagggaacatagaatttgattatgttaaattccaaaacgtagcacagtatttatatttgttaaatgatgactattatgaaactatcagaagaggaaaacaaaatacctcaactayagattctaaaattctccacatgaagtaagaactgatgtgatattggaaccaagtgcttgtccctcagaggagtttacgtaagtatattaatcattactgattgattttcattgacatacacagagacattcttgttaaacttggtgtctcataatttctgttggaaacagtaactataaacaatctgttaatcactgtataggttttatttgagttgagttaaatagattttatatattctcaaatagattaaggtcagacttaaaagaggtcaatttaatcagttccttcagcttcactgtttgtgaaaatagccacaataatggatgagaaaata

SEQ ID NO: 645798 - DNA, 581 bp, Homo sapiens
acatttccactttgttcttctttatatcttctattactttactgatattttctatttcttagctgatgcttcctattttttttttatttgtttcaagtgtgtctgtygcttgttgaagcatttttatgatggttgctttaaagtctttgtcagctagtactaacatctgtcatcttggtattggcaactattgactgtctttttctattcagttttaaatcttcttggatcttgatataataactttttattaaaatctggatattgtgggcatcatattaggagactttggatctcatttaaatcttttctacttttttctgacacccctctggcaggggaagagggagtactctgttgttactgccaggtgagagtacaagacagtactcctcattacttctgagtgggggtgggaattctgcctctcattgggcctcccctgatacctctctggaaagtatcaggtatctctggctggaagagtaggagtgcctccttactactctctatgtggcctccagtgacaccatagagttaggggcctcattgccaactcattaccaactggtgaggatgaa

SEQ ID NO: 645799 - DNA, 581 bp, Homo sapiens
acatttccactttgttcttctttatatcttctattactttactgatattttctatttcttagctgatgcttcctattttttttttatttgtttcaagtgtgtctgtcgcttgttgaagcatttttatgatggttgctttaaagtctttgtcagctagtactaacatctgtcatcttggtattggcaactattgactgtctttttctattcagttttaaatcttcttggatcttgatataataactttttattaaaatctggatattgtgggcawcatattaggagactttggatctcatttaaatcttttctacttttttctgacacccctctggcaggggaagagggagtactctgttgttactgccaggtgagagtacaagacagtactcctcattacttctgagtgggggtgggaattctgcctctcattgggcctcccctgatacctctctggaaagtatcaggtatctctggctggaagagtaggagtgcctccttactactctctatgtggcctccagtgacaccatagagttaggggcctcattgccaactcattaccaactggtgaggatgaa

SEQ ID NO: 645800 - DNA, 581 bp, Homo sapiens
acatttccactttgttcttctttatatcttctattactttactgatattttctatttcttagctgatgcttcctattttttttttatttgtttcaagtgtgtctgtcgcttgttgaagcatttttatgatggttgctttaaagtctttgtcagctagtactaacatctgtcatcttggtattggcaactattgactgtctttttctattcagttttaaatcttcttggatcttgatataataactttttattaaaatctggatattgtgggcatmatattaggagactttggatctcatttaaatcttttctacttttttctgacacccctctggcaggggaagagggagtactctgttgttactgccaggtgagagtacaagacagtactcctcattacttctgagtgggggtgggaattctgcctctcattgggcctcccctgatacctctctggaaagtatcaggtatctctggctggaagagtaggagtgcctccttactactctctatgtggcctccagtgacaccatagagttaggggcctcattgccaactcattaccaactggtgaggatgaa

SEQ ID NO: 645801 - DNA, 621 bp, Homo sapiens
agagtgtaattttacattattgttacttacataggacagacagaatcgaaaacacatgaaatcactttgagaagcaagtgggttgcataagactagatgcacatcttttgtctcacatccaacgagagacaaaccttacacatagaatggtggacagaatcacctgtagtattgtgttatttttattttgggaggcaggtgagtggccaactatccagataatgcaagttaaaagagtatctaacataatrcctgtgatcttaagaagcaatttactttatcaaggagacttggctgctattaggtaagctaccaccagtttgcataacattggaaacttcatgaggtcttcacaaagttagacttcctgtaggccttgaacactaagacatatggattattctaaaattctttgcttgtttttgcatccctgaataaaaaacacatacaactctatgaaaatatttgacaaaatgctaagagaaaattctgaatggaattaaacacacaatatgaagaaagagatgaaatggaaaaaggtagataccatgatgtgaattactggttatagcatcacaaaataacttaggcctgaaagaaaccttaaagataatgtaattt

SEQ ID NO: 645802 - DNA, 621 bp, Homo sapiens
agagtgtaattttacattattgttacttacataggacagacagaatcgaaaacacatgaaatcactttgagaagcaagtgggttgcataagactagatgcacatcttttgtctcacatccaacgagagacaaaccttacacatagaatggtggacagaatcacctgtagtattgtgttatttttattttgggaggcaggtgagtggccaactatccagataatgcaagttaaaagagtatctaacataatgcctgtgatcttaagaagcaatttactttatcaaggagacttggctgctattaggtaagctaccaccagtttgcataacattggaaacttcatgaggtcttcacaaagttagacttcctgtaggccttgaacactaagacatatggattattctaaaattctttgcttgtttttgcatccctgaataaaaaacacatacaactctatgaaaatatttgacaaaatgctaagagaaaattctgaatggaattaaacacacaatatgaagaaagagatgaaatggaaaaaggtagatacmatgatgtgaattactggttatagcatcacaaaataacttaggcctgaaagaaaccttaaagataatgtaattt

SEQ ID NO: 645803 - DNA, 593 bp, Homo sapiens
gtaaaataaagcaaaatatataaatgaagattgtttactcatacattacatatattaataatcatcactgctttttattcctttccaaaagaccacaaatagaaatatttatggcctacagattgaaaactctacagcttacaagggatcaaaagagcatagactttgaaaatgggtttttactagattacacagaatcttatattcactcatttattcattcatttaacaaatatttatgaaatgtgtacactgtgctatgcattacaaaaggttctacatataaaatggtgaacaaaacagtcatttcccctttctyctcagagctttcagtctaagggaccaatattaaatatatactcacatacacataaatgtaactataaactgggaatgtgaaagcataataagaaagagtagcagaagtgacttaatttagattgatggggaaccagggaaggctatcagaagaactgatatttaagctgagactgagaggtaaactggagatagccaggaaaggtagagaaagaaggggagtattccaggctaggacacagcaacataaaggctctgaggtagacaactagagc

SEQ ID NO: 645804 - DNA, 540 bp, Homo sapiens
gaagaattaatattataaaaatgaccatactacccaaagtagcctacaggtttaatgcaatttccatccaaacttaggacatgcttcaaaaaaaaaaaaaggaaaaaaaatcctaaaatttgtatggaaccacgaaagacctcaaataactaaatcagttctgagaaaaatgaataaagctagaggcataatactgcttgtctccaaaatatactacaaakctatagtaatcaaagcagtgtgatactgatataaaaacagacacatagacaaatggaacagaatagagaacccagaaataaatccacgtatgtatagccaattgatttttcacaaaagtgcaaagaataggcattgggaaaatggcagccttttcaataaatggtgctgacaaacctagatatctgtaggtggaagaatgaaactagatctctatctctcactatatacagaaatcaactcaaaatgggtgaaaacttaaatgtaagacccaagtctataacactactagaagaaaactagagatattggcctgggcaa

SEQ ID NO: 645805 - DNA, 597 bp, Homo sapiens
tgttaactctctgagagaagagcctatctatctctgtatcccaacccctcatcttaacccctaatcagttcttggcacaaacgagcagttagcacgtggtttttggattcaggaacaaatacatcaatgtgtggataaagggtgaaagtctggactttacaagatgtgatgctctgggcagtactctaagtttaaaacacttgtagatgatgtggaatttkcagatgctaaaaatatccacctcaagttattatttaaatataatgtaagaaaaagagtacattttcaccatctctttgtgtagctgccttcccatgaaacggacaattcgtaatctcctgatttttaggggaaaccttccttcctgaccatgataattagtctggatcttgtccagcttcattccgtatgctggagagggatgagcaaatgcatgatgcactcaggtgctgttgtaccatgttttgttttgttttgtttccagtgcaagtatggtcaatgctttttgttctgtttatacaaaactccatgaggaagcacagcatttcataggtctcttggctctggcagcattttcagccattaccttcagtgcat

SEQ ID NO: 645806 - DNA, 511 bp, Homo sapiens
  misc_feature 82: n = A,T,C or G
ttatgagcattggattctgacaaacctagcttatgttggatgaggagttgctttttatcaatgagcaaagaaagtagttacngagatgaaatctattcctgctgaagatactgtgaatattattgaaatgtcaacaaataatttagaatattacaaaaatttagttgataaaggagtggtagattttaagaggactgactccaattttgacacaaattctactgtkggtaaagagatcacttgctatagagaaatcttttatgaaaggaagagtcaattgatggtgcaaacttcattgctatcatattttaagaaattactagtcactgcaaccttcagcaaccactgccctggtcaatcagcaggcatcataattgaggcaatatcctccaccagccaattatgactcactgaagactcaaatgatcattagcagtattttatcagtactttttaattcagatatgtacttttttagacataatactattgttgcacacttaatagaata

SEQ ID NO: 645807 - DNA, 617 bp, Homo sapiens
ggttgaactacttaacataagatataaacaaatacaaagattcaacagatatcaagatttaaagaaaagaggcaaaaaggtaatttttctaaattttaattttgcttattattaattactacacagaattttttgtttctaatttactctatatctttttgagccaatgaccttgccagcaagtaatcattatggattgataataaatctggccttcatgttgggaccccctataaaatgtttctcatatgttgctcaacctaaacagggtatatcataggaacagcctaaatatttgctgaaaaatctactgaatgaatgagtgttggcttcttttttttaaaaaaaatttattttattttacattagggtctgggttgtagagcaaagtgctgtagacctggaatcagaaggcctgggttggggccaactgtaggcaactctagggtcttgttttatgataggtctgctttttattttttgttaaatggaggtagsaagcaactccttaaaaactatgtattgctctaaatatgccaacgactatctttggtagtaactgtgttcttttgatctctagagcacatagtctctcaggaatcccaaatagaagaaaa

SEQ ID NO: 645808 - DNA, 559 bp, Homo sapiens
tatggttttctgattgttataccatatgtaataaatcttagcttacacccaggtcacagagattttctgtgttctatcttctagcttgaggttttacctttaagtttactagtctaattaatttttgtatacrctgtgaggtcaggatcaaagtttttaaaatctcattttgatatataacaaatggtgtacttttcattatatttttgaaaagaatatcttttctccattgaattaccctagttccattgtgtgggtctatttctggattcagcattctatttaattaatctatatatgtctatgcttatgttaataccacattgtcttgatcactacagataaaaatcttagtagttcttaaaattatgtaatgcgtatcatccaactttgttcttttctgaaattgctttgactattatgattattttatatttctgtaccataaaattataaagttgacttgtcaatttctccaaaagaattcctgctgggaatcaaaaccaaaatgagataccatctcgcgccactcagaatggtgattgattattaaaaagtc

SEQ ID NO: 645809 - DNA, 547 bp, Homo sapiens
ggtcatttttgatgtctacacatttcagcatttgagaagttgtatattacatgcatacaaacccatattcaaatatacaattggctaaacaagtatttgttttaataaagtagtagtaataaaatatttatagcaaaggggacaagactcaggactgagaggaaaaactcaattaaaaaaaagacaacaatacttaaatctcttgatgcatctacttagcaatgtctacaatagcttttttaacactatcagaatatagagcataaattataatgtttatcctgcttttaaaggaaaatttttctcttatgcaatcatggtgggagaaaagaattcttaacgtgattatttgtctcatattttattttaggattctgttagtgtttttaggattctatcaatgcaaggtgtaagaacatgtcctggcagttgaaggaaagrctaaggaaaaagatgaaagagaagtgtcgcatcccttaccctccttttaaagaaatgctgaagttgctgagcagaaggtgccacagtcatgtcccttaatttatcc

SEQ ID NO: 645810 - DNA, 547 bp, Homo sapiens
ggtcatttttgatgtctacacatttcagcatttgagaagttgtatattacatgcatacaaacccatattcaaatatacaattggctaaacaagtatttgttttaataaagtagtagtaataaaatatttatagcaaaggggacaagactcaggactgagaggaaaaactcaattaaaaaaaagacaacaatacttaaatctcttgatgcatctacttagcaatgtctacaatagcttttttaacactatcagaatatagagcataaattataatgtttatcctgcttttaaaggaaaatttttctcttatgcaatcatggtgggagaaaagaattcttaacgtgattatttgtctcatattttattttaggattctgttagtgtttttaggattctatcaatgcaaggtgtaagaacatgtcctggcagttgaaggaaaggctaaggaaaaagatgaaagagaagtgtcgcatcccttaccctccttttaaagaaatgctgaagttgctgagcagaargtgccacagtcatgtcccttaatttatcc

SEQ ID NO: 645811 - DNA, 287 bp, Homo sapiens
ctgcatcctctttgaccttctctgtcatgttatgatgcagaataaaagcccctgccagaagccagggtcatgccgttgaacttctcagcctgcagaactgtgagctaawcaaacttcttttcttacaaattactcagtctcaggtgttcttttgtagcaataccaaacagactaaggcattttttctgaaaaaaataaaaatcaactttgaatatacttggaatgttaactatagcaaaattatggcaaaatgtagtgctgtttaaatggcagcttaaacatataac

SEQ ID NO: 645812 - DNA, 514 bp, Homo sapiens
attaattcttaagagttaacaaattttgtgttttaggctatccaacaacgtaggctttagttctgtccaaggcccaattctcgtcaaccttaaattcaatatgagtcaagattacaaaacaaccatcttcaaagctaatctcattaggcaggtttgtggggatgtgtgggtgggcagcaaggggtgttaayggaaatttattctcaagaacaaaattggttttcctttttttttttttgaaatttttttattatactttaagttctagggtacatgtgcacaacgtgcaggtttgttacatatgtatacttgtgccatgttggtgtgctgcacccattaactcgtcatttacattaggtacacctcctaatgctatccctctccactcccctcaccccaccacaggccccagtgtgtgatgttccccttcttgtgtccaagtgctctcattgttccttttgctgtgatgttcagactaaaactgggtcctacagtcaactttgggtatggaaac

SEQ ID NO: 645813 - DNA, 514 bp, Homo sapiens
attaattcttaagagttaacaaattttgtgttttaggctatccaacaacgtaggctttagttctgtccaaggcccaattctcgtcaaccttaaattcaatatgagtcaagattacaaaacaaccatcttcaaagctaatctcattaggcaggtttgtggggatgtgtgggtgggcagcaaggggtgttaacggaaatttattctcaagaacaaaattggttttcctttttttttttttgaaatttttttattatactttaagttctagggtacatgtgcacaacgtgcaggtttgttacatatgtatacwtgtgccatgttggtgtgctgcacccattaactcgtcatttacattaggtacacctcctaatgctatccctctccactcccctcaccccaccacaggccccagtgtgtgatgttccccttcttgtgtccaagtgctctcattgttccttttgctgtgatgttcagactaaaactgggtcctacagtcaactttgggtatggaaac

SEQ ID NO: 645814 - DNA, 455 bp, Homo sapiens
ccccaattgttcaggcaagagacaacactggttgagagtacagcagaagcagtgaagatggagaaaagtagcttttgtattttaaagcatctttcttctaaaaactcagaatctgttcagctctatcatcgtatttgaccacrtcaagtcagtgagaggcacaggcattgaaaagttaattgcactaagaccagaaaacgaacaggatctgaacccagggtgcagattcctaatctagtctctatgctagccacttgccaatagagctactcaaatttaatttttagttaattaaagttaagtaaaggtataaattcagttcctcagtcactctagccacaattcaagtattcaactgccacatgtggctaatggctgtcgtactggacagcacaaaggaacatcatcctcacagaaagctctactggaagtgctgccctagacatactgctctt

SEQ ID NO: 645815 - DNA, 531 bp, Homo sapiens
atagcatccccatttgaaaaatgaagaataagcccatggttaattaataactaatgaaaccatgtctacttccagttcagtacaatgcttccacctaagaacccgtcaacgcagccgaccactcttccacrggctggcaaacagttcaacatacacctctggacaccacgttgctcaagttgggaggtgagcaaaacaggttcacatcataaacatgtattcttcgatggcgaatgttcttccatgtccacattccaaatgtcattacaattattctagtaactagaaacatcccactcccggaaatgactgctaatcctgtgggcaccaaccctgtcatcttaagcaacaatggagcacaatataatcacagagccagaacccaaacggcctctcccagtgcaaggaaaattcactgcaggaaagtgggctgtgccctggagacacaatcaagtatcaggagcagttattagaaaaaatcatggcccctgaagttcagaaaacaaatgaaatgttatcccgctgacaagt

SEQ ID NO: 645816 - DNA, 549 bp, Homo sapiens
aatatgtaaacaattaaaatattaacagcttccattaataaatgcctgctatgtatccaaaaacatattcttgcatgtgatttcactttatccttttatcatcaccattaggtcagtgttaatcttgagataygaaaacagagactaagactgagagaagtcacccactagagattacacagtcaatagtacggctgtcattcaaactgaagttagatggttccaaagcccttgccctttcttctcccctacggtgtccactactaagtactaaagcagagtgatgggggctgagaggcactcggaatcaaacggactagcatttgaatcatgcctctgccacctaatggtcctagtgacttagggaagttatttcagttgtctatgattcagtttatatagttataaaatacacaaagaaaaactacctcctagggttaatatgaaggttaagacataaaacatgcacagtagttgacaagtagaatggtcttaatattcactgatcagatttttccaaatacatctcttgtgccattgcagcaatcc

SEQ ID NO: 645817 - DNA, 615 bp, Homo sapiens
tatggtttttttttttttaaatcattatttttgttttgcattttccattagggaactttttttcttttgacatgtttcttggtaacataggatatgttaattaacctttctaactcttagttttctcacttgtagtatgggtataataataatactatctatgacaaagggttgttgcaaaaattaaataaaataattcattaaatttcttagcaccatacttagcatatagcaagcatacaataagcattgtctattatcctgtaagacttgaattatacaaattctggtcattctttttttatttatttgttttttgagatggagtcttgctctgtcgcccagagcaacgtctggagtgcaatggtgcggtcttggctcattgcacctctgcctcccgggttcaagcgattctcctgcctcagcctctggagtagctgggattacaggcgtccaccaccatgcctggctaagttttgtatttttagtagagataggggtttcacyatgttggccaggctggtctcgaactgctgaccttgtgatctgcccgcctcggcctcccaaagtgctggggattacaggcgtgagccactgtgcccggcccaaattctc

SEQ ID NO: 645818 - DNA, 540 bp, Homo sapiens
tggcaaggaagtacttttgtgtttggaggagggaaactcatccatgcagggggtgatgtcaaaagacagagagctccccaaaatcaagaggtatgttgtcttcccctttgagtattcagatctatccactacatggcaggagtttttttccaaatctgttgaattgagctgcctgtgggtagaagagtttgttctggagcaatagttatggagaacaataagaaatccctatgaagagacaagttgaggcaagcctgtgaaggatgtttgagaggtcacctgttgctttagcctgccaggcrtacattctccccgccctttctgatgtcagcatgccaactttcccttaggaaacgagccatcctccactgttggtccatatagtcctgatagagctaatcccactcccagctccagaggtggcgatgtggaccaggtctgacccaacagcgtactccattcttccagctatggtgttggttcagagatggacatgtgacctaagctgggccaatgggagccttctcgggactgttgctg

SEQ ID NO: 645819 - DNA, 540 bp, Homo sapiens
tggcaaggaagtacttttgtgtttggaggagggaaactcatccatgcagggggtgatgtcaaaagacagagagctccccaaaatcaagaggtatgttgtcttcccctttgagtattcagatctatccactacatggcaggagtttttttccaaatctgttgaattgagctgcctgtgggtagaagagtttgttctggagcaatagttatggagaacaataagaaatccctatgaagagacaagttgaggcaagcctgtgaaggatgtttgagaggtcacctgttgctttagcctgccaggcgtacattctccccgccctttctgatgtcagcatgccaactttcccttaggaaacgagccatcctccactgttggtccatatagtcctgatagagctaatcccactcccagctccagaggtggcsatgtggaccaggtctgacccaacagcgtactccattcttccagctatggtgttggttcagagatggacatgtgacctaagctgggccaatgggagccttctcgggactgttgctg

SEQ ID NO: 645820 - DNA, 581 bp, Homo sapiens
gctctggttctagggccctccctgggtactaaactgggagtccagggcaccagcatccccagtggggttccaattcccttccactaaaaaatgggtcgagtgtgttgctcccccagggagtcaatgtcaccacctgggccttccccaggaacacccagggagatgagggtcacttcggggttactttacaaccactgcctggtagcggcagaccaccctagccatcatgcgcctcggaagagcacacctttgctgcagagggcacgcccctcacctgtccctcacttcgcagggaacaccagtccaaccttggctaacgggcgcagggcccagccttcccaaaatatgggagggggttgctgcggtggccctcgaaaggctccactccgcggacccctggactgcggggcccctccacgcctccccttgagtctgggtaaaggccattcattctcaggagatgagcctcagtgtccacctacattccagatagcactggtgacatrtatgccgaaaaaggtcaggagccctgtggtcttgcccgtagcctggagcccgggacaggcgcgtccccctcctga

SEQ ID NO: 645821 - DNA, 556 bp, Homo sapiens
aatagcataaataaaaaacaatcacaacttctagaaattgtgattttgagaaaggacacacttagagaactgaaaaatgcactgaaaatctcagcaatagaatcaaacaaaaaraagaaaaacttcagagctcaaagacaaggctttcaaattaacccaatccatccaagacaaagaaaagtctggaaaatttatttgaaagaataattgagaaaaacttccccggccttgctagagaactacaaattcaaatataagaagctcaaagaacatctgggaaccgcatcacaaaaagataatcacctaggcacatagtcatcaggttatctaaaagcaagatgaaggaaagattcttttttaacattttttaaaaatttttttgggatggagtttcactcgtgttgcccaggctggaatgcagtggtgtgatcttggctcactgcaacttccacctcctaggttcaagtgattctcctgcctcagcctcctgagtagctgggactacaggcatgcaccaccacatctggctaactttgtatttttggtagagacaggg

SEQ ID NO: 645822 - DNA, 605 bp, Homo sapiens
tctgaaaccatttttttttttttaccttgggggtgtggggggattgtggtgattgaaggctagatcattatggaaattattgcacagatgtttccttgagtgatataaactattgcccaaggttaacagcattgtcaattcccattggtactaaaacaatgattggtgtattatgaaccatagagaagtatccatagtcaggagatgactggagtacaagtataacgtatctctttcttctyagacacaaaaatttcctcaaaatacagatattccatttccactcaataacaccgtctttttttgaccagagaaaatgagaagaaaaaaaagaggttgtttgctgtgtttgttgtttgtttttgtttcctcttgcggagaagaagcaatgagtatatggatgtattcactgacatatatctcacaacactctcatctatatatcttcatagatatagaaacatacacagagaaatatagagatctacaggtataaatatagatatctatggagagagacagagagtgtgagacagattgagaaagagattattatattactactttctacatttattggtaagactgggtacataatttatgag

SEQ ID NO: 645823 - DNA, 470 bp, Homo sapiens
ttgcctatcagcctcagttaagaggagtctatggaagtgagagagacagaggaccagttggaaaaaaaaaaaaaaagaatatgctattatyttcctttatctttgaaaataacttggaaagtattttaacgtcaatgttaaaatattaacattaggaatattgttaaaggataaagaaaatattttagtattaaaaatcataggtgatatatattttgttttggacgacagaacattttcatatggaaagcagtggttactaggtgaggtgtggagtctatggcccatgccttctattcttcaggactagattactttactctttattgactagctttcctgttgggtcactaaatcagacagcgccctttagacatctttcttttatacaatgaagatgaatgtgtttcattgcaactgctccaggctagtcagtaagtttgtttgctcctttttttaaaaaataataa

SEQ ID NO: 645824 - DNA, 597 bp, Homo sapiens
cgttagtcattacccaagagacgtgacccttgaaaacaaaattatttaagggtagagtcattttaagaagacctaaatttacactttgtaccaaatagttacacatagaacttttcataaaatattgcaatgaagggacttttctcaaaaatgaagaggcatctttgtcaatcctatggaaatctgtaaatgtaaaaatcaatgtattactagaaaaattttatcattagcttctagcaattgaaaacattcatttcacaaccaactagagtttactatagtatttcttttcttcagtagaatggtcaggtctctaagtgctgcagyggcttgaactcttgatgacaaacatgtaggaaaacttcatgcagccagttcaagttcggttttgggtgactttggtagaaactgcctaaattccagtagcaccccttgagaaggccaccaattaaatcactaaattctgcaagctacattcttccccactctccatgtgttcttactgtctatgaaagaattagatggtgtacgttggaaagaaggcaactgggaagaaatttttcttagctgtcaagaagtagttagttaaaacaactc

SEQ ID NO: 645825 - DNA, 575 bp, Homo sapiens
tattttcccaacctgcctagtggctgagagaaggaatatgtttaaaatccagccaatgggacataagtggaaatattgccccttccttaaaggagcagcagtaatatmtcttttgctgttctttcactctctctctttttttttaacacagagtctcactctgtcacccaggctggagtgcagtggtgtgattttggctcactgcaacctccacctcctgggctcaagtgatcctcccatctcagcctcccaagtagctgggactacaccagctaatttttatattttttgtagaaatagggtttttccatgttgcctaggctggtctcaaactcctgggcacaagcaatccacccgcctcagcctcccaaagtgctgggataacaggcgtgagcctctgcgcccagcctctcttcttctttatcctgcaacctggaaggtagatgctgccatctttgactagcagcccaggtcacaaatggaaggagcaacaaggtagaagaaaccagagtccctgataccacagagcaccatcaccactgtgggcagcctgctcaaagttttatgtgaacaag

SEQ ID NO: 645826 - DNA, 575 bp, Homo sapiens
tattttcccaacctgcctagtggctgagagaaggaatatgtttaaaatccagccaatgggacataagtggaaatattgccccttccttaaaggagcagcagtaatatctcttttgctgttctttcwctctctctctttttttttaacacagagtctcactctgtcacccaggctggagtgcagtggtgtgattttggctcactgcaacctccacctcctgggctcaagtgatcctcccatctcagcctcccaagtagctgggactacaccagctaatttttatattttttgtagaaatagggtttttccatgttgcctaggctggtctcaaactcctgggcacaagcaatccacccgcctcagcctcccaaagtgctgggataacaggcgtgagcctctgcgcccagcctctcttcttctttatcctgcaacctggaaggtagatgctgccatctttgactagcagcccaggtcacaaatggaaggagcaacaaggtagaagaaaccagagtccctgataccacagagcaccatcaccactgtgggcagcctgctcaaagttttatgtgaacaag

SEQ ID NO: 645827 - DNA, 575 bp, Homo sapiens
tattttcccaacctgcctagtggctgagagaaggaatatgtttaaaatccagccaatgggacataagtggaaatattgccccttccttaaaggagcagcagtaatatctcttttgctgttctttcactctctctctttttttttaacacagagtctcactctgtcacccaggctggagtgcagtggtgtgattttggctcactgcaacctccacctcctgggctcaagtgatcctcccatctcagcctcccaagtagctgggactacaccagctaatttttatattttttgtagaaatagggttttkccatgttgcctaggctggtctcaaactcctgggcacaagcaatccacccgcctcagcctcccaaagtgctgggataacaggcgtgagcctctgcgcccagcctctcttcttctttatcctgcaacctggaaggtagatgctgccatctttgactagcagcccaggtcacaaatggaaggagcaacaaggtagaagaaaccagagtccctgataccacagagcaccatcaccactgtgggcagcctgctcaaagttttatgtgaacaag

SEQ ID NO: 645828 - DNA, 575 bp, Homo sapiens
tattttcccaacctgcctagtggctgagagaaggaatatgtttaaaatccagccaatgggacataagtggaaatattgccccttccttaaaggagcagcagtaatatctcttttgctgttctttcactctctctctttttttttaacacagagtctcactctgtcacccaggctggagtgcagtggtgtgattttggctcactgcaacctccacctcctgggctcaagtgatcctcccatctcagcctcccaagtagctgggactacaccagctaatttttatattttttgtagaaatagggtttttccatgttgcctaggctggtctcaaactcctgggcacaagcaatccacccgcctcagcctcccaaagtgctgggataacaggcgtgagcctctgcgcccagcctctcttcttctttatcctgcaacctggaaggtagatgctgccatctttgactagcagcccaggtcacaaatggaaggagcaacaaggtagaagaaaccagagwccctgataccacagagcaccatcaccactgtgggcagcctgctcaaagttttatgtgaacaag

SEQ ID NO: 645829 - DNA, 561 bp, Homo sapiens
gaaaatgaaaacaccacttatcaaaatttgtaagatgtggtaaaagaagtgcttagttagtaatttatagcactgaatacatacattagaaaagaataaaaatctgaaatccataatctaagcttccaccttagaaaaaagaaaaacacagcaaattaaacccaaagtaggcaaaagaaaagaaataataaaatcaaagtagaaatcaatgaaactgagaacagaacatcaataaggaaaatcaatgaaaccaaaagctgtttatttttaaatatcaataaaattctttagcccttggaataagaacaaacaaagaggacacaaatttataatatcagaaatgaaagatgaaacatcactgcagatcccttagacattaaaataagaaaatctgactgaaactaatccttgacaaaagagtaaaggcaacacaatgaagaaaagagtgttttcaacaaatggtgctaacacaactggccattyatttaaaaaaaaaaaaacaaacatgaagctagagacagaccttatacctgtcacaaaaattaactcagaattgatcac

SEQ ID NO: 645830 - DNA, 567 bp, Homo sapiens
agttggggatttttagcacagcactgtatccagcagctgcagaatgcacattctttttaagtccacatggaacatttgtcaaaattgattatatgctgctgggatataaagcaattttcaacaaaattcaaagtatcaacatcctaaaaagtatratctctaagcacaggggaataaagctagaaaacaataatacttggccagttggttgcatttggagtgaaagatggagaaaggtgatgggagcaactggctggagtgaatcatagaagagtcacatcagagaaaagagcagcttttgacagatatgtatccaaggacagtgccctgtagactgaaatgcagagctcctggaagtaaggaatgcagcagaggatgggtctgcgggtctcaatggcaaacttaatcagctgtgtaagtttgtggagagccagtcactatggagaaatcctggctatgcttccacattgctgaaattgcctatcagataaattttccttccaccataaagcaaatctttcttctattcaatgtctatttgcctagtggaaagcatcacactattaa

SEQ ID NO: 645831 - DNA, 511 bp, Homo sapiens
ttgtgtggcttcctacttaacccactaatgctggttctcatcatgctgcttttctcctaccaactaagttgctttagtyccgttttaaataagtccatggagattacttggaatcattttaaattatattgttcaacagcagagtggagtgactatggttaacaacaatgtactgtatatttcaaaattgctgcgagaggacttgaactgttcccagcacatagaaatggtaaatactcaaagtgatggccacctcaaataccctgacatcatcattacaaattccatgcatgtaacaaaataccacacgcaccctataaataggtaaaacattatgaatgtatcaaaaatttaaaatgtaaaaatacagcttatgaatcctatcccttcatttatacctcctccaatcaagtgtcactgtatccagttgtgatgacacaatggagcagtgactcacagaatatgattatttcctttctaggtataaaaagacaatctactgtgaagacct

SEQ ID NO: 645832 - DNA, 511 bp, Homo sapiens
ttgtgtggcttcctacttaacccactaatgctggttctcatcatgctgcttttctcctaccaactaagttgctttagttccgttttaaataagtccatggagattacttggaatcattttaaattatattgttcaacagcagagtggagtgactatggttaacaacaatgtactgtatatttcaaaattgctgcgagaggacttgaactgttcccagcacatagaaatggtaaatactcaaagtgatggccacctcaaataccctgacatcatcattacaaattccatgcatgtaacaaaataccacacgcaccctataaataggtaaaacattatgaatgtatcaaaaatttaaaatgtaaaaatacagcttatgaatcytatcccttcatttatacctcctccaatcaagtgtcactgtatccagttgtgatgacacaatggagcagtgactcacagaatatgattatttcctttctaggtataaaaagacaatctactgtgaagacct

SEQ ID NO: 645833 - DNA, 589 bp, Homo sapiens
atgctttcatcgaatataatgcagttttcttcctgttcttgttcgttttttgcagtcttcatgtttgtttgcacctgatagctttctcaattagagagaagtgagagatcttacggctgactcgcttgaacactccattaaaacatttcatggcatggtgtgcaatcccccaagcaatctcattaagtgcatrttagctttttccaatttagaacacagtcctttatgtacaaagacaagggaaaaactaataaatacctattttaagattaataaaatcttaaatgcacctgtgtgcgggaaatcatgggtgcatccaagactttcatgaaataatagagctcttcgtacccaatgtggttccagctcccttcaatgattcatcagaaacccagatcttaacaaatcaagcccttcgtggtggtcggcctcacagtccccgccaccggccatgtggataatactctggcttcctgctgagctgaaatgttccttcagtcacagagtcacagaatgaggattatggccacagcaaacctctcgcctcaggtcatatcttcctgtcaggagcagggcccttgattgatac

SEQ ID NO: 645834 - DNA, 589 bp, Homo sapiens
atgctttcatcgaatataatgcagttttcttcctgttcttgttcgttttttgcagtcttcatgtttgtttgcacctgatagctttctcaattagagagaagtgagagatcttacggctgactcgcttgaacactccattaaaacatttcatggcatggtgtgcaatcccccaagcaatctcattaagtgcatattagctttttccaatttagaacacagtcctttatgtacaaagacaagggaaaaactaataaatacctattttaagattaataaaatcttaaatgcacctgtgtgcgggaaatcatgggtgcatccaagactttcaygaaataatagagctcttcgtacccaatgtggttccagctcccttcaatgattcatcagaaacccagatcttaacaaatcaagcccttcgtggtggtcggcctcacagtccccgccaccggccatgtggataatactctggcttcctgctgagctgaaatgttccttcagtcacagagtcacagaatgaggattatggccacagcaaacctctcgcctcaggtcatatcttcctgtcaggagcagggcccttgattgatac

SEQ ID NO: 645835 - DNA, 589 bp, Homo sapiens
atgctttcatcgaatataatgcagttttcttcctgttcttgttcgttttttgcagtcttcatgtttgtttgcacctgatagctttctcaattagagagaagtgagagatcttacggctgactcgcttgaacactccattaaaacatttcatggcatggtgtgcaatcccccaagcaatctcattaagtgcatattagctttttccaatttagaacacagtcctttatgtacaaagacaagggaaaaactaataaatacctattttaagattaataaaatcttaaatgcacctgtgtgcgggaaatcatgggtgcatccaagactttcatgaaataatagagctcttcgtacccaatgtggttccagctcccttcaatgattcatcagaaacccagatcttaacaaatcaagcccttcgtggtggtyggcctcacagtccccgccaccggccatgtggataatactctggcttcctgctgagctgaaatgttccttcagtcacagagtcacagaatgaggattatggccacagcaaacctctcgcctcaggtcatatcttcctgtcaggagcagggcccttgattgatac

SEQ ID NO: 645836 - DNA, 589 bp, Homo sapiens
atgctttcatcgaatataatgcagttttcttcctgttcttgttcgttttttgcagtcttcatgtttgtttgcacctgatagctttctcaattagagagaagtgagagatcttacggctgactcgcttgaacactccattaaaacatttcatggcatggtgtgcaatcccccaagcaatctcattaagtgcatattagctttttccaatttagaacacagtcctttatgtacaaagacaagggaaaaactaataaatacctattttaagattaataaaatcttaaatgcacctgtgtgcgggaaatcatgggtgcatccaagactttcatgaaataatagagctcttcgtacccaatgtggttccagctcccttcaatgattcatcagaaacccagatcttaacaaatcaagcccttcgtggtggtcggcctcacagtccccgccaccrgccatgtggataatactctggcttcctgctgagctgaaatgttccttcagtcacagagtcacagaatgaggattatggccacagcaaacctctcgcctcaggtcatatcttcctgtcaggagcagggcccttgattgatac

SEQ ID NO: 645837 - DNA, 569 bp, Homo sapiens
tctctgcattctggttctattctggcactcaacagactagacaatgcccrcccacaatagtgaagggaatattcttacttagtttatcaattcaaatgttaatctctctcagaaaatcccccacagacacacacccaaaataatgctttaccagcaatttgagcattccttggctcagtcaagttgacacatacaattaaccatcacaacccatgaaatataaagagcagagagatcaggagtagttcgagttttagactgcaatgctaatttgatcccggtaaaattagaggaggaagaaaagcagattaggtggaaatagcctcgtatgtcagtgaagcttttagaaaaagcctcaatcccaaacagtgagctacagtgaaaagattgccctgtgctgggcagaaatggtgagacgctagtaccccttctatgtcaaatcattgagtagaaattgttcagaagagaattgcctcacctcaaatgctgtggttatttcccaaagtgctgcagctggaggctgttggctaattgcacttgtgtatcagcttgtttcttgaaaagaattc

SEQ ID NO: 645838 - DNA, 523 bp, Homo sapiens
aaaagtagtaagtaaaaaacactaaatgtcaacttaagaaataccttatgaaatgtgttaattccaaattgaaagccaatatataaaatttggcttatgccaaagtaatagcaaaaacatataaaatgggttttaacagctagggctacagagataagataatttataactatggagaatgttaattcatgattgggaattaaatggttaattaaaaataaaatattatagttaatgcatgctgggcttaatacctaggtgatgggtttgtgtagtaaaccaccatggcacattacctgtgtaacaaacctgtacatgcacccctgaacttaaaagtggaagaaaaaaacccaaccmccaaaaaaaaaaaaaaaaaaaaaggaaaaaattttacagtggccaacatgccaactatcctcaatctgatattacagtcttgttttaggaaaacaggtttctgattcccacaaatcattaattacattttgataattaaaataaactaggttacacacgcacatac

SEQ ID NO: 645839 - DNA, 467 bp, Homo sapiens
gagatggacagttctgtcatatgataacttctcaggtaaaggcagctttcaaaacacacttcaacagaatcccggtgatactgttaccgtggagacagaagcatcgggaggttttaaaagcagggtgcaggaagagacactcagagccctcttttacatgcagagccatcatttgactctattttatgcagcactgctgcaatttttgatcaaacaagtacaaaaaggtaacagtcttgacaacagctctgtacaaaaggtcaggcagcttttgactgtgtttcttgtcttttcccttttcttaatcagaggctgtgaaagagctggagtggtttccctttgcatagctacagaaaatactttaggcattaagtgtgtgttgattttaatcaaatacgatattgatatcttccagctttaacccgttaaccctmttacagcagtgaatggcataatattacggacct

SEQ ID NO: 645840 - DNA, 506 bp, Homo sapiens
taggtaaaaacatgtaagctttcattttggtttctttatcaatagaccagccaaatgtatttgctaacaggccatacgtggaaggcaacagtggaaattaatttacttcttatttgtaaacataccacagtaaatgaaaaactgaaaatgaaatcaaatttaggtaatttaaattgagatgtgtttacatagaaaaaaatagatacatctctttgataaactcttaaaatgtgtgagcacatgaacttctgttgtgagtgcrtagaaaatgtgtatttcttgtgtgtataaagacagcttcctgagactttcctatctcagtttaatgtcttaaaatctacttaaccataaccataaccatataaatgggtttggcgtgtacttaatctcttactaagatttacagagggtattaaataaaagtctggggtattaaataaaagctatctgaatgctcagatagccacaacactagctttttttttttcctcccctgcctttcccga

SEQ ID NO: 645841 - DNA, 597 bp, Homo sapiens
tgttgcataacctcattcttcttggacttgggacaagaactagggacycaccaaatgcaggtacagagaaggctgtaacactgtggccctccaccctctgcagatggaaggcagctgccccacatgatgggaaggagcagcagcacttggaatggcggactggaccctgacttgcttgctcatacaccccttcctggcaggggctgagtgtgcagtcacagtggccatgggatctgcaccacagtgcaagacagacatagcccagtgggccaagtagatggggcatatcctgcagcaagcttgggcccaagcaaggcttgggcaggggcatcaccagctggatgtctccactctggcaaagtggctgagaaaaatcctgtgtcattatcatattgtatcatagtttaaacattctttaaaaactcattaaggactattttattaatttttatccatttgtctggtatataggatagtatctggcatgtctgacaaacagcaggcactcaaggaatggttattgaaatgaaatcagtaggtgaatgaatggtgatgatataacccaatggacagacctaaaaatgttgaaagcctgtt

SEQ ID NO: 645842 - DNA, 597 bp, Homo sapiens
tgttgcataacctcattcttcttggacttgggacaagaactagggacccaccaaatgcaggtacagagaaggctgtaacactgtggccctccaccctctgcagatggaaggcagctgccccacatgatgggaaggagcagcagcacttggaatggcggactggaccctgacttgcttgctcatacaccccttcctggcaggggctgagtgtgcagtcacagtggccatgggatctgcaccacagtgcaagacagacatagcccagtgggccaagtagatggggcatatcctgcagcaagcttgggcccaagcaaggcttgggcaggggcatcaccagctggatgtctccactctggcaaagtggctgagaaaaatcctgtgtcattatcrtattgtatcatagtttaaacattctttaaaaactcattaaggactattttattaatttttatccatttgtctggtatataggatagtatctggcatgtctgacaaacagcaggcactcaaggaatggttattgaaatgaaatcagtaggtgaatgaatggtgatgatataacccaatggacagacctaaaaatgttgaaagcctgtt

SEQ ID NO: 645843 - DNA, 585 bp, Homo sapiens
tactctagttttctacattctattttagaagcaaatgggtagaaaaaatgtcatacctttcctcactcatcataaaggtcactcatagccaacacttgtagaaaaaaagacagattaacagaagaaaagcataacaaatttatttagtcaaagttttatgtgatatgggaagcttcagaaatgaagatccaaaaaaatgcagggaaaactctatttttatgcacagattggatgaagaatgggcagccatgtagatatgtgcttggacaaagggtttgacctaatggtaatgagcttagcggaggaaacctagctaagcctgtttgtttaaattcctcttggcctctttgtacagcattccttcctctgggtataraggaggacccctatggaatgagggttttatgacctaccatcagacaaggtaggggagaaaatttctttatgttcagctcctctacaggaaagggtggaggggtggaataatatttataggctttatggcttgctttgagagagagggcttataatttctctgacctaccttgtggaagacaaattctagtttctatgactcatgcaagg

SEQ ID NO: 645844 - DNA, 576 bp, Homo sapiens
gtgcaatgtaatctcggctcactgcatcactgcaacctctgcctcccaggttctagcaattctgctgcctcagcctcccgagtagctgggattacaggtgtgtgccacamcacactcggctaatttttctatttttagtaaagatagggtttcaccatgttggctaggctggtcttgaactcctgacctcaagtaatctgcccacctcagccttccaaagtgctgtgattacagacgtgagccaccgagcctggccagaactgagttttgaagagtaaacagatgtgtgatactagcactgttctgagaaggggctgagggaaaattgacttgtctagtgttcaaataaatggaatttttaaaaggttttgtaccaaaaataaatttaattcccattggtagaactatgtcatggttcttacacagatttggaatataacatgacctaaaagtgtcttctcaaatccttcatttatactgatttcaaaatgtacataaacaaaaaaattatcatatatagcaataatgtctctcatctgtttttagctgaaccaaacaatcctgctacatcacagc

SEQ ID NO: 645845 - DNA, 571 bp, Homo sapiens
tggcagaactatttacaatagctaagatttggaagcaatctaagtgttcatcaacagatgaatggataaaggaaatgtggtacatatacacagtggaatactatttggccataaaattagatccagtaatttgcaacaacatatatagaactagagatcattatgttaagtgaaaagagaaataagccaggaacagaaagacaaacatcacatgttctcacttatttgtgggatctaaaaatcaaaacactagaacttatggtcgttgagggtttttctttttttttgagaggaggtttcrctctgtcacacaggctggagtgtaatggcatgatcttggctcacggcaatctctgcctcccaggtttaagcaattcttctgcctcagcctcctgagtagctgggattacaggtgcccgccaccatgcccggctaatttttgtatttttagtagagaccgtgtttcaccatgttggcaaggttggtctcgatctcctgacctcaggtgatctgcctgcctcagtttcccaaagtgctgggattacacgcacgagccactgcacccagcctc

SEQ ID NO: 645846 - DNA, 571 bp, Homo sapiens
tggcagaactatttacaatagctaagatttggaagcaatctaagtgttcatcaacagatgaatggataaaggaaatgtggtacatatacacagtggaatactatttggccataaaattagatccagtaatttgcaacaacatatatagaactagagatcattatgttaagtgaaaagagaaataagccaggaacagaaagacaaacatcacatgttctcacttatttgtgggatctaaaaatcaaaacactagaacttatggtcgttgagggtttttctttttttttgagaggaggtttcgctctgtcacacaggctggagtgtaatggcatgatcttggctcayggcaatctctgcctcccaggtttaagcaattcttctgcctcagcctcctgagtagctgggattacaggtgcccgccaccatgcccggctaatttttgtatttttagtagagaccgtgtttcaccatgttggcaaggttggtctcgatctcctgacctcaggtgatctgcctgcctcagtttcccaaagtgctgggattacacgcacgagccactgcacccagcctc

SEQ ID NO: 645847 - DNA, 643 bp, Homo sapiens
aagggactcacagaacagccaaggaggtgtgacagtggtgacatgtagatgggacccactggtcctacacatttggcacctaccagaaactgctacacatatacagcaatgggacaggctcttcaaggtacaactgagatactggcttaggtacaatgccctgcacggatggggtgccattttataagatgaaataaacagctttaaccaatacagtgtttctgtgtccctaggagrcagaatacgtttgtgcagcaataagacaattgatatatgagtggtcccacttaaccatcactccaagtgtcccatttgggttttctgtgcttttcatccctacaaatctggattctgtggctccagaggtcctgcttcccaaggagggaatgcttccagcaagggacacagtgagtttcccagtaaccttttagatttagctgccactcagccactgtaggcttcttgaatgaagaagtcaacaagcaaggaaagaaaccaccatcttgttagagcagtggggctgcagatacacagtttttaccatgacagggaagagtataatcactggggtgtcttttggtacctccttgccatatcttgacagaaaattgacaagtacagtggtcatggactaagaaggaca

SEQ ID NO: 645848 - DNA, 597 bp, Homo sapiens
gaggctgagatggctgaattgacagaagtaggcttcaaaaggtgggtaataacgaacttcactgaactaaaggagcatgttgtaacctaatgctaagaaggaaaaagtgataaaacaataaaggagctgatagccagaatggccagtttagagagaaacataactgatgtaatggagataaaaaacacaagagaacttcacaacgcactcacaagtatcaatagcaaaatagaccaagtggaggaaagaatctcagaccttgaaaactatctttctgaaatttgacagacagacaagattagataaaaaagaattaaaataaattaacaaaacctctgagaaatatgggattatgtaaaaagactaaacttatgacagattgrggtaccaaaaagaggtggggaaagtggaaccaagtaggaagacatacttcatggtatcattcatgagaacttccccaacctagcaaggcaggccaacattcaaattcaggaaatacagagaaacccagtaagatactccacaaaaatatcaagccatagacacataatcattagattctcacaggttgaaatggaagaaaaaatattaaggaca

SEQ ID NO: 645849 - DNA, 515 bp, Homo sapiens
ctggctctcctttctcctcagctctcctttctcctcaggcccagagcctgtggaggacagaatgatttttgtggacccggccagggttccattgctctgttcagccttgggatgttgctcccttcatctaggctgctccagctccagccttggctcaaaagactcaaggtacagctcaggttgcaactctgaatgatgtaagccataagccttggtggctttgatgtagtattaaagctgcaggttctcagagtagaggaggcatgacagcttccacctagatttcaggggatgtatgatatggtttggctctgtgtcctcacccaaatctcatgtcgaactgtactttccaatgttkggggagcaagctggtgggagattactggctcatgggggtgaatttccccccttgccgtccacatgatagtgagttctcatgagatctgatggtttaaaagtgtgtggcacttccacccttgctctctgtctcctgctgccatgtgaagaacgtgctt

SEQ ID NO: 645850 - DNA, 644 bp, Homo sapiens
aggagagtggtgtgatctcattcactgcaacctctacctcctgggttcaagtgattctcctacttcagccccccgagtagctggaattacaggcttgtgccatcgcaactggataatttttgtatttttagtagagacagtgtttcatcatgttggccaggctggtctcaaactcctgacctcaagtggtttgcctgcctcagcctaccaacgtgctgggattacaagcatgagccaccatgcccagcaaaattttattaattttttaaaagaaaaaaatatacatcagaagataaaacaaagaagcaagttcagaaatgttaattaacttttccatgatcacagactatgaagtgaaaacaaataaggaaatacagatttctaatattaatgtctattcarctgactttggctaattcatttttgcattaacatgaacagggcctggcatgtggcacaggtactcagaatgagaggcaacagctgggaaagttcttggagggaagttccttgctgacagtggtttggtattaaatgccaccatttaacaggtaactcagggctgcacttggcattcaggggtctgttccaggtggaaaagggccaactctcagagaaccagaagctatgacctaacgaaactt

SEQ ID NO: 645851 - DNA, 481 bp, Homo sapiens
cgcaccaaaccaaaaccaacamaccaaacccaactctgcttaaagtggtggaaagatcaactctgcttggtggtggaaagatcagtgctttactgaacaggctgccatgccgctgggccttccatcatttatggaccacagaggagaaagatctaattcagcagctatgagctgtgatggtgcctgctgccctgaggtagctataaactacctcagagcacaggttaagtgcatccaaaccaagaagaaaataatcatatgcattttaaatcttagttttttttttaaataaggaagtcattgataaacgatgaaatatagctgtctcattaaaacaatattcaaaggatatgaaaaatagtcttttgtaggaagcctgtggctatttatatttctgaatcagtttttccatttatcttaggaaatcaaaacaatgattctgcatactgaattttaccatcaggattcaaatttgttttca

SEQ ID NO: 645852 - DNA, 540 bp, Homo sapiens
agataaagctacagacctctaaagataagattgtttacagcagtatctcttgtaatcatacaaaattcaaaacaacccaagggatgaaaaattgtaacatacacataatttggaatactgttggcactgaaaacaatcacattgaataaatcttataatcataacattaagtgaaaattagtatgaaattaattatataaggtttaaaaatatttaaagctaagtaaaaatttagaaggagtttacctattggacgaaggcaggggatgtgaacaaggaatgaaacacaagcaaaatgatcatccatatttcctatgttggttgtgcttgttttttttttttttcagacattttcactgttttcttttttctttatttatttttatttttttccccttttcccttcccctttccctggccttcactgggttttgaaaacttttggcagttattttcttttcctctaacatttaactttctcctggcttccattgttgctgatgagaagttaratgtcagtcttatcactgttacttgatg

SEQ ID NO: 645853 - DNA, 545 bp, Homo sapiens
ttagattgtctagagaagtgggttgctttgaaggatgagtgatctgatttagagcaagttggctacaaattctgttttttcaaaaactggatttgcaaattgaagttaaaacatatggggaatttttattagttcacttttgtttattccaaattgccttataaaggaaattaaagaaaagaaagaaagccacatggatatcaccaaatatgcactgtttttccatatttctttgctgcyttagcctatagcaagttaaaaaaatgtaattttaaaaagaaccaattatgataataaattcttgccaaatatatatatacaatttctataattaaagacagtttctataattaaaagtctattgtggtaaagaaatctttttcttcagaatatattttgtcaatgaatatactgaaatgaattatcttatagaaacagctctagtgaaaatcatctgtattttgctgtgtgtgaaattttagatgcatgtaattgcaagaatttcatattctaaaatttttatcagagtctgtaaggctggcaat

SEQ ID NO: 645854 - DNA, 635 bp, Homo sapiens
agcaaaataggaaactgattaacatatgtaaattagatgtccaagagccgacaagtattgggcatgctggatgcaggggcttaaggtagatatcaaggattcattcttgcccttttcatagctcaggtctcttttcttttgtgatagacgcatttgcagacaaagtcttctcttttattggaaagatgattgccagcagctccaagattacgttgctttctattagctcttacaagttttctaacttgagcacgaagagtgattctttctcccaaccattctggtaaaaagtcctgggatacaatctaactggaccaaagtcagtcatatacccagtgctaaaccagtaaatatgaccagagaaataagatattctgattggccactctacaccatgtgtctagccctgattcacagggtagggccatccacagtgaagccacatggactaaaacagaggaatggaggttccccaggaaaatcaaggaactactaccaaagaagacagaatcgacacagggtagctaaaatgatagatgttcactacagacrttaatacaatgcacctggcaatgttggtgaactatgtaatcagttaaggaattttatgaagtcctgagtataagcttaaaacc

SEQ ID NO: 645855 - DNA, 572 bp, Homo sapiens
agtcccagctacttgggagtctgaggcaggagaatggcatgaacccgggaggcagagctttcagtgagtcaagatcacgccactgcactccagcctgggcaacagagcaagactgcctctcaaaaaataaataaataaataaataaactacctgtgtatgaaaccattgttttaggtactttgaaaaacaaagcagatgaattaggtgagtacaatttttaaggcatgtatagctcattctttgtaccgygcaatgtattgaatgatgtaagttgggtgtgtgtgtgtgtgtgtgtgtgtgtgtgcgcgcacacacattcttcacattcagagaactgatcagagcctttgcggaaggggtactattagacaggcccgcagtgatgaacattttgttttgttcgtgccaggcaaatatcccatcctcattactctccttcactctcaatctatgtggttttcattggaaagaacccaaccccaggtttagggttaggacaatgacacaatcctgcacatttgtatttaaggctggccatgtgatctaagccacactgatgagaattggccct

SEQ ID NO: 645856 - DNA, 622 bp, Homo sapiens
gcctgggtaacaatataatttgttcaatatattgctactgattctcatagaattctcccaaatctcattaatcagtccatgaggacttcatctttccactccttgaaagccatgtttttttcagcattctatgtatgcataagttttgtggttgtgctgtgtcctccccaaagtcactgaccaaggtgtggggattagagaatgaaatgtaaccagtgctactagtcaagccacatcctgggaggctgcatggtcctggagaaaggcacatctgcttatgattggtctacttggaggggcatttattttcggttacttattcacagggtataagaaagagtctccattttttatgtgctggtgatagctttcaaccctgcctgtcccgtttgccctctggcctcacatctgggcaagcggatacatcacaagtggtcctcccttggcacctggaaagatcaagccacacaaggccctgctaacaaagaaccttcacttcaaccccacaccctagccatcataaaacccccacatcattctcgttcccgggctctctcaatctgtttttagttgtgcctaagagataccatrctcttcccggaagtctcactgtgtgagtttt

SEQ ID NO: 645857 - DNA, 543 bp, Homo sapiens
ttcttttgagaagtgttgtgttcatgtcctttgcccactttttaatgcggttgttttttttttttttttgtaaatttgtttaarttccttgtagactctggatattaggcctttgtcagatggatagattgcaaaagttttctcccattctgtaggttgtctgttgactctgatgatagttccattggctgtgcagaagctctttagtttatatacttgcattttgatagaaaggtagatataagctttctaagaagctgtaaccttgaagaaaatggacagtaggcaatcttagctggtatgtaagtaatcaatgctttttctgatcataactttaatgcacagtaatttaatggacagtactgctaatttagttttttccagcatcatttgtacaaagtctcctaaaatccatcacagttgagaacagtctagacagttattatgacacaatcaaaaggaaagctggcaaataaaaaaagaaaagtgaatagaagagctgattaaaataacagtatagtttataggaggcttctcttaaat

SEQ ID NO: 645858 - DNA, 543 bp, Homo sapiens
ttcttttgagaagtgttgtgttcatgtcctttgcccactttttaatgcggttgttttttttttttttttgtaaatttgtttaaattccttgtagactctggatattaggcctttgtcagatggatagattgcaaaagttttctcccattctgtaggttgtctgttgactctgatgatagttccattggctgtgcagaagctctttagtttatatacttgcattttgatagaaaggtagatataagctttctaagaagctgtaaccttgaagaaaatggacagtaggcaatcttagctggtatgtaagtaatcaatgctttttctgatcataactttaatgcacagtaatttaatggacagtactgctaatttakttttttccagcatcatttgtacaaagtctcctaaaatccatcacagttgagaacagtctagacagttattatgacacaatcaaaaggaaagctggcaaataaaaaaagaaaagtgaatagaagagctgattaaaataacagtatagtttataggaggcttctcttaaat

SEQ ID NO: 645859 - DNA, 605 bp, Homo sapiens
aagaaaaaaagaaggaagaaaaaataatgaaataaaagaagcaagtagggaaataaagttacatatgtaatattttgcagcctaatttcattatgttagggcagataatacatctktatcttttaattctgtggtatccagaatcatgctttgttacgtcgttataagcccataaatttgtacgaagtgaagaaagaggataggcaggcataagggcttactgactggtaggtttcttttatgttaaacttatatacatttctactatattgtacttttgaatatgctgtgtaactgcttctaatatcatttatttatattaacataaatattacaatatcctcatattacaaaatatgaggattctggttaagaatttatagtttaccatctccactatgttaagataatatgcatgggaaatgacctttgaaaaagctatttgaagagcttggtttctaatgccattctctaatgaaataaactttgagaaatgactacttctaggcattaaggcagggaatagacacgatgattctggagcatctttagtgccagagagtaagtgctcataaaacaaaatatgtgtatttggcaaagagaca

SEQ ID NO: 645860 - DNA, 554 bp, Homo sapiens
catcaaaaattcacagcagatttcaacctgcttgagaaatgcttaatttaaatagaaataaaatgtgcttacatgaataaaaattagtgataactttccatttcctgatatgcatattgtgacattaaaaattatgtaacattttatttaaggtatatagagaaagtgtcatcagtaaattgttgtttcttrtccactaaaacttgcttttagatattctatattgccaaataactcttactaattttttttttgtttagttttctttgttgtacttcttcaaataatggttattctctggaatttccagcaacgtggtgaactaagttgatctaaatgtactctgaatactgagaaatactggggaaaatatgtgcagaacaactgaattatgaaaaaggaaataaaaatatccatattccacaaatgaagaagtaaaataatgttggttttgagggtgccagtctatgcagctcagatagttccagaattttagcaccaaggtaacaaaaggacataaactacagtccttctggatgagaggatgatatgtt

SEQ ID NO: 645861 - DNA, 571 bp, Homo sapiens
agcaaaaattaataaaatggaaagcaaaaatattgtcttcagagctgtttaagaagaccacatagacaacacaatatgcaacatcagtaatgaggaggtgtttactcagagaataaagagatttaacaagtttaaatgaataccaactatacatttataccaatgcgttttaaaatgtggcttagataagtaactcttgtgaaaatattagcaatttgggttcaagaatagttagaaacaataaggaaagacagagttctttctcycagcttgcccctgacccgcaggcaccagatccaatgtctgagcagtaaatccaatccaatcgaatcttcgaggcacagaaaattcaagacattgaagctactgcaaagcatagataaattagttgctagaaatttactcattcatacaaattaacaactcattctatgaaagtggtaagtcactaattctgagagtgttgaaagatagcactaaaaaataaatttacagacttttcttacatatgaacacagaaccaaaaatatgtaaaaccatcatctaacataatctagcagaaccttaaaac

SEQ ID NO: 645862 - DNA, 571 bp, Homo sapiens
agcaaaaattaataaaatggaaagcaaaaatattgtcttcagagctgtttaagaagaccacatagacaacacaatatgcaacatcagtaatgaggaggtgtttactcagagaataaagagatttaacaagtttaaatgaataccaactatacatttataccaatgcgttttaaaatgtggcttagataagtaactcttgtgaaaatattagcaatttgggttcaagaatagttagaaacaataaggaaagacagagttctttctcccascttgcccctgacccgcaggcaccagatccaatgtctgagcagtaaatccaatccaatcgaatcttcgaggcacagaaaattcaagacattgaagctactgcaaagcatagataaattagttgctagaaatttactcattcatacaaattaacaactcattctatgaaagtggtaagtcactaattctgagagtgttgaaagatagcactaaaaaataaatttacagacttttcttacatatgaacacagaaccaaaaatatgtaaaaccatcatctaacataatctagcagaaccttaaaac

SEQ ID NO: 645863 - DNA, 603 bp, Homo sapiens
ccaggaataagcagaaggtggcggccttcacatctccaaacaaagcctctgcaggacacattcctcagttcaggatgactttagcctctcaggagtctgatcaagctgaacgtgacatctggatttgcttttctgttcctgtgacccgggtctgacccattagctccctctcaggccatggggactggatcatgactgggtgcatgactcaaggcagtccaatgagactccaccccaggacctctcttggaaccattatagaaaggaagcccttttccactgagagtttgggtaagatgatggtgaaagcctggaattgccagagaccactgcaccggaagatcctacatgagaatgaaaccagcacagagggaagcagaacaagaagacagagacaaagtgctgacaaaaatcacccttgctcctggatccagctgtgcctgaagccatcccaaccctgggacttttcaggtataggaacttactctctyttaagcttaagttgatttgagttgggggttctgtcattagcaactgaaatagtcctactagaatgtgaaaacccatctgtcagtcttgtctcttttaccagttcccagaact

SEQ ID NO: 645864 - DNA, 606 bp, Homo sapiens
taattcattcccttctgtgagtgagtggtattccatcatatrcatataataccacaggttctttatccactcgttgattgatgggcacttgggttggttccacatttttgcaattgtgaattgtgctgctataaacatgcatatggaagtatctttttaaatttaatttaatcttatttattatatttttacttttaagttctgggataaatgtgtagaatgtgcaggtttgttacataggtatacatatgccatggtggtttgctgcacctatcaatccgtcatctaggtttgctagagaccagttgtgatcatttggagacgaggcattctggtttttggaattttcagcatttttgcattgttttttttctcatcttcatggatttatctacctttgatctttgaggctgatgacctttggatggggttttcatgtgggggtccttcttgttgatgttgatgttattgctttctgtttgttagtttttcttctaacagtcaggctcctcttctgcaggcctgctgtagttgaggtccactccagaccctgtttgcttggatatcacccatgtaggctgcagaagagcaaagactgccacctgc

SEQ ID NO: 645865 - DNA, 606 bp, Homo sapiens
taattcattcccttctgtgagtgagtggtattccatcatatacatataataccacaggttctttatccactcgttgattgatgggcacttgggttggttccacatttttgcaattgtgaattgtgctgctataaacatgcatatggaagtatctttttaaatttaatttaatcttatttattatatttttacttttaagttctgggataaatgtgtagaatgtgcaggtttgttacataggtatacatatgccatggtggtttgctgcacctatcaatccgtcatctaggtttgctagagaccagttgtgatcatttggagacgagrcattctggtttttggaattttcagcatttttgcattgttttttttctcatcttcatggatttatctacctttgatctttgaggctgatgacctttggatggggttttcatgtgggggtccttcttgttgatgttgatgttattgctttctgtttgttagtttttcttctaacagtcaggctcctcttctgcaggcctgctgtagttgaggtccactccagaccctgtttgcttggatatcacccatgtaggctgcagaagagcaaagactgccacctgc

SEQ ID NO: 645866 - DNA, 611 bp, Homo sapiens
aatgaaggataaatgtcacctgtgcatctcaayagattcagaaaaaaagttttcacaaaatttaatacccattttatgatgataactcctgccaacctagaatttgagaaaaatatttcaacattttgaaggccctatatgtaaagtgcatagctaatatcatgctatggaaaaagctgaacttttcctctgacatcagaaacatggcaaggatgtttgcacttgccatttctatttaacccttgtcctacttaaagctcttaggcaaggaaaagaaattaacaacatacagattgtaaaagaagaagtacaatggtccctgtttgcctatggcatgctctaaagaatccacaaaaaagcctcctaaaaccaagtaaagttgcagggtacaaaatcaacatgcaaaaatcctcctatattcatttattaaaagacttcatatagttaaaatatttgtatttcacaatgtgatctgcagatttagtgcaatacctatcaagacctcaatggcattttagaattaggaaaacaatgatactaaaatatacatggaaccacaaaaagccctgaatagccaaacaaatcttgagcaagaaacagaaggccagagg

SEQ ID NO: 645867 - DNA, 611 bp, Homo sapiens
aatgaaggataaatgtcacctgtgcatctcaatagattcagaaaaaaagttttcacaaaatttaatacccattttatgatgataactcctgccaacctagaatttgagaaaaatatttcaacattttgaaggccctatatgtaaagtgcatagctaatatcatgctatggaaaaagctgaacttttcctctgacatcagaaacatggcaaggatgtttgcacttgccatttctatttaacccttgtcctacttaaagctcttaggcaaggaaaagaaattaacaacatacagattgtaaaagaagaagtacaatggtccctgtttgcctatggcatgctctaaagaatccacaaaaaagcctcctaaaaccaagtaaagttgcagggtacaaaatcaacatgcaraaatcctcctatattcatttattaaaagacttcatatagttaaaatatttgtatttcacaatgtgatctgcagatttagtgcaatacctatcaagacctcaatggcattttagaattaggaaaacaatgatactaaaatatacatggaaccacaaaaagccctgaatagccaaacaaatcttgagcaagaaacagaaggccagagg

SEQ ID NO: 645868 - DNA, 612 bp, Homo sapiens
atataaaattttaaaaagtgaggtagcgttaaattataccaataacttctggcttagataacttccattggaggttataccacttcaatgtttactgttataataattatagggggataaagtacattattctcatttagaacacacttcatagtgaaaagtaaatagacttttaagtcaaacagacctagwttaaaagtcagttctattttttgcgagatgtatgcacacatataggttaacttcattcttctcagtctccatttcttatctgtaaataggggtaatactaatacctgtattgaagttgctcttgcaccgtttagattaaagtacattaagtgataaaacacatgtacaatgcctaggatagtacctcatacttagtgacattaaacaaatagtaggtaccatattaaaagataactaatgatttaaatatgggtgggacacctctacgtgtatatttgccaagactttttgtttctctaatcccttacttttgagtaattttcagtctactgagtgctaagattcagacttgatatttttatagcatattaactaggtatattttcttttggaggaatttgctcctttctaaatatgggt

SEQ ID NO: 645869 - DNA, 552 bp, Homo sapiens
aatttcacaattaaaataaattacagcttctttttcctaattttaaagaaaagaaagagctaaaaattatatcaaaaatataatgaactataattaatactctgtatgttattttcttcccaatagagaaattttactcattgccattctttttgcctgtatttacatttttcagatttttaaaatttattataggtacataatagtcrtatatttttctgaagtaactgtaaatttctttaatacacatgtctcactctattgcccaggctggagtgaagtggtgtgattacagctcactgcagccttgacctcccaggctccagttatcctcctatctctcagcctcctaagtagctagcgctacaggtacacaccaccatgcttggctatttttcttttcttttttaattttttttctaaaaacagcgttttgccatgttgtccaggctgggcttgtggtgttttgataaaggcacacaatgtgtaatgattaaatccaggtaactggggtatccatctctattaggctgttcttaaattgctgtagtg

SEQ ID NO: 645870 - DNA, 522 bp, Homo sapiens
agacaggccctaactctcttcaattccctgaaggctgagagaggtgagggagatgcagaaggaaagttggatgctaatagaggttggttcatgatgtttaaggaaagaaggcatttccagaacataaaagtgcaaagtgaagcagcaagtggaagctgcagcaagttatctggaagaactagctaaggttattgatgaatgtgggtacactaaacaacagaaaaacagtcttatatttgaagaagatgtcmcttcggactttcatagctagaggagagaagtcaatgtctggcttcaaagctttaaagatcaggttgactctcttgttaggggctagttctgatggagagatacaaggagagtaatgttgttttcatgcttgctaacacaacatccattctgcagcccatggatcaaagtgtaattttgacttccaagtattattatttgagaagcacttttgtaaggctatacctgctatagatcatgattcttccgatggatctgggcaaagtaagttga

SEQ ID NO: 645871 - DNA, 522 bp, Homo sapiens
agacaggccctaactctcttcaattccctgaaggctgagagaggtgagggagatgcagaaggaaagttggatgctaatagaggttggttcatgatgtttaaggaaagaaggcatttccagaacataaaagtgcaaagtgaagcagcaagtggaagctgcagcaagttatctggaagaactagctaaggttattgatgaatgtgggtacactaaacaacagaaaaacagtcttatatttgaagaagatgtcccttyggactttcatagctagaggagagaagtcaatgtctggcttcaaagctttaaagatcaggttgactctcttgttaggggctagttctgatggagagatacaaggagagtaatgttgttttcatgcttgctaacacaacatccattctgcagcccatggatcaaagtgtaattttgacttccaagtattattatttgagaagcacttttgtaaggctatacctgctatagatcatgattcttccgatggatctgggcaaagtaagttga

SEQ ID NO: 645872 - DNA, 587 bp, Homo sapiens
caaatctgtaactgctcatcttcattcacattattgcagttgataacttttcagtctttcaaaaatatggaactcttctgtcatccagtttctgttgaacccatatgttgtcaaagaaaaaatgcactagacagaattaaacaggccggaaagaattaattcaagactattttgataggggagattcaactcaactccaatgaaacaaacatggaagagtttccacttgatggggtagctagtgaaaaagtgctggaggaagttaggcatgtaattaggccatctatatttactaattggtgcttatagaagttagaagttaggctcctaccctctcacgcagcctgaaagataggacactatctccttaaatgatcacattttgaagagatggcgcccaagtcctgaggaagggtkgtaaaactaactagaggcttggagaagatttctgtacatttcagaggggcagagaaagaattgcagttacagattctctaaagtaaataaaatggaagtcaagagcttatagtgggaataagccagtctaaaatttagtcaaacagaaggaaatattaaggtcattaggc

SEQ ID NO: 645873 - DNA, 571 bp, Homo sapiens
acactatctccttaaatgatcacattttgaagagatggcgcccaagtcctgaggaagggtggtaaaactaactagaggcttggagaagatttctgtacatttcagaggggcagagaaagaattgcagttacagattctctaaagtaaataaaatggaagtcaagagcttatagtgggaataagccagtctaaaatttagtcaaacagaaggaaatattaaggtcattaggccatcttkgttaaggccgtgacagtcctccattgtaaaactcctttagtatagtgacaataacatacttctgatagtatgttgcactatatctcaaaaggagaggaggagtaaatattcgtcaagtacaatgttcattatttctttttctgtgtatgcacagattgactataagtagctcttccccactccccaaggaatcataaattctgggacaggtttttgaaagtgttattatgcattatataatatgattggtatattattatttttctgaaagatttaaagctgataggcattaggcttattttcccttatgaccaggctgaagcacaggtctac

SEQ ID NO: 645874 - DNA, 594 bp, Homo sapiens
ctacgctgatttggagcagaggtttataaccacatgagaagagttagtaaactccctactacctaagacagaaaaagaagaacactttttctgagatagccccaccctaataccctggagcacaaggtttgtatcagatttaggtggacaagaacatgagaagccttgtgcaaaggcctttaccataagcctagaaagaaataacatgcagaagtagtctattactgacagaacaagcagagcatggatagagactctctctgtagaaaagtgaagagaaatagcagaaagtctagggaatatgagaacatatgagamtattaaaatattttttaaattatacatgaaaatatcttttctgccataatatctatataaagtacatgatttccagcaacctaacaaataagagaataaataaatgtttactcattaaaaatgacaagaggaaattcaagtttttttattcttttttatcaaatatatatgttgaaggcatttcattttttttaattccagcataaaaatatactgagctctcagaaatgttataagtaatcaaccatgtatttcaacgtaaatcagtcatcataa

SEQ ID NO: 645875 - DNA, 601 bp, Homo sapiens
acttacgtttttcttacaacaatacaagctcccacattgaggtttagacacagagtcagaaacatttttttcagatcacgctgtcatttgtctgctcaacaattcagtgactcaattgttgtaagaagaggaaattcaaactccactgtgtgggctgatccatgtgacctgccaccaaaggcagcaaagactattctrtgttctcacctacaatgcttcaagcatcagtcagtttttctttttctttgtttgtcactgcaaagctgttgacctacacgtgatatgcgctgtgacacacaggtgccgagaatttcaatggcaggaggttacaggggtgcatggctgagataggagagagggaagaaaaatggaaaagagtgggacaggcatttttcaattgctcaaaatataagtatgggcaattttttttttttcgtttgagacagagtctcactctgttgcccaggctggagtgcagtggtgcgatcttggctcactgcaacctccacctcccgggttcaagagcttttcttgcctcagctgctcaagtagctgggactacaggcacgtgccaccatgcctggctaatttttgtattttt

SEQ ID NO: 645876 - DNA, 601 bp, Homo sapiens
acttacgtttttcttacaacaatacaagctcccacattgaggtttagacacagagtcagaaacatttttttcagatcacgctgtcatttgtctgctcaacaattcagtgactcaattgttgtaagaagaggaaattcaaactccactgtgtgggctgatccatgtgacctgccaccaaaggcagcaaagactattctgtgttctcacctacaatgcttcaagcatcagtcagtttttctttttctttgtttgtcactgcaaagctgttgacctacacgtgatatgcgctgtgacacacargtgccgagaatttcaatggcaggaggttacaggggtgcatggctgagataggagagagggaagaaaaatggaaaagagtgggacaggcatttttcaattgctcaaaatataagtatgggcaattttttttttttcgtttgagacagagtctcactctgttgcccaggctggagtgcagtggtgcgatcttggctcactgcaacctccacctcccgggttcaagagcttttcttgcctcagctgctcaagtagctgggactacaggcacgtgccaccatgcctggctaatttttgtattttt

SEQ ID NO: 645877 - DNA, 555 bp, Homo sapiens
gacaaaatctgggggctgaacaatcattgtgtactgtaattatgccaataacaacggtaaggaatccttataagggaawttgatattgcagtaataagtaataagaggtcgactgaaggaaaaagggaaattaagagcagggaagaggagactgaggcacaaagagagggaagtgagaagcagagaatcagagagaaaatgggggaaatggggacaaaggagccagcctagaaaggaggagagacgggagactgaagagaaaaaaatagacataggaatagaagtggggatctaaggggtagagcgtggtagacagacagattgagacagaaaagagacttgaaaattggaacagacataagggagagactgagaaggttagatttcagaaacaacaacaacaacatgattttttaaaaatgaaccagccaaagagaatactaaaattgttatcttaacccttagaccttacatcaagctttaaaaaagcaaaatgcatgttcacagaccaatgtttcatttgtataaatgaatacaattttgaatcataatttt

SEQ ID NO: 645878 - DNA, 554 bp, Homo sapiens
tgtgccaaattggaaacaatggctgttttccttttctactgtgaatgtcaaatcagtaatttactgacctaaaagagtctaatattttaactaactaaatgatgaatattacttcgaagatttatcttggactactgtaactgtttgtttgtttgtttactcattcattttagagacaagatctcactatgttgcccaggctggtctcaaactcctgggctcaagcgatcctcctgcctcagcctccctgggccactgtgcctggcctgtaactattttaaaaatgtgacacaggtttaatattccttatctaaaatgcttggaaccagaagtgttttcgatttgcgattttattttttttaatactygcattacgcttaccagttgagcatccctaatctgaaaatccaaatccaaaatgctccaatgagcatttccttttaacaccatcttggcactcaaaaagtttcagattttagagcgtctcagatttcgtattttcagattaaagatactcaacccgtatcaactatgtacagcatattaagacgtgt

SEQ ID NO: 645879 - DNA, 499 bp, Homo sapiens
tttcctgaaacagtcaatcagtgtagcaaacttgattgttgtcttgttttatgaaactgtcacagcaacccccgccttcagcaaccaaccaccaccttaattattcagcagccatcaacactgaggcaagaaccttgactatcaaaaagattacaactccctgtagggctgagatgattcttaatattattttaacaataaactatttttaattaagtttacccacttttagaaataatactgcatatttrgtagactacagtgtagtgtaaacattaacttttataggcactgggaaaccaaaaacactatgtgtagccttactttatcacaatatttgctttgttgcagtgatctggaaccagacccacagtatctctagaggtatagcctgtattctacagaaacccatgggcctactgagaataaatattgacagagtacctctcttattactatctcccattgctcaatcattttggagctcacaatatacatg

SEQ ID NO: 645880 - DNA, 548 bp, Homo sapiens
ggtatttcaagagaaagagagaccacattcacataacttttactacagtatattgttataataattctattattagttatgttcatataattattagtaaaaggaatataattatattcctatataattatagaagtatactactcctatamataatatattagtataactaatataattctattatcattagtagtgttagtttaactaataaactaatagaattattaaactaatataattagcctattagtttaatactactcccataatgagtatattagtttaaacaaatactactactataataattagtagtagtttaactaataaactactataattattagttaaatttcactatgcctaatttttaaattacagtctattataagtatgtatgtgtaggaaaaatagtacatgtttactatccactgtttcaggcatcaactgggggtcttaatacatatctttttacagataagggtggagctacagttaccttccaaaaggtagtattgccactgccattgttgcctgctaatgta

SEQ ID NO: 645881 - DNA, 600 bp, Homo sapiens
tggcaggcagtaattaccattgtgaggcataaggctatctctctctttttcttaatacaagggaaatgaatagtgtctttttcatcctgatcatcttctggctttgacactgagaatggaggctctagggacaatgaaacatgtctttgtactctcagtctgtgtctttaagaaagaaaaatgataatagaaacatactaggttggtgcaaaagttattgtggtttttgccattaaaagtaaccatcaaaaactgcaattacttttgcaccaactgaataattcaatgtgtctgaatctattaggctatgtcctggcatcagaacaggtttcagaacttgtaactctcaaactcacacctgaaattcactatatttagggctttggggagctgtccctgagtctcctgaaattgatataaaattatgtttatctacatgttgtaagagaaagacttcaacattttttcatattttaataaggttccctgtcatgaaaatgttaaaaactgataatcttmggttgcctcacagaatactgaatctgagatcccactccagacctgcagctgcaattcctactgacttaggaattaaatggg

SEQ ID NO: 645882 - DNA, 530 bp, Homo sapiens
agatctggttgtctaaaagtgtgtagcacctcccccttcactctctcttctttcttcttcaaccaggtaagacgtgcctgcttccccatcaccttctgccatgattgtaagtttcctgaggcctctttcctaaggtttctcttttctttataaattacccagtctcagatagttctttatagcaacgcaagaacagcctaagacaccaactttccaaactctactttttatctaacaatgaaaataagagaagaatgagatatgagtgatttcttataattttatgttgactcagaatccattttgaatataaggtgcgctttctcataccaaagcagggcttggtcaccattgacagtttccatctatctgcctcttccaaattcctcagtatggtcgatctagatatctgccttacacaacttaytcctggtgaccacctccctatgggacagctagatacaacacacttgattcaccccactgactcccaaaccctgcacggactatgcagatacattgcagtgacc

SEQ ID NO: 645883 - DNA, 386 bp, Homo sapiens
attgaagcataagtttcaaagcatcaagctttgttgagccagcttgaaggcatacctgggaaaatagagagtcacagaagcatgtgtgactgttttttccaaagaggttcttaggaggtttagtatttatatattttccttaaaaggcaggggaggtggtggggcagcagtgagacaaatgattacatacttgtaaaactttagttagtgcctggtaaatctacatcttacataaaataaggtgagcataatgaatctcatctggactgttacgtatctgggaagataagctagtagtcttttggaaaggctggtttctgtttagctgttaaggaagaaaacctaacgactgttagcragggtggggatataatgaggcatatgcc

SEQ ID NO: 645884 - DNA, 411 bp, Homo sapiens
ttcagtgtcaaatgtagtagggtcaaggcaacatgaccacatacatatcacctctggttggaaacttcaggcctcgcttgggttagaaagaaaaagagaaagtggctgttttcaccatttttgaagtacagcctgattcccaaagaattccagctggctgttcttttcctgtcctctgagcattacctttacctatgagtagctactacgtaggctgrtacaaatgcccagctagaggtcagaacactgacgagcaccaaaggcaggtcaatggaaagagaagagcagacctaagcagtccttacccaggaggtcactctgaggaagccagtccacaattttcacatttgtggccaaatgaacatctctgggccaatgagaactctgacatgtccatatcactccttgagg

SEQ ID NO: 645885 - DNA, 562 bp, Homo sapiens
atgggttacctgataaatgggttaagcagcatagccaattgtgatatacgtttcctccaaaatccaaggagacaaatcaagacttttgcatttttcaaaattgcagatggtacaggaagcctcttacttaaaaatgacacccattgacccttggaattcagatgtcttagataatcaactcacttctcaactctactatgacagagaaaggaaattgacgtagctctgcagcaggacaccaagcatgatcttagcctaacttaaattatcattcttttctaacttacagaaataagttgcataatagatgccaagattttcattatttcaataaagacgccacacctggagcataagccatgattagcatcmccacctacgaatggtatcatggtaattctttataattcatctgggtttagtgatgattaaaaggtgtaaatggagataagatagcgaatatcagctctgaatctctcaagtcttttatggtaacagtaatctctacagttcagtctaggatgtaatactggtatggctcaccttcttgtaaagtgtggac

SEQ ID NO: 645886 - DNA, 562 bp, Homo sapiens
atgggttacctgataaatgggttaagcagcatagccaattgtgatatacgtttcctccaaaatccaaggagacaaatcaagacttttgcatttttcaaaattgcagatggtacaggaagcctcttacttaaaaatgacacccattgacccttggaattcagatgtcttagataatcaactcacttctcaactctactatgacagagaaaggaaattgacgtagctctgcagcaggacaccaagcatgatcttagcctaacttaaattatcattcttttctaacttacagaaataagttgcataatagatgccaagattttcattatttcaataaagacgccacacctggagcataagccatgattagcatcaccmcctacgaatggtatcatggtaattctttataattcatctgggtttagtgatgattaaaaggtgtaaatggagataagatagcgaatatcagctctgaatctctcaagtcttttatggtaacagtaatctctacagttcagtctaggatgtaatactggtatggctcaccttcttgtaaagtgtggac

SEQ ID NO: 645887 - DNA, 608 bp, Homo sapiens
tatcagtaatttcaaactttttttactgtgcaagcaaggctgagattccttgctttaaccacttttggcatcttttatgattaaattaaaccataaaccaycgtttttttgttaaattaaaacaaaattttaccatttaattttatttttattgctttaaaattatagattatttgaagatgaataatcaccttaaacatatctttgagtttaataaaatattttacatcagtaatatttttactgttttttggcataattgttataaaaagccaaaatgggcagatatactggaatctcaattatgttctagtcacttaattgaaatagccattatctccaaattgccaaatacaataaacctaggattgacaaaccatttcttaaaggggcagtatagcaaatacattaaggtcatttgctgtgtagtctctgctagagctattcaactgttttgttgtagcttaaaaacagccatagaccatatagaaacaaatacatgtgtatgtgttccaataaaattttatttacaaaaatacatgtcattctatgtaccacgagatcccacttctgaaaaagcattattgctgacttatttgaccagatga

SEQ ID NO: 645888 - DNA, 608 bp, Homo sapiens
tatcagtaatttcaaactttttttactgtgcaagcaaggctgagattccttgctttaaccacttttggcatcttttatgattaaattaaaccataaaccatcgtttttttgttaaattaaaacaaaattttaccatttaattttatttttattgctttaaaattatagattatttgaagatgaataatcaccttaaacatatctttgagtttaataaaatattttacatcagtaatatttttactgttttttggcataattgttataaaaagccaaaatgggcagatatactggaatctcaattatgttctagtcacttaattgaaatagccattatctccaaattgccaaatacaataaacctaggattgacaaaccatttcttaaaggggcagtatagcaaatacattaaggtcatttgctgtgtagtctctgctagagctattcaactgttttgttgtagcttaaaaacagccatagaccatayagaaacaaatacatgtgtatgtgttccaataaaattttatttacaaaaatacatgtcattctatgtaccacgagatcccacttctgaaaaagcattattgctgacttatttgaccagatga

SEQ ID NO: 645889 - DNA, 575 bp, Homo sapiens
ggagctaaatgatcctttgttataggggctgacctgcacattgtaggatgttcagcagcattcctagtgcctatccatcaggttacagtggcactaccccaaatgacagcccaaaatgtcccaggcattgccaaatgtcccctgggaggcaaaactgccactgcttgagaacccatacatggccttacccacaaaatgtcactgtactgactctccagtagtgtttcccactatcccagcctaactatggtctagggactccagctgactgaattaaaagatggactcgctggcctcagagaacttacattccagagtgaaaataaaatcagaaaccaagggaaacaagtaatgtgactatgatcttggcgaggagcttcagagccttaaaggagcagtcaccttgcccttaaggtgaaataccaaggaccaaggagtagaaaaaatctgcaggaacccctttaacccaatggrcaggactcctggtttcacctctctccaaacaaccagcttagataaaaagctacgctaagctcgcagcactgggtggcttgtctgtatgctcctgtgtactt

SEQ ID NO: 645890 - DNA, 562 bp, Homo sapiens
gggtgatgccacagtgtgaagtgaaagcaagtttattaagaaagtaaaggaggaggggcacsgtggctcactcctgtaatcgcagcactttgggaggccgagacaggtggatcacgaggtcaggagatcaagaccatcctggttaacacggtgaaacctcatctctactaaaaatacaaaaaaattagccaagtgtggtggcgggtgcctgtagtcccacctactctggaggctgaggcaggagaatgggatgaacccgggaggcgaagcttgcagtaagccgagatcgcgccactgcactccagcctgggtgacagagggagactccatctcaaaaaaaaagagagaaagtaaaggaataaaagaatggctaccccatagacggagcagccgtgagggctgctggttgcccatttttatggttatttgttgatgatatgctaaacaaggagtggatttttcatgcctcctctttttagaccatatagggtaacttcttgatgttgccgtggcatttgtaaactgtcatggtgctggtaggagtgtagcagggaggatgatg

SEQ ID NO: 645891 - DNA, 562 bp, Homo sapiens
gggtgatgccacagtgtgaagtgaaagcaagtttattaagaaagtaaaggaggaggggcacggtggctcactcctgtaatcgcagcactttgggaggccgagacaggtggatcacgaggtcaggagatcaagaccatcctggttaacacggtgaaacctcatctctactaaaaatacaaaaaaattagccaagtgtggtggcsggtgcctgtagtcccacctactctggaggctgaggcaggagaatgggatgaacccgggaggcgaagcttgcagtaagccgagatcgcgccactgcactccagcctgggtgacagagggagactccatctcaaaaaaaaagagagaaagtaaaggaataaaagaatggctaccccatagacggagcagccgtgagggctgctggttgcccatttttatggttatttgttgatgatatgctaaacaaggagtggatttttcatgcctcctctttttagaccatatagggtaacttcttgatgttgccgtggcatttgtaaactgtcatggtgctggtaggagtgtagcagggaggatgatg

SEQ ID NO: 645892 - DNA, 562 bp, Homo sapiens
gggtgatgccacagtgtgaagtgaaagcaagtttattaagaaagtaaaggaggaggggcacggtggctcactcctgtaatcgcagcactttgggaggccgagacaggtggatcacgaggtcaggagatcaagaccatcctggttaacacggtgaaacctcatctctactaaaaatacaaaaaaattagccaagtgtggtggcgggtgcctgtagtcccacctactctggaggctgaggcaggagaatgggatgaacccgggaggcgaagcttgcagtaagccgagatcgcgccactgcactccagcctgggtgacagagggagactccatctcaaaaaaaaagagagaaagtaaaggaataaaagaatggctaccccatagacggagcagccgtgagggctgctggttgcccatttttatggttatttsttgatgatatgctaaacaaggagtggatttttcatgcctcctctttttagaccatatagggtaacttcttgatgttgccgtggcatttgtaaactgtcatggtgctggtaggagtgtagcagggaggatgatg

SEQ ID NO: 645893 - DNA, 466 bp, Homo sapiens
ttaaattcttggtctcaagtaatcctcctgccttgccctcccaaagttgtgggattacaggtgtgagcaatcatgcctggcctcctttaattttttttttttttttttttttttttttttgagacggagtctcgctcttttgcccaggctggagtgcagtggcacaattgtatttttagtagagacggggtttcaccatgttagccaggatggtctcgatctcctgacctcgtgatctgcctgccttggcctcccaaagtgctgggattacaggcgtgagccaccgcgcccggccggcctcctttaatttcttaaccataaatatcctccccccacttttattatggacrttctgaagcacataaaaatagggagcatagtataataaatttgtacatatttaacactcagcttctataattagaaacaaatggcccatctggtttcatctaggcctctttgctat

SEQ ID NO: 645894 - DNA, 619 bp, Homo sapiens
cccacgtgcaccagactgacgcctcactgcacacctgcctgttacccacgcgcaccagactgacatctcactgcacacccgcctgttacccatgtgcayagactaacacctcactgtgcacccacctgttacccatgtgcacagactgacgtctcactgcacacccgcctgttacccatgtgcatagaccaacacctcacggtgcacccacctgttacccatgtgcacagactgacgtctcactgtacatccatctgttacccatgtgcacaagcagcctgctccttcacagcccagctagagtgtgcaatgggatgtcaacccagctagaccatgcaatgagatattacttggcaatcagaaaggacacagctctaactcacgctgcggtgtgggtgagcctcaaaagcaccgtactaagtgacagacgcaagacacaaatgttccacatgttacatgactcagttcctatgaaacccacagagacagaagcagcacggcgggggtggggagaagagctaaaaagtaccaagcttcctccttgaggtgctgaaaatgttctaaaattgacttgggatggctgcacaactgtgaatatacccaaaaccatagaattgta

SEQ ID NO: 645895 - DNA, 504 bp, Homo sapiens
aaaaattaaagtagatcagccattataaaatctttctctcaccttgatttcttttactataaattcattggcatcttttctatatagacaggaaagcatattctatattggaccttgattcgtttctttcaaacattctagaaaacagagaatataatagcttttcaattgtaacacaatatgcattcaaggatacttttcatccayggtcttagacatgaaaaactttatgtgaggtgcaatttagcagagataaaaatattgagcaaattagaattagctttaaggtggccagtagtaattttttggagtaccaccgctgttcctgaagactcaaaacctacaggctgtgcaacatatctaaaccttgtcaatggctgacattatttggtagtctcatgataagagctaccattatgtgtgtggcttgagagtccattaaacctagagtcaatctaaatctcttctctcttcttttatgtgccatgggagatcactaaaatt

SEQ ID NO: 645896 - DNA, 562 bp, Homo sapiens
aatccctgcatttgtaaataatttgcttgctacagtgctccaattaaaaaaaaagtcaaaaagaaacttgctattattagcaagttgtttgtttatttgcaaatggatgccgaattagagaattaagccagctgaatacagtgtttatatctcactgttattactaatacagatttgaaatacacatatatttatcatgacactaaattaatatgtttatgttgctgagtagctaattgctgacatgaaaatcccagtggttcaaaagaacatagtttggaagtttagttagttttgcaaaagaaggactgagagaagggggttgttctgcattctggtcctcactttgctgtaactgactaggtgaccttgggcttcttcattcctatttctaaaaataattagatcattttaagtcccttttcagctttgtttatgcaactcatatctctgcaaacataagtgtttactatcagtatattgtggtaggctaatatgattccttccctcaataagatgactttcctctrtggattttgtagatttggcacctttctgtgac

SEQ ID NO: 645897 - DNA, 578 bp, Homo sapiens
ccatctgcaaactgaagaggtaggaagccgttagtggctcagtgcaaaagccttaaaagtrggaaaacttgacaatgcagccttcggtctgtggccaaattcctgagatccctgggcagaccactggtgtaagtccaaaagtccaaaggccgaagaacctggagtctgatgtccaaagtaaggaagtatccagcatgggagaaaaatcaaagccagcagactcagcaagtcaacttatcccttcttctgcctgctttgttctagccgggttgtagctgattggatggtgctgacccacattgacgatgggtcttcctcttgcagtccaccaactcaaatgttcatcttctctggcaacaccctcacagacacacccagaaacaatactttaccagctatctaggcatccttcaatctaatcaagttgacacttaatattaaccattgcacagaactacttacaggaaatgaaaccacaaatttacaagtaaaagtgtgtaaacaaatacagttatggctgcctttggagtgcaagcttcaggatgtttctgaaatatgtcttggctttgcagttagca

SEQ ID NO: 645898 - DNA, 578 bp, Homo sapiens
ccatctgcaaactgaagaggtaggaagccgttagtggctcagtgcaaaagccttaaaagtgggaaaacttgacaatgcagccttyggtctgtggccaaattcctgagatccctgggcagaccactggtgtaagtccaaaagtccaaaggccgaagaacctggagtctgatgtccaaagtaaggaagtatccagcatgggagaaaaatcaaagccagcagactcagcaagtcaacttatcccttcttctgcctgctttgttctagccgggttgtagctgattggatggtgctgacccacattgacgatgggtcttcctcttgcagtccaccaactcaaatgttcatcttctctggcaacaccctcacagacacacccagaaacaatactttaccagctatctaggcatccttcaatctaatcaagttgacacttaatattaaccattgcacagaactacttacaggaaatgaaaccacaaatttacaagtaaaagtgtgtaaacaaatacagttatggctgcctttggagtgcaagcttcaggatgtttctgaaatatgtcttggctttgcagttagca

SEQ ID NO: 645899 - DNA, 537 bp, Homo sapiens
ttctttgccctctatgaaggtagttttttttttaaccagtctcaaaataaaagatactgaaaatgaaatgaatcaaacaacttggagattcctagcaaatccccggggtctagtgaccccgagcaagggtcactagagaaattgtaggggcaaaaacagggatttagcctaaaccataagaatgattaaaaaaaaatctctttagcattttataaagrtgttatacattctagagaaaaggatgagaatccattccattctaaaaattcatcagttatcagtaagggtaggaaaaaatatgtaacccttagtcagagtcataatagtcccaacccttgagaaaaaaaaaaaaaacaatatgttagacttggttcatccatctgctgagccaatatttgcacattcaaaacttgcaggtatcaaatgtacatatttgctttgaaaagaatttttggagctgggaaagagtctattctaagtagcaaatacttaacatctcctgacatttattccactgtaaatgaaaatttttcaaga

SEQ ID NO: 645900 - DNA, 595 bp, Homo sapiens
gtaacaaaagaattaatgctcctgaaggtttctcaattttatcatctggaaagtggagtgaacctttgcagagtccttctgaagagggctgaccttggactgcactaggttatattcatttgctattactcagcaataaaaagtaaatgcaacaatataaatgaatcttaaaaacataatatggaaagaaagcagccagacacaaaagaatacctcctgtttggtttcattaccataaaacctagaacagacaaatgaatatactatgattttaaaaagatcattatgatcagaaagcacttgcctgttacaggaaggagatggggattgactggaaaggggcatgagaaaactgtatgaaatattatatatggtttatatcttgtttgggggtggatayatagctgtgtataattgtcaacagtcattgaactgagcacttaaaatctctgcattttagtgtatgtaaattaatttttaaaattattttaaaagaaaagtaaaaggatagaaaaagatataccatgaaaacagcaatcatacagagttggggcagctatactaatactagataaaatagtctgtaagacaaaaa

SEQ ID NO: 645901 - DNA, 376 bp, Homo sapiens
aagtgaatgtttctctctactttctacttttttgctctttattttatttaggagtcaatatattaatttcataatggaaaacataaacttcatgtcaaaaacctatttgaggaatctggttctgttatgaaagtatgagtcccctatagcctagacctcttgcagatgacaactgcaaaccctacacagaatagaagccaagaataggccaacacatatatagtcaactgattttcatttaaggtgctaaggcaatttaatgaggaaagaatagcctttccaacacatrctaccaaatcaattacctatccataaaggaataaatgaatattgacccctaactctcttcatatacaaaaaggaatttgaaatggat

SEQ ID NO: 645902 - DNA, 498 bp, Homo sapiens
acttctgcaatatgttaaaggcaattatcaattgtttagctctggcaggtgagaaaagtttttgaagagacaatcaattcaatcgtactctatttgtgtgctctaatttatgacaaccaagattgtgatgaccaagattgctgatctcgtctgggatcagcatcaatgctctcaagagcctcagtggaaaaatacaccatttgataaggcagattattctgtttcagtatgttcaggttatttacagagtaaggagaatgaattagtatcaactggatgttttatacggwgaaaaaataaaatattaaaattcttatctatgttatttaatctaattatttgtcctatatcttcttttggtgtgtggttcataatatatggcttatgttaataaaactatacagatatatagttaataactcatttgtacatatattattatctcatgttcaaatatatttttctagtactgaagtgtgatccttaaaatttggatac

SEQ ID NO: 645903 - DNA, 623 bp, Homo sapiens
aatgtatatggcagagaggcaggcccagcccatgatatgagaaaaggcctcctgaggatggcacacagaagccaacaagtaggatgtagatgtttagaaacacgtattttagaaatatatctgtgattgtggatagagacagaacacacgtgttttgaattggagtttgatgtcctttatttaaaagtatcttgtagatttcaaagttaatctcaascataaacaactacaggggtgcatgaaatgtataaaacaataaattttatatactggacagaaagcaatgggtgactaatcctcaagacaagaaaacataggaagtgagcactacatgtactctggctttatatctggaggtaattttaggaccacagcagaagacgaagccaaacagagcccagaagaatcactgtgctgaggagacagagatcagagttttgagggaccagagtaactagaatttgcagagcagtgtacgaaagaagccatgccaagaaatctgtatagcttcccctgtagtatttggatattccaatctgcatacccatagggagaaacatcaagagtctaaacaaaaaataacttctgaagaaggaaaatacattagctataaaacacccaca

SEQ ID NO: 645904 - DNA, 636 bp, Homo sapiens
agctgggattacaggcgcctgccaccacacccatccaatttttgtatttttagtagagatcgggtttcatcatgttggtcaggctggtcttgaactcctgacctcaggtgatccacccrccttggcctcccaaagtgctgggattacaggcgtgagccaccacgcccagcctccgtgtttctttagtggtgtaatttttgcactctcagtcatctgtccacctccaaattctctgtagttctcatttcctttcagtagtgtgatcctgaactggatataatagtctggtaaaaggtttgaacaagcctatcatgttgtacttgcttggtgcttccttttcagggccttatgtgtgcaggtaatatgttactttgtctttgtacccaccctaatgaattacactaaatcctatgattttattaatgtaactttggatgacacagtcctgagatggacacctgtcaagcttgaaggctcaaccttgtgaagcagtgcctctgagaaaggcaatgcaaccaggagcatagagagatgctctagtcccgggttcagcatgcttcttctgtaaagggctaggtggcaaacattgcaggcttggcggagctgtaatagtacgaaagcagctatagacaacct

SEQ ID NO: 645905 - DNA, 613 bp, Homo sapiens
gaaactgtctaggttaaacggtaaattcagacctgaccacggtaaaggctgatgtttttctgcccttctgtgagggactaatagagttcagagaaggggtgaggttggggagcgagagtgttagaattagagttccatggcttcagtgggcaatatctaagccatggtgctttctagaggaaatcagggaatcacatggtgcttcatggttctatatttctatcagtcgtgcatcattaattagttagccagcctggggyttctctttttactttttcaatgatttctctgtctggatgggttcatcatttctgcatactctgtagtgtcttctaaatgtcagtcatttgcacatgccatgtagcaaattcttactcttttacagtctcatgatctctgtattggatagtctttgtgtagggaaagctctaaggatgtagaagacctgtcatatttttctgagtcttttatagatacagatgttgatactgaagttaggtcactggaactgcccaaaatacattaaaccataggcttctatacagggaacatttttttaaactttttattgacatagtacacatttagattaagtctacaaatcctaaatgta

SEQ ID NO: 645906 - DNA, 613 bp, Homo sapiens
gaaactgtctaggttaaacggtaaattcagacctgaccacggtaaaggctgatgtttttctgcccttctgtgagggactaatagagttcagagaaggggtgaggttggggagcgagagtgttagaattagagttccatggcttcagtgggcaatatctaagccatggtgctttctagaggaaatcagggaatcacatggtgcttcatggttctatatttctatcagtcgtgcatcattaattagttagccagcctggggcttctctttttactttttcaatgatttctctgtcyggatgggttcatcatttctgcatactctgtagtgtcttctaaatgtcagtcatttgcacatgccatgtagcaaattcttactcttttacagtctcatgatctctgtattggatagtctttgtgtagggaaagctctaaggatgtagaagacctgtcatatttttctgagtcttttatagatacagatgttgatactgaagttaggtcactggaactgcccaaaatacattaaaccataggcttctatacagggaacatttttttaaactttttattgacatagtacacatttagattaagtctacaaatcctaaatgta

SEQ ID NO: 645907 - DNA, 564 bp, Homo sapiens
  misc_feature 557: n = A,T,C or G
atctgtaaaactgctaactcccaagatttgaagggaaaaggtaaacaccagctgccagtactttcattgtaaaacaagaaaacctggacaacgattgccctttttctacactagctccattgatattttgttcctgaagtagtcaggaagtaccttaccattgagggactascttttaaagttctttagatattgaaggacacccctgacaactcagaaccccatgagttaaacaccaacagtgagcaagtgatctacttgtccctaaatatgtctgtaattacacctctagaccaggaggtcataatgacctttaaggtccattacgcacaacactttatgggaaagattatcaacactatgaaggaagactccgatagaggggaaatcatgaaactctggaagatttacaccatcgaaaatgccatcattattatataaaaagctattaaaaccatcaagtcccaaacaatgaatttttgctgaagaaaactgtgctcacatgttgtgcataaattcacaggatttaaaatggagccagtcaggaaaatcatganagagatc

SEQ ID NO: 645908 - DNA, 564 bp, Homo sapiens
  misc_feature 557: n = A,T,C or G
atctgtaaaactgctaactcccaagatttgaagggaaaaggtaaacaccagctgccagtactttcattgtaaaacaagaaaacctggacaacgattgccctttttctacactagctccattgatattttgttcctgaagtagtcaggaagtaccttaccattgagggactaccttttaaagttctttagatattgaaggacacccctgacaactcagaaccccatgagttaaacaccaacagtgagcaagtgatctacttgtccctaaatatgtctgtaattacacctctagaccaggaggtcataatgacctttaaggtccattacgcacaacactttatgggaaagattatcaacactatgaaggaagactccgatagaggggaaatcatgaaactctggaagatttacaccatygaaaatgccatcattattatataaaaagctattaaaaccatcaagtcccaaacaatgaatttttgctgaagaaaactgtgctcacatgttgtgcataaattcacaggatttaaaatggagccagtcaggaaaatcatganagagatc

SEQ ID NO: 645909 - DNA, 581 bp, Homo sapiens
tcccaactacttaggaggctgaggcaagagaatcacttgaacctgggaggcagaggttgcagtgagccgagattgtgccactgcacttcggcctaggtgacaaagtgagactccgtctttaaaaaaaagaaaaagaagaaaagatgccgtagtattgcaaggctaagtagggacagcagctgaagttcctcaagacttccaacrttactgtatagctaaactcttgagaaaaaacagtaacctaccaattggacatacggaattcacaagtagttcttttgacccaactaggccaagcatgagttgaggaagttaaaaacactatctgagttatgcaggtaagtgctaaagaacagacttctcttgtgcagtctgaaaacaactttagtctattttgctgcccttagacaaatgaaaagagccagtacagatggatcaaaatggcctatgtgtaactgaaagcgatcaaggttgtcgttttgaggttggagtgttaggtaccctccaagacattttcttgccatattgatgatactgtttaaaacataatatctacaataggaacaggttttatagccaaa

SEQ ID NO: 645910 - DNA, 502 bp, Homo sapiens
gccaggcatggtggctcatgcctgtaatcccagtgctttgggaggctgagatggaagaattccttgaggccaggagtctgagaccacccctggcaacatagtgagaccccacctctacaaaaaatgaaacaattagttcgatatggtggcacatgcctataacccagctacttgggaggttgagacaggatgatagcttaagcccaggagtttaaggttacagtaagctatgattttgccactgcactccggcctgggcaatagagtgagaccctgtctcttwaaaaaaaaaaaaaaaagagaaaaagaacataagacaattcgattcttttgaaagccctagactaaggaacaagacaagaaaagtaaatgagctgtataaacacataaaggcaagaaaaaactagcatctgcagatgacataatttatcaataaaatataagagaattgactgaaaacttttataaataataaatgaggaagatgaccaataaaaatata

SEQ ID NO: 645911 - DNA, 578 bp, Homo sapiens
cactctcaccactcctattcaacatagtactggaagtgctagccagagcaatcaggcaagaaaagaaatcgaagacatccaaataggaaaagaagaactcaaactatctctctttgcagatgatatgattctayacctagaaaaccttaaagaccccaccaaaaagctcctggagctgataaatgacttcagcaaagtttcaagatacaaaatcaatttacaaaacttagtagcatttctatacaccaataacattcaagctgagagccaaatcaagagcacaatctcatttagactagccacacaaaaagaaatacttaggaatacatctaactaaggtgaaagatttctacaaggagaactataaaatactgccaaaaggaataagagatgacagaaacaaatagggaaaaatttcatgttcatggattggaagaatcaatatcattaaaatgtccatactgctcaaagcaatctacagatttaatgttattcctatcaagctcccaatgtcatttttcacagatttggataaaaaactattctaaaattcatatggaaccaaaaacaagcccaaa

SEQ ID NO: 645912 - DNA, 530 bp, Homo sapiens
gttcacacgtgtctgtgtatcataaatccctgcacataaaggaacttcaaaacctttactggatattttttctagttgtcttgaatgctggcccatatcaccagcctggaaatgaagataaatgtgagataattaatggcaggctcaagtgggattcgattgcattatttgcatttagttattgaaggctatgcacctcataagatttagcatgaaagaaatctaaaacarcagcagtacatcactcaacctttcaaaaagccatactgctgtataattaaggatttgctattgagtaattttcaaaacaaacaaaaatgctctgcccttcaaggtgttgacaggctgacactaacaatggcaaacaagtaatcataaaacccactcaataccacacaaagctcaactgttgagcctagtgctttaagaataaacggcagtcagtagaggcagggcccttggaatcccttttgggtgccttccaacaaacacccatagctgtggaatcgagttccagcagcagcatcttt

SEQ ID NO: 645913 - DNA, 435 bp, Homo sapiens
agaattcaggtattttgattttactttcatttcaattaacttcaacagagctttattgagaatctaccatgtaccaggcagtatgttacatgctgaacatgcaaatataggaaataccactggcctcacggttctagtcttgtaggggactgggctatgcagaaacaagctgtattgtgatatatgcaataatgcaagtttgtacatattaccttctgagcaaagcagcaaagactgttctttttccataagttgttgactttctgtcatgtgaccctggtaagtaaccatgatcgaactgatcaagaatctgtaacttggccaaaggtaaccacaaarttgtgcaaaactacaggatacatagagtaaatattttgggggtttcattattacagatgacgttgaggagagaaaagttttacatttttacaatct

SEQ ID NO: 645914 - DNA, 602 bp, Homo sapiens
gaattaatgtaattctttgatcaaatttcttcctgtgccattaaataattttcagtatttttattttactgaaataatttagactttattcagtgatcccattttatgtccttattaaatctttccaacttttccaatcagcaattttgaggtttcttttgtagtcattttctaccaaacctaattttcctgggctagattttgcaggtataatttttgacaagaagatttgattcttttgtcaatttttaaagtcaattacaaatttttctgtgtaaagctttcacctttgtcagttttattttgtgttatttctataaagtgcaattttaaaagagttcacttttgtagttttgtgacttaccaacacaatgagattcttcagtcagttttttgtcaatatcaaagttaacatatatcattttagttattatcagtttgatcctgtgtagattcttttyactacatcaatttttttttctagtgacccgttgaaaatatacttgatgtaagaatatcaaggtcataacatcatgttttcatccaaagctactctgtttaaatatatttaaaaagtagaatcgacctgtctttttagaagc

SEQ ID NO: 645915 - DNA, 602 bp, Homo sapiens
gaattaatgtaattctttgatcaaatttcttcctgtgccattaaataattttcagtatttttattttactgaaataatttagactttattcagtgatcccattttatgtccttattaaatctttccaacttttccaatcagcaattttgaggtttcttttgtagtcattttctaccaaacctaattttcctgggctagattttgcaggtataatttttgacaagaagatttgattcttttgtcaatttttaaagtcaattacaaatttttctgtgtaaagctttcacctttgtcagttttattttgtgttatttctataaagtgcaattttaaaagagttcacttttgtagttttgtgacttaccaacacaatgagattcttcagtcagttttttgtcaatatcaaagttaacatatatcattttagttattatcagtttgatcctgtgtagattctttttactacatcaatttttttttctagtgacccgttgaaaatatacttgatrtaagaatatcaaggtcataacatcatgttttcatccaaagctactctgtttaaatatatttaaaaagtagaatcgacctgtctttttagaagc

SEQ ID NO: 645916 - DNA, 602 bp, Homo sapiens
gaattaatgtaattctttgatcaaatttcttcctgtgccattaaataattttcagtatttttattttactgaaataatttagactttattcagtgatcccattttatgtccttattaaatctttccaacttttccaatcagcaattttgaggtttcttttgtagtcattttctaccaaacctaattttcctgggctagattttgcaggtataatttttgacaagaagatttgattcttttgtcaatttttaaagtcaattacaaatttttctgtgtaaagctttcacctttgtcagttttattttgtgttatttctataaagtgcaattttaaaagagttcacttttgtagttttgtgacttaccaacacaatgagattcttcagtcagttttttgtcaatatcaaagttaacatatatcattttagttattatcagtttgatcctgtgtagattctttttactacatcaatttttttttctagtgacccgttgaaaatatacttgatgtaaraatatcaaggtcataacatcatgttttcatccaaagctactctgtttaaatatatttaaaaagtagaatcgacctgtctttttagaagc

SEQ ID NO: 645917 - DNA, 415 bp, Homo sapiens
attccctctttgaattgaagtgtttcaaagatatcttattttaaaataccaaaataggaatagaatatgaagggctggttatgagtaatatgatacacttttttgagaggatgagattacaataacaatacctcctctcatagaatagccagcaagtctccactaaataagagtgccttgattttatagatgyttaatcatggatattgagataatgcgaacgatttgtagacacaggagtttattaaagaattatataatacctttcaagtgttgaaattaagcctgcatccccacaattttcagaggtgctgatgcctaataaactcaaccccttgcatgccaaaattggcttaaagcccacccattacccaagctacacttcaagcatcaaggttcaaaaatgtaattttaa

SEQ ID NO: 645918 - DNA, 574 bp, Homo sapiens
cacaatcaatgcttaatgcattactgttgactatctgaatgaattaataaatttagacatagcatcagttataatctgtaatagcatttggcctgctatatgtccaaaacttagtttttggtcttttttttttttttttttttttttttgtcgggtcagggaggaatatactactctggagtagaaaagatgttgatgagaatagaaaaccaaaacacgatcacaacaggcaaatgagtgagaaatggaagtgccaaggggttagtcaagttttgagcttttaattaacatttagaaaaatcaatagtccataaaaattgaaatgatgtgtggggaaaatttgttaccattatattttgggattaatagaaataaatgatttcaaaaaaattccatgatggtggggcccatmataatcattttagctgattttttcaatttaagaaaaattaaaagcagataatatgtataattacttagaagagtcagttaaattttacatgtaaaacacttagcacaatacaatgtacatagtagggattcaataactcacaacaacaaaaaataccttttg

SEQ ID NO: 645919 - DNA, 573 bp, Homo sapiens
ttgtttttccatcactgagtataagcttgcctgtttattgaattctctgtaatcccagaatcaaattggaatgatagccaagtaggtaagagtttctagacttmaaatgttttatattattcaacacctcctcatggtaaaaataatgaaagcaaaagcaaccatgttgggtttaagaaacataattatggtttcaggggactgttgagctttttaactgaaagccttaaaaatcttttaacaggtgttaatccacgcatgtgtcctttacaaagtttgtagcaatactattctgcattgcattttagttgtgttaataaaggatgttcacatacatatctcattgtcacattctaattaaggttcattttacagatgagaaagctaaggctcaaagaagttacatatttttctcaacatcacacagcttattactgtatcaaggtctaaatgtcttctgatttggcttgttcacagtaaaacctcagaaaacaactgtaattaattcccacagagtcacttagagtaattagatcaggaagtttccttaaaactgaaggattgtatagaaat

SEQ ID NO: 645920 - DNA, 622 bp, Homo sapiens
taatatattcataataagaataaaggtattatatgatcatagctaacatttatctaatatttaaccatgtactaggcattattccttcttttagtctagctaagtgactttcctcttagcaaaagaattgctgtgtacatgagatatggagtaaaagtacacgtatatgtaacacaaaaccatatagaccatgttttggggccaagtatgctacattaagaattttttcaccrtgcatttttttcatgtcacaagttgactttggaagctactcaaacaaaactgtgtctcaaatataaactgaaaattattaagggtcactgaaataactgaagataaaagacaataaaaataattatgaaaacacttaaatgtacatattacttatttctcagttcttgaaaaatgcatgtaaaacggcatggctcacatctgtaatcccagcactttgggaggccaaggcaggtggatcacgtgaggtcaggagttcgagaccagcctgaccaatatggtgaaaccccatctctagtaaaaatacaaaattaattttgtaatcccagctacttgggaggctgaggcaggagaaatgcttgaacccgggaggcagaatttgcagtcagct

SEQ ID NO: 645921 - DNA, 614 bp, Homo sapiens
ctcagaatacttgaggtaaatttgccttatgtagaaaggacacatttggaatctggggaataaactagaggccttttatttttttatttcattttcatttttagacagagtctcactcttttgctcaggctggagttcaatggcaccatcttggatcactgcaaactccacctctggaattcaagcgattcccctgcttcggcctctcaagtagctgatatcaggccctcgccaccatgcccggctaatttttgtatttagtagagatggggtttcaccatgttggtcataatgctcttgaactcctgacctcaaatgatccacctgccttggcctcccaaagtgctgggatttcaggcgtgagccaccatgcccggctgaggtcttttcttatggaagcaatagcttttgaagtcttttattagactcatggacaaagactgacaaacattgaatggttttatttttaattacttctccagtttctacagttctaccaatgatactagagttcaagtaaattcctaggcrtctaaacccaaaatgtttgtatctaatgagcatgaaacaaatagctctgcaagtatgactaacgctggcctgatacaatcacc

SEQ ID NO: 645922 - DNA, 589 bp, Homo sapiens
ttcgtttagaaaatttgtaatagaatttatggagaaaacagtgataataaaatgtgcccaataataatttcaaaagaatcttacagcattttgtcctagtcctttttttttttttcctgtcataacagagcaccacagactgggtaacttattaaaaaaaaaagaaatttatttttcattattctggaggctgggaagcccaaaagcacagatgccagcatatggtgagggtcatyccatggtggaatgatggaaggtagaagtgagtacatgagagaaagaggaaaaaggaggcaaactcatgataactaagccagtcccacgattacagcattaatgtatttatgagggcagagccctcatgacctaatcacttctaaaaggcctcagatctcccctcccctcccacccctttggaaacttaggctggagtgcaatggaatgatcatggctcactgcagcctcaaactcctgggttcaagtgatcctctcacctcagcctgccaactagctgggaccacaggtgtgcaccatcatgcccagttaatttatttttgtagagatggggcctcactctgttgcccaggcc

SEQ ID NO: 645923 - DNA, 589 bp, Homo sapiens
ttcgtttagaaaatttgtaatagaatttatggagaaaacagtgataataaaatgtgcccaataataatttcaaaagaatcttacagcattttgtcctagtcctttttttttttttcctgtcataacagagcaccacagactgggtaacttattaaaaaaaaaagaaatttatttttcattattctggaggctgggaagcccaaaagcacagatgccagcatatggtgagggtcatcccatggtggaatgatggaaggtagaagtgagtrcatgagagaaagaggaaaaaggaggcaaactcatgataactaagccagtcccacgattacagcattaatgtatttatgagggcagagccctcatgacctaatcacttctaaaaggcctcagatctcccctcccctcccacccctttggaaacttaggctggagtgcaatggaatgatcatggctcactgcagcctcaaactcctgggttcaagtgatcctctcacctcagcctgccaactagctgggaccacaggtgtgcaccatcatgcccagttaatttatttttgtagagatggggcctcactctgttgcccaggcc

SEQ ID NO: 645924 - DNA, 584 bp, Homo sapiens
tcctacttagtctttaagctacagcataagtgtcacttcctctgtgttgccctttccctgttctctcctttagtatctactgtgccccataattatttatacgaaggaacctatatcattgaayggaaatcattcatttttttctctgtcatccctgataaactatcagatccttaagagtatagttctgagtttagtcattcgtatgtctccaaaacttaaaacaatgtcctgatcatgggtgctcaataaatacttatagagtaaataaagaaaaatataagtctttttcttatgcttctgattcatcaacttgaaccagaaatgataaggcagttaaagggagcttatcgtaagggatatcatctctttaaagggccaggttggggggaaattccaataaccagaacgtctcatagatagagagctcatgaaatttgaaaattgatgccagtatcaaaatgtcaggaatactgattgtcaggcctctgagcccaagccaagccatcgcatcccctgtgacttgcacatatacatccagatggcctgaagtaactgaagatccacaaaagaagtaaaaatag

SEQ ID NO: 645925 - DNA, 592 bp, Homo sapiens
acaggttttgttggcttaaaaaataaaatcttggatgctctgagagcatgtaggtagaagcagagaaagaatattttaaagccttaagtggaagcaaaatgttgcctaccattttgcaaaattgggtactattatttttatttgtttatttataccaaatccagatgtaggctaattcaatctcaaacatgaaaggtgggcagattttatcattaaggtataaagtcatgctgaagattacatataataaatggacttcatgtacttccagaattccaatgtcagaagtaatgcatctttggtatcaagtcagtstggacacttctaaaaacaaaatgaatatactgtgatgtggggtgtgtgccacgtgggcatcagcaaggaagagatagattatctttcaggtagggcagagagcatggatggaaagctagctagagcagagtcagagtcatattttagagatgtaagatgggggaagtggtgactagcatcaggtagaaaaatacttagatttctagaagctctgtgtttgtttgaggaggtagggcaaaccttttttaaaaatctggtatcaggtcaactcttccca

SEQ ID NO: 645926 - DNA, 510 bp, Homo sapiens
tgtgtgaacagcacatgttgtacagatgcagactgacaaactcccaggataccctttttttttttttttttttttttttttttttgagacaaaaatctcactctgcctccaggctggagtgcagtggtgtgatcttggctcaactccttgggttcaagcgattstcttgcctcagcctcccaagtagctgggattacctgcacaagccaccacatccaactaaattttgtatttttagcagagacgaggtttgaccatgttggccaggatggtctcgatcccctgacctcatgatctgccctcctcagcctcccaaagggctgggatcataggcgtggccaccgcactcggcctccagccaccttttaaacatccttttccatctctgatatttcattttcactcccactactgcagatctttggtagttgtagctgttgtttacagagtgcttatattatctttctaactaaactgcaaattagttattttagaggtagatcttatcca

SEQ ID NO: 645927 - DNA, 438 bp, Homo sapiens
aagcttatcccttcatcttaggctgttgctcaagaagagrgcaatgagactttcctaggctataaaatcctaaaatattagctatatgaaggaattctgaggtcactgaggaaggagcactacagtccttttgggaatctcaggataattaaccaggtgtgggtcacaggattcccgggatgggtgatttgagggcttcttttggctcctacccatgtgtctaatttccctttcttttccctcttccttctctttccctgggctgagacaatcatagaatggtgattaaacatgtagaacaaatcatggttctgccacatcagctgtgtgaccttgtacaaggtggtttacgtttccttgccttagtgccctaatcatacattggttatggtgataatatacccacctcgtggggctgctgcataaagcatttagaac

SEQ ID NO: 645928 - DNA, 611 bp, Homo sapiens
cagtctacccaccaaacctgcagaactaaagaaaaagactccaatctgtcccgcagggtgcatattactcctttcttggattgttaaattctaattataggctgttgatccccattagaaccatttgtaagcctaaacactgttgtgcagcatcttttgccaataggtgtgtttcattccaatcgttgtataaaacataacattcgtgcttttgggggactacaacaggttagtgttctctggcaaagttggacaagaaatagtcaaaatatgactcaaaactaagatagtgcaaacaaaagtacactttgccttgatgtttatttattagggatttctgaaaccctaggacactagagctcacctttcagatctcagacctcagatgccacatcgtcaaggaagctctcctggactgcccacttccacattcctgggacagcagagayctcccccagccctgcctggcacttgacacagtggatcatttcacaggactgggggattagttaactgtctttccactagatggaaagtttcagaggaatcctgtcgggattaccgatgcctagtatgatgcttagcacacagtaggcatttaataaatgtgt

SEQ ID NO: 645929 - DNA, 620 bp, Homo sapiens
ttgaccgtttaatttttggagatagtgtgtatctttttatgttcaggaatactagaatcaacaaagatattagaggtaaaacacagaggttttgtgacccaagaaattgagaagagtcttaaatagagatgcagttggaatcgcttaagaattatgttgttaaagatgcaatggaacctgcttttatatttgggttgtgagttctcaaatacattttaaagctcaagggcaaaatagaggtgttttcaatccatttgatactgaaccttctcagctccctcaactgcaaggcatgtagctttctctgtgagtgaaaatactagcaaataaaatgctgcttgcagaatcttgtccaaaagactacagtgggaatccatggggaaaagaaaaagagacctgaaaaagaaattaattaatatacagtaggtcaaaagaatgrtgatgatcataaattcactaaatcagagtggaaaatgtaaggaaaaaaatgaaactttttttcagatattctattttctgtcctgttatatatttttgttttatggaaggaaaagatgaagagaatagtacgcatttctctttcaatggcttgaatggaaaatgtttttaaaaagtcagtc

SEQ ID NO: 645930 - DNA, 620 bp, Homo sapiens
ttgaccgtttaatttttggagatagtgtgtatctttttatgttcaggaatactagaatcaacaaagatattagaggtaaaacacagaggttttgtgacccaagaaattgagaagagtcttaaatagagatgcagttggaatcgcttaagaattatgttgttaaagatgcaatggaacctgcttttatatttgggttgtgagttctcaaatacattttaaagctcaagggcaaaatagaggtgttttcaatccatttgatactgaaccttctcagctccctcaactgcaaggcatgtagctttctctgtgagtgaaaatactagcaaataaaatgctgcttgcagaatcttgtccaaaagactacagtgggaatccatggggaaaagaaaaagagacctgaaaaagaaattaattaatatacagtaggtcaaaagaatgatgatratcataaattcactaaatcagagtggaaaatgtaaggaaaaaaatgaaactttttttcagatattctattttctgtcctgttatatatttttgttttatggaaggaaaagatgaagagaatagtacgcatttctctttcaatggcttgaatggaaaatgtttttaaaaagtcagtc

SEQ ID NO: 645931 - DNA, 562 bp, Homo sapiens
aaaaagtaaagtgttagtgaccaratggggtttaacacaggaagattagttgagcagtaataaaccaatcactattcactatattaagaaactaacaaacacatggtcatctcaatagagagagaaaaagcatttagcaaaatctataatacgttccagataaaaactctcattaaaccaggaagagaaggaaaagtccataacttgataaagggcatctacaaaaagcctatcgctaacatcttttgttttattttacttaatcctcaatgtgctagtagctaatatctttttcatggtagaagactaaatgctttctttccaggagaaagaacaaaggaaaaatgtctcctttcactacttttcttcagcattttactggaggctctagcttgtgaggcaatgaaaaaccacaagaagggaagcagtaaaattatttttatttggagacatgattacctatgtacaaattcctacaggatctactaaaaagctactaaaatgaataagtgtatatagtaaggttgcaggatcaataagatcaatatagaaaaattaactg

SEQ ID NO: 645932 - DNA, 495 bp, Homo sapiens
atcctcctccaagaagcaatgggaccatttataatgtggtttccaccaccacttacaaaggaatatagttttctctcagccccatagctgagagagcagtttgcaagttgatttaagagcagtttgcaagttgaagggatgaatcattcttgtgagaataataacctgactcccaatgataatatattcttcaagttcccctaagcttaggtcatctgaatctctgacataaatgggcatgcgaattaaagcaacagagtcttttcctagtgtatgaaatgtatctatctatctatctatctatctatctatctatctatctatctatctatctatcaatcatgtatgtatgtatgtatgtatgtatgtatgtatgtatstatctatctatctgtctatctatctatctatctatctatctatctatctatctatctatctatgtttctgcattgctatagagggtagattttaatttctcttctttccagaaga

SEQ ID NO: 645933 - DNA, 544 bp, Homo sapiens
tatctagtggaatagatacagatacatgaaactgtgtatctatagagaaagcaggttcaggcacagacagggtttacttcttgctgctcttgtctctcctgtccttccccagaggtctctaattcatttgtccctcaatcagagatctttttcaggtgtttttctatatgacatatgtgggtggtgtattttctgagtatccatacatacacttttttttcaggacaagtgacagatgttgtgtttggggtttgctacttttctcttagtattttgctagagccattgctatggcttccattgtcgcgggtgagaagtctgatgcctctgatttttttttcctgaagtactatgttctacctacctgtaagcttgtaaaaatattttcttacagagtcaggaatttagtaggatgtgtcaagatctgtgtgtagaataayatgagctcttttaatcggcagaccaaggtctttctttggcccaagcaaatattcttctgctttattactgcctctcctccgtcttttcatctttcttcagctgg

SEQ ID NO: 645934 - DNA, 547 bp, Homo sapiens
ttcaaaactgatgatttgtaataaacagttttcagaataaaagaattacattaagaattaatttgcttgtgaagaaagtgtcttaagaaaagagcatttaaggggcacagcagcctctgctgtagctggatttcttacccattttaagtgacatmagtgttgaattgactttttcctcagtgctaaaagctgctagaaatgagcaccagtcacactactgatctgtgttaggaaagatcacaaacacagtactttgtaataaatgtcagaggaatagcaaaattgtacatgtcaagaaagcattacaggatgacgttgctatttggagaattgctttcatctttgagatatctcacacctgcttcatttggcataggttgtttctatttcatgaaaaacagtcttttccctcccccagatcccaagttacatagaaacagtatgctaacaagggaaaaattttaacataaaaactcacttgaaggtgccatctaaaaactcagtgtgtaaacttagttaactaactttattttgttgaaaagggacc

SEQ ID NO: 645935 - DNA, 528 bp, Homo sapiens
ggcagagggagagagctctggatttctggggcccaggaccgcagagtggctgcctctgaccccaagtgagatgaaggcagcgtgttgtggaaggactgggctgggaggtggcctttcctctaggcctggaaaggggtgggggcctggtgggggcctcctgcagctccacgaggccagattcactgaaaaaatcaggagcatttctcaattatggagttttcttttgttcttcttgatggaatagagtttaatatggctgaaaggctgggctgtgcaatatagaaaaagtaactccaggctgggcatggtgactcactcctgtaatcctagcactctgggaggcagaggcgggtggatcacctgaggtcaggagatcaagaccagcctggccaacatggtgaaaccccatctccattaaaaatgcaaaaaaattagctgggcgtggtggcgtgcacctgtaatcccagctactcaggacgcygaggcaggagaattgcttgaacccgggaggtggaggttacagtgagt

SEQ ID NO: 645936 - DNA, 628 bp, Homo sapiens
ctgccataatgtcagggacttaggtggggaagctggattcggactttaagggtgagatggaagacacatataacctttggctggggttccaatgaatgccctgttggcagtgggtcctaagtcaccatggaaaaacctcaggccacatgaagaactcacctagaagatggagcaaaaactatagacagatgatccaaccgtgattctgtgaagcgtgttcccaaatcacagatgttacaaatccaatgycaacaacaactagtcacaagttaagtactttcatgcataaacaaagagagaaaacccagggaggttggaacaaatgatgctcaaagtcaaggtggccatttctgcatcctcactgctatagaaaggtttccagattctattagttaaataataaccctagaccagatactgatctagatttattttctagtgatcacgttttgcctcttataaatatgcctcagacagatgagaatctgactcaacattctcatatcctatggaattaagaagatttaaataaggtaatatggtgatccatgctaacagcagtcatgattcaagatggtgtcgtgacagaattttctgtttcatccatagtggtcataagggtgtaaaa

SEQ ID NO: 645937 - DNA, 577 bp, Homo sapiens
ggtattgttctaagcacattatctcattctgtctctgcaaaagtcttatgatcttatatatctcaaactaagaaaagattggagatggaaaagaggagtatatggaagaaggaaagtatattgtgatcatgatctgcacttaaaatacaggttagactaaggtgtgattaacagtagtaaagatkaaaaatgttccaaactatactttagatttttaaaaaccatctgtaaaaaaatcatctgctcttttgatgatactagtacacttaaacaactgttgttgccccacatttatgatgtttacctaattgctaaagccatggccaccatggctcactattgccatctgggtggtacatccaatttatacacttagctgtagttttttttttttaatattattattatactttaagttttagggtacatatgcacaacgtgcaggtttgttacatatgtatacatgtgccatgttgttgtgctgcactcattaactcatcatttagcattaggtatatctcctaatgctatccctccccgctacccccaccccacaacagtccctggtgtgtgatgt

SEQ ID NO: 645938 - DNA, 592 bp, Homo sapiens
tgccacgcagagcagagttgctgttgtttacaactcaaatgtaaaccccttaccaggtctgaccctctccctcctcttccactacgtctcttaccactattccattcctccaatgatctggtctccttcgtctttctcaagcacatttggctcatttccttcttgaggccttgaaccttctgtccttcctgtaatcattagcacccarccctctttttggcttgttgctttttattttccaagtctcagatcctctgacatttcttaatgagactttccctgaccacccaaagtaaaattagcacatcaccctgctttatttccttcatagcacttttaatttctaaatttattcatcatcttcatctccatgtcactagatgaaatcagggcatgttgttgttactagccttctgactttgggcaagtgtttaaccactgtgggtcacagttcctccatatgtaaactgggtaaatttataccttcattatagaattatgagacttaaagtagttaatccatataaagtatctaggactgtctcacaaataagtgcttatcatataatgacttctttaaaacaaaaaaata

SEQ ID NO: 645939 - DNA, 519 bp, Homo sapiens
gcaagttgcccttctgaaaagtgattaagaaactgtacagcatacctaagcctggactttctactaattctcgtatcagaataaatgttttcaggtgcattttcatatactgggcaattggtataactaataatcatgtttttaatggtcgttgggtaaacttatagatgttcacaaaagggaaataaaaagagtaggtacttttgtttttgttttcattatataaaacaaataaaatcagcttacattaagtactatgccatggagatttgagttgaaaattcctttgtgtgaaacttcagtgacctctaatctgatcatagatttggtcataaactctttcatggagataggcccgaagtacacttctaagcctacctttttcatctccttcccttgtctttccaatctccrtcttttactttcaatccccatctccagggaggagagaacagaatgtcatgtgatttgtgggcttgcttaaacagtcttctataatgcagacatggttggtataga

SEQ ID NO: 645940 - DNA, 519 bp, Homo sapiens
gcaagttgcccttctgaaaagtgattaagaaactgtacagcatacctaagcctggactttctactaattctcgtatcagaataaatgttttcaggtgcattttcatatactgggcaattggtataactaataatcatgtttttaatggtcgttgggtaaacttatagatgttcacaaaagggaaataaaaagagtaggtacttttgtttttgttttcattatataaaacaaataaaatcagcttacattaagtactatgccatggagatttgagttgaaaattcctttgtgtgaaacttcagtgacctctaatctgatcatagatttggtcataaactctttcatggagataggcccgaagtacacttctaagcctacctttttcatctccttcccttgtctttccaatctccatyttttactttcaatccccatctccagggaggagagaacagaatgtcatgtgatttgtgggcttgcttaaacagtcttctataatgcagacatggttggtataga

SEQ ID NO: 645941 - DNA, 493 bp, Homo sapiens
cttggctttccacattaatcatttccttatatcttccagtgcatattgtcttaaccttccttgagttccaggtaccactttcacatgccagcctttccaaatctctgtgtggtcaaacaaagccttcccttcctcctcatttgtactccatttgtgatccactcctgttttccactttaatgagattgttaatgatatttacaccactgctgctatgaaaaatagtgagagcttccacatcagctcatgcatccttatatatatttttccagttaaaaaagcttttcatgctagcagacaaatacatttaccttaaaaatctaaactatataaagtttgagtatataatttcctttttaatcttctttcatttgtagctataacacatttttctttcactggctacttatayttttatttcttaaacaccaaattccaaatacaatgcttgaagaacaatgtgcccataaattattaggtgtccttttcttta

SEQ ID NO: 645942 - DNA, 583 bp, Homo sapiens
taaagtataataaaaaaatttaatacagcatgtcatcccaaaggatttagtgacattaacacacaatatacatgaagactatcatgaggaagatatttatatataaagtacacccccacaaacttctgaacagagaattatgcagcttttaacaaagggtacctacaaaataaggcagctgaagcagggaatcgaaaggtggtgataatgtatcttggaaagtagggctccaggtggcattattasaaatcaagaatgcaacattcagtgttgaatgatttcctttctgtcctggcttcctcccggtccgcctttctgtatgatatcctggctcttatcttcttgctcaatgtcagcgcacgactgctgagttggtgaaagtcatccccagctctcatggagcagcacagaaaaactgacccagcagaaatgagatgtgtggggaaaaggacaacttccccctaatcagggaggtataaggttagtattaatggtgttagtattatgacttaggggggcttaagaaaggtatatgttaagaactcactctatactctggtggagctaatattaccatggtcag

SEQ ID NO: 645943 - DNA, 519 bp, Homo sapiens
aaatcaaatatcttggagtaggcagcaaataatttcattgtcaaatttttataagaacttccagggtctctgcaaagagcaaaaaaataatgggcttatttcattttttctcaagaatttctaaaaaagctataaaaaaagagcatattttacttcccattcataatactcattatgtttataatttcttgatgattagtctcccctcatattttttggtccataaaaacaaaaattatttttagaaggttatacatatatatatatatatatatatwtttgaagttctgtactttttctctttttttattattatactttaagttttagggtacatgtgcacaatgtgcatgttagttacatttgtatacatgtgccatgctggtgtgctgcacccattaactcgtcatttagcattaggtatatctcctaatgctatccctccccgctccccccaccccacaacagtccccagagtgtgatgttccccttcctgtgtccatgtgttctcattgttca

SEQ ID NO: 645944 - DNA, 519 bp, Homo sapiens
aaatcaaatatcttggagtaggcagcaaataatttcattgtcaaatttttataagaacttccagggtctctgcaaagagcaaaaaaataatgggcttatttcattttttctcaagaatttctaaaaaagctataaaaaaagagcatattttacttcccattcataatactcattatgtttataatttcttgatgattagtctcccctcatattttttggtccataaaaacaaaaattatttttagaaggttatacatatatatatatatatatatatatttgaagttctgtactttttctctttttttattattatactttaagttttagggtacatgtgcacaatgtgcatgttagttacatttgtatacatgtgccatgctggtgtgctgcacccattaactcgtcatttagcattaggtatatctcctaatgctatccctccccrctccccccaccccacaacagtccccagagtgtgatgttccccttcctgtgtccatgtgttctcattgttca

SEQ ID NO: 645945 - DNA, 493 bp, Homo sapiens
tgaattccatttggtagcagcagggttgggaggtgtctagaactggactctgacatgtgtccttgttctgtcccacgtgtaagagctcaagctgagcctggcttcctgaagacctcagcaaaccctatgtaatggggcctgctttgtgccaggttcacactggaaagtctacagacgactttgcatctggctagcaaagtgaccttggaaggagccwttaccaacttcatgtcatacacgaggaaagacaatgggggctccagcaggtcatctagaccggagtgcagagtaccctagtggtgatgtgagactgctgactctgtgtgatgtcacccaggttcctggggcagctgtgggcatgggactggatcagcttccacagtggctccatttcagccacagctggagcttttccaccccaaagctttgctgtccaatgctaccacagggaataaccaaatatagctatttctatcaatattaaaattcagtt

SEQ ID NO: 645946 - DNA, 556 bp, Homo sapiens
tttgcatttctctgatgatcagtgatgtgcctttcatcagtgccttttcacattcctatttgccatttgtatgtcttcttttgagaaatgtctattaaaatctttagcctatttttaaaatggattattagttttttcctatagagttgtttgygctccttctatattctagttattaattccttgtcagatggatagtttgcaaatattttctcccattctgtgtgttgtctcttcactttgtcgattattttctttgctgttcagaagctttttaacttgatgtgattccatttgtccacttttgctttggttgcctgtgtttgtggggtatcattcaagaaatctgtgcccagtccaatgtcctggagagttttcccaaagttttcttttcctagtttcttagtttgaaattttagatttaagtctttatccattttgattttatatttgtgtgcagcaagagataggggtttagtttcattcttctgcatatgtctagttttcccagcactgtttattgtagatgtatggatttgtttctgggttccctgtt

SEQ ID NO: 645947 - DNA, 567 bp, Homo sapiens
agcagcctgaccaacagagtgaaaccccttctctactaaatacaaaaaaatttagccgggcgtggtagcacatgcctgtaatcccagctacttgggaggctgaggcaggagaatcacttgaacccaggaggtggaggttgcagtgagctgagattgtgccattgcactstagcctgggcaacaagagtgaaagtccaactcaaaaaaaaaaaaaagatacatgaatgcatacatcaaaattaaaagatgaatgctgagggtctaaagtcttctcttagttcaattcttgaagaagcatgtttgctctatcaggccaggtgagaactatttagtcttctagttttcttttacaaataagttagtttactctaagggagaaataagcgttgtagaggcttcccctgcatatgtgattgaaaattatttatggtcactgtaattttgaaaaggagttgaatggccacaaataggtaagatgcagggaatgttattactgtgtgacctctgaatgtccatttcgtttgttcctattttggatcctttgcattcacactgatagcccatttg

SEQ ID NO: 645948 - DNA, 567 bp, Homo sapiens
agcagcctgaccaacagagtgaaaccccttctctactaaatacaaaaaaatttagccgggcgtggtagcacatgcctgtaatcccagctacttgggaggctgaggcaggagaatcacttgaacccaggaggtggaggttgcagtgagctgagattgtgccattgcactctagcctgggcaacaagagtgaaagtccaactcaaaaaaaaaaaaaagatacatgaatgcatacatcaaaattaaaagatgaatgctgagggtctaaagtcttctcttagttcaattcttgaagaagcatgtttgctctatcaggccaggtgagaactatttagtcttctagttttcttttacaaataagttagtttactctaagggagaaataagcgttgtagaggcttcccctgcatatgtgattgaaaattatttatggtcactgtaattttgaaaaggagttgaatggccacaaataggtaagatgcagggaatgttattactgtgtgacctctgaatgtccatttcrtttgttcctattttggatcctttgcattcacactgatagcccatttg

SEQ ID NO: 645949 - DNA, 623 bp, Homo sapiens
ttctttcaaaagcattaaaaaaaaagtccaattgttggtttcatttttaaaattgtaatttgttcctttattatgtcttcccaacaacagtttagattttcaacacttaacatcggaaatgttttattgtttatgctctacgtcaaccatgaaaaaataatgtgacttcacaaatgggaagataaagaaaaaaataattgtatgattgttcagattataaatgaagcctctggcagaacccgaaaaacaatctyggtctcccatttcttatcagactttgcttgataattgatattgctatatatatcatataaaaaggcacataagtatgttctcagcacaatttacctaattgccatgtaagtacccaccatttaaaataatagatttctggaaaattcatatcactcatgggccgtagctacaatacacatgcctaaagtgactctaaaagtccaaagacaatgttaaagtagttaccaagaaacaactggtatttactgatactagatgacatttgtggtacattccacctaaccactctacccatatttggaagtaattgacagctcacttatttgtactattttcaaattattttttacagtctgaatgtgaaatag

SEQ ID NO: 645950 - DNA, 615 bp, Homo sapiens
taactcaccatatacttcaagaaaaacccagtgctccaagggctttagtcaagaagccctatgaataagcctttggccatgaggaaattgaagggcaataagtcgtcccaaaatttaaaaaagaaaaatcgaacataagatagggatattattaaacacacacacacacacacacacacacacacacacacacacacacasagagagaaatcaaactcttctttttcaaggatgcctcttcacactaacaacgacagaagtgtacacttaaacatcctttctattaagaggacaaattctaaaaatttgttatcaataaaattacaaactttaagatgtttcttcaactctcagtgctgagtaactcaaatggcaacttgagatttccccccatcccagatgttgagaaggtacataaataatagcaatgcacatttttaaatagtaaaaagttggagtttgttgctgggttttgttggtttgttcagtctgtttggtttctggttgatcttttgttgtttgtttccttgactggcaaaaaaaagaaaaaaaagaaaaaaagaaaaagaaaaggcagttctcctgacacaccaaagaaatatttaataaaggaca

SEQ ID NO: 645951 - DNA, 566 bp, Homo sapiens
tagcgttgattcaaatttatatggatttattcccatctggaaatgttgacctctcctctaaggataaataaatctagagatctaatgtacagcaggcgtactataattaataatactgcattgtatattgaaaatttgctaagagggtagactttaagtgcccttaccacacaccaaaaaagaagaagtaactggaaggtgatgattatcttgaattgcttacctgtagtaatcacttcattatggatatgtatatcaaacatgttgtacaccttaaatttatamtatatatatatatatatatatatatatatttaaaacttgtgtttgctctgatgtttgctcaattgtatgtgaaatgctttctggagaggaaaggctaagaagatgactatcagtttcaccagagtctctagaatttcaaatagtaagatttttttaattgtctgaaaagaaatatttagatttaaaatgcaaaaataagaaataatcaacagaaaatattttatgtgctaagatgagttatgacaaaaaaagaaaactctgtgtacatcattatttgcctg

SEQ ID NO: 645952 - DNA, 539 bp, Homo sapiens
ttgtgaaacttattaactatcacaagaacagcacggaaaaaaacccacccctatgattcaattatctcccactgggtccctcccacgacacatggggatttttacaattcaagtgaggtktgggtctgggttgggacttagaaccaaaccatatcagagatatatgcaatacaatatgttgaacaatcccattgataccaataaatttggaacagagagttcataaagtatacacaggtttaactttttataaaaatgatgaggagttggtaggagggggtattttttgttgttaatttaaggacatcaaaataaaataattgtctatgttagtcaacctgtgctcagcagctagccttattttgtagagacctgctttggggacaaatataaatatcacactatagctgactatgttgacaagacaatggacaaatcaattgtgtcatatttaaacagagtacataatgcagggctctgaatttgcagaaaagaaaatcatagggatttactgaattttgataaaagaaacaaccttt

SEQ ID NO: 645953 - DNA, 539 bp, Homo sapiens
ttgtgaaacttattaactatcacaagaacagcacggaaaaaaacccacccctatgattcaattatctcccactgggtccctcccacgacacatggggatttttacaattcaagtgaggtgtgggtctgggttgggacttagaaccaaaccatatcagagatatatgcaatacaatatgttgaacaatcccattgataccaataaatttggaacagagarttcataaagtatacacaggtttaactttttataaaaatgatgaggagttggtaggagggggtattttttgttgttaatttaaggacatcaaaataaaataattgtctatgttagtcaacctgtgctcagcagctagccttattttgtagagacctgctttggggacaaatataaatatcacactatagctgactatgttgacaagacaatggacaaatcaattgtgtcatatttaaacagagtacataatgcagggctctgaatttgcagaaaagaaaatcatagggatttactgaattttgataaaagaaacaaccttt

SEQ ID NO: 645954 - DNA, 539 bp, Homo sapiens
ttgtgaaacttattaactatcacaagaacagcacggaaaaaaacccacccctatgattcaattatctcccactgggtccctcccacgacacatggggatttttacaattcaagtgaggtgtgggtctgggttgggacttagaaccaaaccatatcagagatatatgcaatacaatatgttgaacaatcccattgataccaataaatttggaacagagagttcataaagtatacacaggtttaactttttataaaaatgatgaggagktggtaggagggggtattttttgttgttaatttaaggacatcaaaataaaataattgtctatgttagtcaacctgtgctcagcagctagccttattttgtagagacctgctttggggacaaatataaatatcacactatagctgactatgttgacaagacaatggacaaatcaattgtgtcatatttaaacagagtacataatgcagggctctgaatttgcagaaaagaaaatcatagggatttactgaattttgataaaagaaacaaccttt

SEQ ID NO: 645955 - DNA, 562 bp, Homo sapiens
ccaaaatatgtctcataagccaaatcctgcctgctgcctgagtacagcccataagccaagaatcattttaatatattttaaatgactgaaaaaagaagactattttgtgatacatgaaaactacataaaagttacatttcagtgtctataaaattttattggaatgacaccatgctcatttgtttatgtatgctttatggctgctttcatgctacaatggtagagtcgtgtagttatgatagagactccatggcttccaaaggctaaaatatttactacctgaccctttagaaaaacaaaaatgtcaactcgtagagcacattgatgaaactaccagtacttgttttggcatttgcacatgttcagctttcttatgttttgccaaaatgtttcagaagtggttgtaccaatttatacttttaagtagctgtgggtaaaactacctattgctcttcatattgtccaacacatttttaattgactttcaaagggcataacatygcattttttgtgattttaatttttgtttccctgataactcatgatattttttaatcgttgt

SEQ ID NO: 645956 - DNA, 573 bp, Homo sapiens
ctgtgcttaatgtatatctaaggcctggtctgcttttctttataatcacaacagcatgtaagtttttaaaactggtaataattttaacatttcttaaatacatttaattttaaagtagtgataattttagtgtttctgtggaccagcagttttcatgtattacctgtaaagaaaaatgtactttggataaaataaatagctgtagcagcatagtcattgtcacacacagacaatgtgtgtctgtgaggtattattctctgttttttcccttgatttattgatgtgatttcacatcatgtttcgtaatgaggctttacgtcaggacattttgctttatgattttaggatatgtagctcacttttaaatggctgacggatttttttcttacacctacattcactttttatcattgataccttctcaccagattacttatacaaatcatcatgaagcttttgatgtcagtcagcctcatccatttatgcatctactaatttgtccattcactcatttatccattcaaatgtttattgagcagtygctacaatgattttatttaggtaaccatggaa

SEQ ID NO: 645957 - DNA, 577 bp, Homo sapiens
tatttcctttggatatatactcagttgtggaattgytgaaacatatggtagtcctatttctattttttctaggaatctccatattgtgttctataatagctgtactaatttacattcccaccaacattttgtgaaagttcccttttctctacatcctcaccaatacttgatgtattttatcttttttacaatagtcatttttattggggtgaagtagttatctcacaatgctttttatttgcatttttctgatgattagggatgttagacattttttatatacctgctggctactggtatgtcttcttttaagaaatgtctattcaggattttgcccattttctaattgggttgctttcctgttattaatttgagtttttaaatatgtatcatatattaaccccttagatgtaaagtttgcatatattattccactctgtaagtgtctctttactctgtagagtatttcctttgttgtgcagaaacttttcagtttgatgtaacccatttgcctattttctcttttgttgcctgtgcttttggggtcatattaaaaaaattaattgcttagaccaat

SEQ ID NO: 645958 - DNA, 577 bp, Homo sapiens
tatttcctttggatatatactcagttgtggaattgttgaaacatatggtagtcctatttctattttttctaggaatctccatattgtgttctataatagctgtactaatttacattcccaccaacattttgtgaaagttcccttttctctacatcctcaccaatacttgatgtattttatcttttttacaatagtcatttttattggggtgaagtagttatctcacaatgctttttatttgcatttttctgatsattagggatgttagacattttttatatacctgctggctactggtatgtcttcttttaagaaatgtctattcaggattttgcccattttctaattgggttgctttcctgttattaatttgagtttttaaatatgtatcatatattaaccccttagatgtaaagtttgcatatattattccactctgtaagtgtctctttactctgtagagtatttcctttgttgtgcagaaacttttcagtttgatgtaacccatttgcctattttctcttttgttgcctgtgcttttggggtcatattaaaaaaattaattgcttagaccaat

SEQ ID NO: 645959 - DNA, 576 bp, Homo sapiens
ggtcttaaattgtttgtcttaaatagcattaaaattctgttgttattattatcttcrttaagcaagctgtataagaaaattaagactcaaagaggaagattagaataatagtaacacctacatataacacttaactatgctccattcagagttctacattctttacatatattcactcgatcttcactgaatatgagcctcaaagaaactgtatgaggtaatactatcattatcatccccattttagagatgatgagcctgagactgcaaagaagtaaagtaaattgtccaaggtcacacgacaaggaaggtcatacaaagcagactgttgaacccagatattctgattccaagatgaattgcttaagaaaattgtttaaatgcacacagataatgagaaggtagagtgataaggaagaaagatagagactttagtggttatacataacttggtttgaatatcattcaggaattttcaagctgtgactgtgaggaacacagcaagttaattaagcatgacaaaacttaatgtcctcatctgtgaaagagcgataaattagggttatggtgaaaatt

SEQ ID NO: 645960 - DNA, 599 bp, Homo sapiens
caaaaaatacctaatacttttttcacagtcataaacatattaaataacaataaaaatgtcatttgatttcagaatttcaaattatagaaggcaagtagaatttcttagtacaaatttaacaacatagaatatgatttattagaaaagctcaagattcaagttctctactgctgatggaggaaaggcaagatcagattaaaaatacggacctttccttttcatctttcttcacattcattccaatgttatatttgcccttccatcttacaagcagcctctactaatctatttttagagaagcagctggccgatattttatgtctatagactcatgaagtatctatggtrtctctgggaaaaaaaaaacataattttttaaaaagcattctctaagtttgtttaccaggtggcagctgtttaacaaatcaaagttttgagatagaaaaaatgaattaagatttagaggtgaacagtttttcaaaaactaatgatcacagtctcataagcatttggatgaattcacagatataatatactgtttgaagttgtcattctacaaaagttgacatgctgggaaatcatgagcctcatgcaagaac

SEQ ID NO: 645961 - DNA, 599 bp, Homo sapiens
caaaaaatacctaatacttttttcacagtcataaacatattaaataacaataaaaatgtcatttgatttcagaatttcaaattatagaaggcaagtagaatttcttagtacaaatttaacaacatagaatatgatttattagaaaagctcaagattcaagttctctactgctgatggaggaaaggcaagatcagattaaaaatacggacctttccttttcatctttcttcacattcattccaatgttatatttgcccttccatcttacaagcagcctctactaatctatttttagagaagcagctggccgatattttatgtctatagactcatgaagtatctatggtatctctgggaaaaaaaaaacataattttttaaaaagcattctctaagtttgtttaccaggtggcagctgtttaacaaatcaaagttttgagatagaaaaaatgaattaagatttagaggtgaacagttttycaaaaactaatgatcacagtctcataagcatttggatgaattcacagatataatatactgtttgaagttgtcattctacaaaagttgacatgctgggaaatcatgagcctcatgcaagaac

SEQ ID NO: 645962 - DNA, 512 bp, Homo sapiens
tccctcttcatattactctcacctccatttcctcttgttttgtgcctatctcttaccctcagtcagttttctatttgctaccagaaagttacctctctacatttacacaatttaatactcatatcacattatacaattatggccctcatttgaatgaagctctgtttagaaggattctaaatgacagcacagattattttttaagttttaactgcatatcaatgcagatagaaattcctggaataattaaatcatccttcatctgtgaataagtgatgacatcactgtaatccagatgtcggcttctcctttcccaarctcacttctcactaaggtatttgagaaaggaagctggcccatggagtgctctgaattatttccaagctgctgcagcttccttgcaactctttagctctgtgatgaataactattcaccttggtgatggtcataaacagaaccttgtggatctacccgtcctgtagataaacaatcctacatcagcatggacatc

SEQ ID NO: 645963 - DNA, 585 bp, Homo sapiens
taatatggacattttaacaatacagattcttccaatccaggaacatagaatacctttccattttttggtgtcctctttaagttctttcatcagtgttttataattttcatcataaagatctttcacttctttggttatgttaattcctaggtatttaattttatttgtggctattgtaaatgggattactttcctgattcttttcagattgttcactgttggcatatagaaacactaccgatttttgtatgtcgattttttatcctgcaactttactgaatttattagttctaatagttttttgatggagtctttaggtttttccaaatacaagatcgtatcatctgcaaacaaggataatttgccttctttttttccaatttgattgmcctttatttctttgtcttgtctgattggtctaactagggcttgcagtactatgctgaataacagtggtgaaagtgatcatccttgtcatgttcagatcttagaggaaaggctttcagtttttctctattcaatatgatactagctgtgggtttgttgtatatggcttttatcatttggaggtgtgttcctttgaaa

SEQ ID NO: 645964 - DNA, 469 bp, Homo sapiens
aagctattccctttactaccataggcctcaaagcgctccaaatctccacttgcacattccacaacaagagtgtttccaaactgctctatcaataggaatgttcaactctgtgaggtgaatgcaatcatcacaaagcagtttctgagaatgcttctatctagtatttaggtgaagatatttccttttccaccacaaaccacaaagccctccaaacgtccacttgcagattctagaaaaacagtgtttcatagctgctctttccaaaggaaagttcaactctgggagttgaatacaaacatcaccaaaaagttcctgagaatgcatctgtrtagtttttatgtgaagatgattccgtttccaacgaaatcttcaaagaggtctacatgtccccttgcagatgccacagaaagagagtttcaaaactgcgctctcaaaaggagtgttcaactccgtgagttgaatgcagtca

SEQ ID NO: 645965 - DNA, 353 bp, Homo sapiens
cacagagttgaaccctcctatggatagagcagtgttgaaactctctttttgtggaatctgcaagtggatatgtggacctctccgaagatgtctttggaaacgggaatatcttcacataaaaactaaacagaagcattctcagaaacttctctgtgatgtttgtgttcaactcccagagtttcacattgcttttcatagagtagttctgaaacatgcttttcgtagtgtctrcaagtggacatttggagcgctttcaggcctgtggtggaaaacgaattatggtcacataaaaactggagagaagcattgtcagaaacttctttgtgatgattgcattcaactcacagagttga

SEQ ID NO: 645966 - DNA, 619 bp, Homo sapiens
aacttcccaaactgaaaagcagagaacaaagactgaaaaaacacaacagaatatccaagaactgtggtacaactacgaaagatataaggtgcacacaatgcaaataccaggagaagaaaaaaaggaatggaaacaatatttgaaggaataaagactgagaattttcctaaattaatgtcagattccaaaccacagatctaggaagctcagagagtaccaagcagaataaagaccaaaaaaaaaaaaaaaattgtacctaggcatatcatagtcacacttctgaaaaccaaagataaagaaaaaatcgtgaaagaagccgaagggaaaaaacaaatacttttcctatatagaagccaagataagaattacatttgacttttcctcagaaaccatgcaatcaaaaagagagtggagtgaaatactgttgagagaaagaaactccatcaacctggaattctgaaccctgtgaaattatccttcaaaaaatgagggagaaacaagtataagcgatatgctaagaaagaagagaaaaagaaattatatataatgctcaaatamaccaaaaaaggcagaaaaagtgtgggaggcaaaaatagaaacaaagaacaagggcaacaaa

SEQ ID NO: 645967 - DNA, 610 bp, Homo sapiens
accagtcataaaagattaagagacaattatggaagagtaaatgttaaatagaatgaattttggtcattagcctaatcccagacctcccccgatcccatccactccctgacttgaaaaacctccgttggatttccctggccacctcctgggcctggttgccagaggcgttttctgacgcaatgcctagcacgccctctggtggctactggmagaagtgcataggtccgtgctgtctttctgagctcacagaagccaagttttagagcttccactagaggtcacaaactggttgctctacaggctgaatgcgacctatagatgtgctatctataaagcatgaatatagggaccaggttcttaatatgttaccagcatttaaaaatctagatattttacgtacaaatccagatttctggcttctttggaaagccaagtctgacaatgacaggcagagacccgcactctccagttacccgtctggcctctgtggtttatgttcagtttctccagcacacaatccctgtagtgggcggaataataagtcccaaatatttgtgtccgccaggaaccttggaatgtgaccttattttagaaataagatctttacaga

SEQ ID NO: 645968 - DNA, 210 bp, Homo sapiens
attatcactaaggataaaggttctagaaccatyaggaacaagggtcccatcttcacacaagttacttaactgctgggaggctctatttcatcttatgtaaactacagataatacctactcacctcaagggtgtatcaagggtttatgtaagctaaatttgtagaaagcagttagcacagtgccaggaagggtccaagaagaaatggtact

SEQ ID NO: 645969 - DNA, 447 bp, Homo sapiens
gaattcttggaactgggattaatcagaatatggcagattagcctccaagatggaattgctttactctcattcaaggtttccctcattcttcactctccccatgctggtcaccttgctgtttgttcctcaaacacatatgaaatgcgtttctgtcttggcagtcatcctgctacctgtaatgtcagcactgctttctgttgtcccttcagtcaggtcattgttcaaatagctctctagacaggctcttccttatcattctacttaaaatagcccccaatcactctgtgtccctttagcctgcttcctcttcctgctatttcatactacctgaaaaaatacttgaacttcctagaacataagctcmtaaaagcaagaactgggctccacctctcctctcctctaccccagcactcagaagagcaacagagtcagcatccagtgagtgtt

SEQ ID NO: 645970 - DNA, 448 bp, Homo sapiens
tgaattcttggaactgggattaatcagaatatggcagattagcctccaagatggaattgctttactctcattcaaggtttccctcattcttcactctccccatgctggtcaccttgctgtttgttcctcaaacacatatgaaatgcgtttctgtcttggcagtcatcctgctacctgtaatgtcagcactgctttctgttgtcccttcagtcaggtcattgttcaaatagctctctagacaggctcttccttatcattctacttaaaatagcccccaatcactctgtgtccctttagcctgcttcctcttcctgctatttcatactacctgaaaaaatacttgaacttcctagaacataagctcctaaaagcaagaactgkgctccacctctcctctcctctaccccagcactcagaagagcaacagagtcagcatccagtgagtgtt

SEQ ID NO: 645971 - DNA, 441 bp, Homo sapiens
gagagactttaaataatataaacaaatgacacactttttactcaactttttgttgtagaaaagttttttttcaatgaaaaacttctgttaacaatactgttctcaaggaatattttctgtttttataamctgggtcatgggttactactgacatctagttggtagaggccatgaatactgctaaactctctgcaatgcacaagacagtccttacaacaaagcattatctagcccataatatcaacagtggtaaggctgtgaaatctaaactaaaaatagattttgaaaaaatttcaattgtataattctaccacactaaatatcaatataatcaatataagcatatactctttgagattctcaatcatttaagaattatgagagtcttaaggaacaaagaaaatacaaataatttgcttcgatattttagtaggcacaata

SEQ ID NO: 645972 - DNA, 447 bp, Homo sapiens
tcctattaagctcaacatgagagactttaaataatataaacaaatgacacactttttactcaactttttgttgtagaaaagttttttttcaatgaaaaacttctgttaacaatactgttctcaaggaatattttctgtttttataacctgggtcatgggttactactgacatctagttggtagaggccatgaatactgctaaactctctgcaatgcacaagacagtccttacaacaaagcattatctagcccataatatcaacagtggtaaggctgtgaaatctaaactaaaaatagattttgaaaaaatttcaattgtataattctaccacactaaatatcaatataatcaatataarcatatactctttgagattctcaatcatttaagaattatgagagtcttaaggaacaaagaaaatacaaataatttgcttcgatatttta

SEQ ID NO: 645973 - DNA, 602 bp, Homo sapiens
acagcagagcattaaagcaaacactgtgttgttcttctcagtgtggggcccaatgagactgcgtaggtcatatgcccaagaagctatattggttggggaatgagggagaggtgagatcaatccaggatccttctgtgtttctgtttgaatgaattcgaatgaataaaggagtctttgtcccattgcatgagaatggaattcagaaagaaaatctggttcatgagagtgcaaaataggtttgttctaatgatttttagctgaaaacaaattctttggtaatgtccaagggcagtcagaagtatgagtctggggcacaaaagagaggcaagatcttgaaatagtgagctgcgtgtttgtagtgcataggtggtatatgacacctgcgggaaaactgtgtgaggatgtagaatgagagtaaaggcagccacggacagaaacctatggaacagcagaattcacaatgggggaggatttcttcagatgtcttttcttctcagtattcctgcctcaagttcagagcttgacatataaaggggaaattagcaggtaggataaaataaaaaaataatwattatttgggataagatgcatgttttcagtgc

SEQ ID NO: 645974 - DNA, 593 bp, Homo sapiens
gccctttgtgttctcatcctctataaaataactctacttttattaattactaattatccactcattccccactgggaaagtgagtgatgtgtgtgtgtgtgtgtgtgtgtgtgtgtgtgtgtgwgagagagagagagagagagagaggaaaacaacactcagtgcaggggaagttttgtcttgacgatgcttatgttcctagcaccttctcaatatctaaaatataaccatactctggattatctgtagtctacttggtaccatcacctggggccatcaccagatctttttaagtcactttacattaaaacaagaaaattccatttcccagaatttctatccctgtattttcaggatggaatttggcaatgagaaaagaaagtcatgggaaattggaaagataacaagaagtaaagctattattttctgaggtagtttcagctaggtataaggacttattgaaatttcagagacttctttgggtatatttgagcacctttcatttggtgctgcagactgaaatacttaatgggagttttctaaaaaattcttgaaattttattattttctgaaaagcactaattcaggctgag

SEQ ID NO: 645975 - DNA, 520 bp, Homo sapiens
tcaccactgcactccagcctaggcaacagagtgagactctgtctcaaaaaaaccaaaaccaaaaccaaaaccaaaaacaaaaaacaaaaaactgagatcacagaaatacaaagaattaaagactgttatgaacaactatataccaacaaatttggaaaatctagaaaaagaagtataaatttctagacatctacaacctatcaaaattgaaccataaacaaataaaaaatctgaacagaccaataatgagcagtgagatctaatcggtaataagaagtctcccatcaaagaaaakcctaggacctgatggcttcactacaaaattctaccaaacatttgaagaagaactaataccaactctactaaaacgcttcaaaaaaactgcagaggagataatactttcaaaataaatctatgaggtcagcattaccttgataacaaaaccaaacaaggacacaacaacaaaaataaaactacaggccaataaacacagatgcaaaaatccttaacaaaatactag

SEQ ID NO: 645976 - DNA, 585 bp, Homo sapiens
acaattttcaccatagattgatactgccctggatctataggctaatgtttcttctctgagattaacatttagcaagaaatggaaaatagaggtgtggacagtataggatatattgaactacacacagtaatttgtgccagaatcagagccccaagtgccagtcaattagcaggtcactaccaagtctgtagtgtatgccatttgctggtgcactgaacctgacttagaagaaacactcaccttcttggagacagaatgtgtggttggcaacattctcactgaccttccactggcatttatttaaggtccatgggggtaccctcccctaacattgggacagagaactttgaacttgcagtgcatcctgtgagcaacaagtaccagctgctgccagagaaaccaagcaggattcaatgctaccgcggaggacactytttctgagctgcctggctccatcccaggcccagcatagatcaactaagggactcgagcccactatctacaaaggacagagaagtctgggctagtgcagacagcagttgtgccagggggttgcactgaggtccctacctgggaaaagggcca

SEQ ID NO: 645977 - DNA, 585 bp, Homo sapiens
caacattataatgtgtatggtatatttatctgaataactggaatatttcaagtggttataaacaagtagattatagactcaattgtataaaataaaaattcaggtaaaagcaaatccctatagttccccaaaacagtttttcatctttcaaagcaagaaattttaaaaaaaaattaaatatattttttccaaatataataaaatacatattttgttaaatttttcaagtatttctaaaatgtatgaattaaaacattctgctataaaatatctactttcattacacaaacatcaatagtgaaatcaataaggataaggtaaatatttttctaatttaaaaaatatttggaaaattcttctaaacatattgtagaaaccatttttcttttgagcaatgattttactagtttcaattaaaataagtaaagttcataatgagtcagagttacctagaaaaaaagaatattcaaagaaagaattgcttttaacacctaatgaagtcattacctcttattacatgagacattttataatttagrtgcataaatgtatacatatctcagtttgttcaaagatttgacattt

SEQ ID NO: 645978 - DNA, 640 bp, Homo sapiens
attttatagttactaaaaattatttgttaaaaatttggatgttttctataaggcagatattattatattgttctttaatgacatttctcatttttccacctagcctatccttattttcagcctttcaagaatggtaatgaatataatataagtacacagtaaatcttcattgtaggtactatactaaactgcttgctttatactacagcaggggacattgctttaatatactgcagttttaagttagctttggctatttattattagacttttaatggcatcagtttcagatattatccttatcaagamcttgtttgtataatttcagatcctttctttacaagaaaaatgtcatattttttgttttttcaaaactccaaactcttattagaccattcattattttttcttctctctcagcaaattgaatataatattatattatctgagaaaaataatttgattagacagttcccagctcaatgccaccatcctctgagttttatacaatgatgctgatctggaataatatactgattaaaaggaaagtctactgagtcagactgtctgaatttaaaacttccctccacattttaccaacttgtgacgttatataggtttcagtttcctattatataga

SEQ ID NO: 645979 - DNA, 578 bp, Homo sapiens
gtttaagacatctagcttgtttctgagctctgaattaaaacagtttgggtgagaattccaattctaactgcaacttgttgaatggttgtgtataaaagattttcttgtccacaaggttttcaaataaaaggcaaaggtaaaattattaaatacttacytccttggtttaacctgaagatttaatgaggtaatagaataaaaatatttgtcacctactgtgggttgagttgtgtctccctaaaagacatgttcaatttctaacctctgatcctctggtacctgtgaatatgagcttatttgagatagattctttgtacatataataaagttaagatgaaatcatataggaatagggtaagccctcaatacactaacaggtacccttataagaggacaggacacaaagagaaatagggtagaagtctatgtgaagatggaggcagaatgtggagtgatgcagctgtatccaaggaatgtgccaagagccaccagaacctacgagaaggcaaagaaggagtccttcctggagactttgcagaggtcatggcccttctgacacctttgttttaaaattcttg

SEQ ID NO: 645980 - DNA, 578 bp, Homo sapiens
gtttaagacatctagcttgtttctgagctctgaattaaaacagtttgggtgagaattccaattctaactgcaacttgttgaatggttgtgtataaaagattttcttgtccacaaggttttcaaataaaaggcaaaggtaaaattattaaatacttacctccttggtttaacctgaagatttaatgaggtaatagaataaaaatatttgtcacctactgtgggttgagttgtgtctccctaaaagacatgttcaatttctaacctctgatcctctggtacctgtgaatatgagcttatttgagatagaktctttgtacatataataaagttaagatgaaatcatataggaatagggtaagccctcaatacactaacaggtacccttataagaggacaggacacaaagagaaatagggtagaagtctatgtgaagatggaggcagaatgtggagtgatgcagctgtatccaaggaatgtgccaagagccaccagaacctacgagaaggcaaagaaggagtccttcctggagactttgcagaggtcatggcccttctgacacctttgttttaaaattcttg

SEQ ID NO: 645981 - DNA, 578 bp, Homo sapiens
gtttaagacatctagcttgtttctgagctctgaattaaaacagtttgggtgagaattccaattctaactgcaacttgttgaatggttgtgtataaaagattttcttgtccacaaggttttcaaataaaaggcaaaggtaaaattattaaatacttacctccttggtttaacctgaagatttaatgaggtaatagaataaaaatatttgtcacctactgtgggttgagttgtgtctccctaaaagacatgttcaatttctaacctctgatcctctggtacctgtgaatatgagcttatttgagatagattctttgtacatataataaagttaagatgaaatcatataggaatagggwaagccctcaatacactaacaggtacccttataagaggacaggacacaaagagaaatagggtagaagtctatgtgaagatggaggcagaatgtggagtgatgcagctgtatccaaggaatgtgccaagagccaccagaacctacgagaaggcaaagaaggagtccttcctggagactttgcagaggtcatggcccttctgacacctttgttttaaaattcttg

SEQ ID NO: 645982 - DNA, 552 bp, Homo sapiens
ggaagaataggaggggccacgtggcactgagtgcttgatgtcctgggggtgttctggccaaatttagggagcccccccttaaatatataaggctgagctcaggatggtgggcaggcggtgaccacacgtggggaggaaaccagagcacctggtacagtgcccagtcccggtcttctccagatactgatgarggggtgcgggcatattttggctgaaggcagcagccctaagctccggaagacaccacattcaccaagtcagaaccctcgggatgggagccaaagaatgttttctagcactcagtgagagaacaggcccgggctacctgattgaaagacaccgcaacccacacgtgtagccttacattttccagcagccacattaaaaaaaagtgaaaagaaacaggtgagattgctcacaatagcatacgtcatttaacccaatatatgaaaaatgccatgatttccatgcataataaatataaaagaattatttatgagatatcttgccatctctttttcatactgggtcctaaaagtcctgtgtgtatcc

SEQ ID NO: 645983 - DNA, 552 bp, Homo sapiens
ggaagaataggaggggccacgtggcactgagtgcttgatgtcctgggggtgttctggccaaatttagggagcccccccttaaatatataaggctgagctcaggatggtgggcaggcggtgaccacacgtggggaggaaaccagagcacctggtacagtgcccagtcccggtcttctccagatactgatgaaggggtgcgggcatattttggctgaaggcagcagccctaagctccggaagacaccacattcaccaagtcagaaccctcgggatgggagccaaagaatgttttctagcactcagtgagagaacaggcccgggctacctgattgaaagacaccgcaacccacacgtgtagccttacattttccagcagccacattaaaaaaaagtgaaaagaaacaggtgagattgctcacaatagcataygtcatttaacccaatatatgaaaaatgccatgatttccatgcataataaatataaaagaattatttatgagatatcttgccatctctttttcatactgggtcctaaaagtcctgtgtgtatcc

SEQ ID NO: 645984 - DNA, 543 bp, Homo sapiens
gctcggctggtctctaactcctgacctcaagtggtccgcctgcctcggcctcccaaaggaggaacccctgggattacaggtgtcagccaccgtgcccgacaccactggctaaatttttgtttgtttgtttgtagagtcaaggttttgctatgttgcccaggctggtcttgaactcctggcttcaagaaattctcccaccttggcctcccaatatgttggcattataggtgtgagccacagtgccccgcccaaactttgtttctctctattgctgagcagtgtttcattgtatgcttgtgccagagtttaatactgctcattggccaggcacagtggctcatgcytataatgccagcactttcagaggctgaggcaggaggatcacttgagcccaggaggtcaaggctgcaatgatcacttcactgcactccagcctgggtgacacagcgagaccctgttcccaaaaaaatgaaaacccaaacaaacaacactgcttagttgctttctgtaatcagcctattaacaaatcaagggagaatgagt

SEQ ID NO: 645985 - DNA, 467 bp, Homo sapiens
tcatatgattttctagatgacagtaatataatttaaaaaacataaagactttccttctttccttatcttgatagtacacaaattcatgaatgtaaatattttaatgaagaaaatggagttaaataaaatggtttactaactagaagatatctcttagtagaatcaattataaaatataacaacattttatgaaaaagaaaacatgtacaactttggtaaacaacacaagctaatttttacttttaaaatacttttaaaattatgatcaacagctagcaatatgaaactgatatctaccaggaacattcctaggtatttgtgattactttaaacaaaaaaattcaaaaaaataattattacattcaaagttgataacctagagagaatgcttgtaaaagttaagaaactttagaaataggcagttataaatagmtcaatttcccgtacttgggtctaaggtaaaatca

SEQ ID NO: 645986 - DNA, 619 bp, Homo sapiens
agagagtaggaaagcctcagatctgtgtttggggctgaaggagaatgttccactgaagtggactcctgcctgcccaggccatggagcttggccagctccctcaccacctgcaaaaccctcagtgcatttcatcagcaccttccctacaacccccatcagggctggtgcattttttcaccactgagggatacaagggtgagattggtggaaccagctccatccagctttgtcccctcctcaggggctgagcatggatctgagggcactgggtattccacaaaccaacccattccttgaggccacagagagcatcttttggtaaagaaaaagaagcttatacccattggtctcttccacagccaacttttacccataagcatctggcctggaggttgaactacatacccaatgcaaaacttgccgacacgagtgtacagcacaggggaataagataagcttcctgagacctccactrtcccagcaccacaggaggcagggaacctgctcatatgcctaatacatcactagtataaccagcatttgaggaagctaccacaaaaatctataactaagtaactcctacagagttttttggcactaaaagcactcagaactagaa

SEQ ID NO: 645987 - DNA, 595 bp, Homo sapiens
ttaagtcctatgaaggaaagagaaaatccacagataaaaactgaaaagaagctatctggtaaactgctttgtgatgtgtggattcatctaacagagttaaacctttcatttgattcagctggttggaaacactctaattgcagcatctgtgaaatgacatctgggagcctaatgtgacctatggggaaaacccgagtttcctcatwaaaactagaaagaagaaatctatgaaacttctttgtgatgtgtggattcatctgagagagacaaacctctcttttgattcaggaggttggaaacactgtttttggagggacatttgggagccaattggagagaaacagaatatccctacataaaaattagaaagtgtcaatctgtaaagctgctttgtgccatgcagattcatctcatggaattaaaactttcttttgattcagcaggttagaaatactctttttgtagaatttgtgaatggacatttgggagcccatttaggtatgcaaatgaaaactgaatatctacagataaaaactagaaagaagctctctgagaaactgctttgtgatgtgtggactcatctcacagaattaaa

SEQ ID NO: 645988 - DNA, 514 bp, Homo sapiens
tccaaactgctgaatgaatagaaggttttaactctgtgacacgaatgtacacatcaaataacagtttctcagatagctcgcttctagttttcatcctgggatattctattttttgccattgtccctaatgagctccaaaatgtccatggatgtaatggacaaaaacagtgtttctaaactgctgaataaaaacaaaggtttaactctctgagataaatgtacatatcacaaagcagtctctcagaaagtttctttatagtttttatcagaagatgattttatttcaccatagtcctcaatgctctccaaaatatccctttgaagattctacgaaaacactctttccaaactactgaatccaaagaaaggttttactctgtgagatgaatgcacayatcacaaagcagtttctcagaaaatttctttgtagtttttatgtgtagatgttttctttttcaccataggcctcaaggctcaccgaaatatcttttttcagattctacatatccgtgtt

SEQ ID NO: 645989 - DNA, 604 bp, Homo sapiens
aaaagacagtttaaactctgtgaggtgaatgcacacatcacagagaagttccacagatrgctttcttctagtttttatcttgggatatttggttttgcaccgtaggcctcaacgggctcctaatgtccctttgcaggttctccaaaaagagtgtttccaacctgctggatgaaaataaaattctaaccctgtgagatgattttacacaacacaagcagtttcacagatagcttctttctggtttttttctggaaatattctgtttctccccttaggcttcaatgggctccaaaatggcctttctcagattctccaaaaagagtgtcaccaacctgctgaagcaaaataaagatttaagtttgtgagatgatttgacacgtaacaaagcagtttcacgatatcttctttctagtttttatctggggatattcagtttttctccatagaacaaaatgggctaacaaatgtcccttcaaagattctccaaagtgagtgtttccaacctgctgaatcaaaaggtttacctctgtgacatgaatccacctatcacaaaatatttcacagataacttctttctcatttttatctggggatattcagtttt

SEQ ID NO: 645990 - DNA, 604 bp, Homo sapiens
aaaagacagtttaaactctgtgaggtgaatgcacacatcacagagaagttccacagatagctttcttctagtttttatcttgggatatttggttttgcaccgtaggcctcaacgggctcctaatgtccctttgcaggttctccaaaaagagtgtttccaacctgctggatgaaaataaaattctaaccctgtgagatgattttacacaacacaagcagtttcacagatagcttytttctggtttttttctggaaatattctgtttctccccttaggcttcaatgggctccaaaatggcctttctcagattctccaaaaagagtgtcaccaacctgctgaagcaaaataaagatttaagtttgtgagatgatttgacacgtaacaaagcagtttcacgatatcttctttctagtttttatctggggatattcagtttttctccatagaacaaaatgggctaacaaatgtcccttcaaagattctccaaagtgagtgtttccaacctgctgaatcaaaaggtttacctctgtgacatgaatccacctatcacaaaatatttcacagataacttctttctcatttttatctggggatattcagtttt

SEQ ID NO: 645991 - DNA, 518 bp, Homo sapiens
ccgtctgtgaaactgctttgcaatgtgtggattcatctcacagagttaaaactttcttttgattcaccatgttggcaacactctttttgtagaatctgcaaagggacatttgggaacacattgagtccaatagggaaaaattgaataccccataaaaaagtagaaaaaagctatatgtgaatctgcttggtgatgtgtaaattcaactcacagaggtaaacatttcttttgtgtcarcaggttggaaacactctttttggagaacctgtgaaaaaatgtgaaagcccattgagggcaatggggaaaaacttaatatctccaaataaaaatgagaaagaaactatttgtgcatctgctttatgatatgttgattcatctcacataggtaaacctttctcttcattcagcaggttggaaacaatctgattggagaatctgcaaagggacacatggcagcccattgaggtccacagagaaaagccaaatatccctatataaaaactagaaagaatctatct

SEQ ID NO: 645992 - DNA, 518 bp, Homo sapiens
ccgtctgtgaaactgctttgcaatgtgtggattcatctcacagagttaaaactttcttttgattcaccatgttggcaacactctttttgtagaatctgcaaagggacatttgggaacacattgagtccaatagggaaaaattgaataccccataaaaaagtagaaaaaagctatatgtgaatctgcttggtgatgtgtaaattcaactcacagaggtaaacatttcttttgtgtcaacaggttggaaacactctttttggagaacctgtgaaaaaatgtgaaagcccattgagggcaatggggaaaaacttaatatctccarataaaaatgagaaagaaactatttgtgcatctgctttatgatatgttgattcatctcacataggtaaacctttctcttcattcagcaggttggaaacaatctgattggagaatctgcaaagggacacatggcagcccattgaggtccacagagaaaagccaaatatccctatataaaaactagaaagaatctatct

SEQ ID NO: 645993 - DNA, 510 bp, Homo sapiens
gacttatttctttccaaattggatgtcctttatttctttctcttgtctgattgctctagcaaggacttacagtactgtgttgaaaaacagcagtaaaagtaggcatcccttgtcatgtttcatatcttagaggaaagcctttcaatttttccctgttgagtatgatgctagctgtaggtttgtaatatacggcttttattatgttgaggtatgttccttctattctcatttttagggtttttgtagtaaattttatcaaatgatttttcagcatcaattgaaataatcacacggttttcatcagttttattggtatgatgtatcatgctgatttgtgtatgttgaaccgtccttgcatcccagggataaatcccacttgattatgatgaatgatcttttaaatgtattattgaatttggtttgctagtattttactagggatttttagaytgatactcatcagtgatactggcctgcagcttttggggtttgtttgtttgtttgtttatg

SEQ ID NO: 645994 - DNA, 510 bp, Homo sapiens
gacttatttctttccaaattggatgtcctttatttctttctcttgtctgattgctctagcaaggacttacagtactgtgttgaaaaacagcagtaaaagtaggcatcccttgtcatgtttcatatcttagaggaaagcctttcaatttttccctgttgagtatgatgctagctgtaggtttgtaatatacggcttttattatgttgaggtatgttccttctattctcatttttagggtttttgtagtaaattttatcaaatgatttttcagcatcaattgaaataatcacacggttttcatcagttttattggtatgatgtatcatgctgatttgtgtatgttgaaccgtccttgcatcccagggataaatcccacttgattatgatgaatgatcttttaaatgtattattgaatttggtttgctagtattttactagggatttttagactgatactcatcagwgatactggcctgcagcttttggggtttgtttgtttgtttgtttatg

SEQ ID NO: 645995 - DNA, 307 bp, Homo sapiens
taacgtgacagtcttcctactccaaattcctctttaccatgttgtccttgtccaactaaaactctatttcctactatgtacttttatataaaatgaaataattggtaagaaacactttaataacaagcagagttagccaggcatggcagctcacacctgtaatcccagcacttttggaggccaaggagggtggatcacttgaggtcaagagttcaagaccagcctaaccaacatggtgaaacctcctctactaaaaatacaaaaaaaaaaaaaaaaaaaaaaatagccrggtgtgatggcatgcatc

SEQ ID NO: 645996 - DNA, 589 bp, Homo sapiens
atctttcttaagcttctgatttcttaagatgcatcagaagcttaagaaatcacctccctgtttaggtgatatttattggccagaattggggagatggatatgggagaacattggagacaagagaacccatcttcttcctccctrtttttgggggtggaattacctgcattttccatgtagctttgttttttctttcatgccctgtccccactccctacaagaaagtaagaactttagtttccatctcctatatcacctgcttcctccagccattttaagaacagagccagcaagaaggataagcagtcagttgcctatagtgttgcatccacatttatgttactgtactgtgttttgtaggaaggagaaattttataaagtttttttcctttgtttgatgaaataacttgtcataccttttcacaatgatgctccatttgtagtaaacacaaaaacatctgttggtaacgataaaaaaccttgactttttacaataaaagttaaaagtcagtcttaagcattccagtgaactcacaggggcatcaccagatttctaagtgtttcgaaggctagacagccttgcaggccg

SEQ ID NO: 645997 - DNA, 634 bp, Homo sapiens
tttacctctaaattctattttcttctcttctcctatgtttttcaagcttttctgattggagtttattgtaaaaatcacactttacataggaccaaatacatacacgcaatagaaattgtccaaaaaatgcttatttttacaatatgtcacttactctgacattctgcattctattctattctatttcattttgtaaaatataaaacaagtggactttacaatccacaatgcatggtttaaaaaatcactaatctgcatcttatttcttggcgttatcttgcaygtgagtaaatagtttttggaaattaacttcagagggctatagaccaattgaggtaaaagaagtagaaaaactggtggagagagtgaatgtctcttaaatgtaattaaatttaatttaaatttaaaatctgttaaagacctatgtttagctcctttgcaaataaataggacttgttttggtaggaaaccagtaagtcttaatcctgatatttcttcaagtgtattttgagaaaactcatgcttacattaatgagttttaccaaatcagtaatgataataatagttttaaatctaatcagagcaaagcacaaacaagtctatttggaggagcaaaattgagttaagggtaaga

SEQ ID NO: 645998 - DNA, 629 bp, Homo sapiens
tggatatttacatgcaagattcaataagtggtgctagaaaaactggatattcacatgtaggataaatgaatctagactcaaggtcttatattctttgcaaaaattaactcaaaatggatcatagatctaaatgtaaaaaacaaaactgtaaaacccctagaggataacataggtgaaaatcaagaccttgtgttttatgatgactttttagatacaacaccaatagtattattcatgaaaaaaagaatgataaactggacttcrttaaaattaaaaatttctggcctgtaaaagacattgtcaaaaaataaaaacacaagaaacagactgggagaacatacttgcaaaagacatatctgataaaggattgttatccaactatacatgttactcttaaaacctaacaattggaaaacaaagggcttttgccctttattctgctaatatggtgtattttatttgaatatgcatttctccaaaatgatatatgtctcacaaacacataaaatatgttaaaccttattagtcactaggaaaatgcaaattaaaatcataagaaactaacacttcatacccacaagaagggctataactaaaagacaaacaataatagtcttaggaaggctata

SEQ ID NO: 645999 - DNA, 556 bp, Homo sapiens
tggtaaaacattatttctgggtgtgactgtgtgggtgtttctggaagattagcatttgactcagtagactgaataaagaagatccaccttcaccaatgtgggcaggcatcatctaatcattgaagatccagatagacctggataaaagtgaagggagggtgacttttctctttctccactggagctgagacatctactctttcttgcctttgaacattgggagctactggttctcagaccttcaaattccaggatttatacagccttccttgcccagttctcagaactttgacctcagactaggagttacacccttaactcccctaattcccagccttttaaatttggactaaattacaagactggctttcttgagtctctagcttgcagatgacagattttggatcttgtcagccttcataattatgtgagccaattcccataataaatcctcctcttatactgtgtatctctrtataccctattggttctgtttctctaaagaactctgactaacacagtgctcaataagtatttgttgaaaaattaatgttta

SEQ ID NO: 646000 - DNA, 424 bp, Homo sapiens
cttgcagctgcacacctggagaggagctgatgttctagattgagggtcatgcagctgaagactccgggaggagctgagttggtaatttgagggtcttgcagctgccgactcggggaggagctgatgttctagtttgagggccctacagttggaaatctggaaaggagctgatgttctagtttgagrgtcgtgcagctgaagactcggggaggagctgatattctagtttgagggctctgcagctggaggtgcagacaggagctgatgttgtagtttgagggtcgtacagctgaagattcagggaggagctgctcatgtatttttagggtcatggagctgcagacctggagaggagctgatgttaaagattgagggtcatgcagctgaagactctgggaggagctgacgttctaatttgaggtcc

SEQ ID NO: 646001 - DNA, 401 bp, Homo sapiens
taaaaatactaatagtccctgatatgcggaaataatggcataagctgtctttctctctgtctcctctccctctctgcctcggctgccaggcagggaagggccccctgtccagtggacacgtgacccacgtgaccttacctatcattgsaggtgactcacattctttaccctgccccttctgccttgtatccaataaataacagcgcagccagacattcggggcactactgttctccgtgcattggtggtagtggtcccccgggcccagctgccctttctcttatctctttgtcttgtgtctttatttctacactctctcatcgccgcacacagggagagacccaccgaccctgtggggctggtccctgcagggttataggcatgagccaccatgcccggcc

SEQ ID NO: 646002 - DNA, 401 bp, Homo sapiens
taaaaatactaatagtccctgatatgcggaaataatggcataagctgtctttctctctgtctcctctccctctctgcctcggctgccaggcagggaagggccccctgtccagtggacacgtgacccacgtgaccttacctatcattggaggtgactcacattctttaccctgccccttctgccttgtatccaataaataacagcgcagccagacattcggggcactacygttctccgtgcattggtggtagtggtcccccgggcccagctgccctttctcttatctctttgtcttgtgtctttatttctacactctctcatcgccgcacacagggagagacccaccgaccctgtggggctggtccctgcagggttataggcatgagccaccatgcccggcc

SEQ ID NO: 646003 - DNA, 564 bp, Homo sapiens
atattatagtgccagagtctttggaatacatgaracacaaagaagaaatattcttattactcatattataataaccagaaatttttagactccattttttaaagtatatgtgaaaagtagagattgttttcagagagaattactttcccaaagctaacaattcatgatctacccaggagatacttgtttgtttacttttatttctttatatattttatttgcctgtttactttttgttatttgtcttttctaagtgggaatcctggaaagagcccaaagcctttgaacaaggctacaaacaaatgagaaagttggattgtgttcatttatttggtaccacaagagaagagcttttgttctttacttgttgtagacatttaatcattcacttcatttaatattcattaagatataggtatgcaaatatacaaagctgaataggtgcttagtctttctattcctcactttttagaaagaaatatctaacttaagttttatgtatgatttgcttatggacaagcagtctattacaccaaaatgatatcagccatattatagagcttg

SEQ ID NO: 646004 - DNA, 543 bp, Homo sapiens
ggtgattacctttctttcatgaagccatgcagtttagagttggaagaaaccacctagggttcctgatgccaaattcagtagcctttccattaaatcccatgccttgccacctaagtcatcygtccttccccagtctcctacctaggcaccagggatttctttaacatggttactctctgtcttcaaatctggcttaaagaaaaaagcccactgaagcctgaccacgtgctttgagtgggcttgattcactttgaacgctgaacaaagacttaaaactacattggttatcaaattgtgtgtgttcattgtttctttctctttaaccaaaatagttaatctaattataacctattgttgattctaatagtgttcaaaatcctcaactgagtgtgggggtgtgtgtgtgctaattttctgaaaaaattggaatacagtgagcactgagagccattttattctatcagaaattgtaatgacaaaaagagccattttattttatcagaagttgtaatgacaaaaaatactcagctgaggaaatattgc

SEQ ID NO: 646005 - DNA, 590 bp, Homo sapiens
ccctactaacctcatttcaacttgctaacctctgtaaagaccctatgtccaaataaggtcacattctgagttactaggagttatgacaactcaacccacaacattggcttattacaaaattctaatttttcacatcaactctttttaaaaatgattaacgtgttcatgctattttgaatatatttcaaattaattcatgttttatttcctacgtagtctcaatatggaaataggaacaaaattcctgcttgacacactgatttttctctatggtcttgtttaggaagaaggttctctgaaataaaaagctatctgatgtgagaagatgagtcagggagacattaagttgtccttttctttgctcaagtagtttcacctcattgccctttatctctttctgtaggtattttatttgttttcatataatgtctttcctaattacatgagttataaaaatttatttattaactaaatctcataaaattttcttatcagtgacaawgtcaatgtgtgaagatctgacatcacattcctttaaaaatcaattcacagggttatgttttgtcttcttaatcacaaaccaagaaaag

SEQ ID NO: 646006 - DNA, 639 bp, Homo sapiens
caaaagtctgtttaggaaacaacccaatgcgcatcactggtaaatggataagcaaaatgtagtgcatttgatgcaggagaggcaaacccccacattggccttagcttgagagggttcctggcttcacccaggaaagaattaaagggcaggtcagtgctgttaaacagcaacttttgttgaagcagcagcatacagcatcagcagaggtactcatccttgcagagtagggctgcttcgtaggcaatgtgcccagagcagcatctcagagrcaattctgcagtcatatttatatgcacttttaattatatgcaaattaaagggtggattatgcagagatttctagaaaaaggatggtaacttcctagtcattgggttattgacatggaaagggacagtacctttcaggtgttgccatggcaattgtaaactgacatgacacagtggtaggcataccttatggaaagctgtttcttccctggccctgtttaagctagtactcaatctcgtccagtgtccaagcctcatctctggagtcaagtcccatctcctgagtagagttctgctttctacctcattttcatacactggaacactatataacaataaaaaggagtatattactgatatttgtttcaacat

SEQ ID NO: 646007 - DNA, 416 bp, Homo sapiens
cagagaaatgcaaaccaaaactacaataagatatgatctcacctcagttaaaatggcttatatccaaaaaacaggcaatagcaaatgctggcaagggtgtagagaaaagggaaaccctgtacactgttggtggaaacgtaaatcattacaaccactatggagaacggtttgaatttatttctgggttctttatgctgttccattaatctatgtgtctgtttttatgccagtgccacgctgtttcagttactatagctctgtagtataattwgaagtcaggtaatgtgattcctccaattttgttatttttgttaaaataaactaaataaaataaattcaaaaaactaaaaatagagctaccatatgatccagcaatctcacttataggtttatacccaaaagaaaggaaatcagta

SEQ ID NO: 646008 - DNA, 610 bp, Homo sapiens
atctgtattttctctaagttcaatgtagacagaataagttaatcaccattgcgtctatatttttaggattttttacacattttaaatacagaccatgtaaaacacaaacatgtaaacacatatttccaaacagataatcacacaaggactctttcattaatatatattgcctcagtctataatattatggtaagattaattcaatataatattcaatatcacaacaaaatcaacagattcctggaggtgcttatgttactattcttttatacagagattgtgaaartaggagaatccttcaaagtttatcatattattgatataaaaagataaaaaactgaaagaattcatgatgtgtggtgctgtgcataggctggtttgcttaactgacagaaatatgcctaggagaagacgttactaccttaggtgaaatgagtgaaatcagatgagtgaaatttttatcactgttctggtttaaccatcattacagtattagggccatttaaatgtaatatgttcattacttacaagatttttaaaggagtctgtatgtattatatttaattgataagtatattgagtatctctaaaatattttctttttttctgt

SEQ ID NO: 646009 - DNA, 610 bp, Homo sapiens
atctgtattttctctaagttcaatgtagacagaataagttaatcaccattgcgtctatatttttaggattttttacacattttaaatacagaccatgtaaaacacaaacatgtaaacacatatttccaaacagataatcacacaaggactctttcattaatatatattgcctcagtctataatattatggtaagattaattcaatataatattcaatatcacaacaaaatcaacagattcctggaggtgcttatgttactattcttttatacagagattgtgaaagtaggagaatccttcaaagtttatcatattattgatataaaaagataaaaaactgaaagaattcatgatgtgtggtgctgtgcataggctggtttgcttaactgacagaaatatgcctaggagaagacgttactaccttaggtgaaatgagtgaaatcagatgagtgaaatttttatcactgttctggtttaaccatcattacagtattagggccatttaaatgtwatatgttcattacttacaagatttttaaaggagtctgtatgtattatatttaattgataagtatattgagtatctctaaaatattttctttttttctgt

SEQ ID NO: 646010 - DNA, 610 bp, Homo sapiens
atctgtattttctctaagttcaatgtagacagaataagttaatcaccattgcgtctatatttttaggattttttacacattttaaatacagaccatgtaaaacacaaacatgtaaacacatatttccaaacagataatcacacaaggactctttcattaatatatattgcctcagtctataatattatggtaagattaattcaatataatattcaatatcacaacaaaatcaacagattcctggaggtgcttatgttactattcttttatacagagattgtgaaagtaggagaatccttcaaagtttatcatattattgatataaaaagataaaaaactgaaagaattcatgatgtgtggtgctgtgcataggctggtttgcttaactgacagaaatatgcctaggagaagacgttactaccttaggtgaaatgagtgaaatcagatgagtgaaatttttatcactgttctggtttaaccatcattacagtattagggccatttaaatgtamtatgttcattacttacaagatttttaaaggagtctgtatgtattatatttaattgataagtatattgagtatctctaaaatattttctttttttctgt

SEQ ID NO: 646011 - DNA, 586 bp, Homo sapiens
tgcctaatgaattatgcatatttttgactgggaatgatagtttgggttagatttttggtaagaaaggggaaagtcaggccaagagaataaccacaaacatattgggttggtgcaaaagtaattgcagttttcatggcaaaaccacaattacttcttcaccagcctagtaaaagcaaagctatggaaattctcacccaattggaaaatggtacagtctgtacagcatatgtttcataaaggaagagtgggagtataagacctaaatgtatattcaatctggattcggtaggccttgtatatcatgccaatgagttttactgttacactgtggttagtggaaaattcttgatggatttaaatcagattaatgacaagattggttgtgtgtcagagattatttttacaacagtgtatagagctgactgaaggagggtattgtaaagactctgaaaagaagccactggragagagataacatgctatgtgtgctcctaacataaaagacagcaagtgcaaaaaatcctgataaatgaccttatcatgttcaggtaacagggagaaagaagttccatataaatagagataa

SEQ ID NO: 646012 - DNA, 587 bp, Homo sapiens
gtatgagggtatctctggcctattcacttaaggaaaaacataccaccagaaatggaattccctttcagtatcagaggttaatatgttaaatcccattgttagctaacatttttctaaaatacaccaactagaagtttgtcttataccctactctttactgctcctatcttacacgtatcattatgaaaacaaataaatgtccattttgtttccttttktaaaaacatatgataatcaaaacatttggtcaacgtctactccatctttttgtttatttaaagacaacttttatgaaatgatcatattggaagttatgatatccttcagctagttgcaaagactaaagaaaatatgctactcaaggtaaatgatttataacccctgagcagagtcacagtctctctctctctctctgtctctctctctctctctcacacacacacacacacacacacacacacacattttagaatcttcaaaaaccacttccaatacaaactaggtatctgaagtaaagagatactcattttggctgaataaaaggcaaattcattttgtgtttttcaacttatttttagagaaagctt

SEQ ID NO: 646013 - DNA, 551 bp, Homo sapiens
ggtcatcctatccacttgatttttaaaattcttctctgctgaggtcatcctttggtgagcatccacatgggacacaaatatcaccatggttttgtcactcattcagagaggtccacccacacatacctctttcccaggtttccttgtcaccaatcttctaattatgtttacacattatgccatttgttctttccaagcaaagtgaacaacctggtgcactatttgaagttgagtccactgggacaacttctcttcaccactgtccagggatgtcccagagaggggctacagtgctgcagctatccactttcagatgrttcctgaatattatgcaaaaccctctgtaatccaggcccaagtcttctcttctttagtcaactgataatggggagctccccatgggaccataagtgcaggctgcgagagaaaggtcagtgtagcagatgtggggaccatgggcttttgggtcactttttcatgtaacttacttgtgcctcagagcctgctcagacctaatcatgtgtataccacttccattaaatgctggagtg

SEQ ID NO: 646014 - DNA, 551 bp, Homo sapiens
ggtcatcctatccacttgatttttaaaattcttctctgctgaggtcatcctttggtgagcatccacatgggacacaaatatcaccatggttttgtcactcattcagagaggtccacccacacatacctctttcccaggtttccttgtcaccaatcttctaattatgtttacacattatgccatttgttctttccaagcaaagtgaacaacctggtgcactatttgaagttgagtccactgggacaacttctcttcaccactgtccagggatgtcccagagaggggctacagtgctgcagctatccactttcagatgattcctgaatattatgcaaaaccctctgtaatccaggcccaagtcttctcttctttagtcaactgataatggggagctccccatgggaccatargtgcaggctgcgagagaaaggtcagtgtagcagatgtggggaccatgggcttttgggtcactttttcatgtaacttacttgtgcctcagagcctgctcagacctaatcatgtgtataccacttccattaaatgctggagtg

SEQ ID NO: 646015 - DNA, 309 bp, Homo sapiens
actggagcatttatgctgtttgtgcagcattgcccagctgcagagaagcccaaggctcagagggtaagaagtgactggaagttgtcttgctacgtatgtggtgcaggttctttaactktcataaaaatatatttgataagatggtcaatttgcatgagtatttacccaatcagagggtgcagagaacagttatatggagatttttttttaagctattacatttacatcatttagaaatcaaaatgagataagttacctaccaagggtaccttccccatttctacgcccatcatagggagctgagaatgg

SEQ ID NO: 646016 - DNA, 570 bp, Homo sapiens
actcggctctaccaatcagcaggacgtgggtggggccagataagagagtaaaagcaggctgcccgagccagcagtggcaacctgcatgggtccccttccacaccgtggaagctttgttctttcgctctttgcaataaatcttgctactgctcactttgtgtccacactgcttttatgagctgtaacactcaccgtgaagatctgcagtttcactcctgaagccagtgagaccacgagcccactgggaggaacgaacaactccagacatgctgccttaagagctgtaacactccccgtgaaggtctgcagcttcactcctgagccagtgagaccatgaacccaccagaaggaagaaactccgaacacattcgaacatcagaaggaagaaactccagatgcgccaccttaagagctgtaacactcaccgtgagggtcygcggcttcattcttgaagtcagtgagaccaataacccaccaactccagacacggtgggacaaaacaacactttaggtagtgcatttaagtttcatctcatccaaacattcagcaaacatttcactaacgcctac

SEQ ID NO: 646017 - DNA, 578 bp, Homo sapiens
attgcagatagtgacaaaggctataaggaaaacaaaagagggtaataagtgtgaatccatgttgatgacacttaagctgaaatctaaatgcaagaataagccagccatgccaatgtccaagggaagagtagccagagagggggacagattggacaagagccccaaatcgggamtgatcctcatatgttcacagagatagaaagggccagaatggctaaagcaaagccagcaagggagagagaactgagaaacaaggtaagaggctgaggcaaggaccagggcacacaggcctataagatgggacctcagtctaagtgtgatgggaaccatccggagcttgtgggccaaggagtgataaaattcaacttatctctgaaaagctcactctggattttgtgtggaggatgcttataaagggatacaaataggacctgggcacaacagctcatgcctataatcccagtactttgggaggctcagatgggagtatcccttgaggccaggagttcgagaccagcctgggcaacatagcaagatcctgtctctaaaacaatttttaaaaattagccaagcacaat

SEQ ID NO: 646018 - DNA, 596 bp, Homo sapiens
aaaacacctagaagaaaataagtaaagcacaggcaacaaaagcaaaataaacaagtaagagtacatcaaactaaaaggttcctgcatagcaaaggaaacaataaacaaaattaaaacacagtttacagaatgggaaaaaatatttgcaaaccatatgtctgataaaggtttaatatccaaaataaataagaaattcctacaactcaacagcaaaagcaacatcaacaacaaattaacccaattagaaaatgggcaagagacctgaatagatatttttccaaagacaacatacaaatggataataggcataggaaaaaatgttcaacatcactaattattagggaaatgtaaattaaatcaaagtgagataccacctcaaatctgttagaatggacattatcraaaagacaagggaaaacaagtgtcagtgagaatgtggagaaaaggaaacccttgtacactgctggtggaaatgtaaataggtacagcctttatggaaaacagtatggagagttctaaaaaaacataaaactaaaaataccatgtaatccagtacttcaactacaactagtctatatgcaaaggaaataaaatca

SEQ ID NO: 646019 - DNA, 596 bp, Homo sapiens
aaaacacctagaagaaaataagtaaagcacaggcaacaaaagcaaaataaacaagtaagagtacatcaaactaaaaggttcctgcatagcaaaggaaacaataaacaaaattaaaacacagtttacagaatgggaaaaaatatttgcaaaccatatgtctgataaaggtttaatatccaaaataaataagaaattcctacaactcaacagcaaaagcaacatcaacaacaaattaacccaattagaaaatgggcaagagacctgaatagatatttttccaaagacaacatacaaatggataataggcataggaaaaaatgttcaacatcactaattattagggaaatgtaaattaaatcaaagtgagataccacctcaaatctgttagaatggacattatcaaaaagacaagggaaaacaagtgtcagtgagaatgtggagaaaaggaaacccttgtacactgctggtggaaatgtaaataggtacagcctttatggaaaacagtatggagagttctaaaaaaacataaaactaaaaataccatgtaatccagtacttcaactacaamtagtctatatgcaaaggaaataaaatca

SEQ ID NO: 646020 - DNA, 634 bp, Homo sapiens
aacagagcatggggccaataatagaccgaacttgtagcattgtgcttgctgaagaaccctggagtaactccctagatgttagaaaatcaggaagatggatccctgaaaatccatgttttcaaattcagtcactcaggtgctcctaacatgcttgatatctacaatacatmtcagtgatctgttcattagtaaactttcagaccttttccatgcaatacgttctttctttctccttctccttcttttccttctttctcattttttaggaaaaagtggcctcagaaatgcctataatttcttacctcctcctgccaaaaagtgtttcagttcctaccactaaatttactactaaaatcctggcttctctctttttctttatcagatgcaaattagttttaaaaatctatgaaggacctattatgtacaaggttgcatgataagtactttgggggtgatttttctttgagtacttcaggttatttggttattagcttgacaccgtggaaatacatctgaagaaaaaaaaattctccttctctagtgcttatgttcttagaggaattagaaaaagacagtcacaaaggaaacttttctagcacagagaactataaaatacgagtctttgtttctaaaa

SEQ ID NO: 646021 - DNA, 634 bp, Homo sapiens
aacagagcatggggccaataatagaccgaacttgtagcattgtgcttgctgaagaaccctggagtaactccctagatgttagaaaatcaggaagatggatccctgaaaatccatgttttcaaattcagtcactcaggtgctcctaacatgcttgatatctacaatacatatcagtgatctgttmattagtaaactttcagaccttttccatgcaatacgttctttctttctccttctccttcttttccttctttctcattttttaggaaaaagtggcctcagaaatgcctataatttcttacctcctcctgccaaaaagtgtttcagttcctaccactaaatttactactaaaatcctggcttctctctttttctttatcagatgcaaattagttttaaaaatctatgaaggacctattatgtacaaggttgcatgataagtactttgggggtgatttttctttgagtacttcaggttatttggttattagcttgacaccgtggaaatacatctgaagaaaaaaaaattctccttctctagtgcttatgttcttagaggaattagaaaaagacagtcacaaaggaaacttttctagcacagagaactataaaatacgagtctttgtttctaaaa

SEQ ID NO: 646022 - DNA, 634 bp, Homo sapiens
aacagagcatggggccaataatagaccgaacttgtagcattgtgcttgctgaagaaccctggagtaactccctagatgttagaaaatcaggaagatggatccctgaaaatccatgttttcaaattcagtcactcaggtgctcctaacatgcttgatatctacaatacatatcagtgatctgttcattagtaaactttcagaccttttccatgcaatacgttctttctttctccttctccttcttttccttctttctcattttttaggaaaaagtggcctcagaaatgcctataatttcttacctcctcctgccaaaaagtgtttcagttcctaccactaaatttaytactaaaatcctggcttctctctttttctttatcagatgcaaattagttttaaaaatctatgaaggacctattatgtacaaggttgcatgataagtactttgggggtgatttttctttgagtacttcaggttatttggttattagcttgacaccgtggaaatacatctgaagaaaaaaaaattctccttctctagtgcttatgttcttagaggaattagaaaaagacagtcacaaaggaaacttttctagcacagagaactataaaatacgagtctttgtttctaaaa

SEQ ID NO: 646023 - DNA, 634 bp, Homo sapiens
aacagagcatggggccaataatagaccgaacttgtagcattgtgcttgctgaagaaccctggagtaactccctagatgttagaaaatcaggaagatggatccctgaaaatccatgttttcaaattcagtcactcaggtgctcctaacatgcttgatatctacaatacatatcagtgatctgttcattagtaaactttcagaccttttccatgcaatacgttctttctttctccttctccttcttttccttctttctcattttttaggaaaaagtggcctcagaaatgcctataatttcttacctcctcctgccaaaaagtgtttcagttcctaccactaaatttactactaaaatcctggcttctctctttttctttatcagatgcaaattagttttaaaaatctatgaaggacctattatgtacarggttgcatgataagtactttgggggtgatttttctttgagtacttcaggttatttggttattagcttgacaccgtggaaatacatctgaagaaaaaaaaattctccttctctagtgcttatgttcttagaggaattagaaaaagacagtcacaaaggaaacttttctagcacagagaactataaaatacgagtctttgtttctaaaa

SEQ ID NO: 646024 - DNA, 620 bp, Homo sapiens
aacaggaatgcccctgaaacaagaatctgtaactatacttttaaactttgatgtcacaatttctaagaaactggtagagcagattttaccttcaccctgtctgacaaggctggaattgacagggaatgctgctgtactgcctagtggtcgagacagcccactggttctgtacctatgtaaccctgccccatgggcatgggaatggacggagaggcacttgctacactagtgttgcttctggcaatctgaaccagcacgggggcctcacctaacatcccttccgaaggtagaaaattaaaactaactggctgggcgtggtggctcatgcctgtaatcccagcagtttgggaggccaaggcaaggcagatcacgaggtcagggtatcgagaccatcctggctaacacggtgaaaccccgtctctactaaaagtacaaaaattagccaggcatggtgtcgggtgcctgtagtcccagctactcgggagcctgaggcaggagaattgcttgaacccgggaggtagaggttgcagtgagccgagatggagccactgcactccagcctgcgtgacatagtgagactctgtctcaaaawaaaataataaaaaaaataaaactaactg

SEQ ID NO: 646025 - DNA, 581 bp, Homo sapiens
agacaaaattggaaatggcaacaagccttctccttctcgctgtcttaaatccacccattagatgatttgagcactccatcttcactggcaagcatttagaaacgaatagtattattgcagccttccatgctgcagcaagagtaacaggagacaagctaaagcagtgaagcaaccatcatagtcagggactatagctctgctcgctgtctaccagcagaaccccagcatctgatggtccctttcttgtctccattcagaagaaagagagcagcaggtcacaagtgcagacatgcaggcaaggtaggacagtatgaagctaataatcactgtagctcatctctactgatacgtgtctttttgacttaggtaataaattatccagtttaagtgayaagtggttgggattgctaatcgataatttttttgttttttcagctgacacatgggtggaaaatgatgataaataaacccccagggttcgaggggaacagccaatcattattaaagcttggacctaatctcagatgctaggccacaaatctgaagcaaataccaacagcagagttattatggtcaaagaa

SEQ ID NO: 646026 - DNA, 542 bp, Homo sapiens
aaattttgttttccttcactttttcaatttcaatttttaataggaatttacttcctctaaaggaatgttactgtcttcagtgtctagaacagtccataataggtagtagtcattcaataaattctgttgaatgaatagataaagattgttaaacatttttttctgattttgaccctaacactatgcccagcctagactgattcacagcccaactcttgagagacacagagcagatataatcatacaatattctataaagtatcttttcactacaaataagtaaaatgccaaaaatttagtcatttccttaaaatttagtggattcttatatgccttattgaataacaaagaaaatgctgtaattagtamtagttttttggaactggaatataactgtgaatatatcaacataaatgtggcccacatgttaccaaagtttaaaaaccactaatttacaccatctcatccttttttaacctatttcattttctccagtttctccccaaatatcctttgcattttattgttctgtaattttgttt

SEQ ID NO: 646027 - DNA, 507 bp, Homo sapiens
gcccaaaagacatttctacctggaagctgcgagtatgactttctctggggggggraaaagaaaaacaagtctttgcagatgtgattaaggtaaggatctcaatatgggatcatccttgatttaggttgagccctaaatccaaaaacaggtgtttcctatagagcaagtaaaatatagagacaccgagaagaccatgtgaaaacagaggcagaagtcacatggctacaatcccagcaacaccaaggattgccagcagtgagtagaagctagaagagagccatgacacagatcattcttcagagcccccaggaagaatcaaccctgttaacactttgatttcaggcttttggtctcctgaattgtgagagaatatatgcctgtcattttaagccaccgagtttgtggttaatttgttatagtagccttttttgtttggagacaaaaagataaactagatattttcattactagtgcattatacactataaaggcaagacgactgttcca

SEQ ID NO: 646028 - DNA, 619 bp, Homo sapiens
tgaattttatcaaatgtctttatttactgagataatcataaggttcttctcttttagtgttttaatggggtgaataactgatattttaatgttaaaccaacctttcattttagaataaaacttattttcttaggatgtaggcttttaaaaagtatatcattggggccggacacggtggctcatgcttgtaattttagtactttgggaggtcaaggcaggaggattgcttgaagctggagttcgagaccaacctgggcaaaaaaatgagaccctatatttatttgtattcagtttgccaaaattctgtttagaaaattttaaaagactatgtaaatgtagttttaggttcacagcaacattgaaagtatggtacagagattgtctgtgcttcctgtccacagacatgcatagcttcccccattatcagtatctctcactatagtggtacagttgatatgattgatgaaccaaaattgcatgtcataatcatccagatttcatagtttatattagtgtgcactcttggtgttgtacattctgtaggtttggaaaggacygatattcatcattatagtattgtacaaagtaattttactgctctaaaatttatttatgtttc

SEQ ID NO: 646029 - DNA, 402 bp, Homo sapiens
tcaacaatgtacgaatttatttatttgttcaattctagaatatacaagtagttccagaattactaacctatatttctggataaaaaagaggtctactaattggagttcaatatttgtttagaggtctttttgcctttagcctgaaggcaagtaatctaggtattgtgttcaacatttgcttgagttaattttttctcccttcttgagtgtgattattttattcatttgatttatgtagatcaattcatttgtttccaattgtatttagttttaggctatcctcccyttctttgtgggtttttacatttttatttatttatttatttgaatgtgagaaacagtaatattatgggttaaattgtgtcccacctcccatcccctaattcattattgaattcctaa

SEQ ID NO: 646030 - DNA, 402 bp, Homo sapiens
tcaacaatgtacgaatttatttatttgttcaattctagaatatacaagtagttccagaattactaacctatatttctggataaaaaagaggtctactaattggagttcaatatttgtttagaggtctttttgcctttagcctgaaggcaagtaatctaggtattgtgttcaacatttgcttgagttaattttttctcccttcttgagtgtgattattttattcatttgatttatgtagatcaattcatttgtttccaattgtatttagttttaggctatcctccccttytttgtgggtttttacatttttatttatttatttatttgaatgtgagaaacagtaatattatgggttaaattgtgtcccacctcccatcccctaattcattattgaattcctaa

SEQ ID NO: 646031 - DNA, 496 bp, Homo sapiens
aatgttatattaatatcatgaacatttttgcaatattaactagccctcaaaaacaaattcttactggctgctaatacttggatatatagatacagtataatttatgtgatgatttttcatggttgagtatctcagttattaccaatattgactattttcacgtaaccctgcaatgcccagtcctgtacacaaatctttctgtgcatctctgatgagttttgaactttttatcatggaagatgccaaatagatacaaaagagggaagatttagtaaaatgaaaccttctttgcacactgyatgcctcaggctgttttgaagtaagtcccagatgtcatgcatgtgccaacatatacctcaaaaaaaggactatttaaaaatcatagcaattctgtcattatcacacctaaaataattagctataattcctcaatgtcatagtctttttagatagtggatttttagaactgatggtcccttcctaatatggctcttga

SEQ ID NO: 646032 - DNA, 496 bp, Homo sapiens
aatgttatattaatatcatgaacatttttgcaatattaactagccctcaaaaacaaattcttactggctgctaatacttggatatatagatacagtataatttatgtgatgatttttcatggttgagtatctcagttattaccaatattgactattttcacgtaaccctgcaatgcccagtcctgtacacaaatctttctgtgcatctctgatgagttttgaactttttatcatggaagatgccaaatagatacaaaagagggaagatttagtaaaatgaaaccttctttgcacactgcatgcctcaggctgttttgaagtaagtcccagatgtcatgcatrtgccaacatatacctcaaaaaaaggactatttaaaaatcatagcaattctgtcattatcacacctaaaataattagctataattcctcaatgtcatagtctttttagatagtggatttttagaactgatggtcccttcctaatatggctcttga

SEQ ID NO: 646033 - DNA, 588 bp, Homo sapiens
acctcagtggcacacaaccataaagtgttttttgttatgctcacaagtgagcatggctggctggctggctggctaattctacggttctgggccaaacctgtctgaattgttcatgagtctgtggtcagctggcatgtcagctggtgccttactggtccaggatggctttaccagcaatcatttgtctctgctccaaatgtacagtactctaatcatcagcaggatagcctgggcttggtctcatgcaaaggctcaggtcaaagagggaacaaaagcccaacaggccttttgagacccaggtttagaattggcatattatttcgcctataatctattgaccaaataagtcataaaaccaagccaatgtgtaggggtgggcaaacagactctactttttaatgacaggaactgttaagtcacattgcgaaaaacattgcaatgatggagccatttctgaaatctacctcactgctctatcattgcttgaggttacaagttcagtgacaaggccttaktaccagatgaaacagaagacccattatgaatttgtaaaagacattaaaaatattttttattatgaatttcaaa

SEQ ID NO: 646034 - DNA, 622 bp, Homo sapiens
ggacatggagtggagtcagagcaatatcccttaagttagccagatcaaaaacagtattttcccaaaagcttttatatctacgtgatattagttattcttctaaacttttctttctgatctgtgyaatttttctgataaaaaatacatttttcatgtaacaaaactgcacttgtgcccctaaatctataaaaaattaaaaattaaaaaataaattaaaaatgtatcttcagtaaaaattatttgggaaaaaagtaaaaagcattagaagaaaatataatcagcaataatcctaccattcagagagaaaatttggcatatggtattatgaatattctttgaggagatttggaaattatgtactcttgtgcttaactagaattgagcatgccatgtttcttgacatagtctatttttcttttgtgtaactcactaatgatttacatttttcttatgtagatcctgcccttgcctctctgtattcatctcaagttccttctgccttcttttttatctcttccctttcctaaagtggacctttaatataggatttttctcattgatcatttctgatgcataagaaacttcaggaagtttgtatatttgttttgtatttaaccaccag

SEQ ID NO: 646035 - DNA, 553 bp, Homo sapiens
gcacataggtcagcagtaaatacttgctgaatgaatcaggataacatatgctcttagggttcatgcatatttaaaaatttctgcaaataattttgatgctcagcttcttttcaagcccagtatactacttgaaaataacctgtgaaatgcgactacttcttcaaccctaaattacaattagacatcattagagggtgacaccaactcaaattaaaacaaacaaacaaacaaaaactgtactttagatttgatggagcaaggctctataagcattccctgagggctataatgatgtctcattcattattatgtccacggagcctgacatagatgattgaatgcttggtgactcaaccaaactggaataatattataattytttctgtggcctttcacattttttattttctttctttaaagtttgcccttcttttattattattattattttgcgacagtatctcactctgtcatccaggctggagtgttatggggcaatcacagatcactgcagccttgaactcctcagtctcgctctgtcacccaggctgga

SEQ ID NO: 646036 - DNA, 590 bp, Homo sapiens
acaaggggaaaggcagggaaattcccttagactgttcttacatgcactctcacacttaatagtcaaagccaccctatgaaatagacactacgttattagcctgagttacataaacgagtaaacagaggcttggagaagttaaaaataaattgccctcagtcctaactggagagtggtggagtcagaatttgaatccaggtttaaagaattctagtgccggcactctgcacctatttctctttggacactcatttcccctaaggatcagagaagctcaaagtaggccacttttcgtctccgtaagtccgcaaggtcctgcgagatcacagtgagcagrgcaccagcaaatacagtctgcgaccgcgagacgtaaagggaagaacgctcctcggcacccctccccagtctatcctaaagtcaagaacgtccgagcccgcctttctccgggggcgggctgcaataaaacagcaaaatcctccattccccatcagcggtcgattgggggctctttcgaagcggcagctctgtaggaccgctcttctaccccaagatccctcggcttcggccccctaggtgccagggtctgcggg

SEQ ID NO: 646037 - DNA, 580 bp, Homo sapiens
agtaagttataaaacaagtattcgtgtgaaacctgacatttaaaagatgtgttgatgtaagatactcaaagtaaatatacatttttttaaaggaccattatgttaaagggacataaaagctcagtttatctttagggcattatgagaaataccttaagattcattttcttggctgggcatggtggctcatgcctgtaatcccagcactttgggaggaggatgggaggattgtttgaggccaggaattcgatactagcctgagtaacatagtcagaccctatctcaaaaaaaaaaaaaaaaatccagatatggtggtgtgcacttgtagtcccagctatttggaaggctgaggtgggaggattgctggagcccaggagttcaaggctgcagccaggagttcaaggctgcagtgaggtatgattgtgccactgtactccggcctggacaatggagcaagactctttctttctttattattatttttaaaagattcatcttcctacagttatagacataaaaatgattcttatrgttttcctgatcttaaacacaatgataaagcagttgttcttaataaata

SEQ ID NO: 646038 - DNA, 580 bp, Homo sapiens
agtaagttataaaacaagtattcgtgtgaaacctgacatttaaaagatgtgttgatgtaagatactcaaagtaaatatacatttttttaaaggaccattatgttaaagggacataaaagctcagtttatctttagggcattatgagaaataccttaagattcattttcttggctgggcatggtggctcatgcctgtaatcccagcactttgggaggaggatgggaggattgtttgaggccaggaattcgatactagcctgagtaacatagtcagaccctatctcaaaaaaaaaaaaaaaaatccagatatggtggtgtgcacttgtagtcccagctatttggaaggctgaggtgggaggattgctggagcccaggagttcaaggctgcagccaggagttcaaggctgcagtgaggtatgattgtgccactgtactccggcctggacaatggagcaagactctttctttctttattattatttttaaaagattcatcttcctacagttatagacataaaaatgattcttatggttttcytgatcttaaacacaatgataaagcagttgttcttaataaata

SEQ ID NO: 646039 - DNA, 559 bp, Homo sapiens
tttgtcaccattctaaaccacttttcctagtctgaatttgtgggacccacttatggtctcactcatttgtgtgcagttaattgctaagagtgtgttttatattgtcttttctgctcttmaaaaaatttatattacagaaacagggaccgagaaaaacgcagagaaagagaaagagatacggatcggaaaaggtctcggaaatccccatctcctgggaggagaaacccagaaacatcagtaactcagagttcctctgctcaggatgaacctgctacaaagaaaaagaaagatgagctggatcctcttcttactcgcactggtggagcatatattccccctgcaaagctcaggatgatgcaggaacagattacagataaaaacaggcatgtttatatcaatcagtatacaaagccatgaaattgtcattgaaaaataagtcaactgtggtttaattaaccctggttcttgagaatttacgttagtctatagtgatagagacctcaaattagagacctctttactttatagctccattggagagccacacactacgtgccct

SEQ ID NO: 646040 - DNA, 508 bp, Homo sapiens
ccatttctttctttcttttgccaaatcattctggccaagacttccattattatattgaatraaagtggtaaaaatgggcatcattgtcttgtcccagatattagaggaaaggatttcaatttttccccaatcagtacaatgtttgctgtgagtttgtcatatgtagtttttattattttgaggtatgttctttctatacccagtgttttgagtgtttttattataaaagaatgttgaactttattgaatgcttttttcagtatctattgaaatgatcatatggtttttctttttggttctctgagtgtgatgtatcatgttattgatttatgtatgttaaaccagccttgcatctctgggatgaatcttatttgatcatggtgaatgatctcttttacatgttgttggattcagttggctggtttcttattgaggatttttgcatctatgttcatcagcgactttgacctgtaattttcttttttgtcgtgtccttgtctggtttagt

SEQ ID NO: 646041 - DNA, 508 bp, Homo sapiens
ccatttctttctttcttttgccaaatcattctggccaagacttccattattatattgaataaaagtggtaaaaatgggcatcattgtcttgtcccagatattagaggaaaggatttcaatttttccccaatcagtacaatgtttgctgtgagtttgtcatatgtagtttttattattttgaggtatgttctttctatacccagtgttttgagtgtttttattataaaagaatgttgaactttattgaatgcttttttcagtatctattgaaatgatcatatggtttttctttttggttctctgagtgtgatgtatcatgttattgatttatgtatgttaaaccagccttgcatctctgggatgaatcttatttgatcatggtgaatgatctcttttacatgttgttggattcagttggctggtttcttaytgaggatttttgcatctatgttcatcagcgactttgacctgtaattttcttttttgtcgtgtccttgtctggtttagt

SEQ ID NO: 646042 - DNA, 567 bp, Homo sapiens
agttgacaacagaaaattcacaactgatactactaatcatgctatcaaaagtagttataacttgttcaggaaaaacatatcacctgccatttataagacatttacacccagtagggcagacactatcacatccagtatacctgattttgctgaagatgaaacaagtgtagctgcagcatctgattgaaggtttagtggttttcctttagcttagctttctagtgatgacatttccaatatggatgaaaacccagctcttactttttctcctttgagaaagatgtcgtccattaaaccaaatgttcctgctatctccactgaggacagaaataacatggcctttctagscttccatcagagagtgtcatgtctctaaaacctacgtctgttggagtacctgaaactctcatcttaactgctaattctcgtactaaagacactgcagctcccagacttgcaaaaagtgaaaacttacatcatcatccaacaatgttaatttcaacagcatcggagcctatgccaacatatttcgcttactttaaggaaggtattatctcaggaaggcaa

SEQ ID NO: 646043 - DNA, 627 bp, Homo sapiens
ctgcatgtaattgtgtacggccgactccacgttggtcatggctgacttgctttgtcctgcgtccccaargggcaacgattggctgattttatttctgaacaattttgacaaagttgttttcaggagcccaggaagcaaatcagttgtagatttgaattttgtaggggctcagaattgttgaatatatatatagtcttttacatgctgataattatttccataccacaaagaaggccggctattaggaggctgctgttcaattcctttgccccgtgaactcgtgagctgtgtctttgtggggggggcactcacttgttagaggcgtttcccttcataataacgtcagccaacattctaaatagatgcaagaaattaaatagtcttccccagacaggtactttggccttctaaagtgaattacacattgtaaaataaaacacagtcacattaaaaaaacaaaaggtctttgtgtcaggttggtctggcttcagcaaagataatatttgcctccagagtagaagatccttggaatccacagtattgcatacggcagccccacatcttgtttccttttcttttctttttttttttttttgtttttaactaaaagagttgacaattttattt

SEQ ID NO: 646044 - DNA, 627 bp, Homo sapiens
ctgcatgtaattgtgtacggccgactccacgttggtcatggctgacttgctttgtcctgcgtccccaaggggcaacgattggctgattttatttctgaacaattttgacaaagttgttttcaggagcccaggaagcaaatcagttgtagatttgaattttgtaggggctcagaattgttgaatatatatatagtcttttacatgctgataattatttccataccacaaagaaggccggctattaggaggctgctgttcaattcctttgccccgtgaactcgtgagctgtgtctttgtggggggggcactcacttgttagaggcgtttcccttcataataacrtcagccaacattctaaatagatgcaagaaattaaatagtcttccccagacaggtactttggccttctaaagtgaattacacattgtaaaataaaacacagtcacattaaaaaaacaaaaggtctttgtgtcaggttggtctggcttcagcaaagataatatttgcctccagagtagaagatccttggaatccacagtattgcatacggcagccccacatcttgtttccttttcttttctttttttttttttttgtttttaactaaaagagttgacaattttattt

SEQ ID NO: 646045 - DNA, 627 bp, Homo sapiens
ctgcatgtaattgtgtacggccgactccacgttggtcatggctgacttgctttgtcctgcgtccccaaggggcaacgattggctgattttatttctgaacaattttgacaaagttgttttcaggagcccaggaagcaaatcagttgtagatttgaattttgtaggggctcagaattgttgaatatatatatagtcttttacatgctgataattatttccataccacaaagaaggccggctattaggaggctgctgttcaattcctttgccccgtgaactcgtgagctgtgtctttgtggggggggcactcacttgttagaggcgtttcccttcataataacgtcagccaacattctaaatagatgcargaaattaaatagtcttccccagacaggtactttggccttctaaagtgaattacacattgtaaaataaaacacagtcacattaaaaaaacaaaaggtctttgtgtcaggttggtctggcttcagcaaagataatatttgcctccagagtagaagatccttggaatccacagtattgcatacggcagccccacatcttgtttccttttcttttctttttttttttttttgtttttaactaaaagagttgacaattttattt

SEQ ID NO: 646046 - DNA, 627 bp, Homo sapiens
ctgcatgtaattgtgtacggccgactccacgttggtcatggctgacttgctttgtcctgcgtccccaaggggcaacgattggctgattttatttctgaacaattttgacaaagttgttttcaggagcccaggaagcaaatcagttgtagatttgaattttgtaggggctcagaattgttgaatatatatatagtcttttacatgctgataattatttccataccacaaagaaggccggctattaggaggctgctgttcaattcctttgccccgtgaactcgtgagctgtgtctttgtggggggggcactcacttgttagaggcgtttcccttcataataacgtcagccaacattctaaatagatgcaagaaattaaatagtcttccccagacaggtactttgsccttctaaagtgaattacacattgtaaaataaaacacagtcacattaaaaaaacaaaaggtctttgtgtcaggttggtctggcttcagcaaagataatatttgcctccagagtagaagatccttggaatccacagtattgcatacggcagccccacatcttgtttccttttcttttctttttttttttttttgtttttaactaaaagagttgacaattttattt

SEQ ID NO: 646047 - DNA, 545 bp, Homo sapiens
agatctaggctagacagataaacttgaaggcattaacctagagttgttagttaaaactacaaaatcatccaaggaaaagcatagagcaagagagatagtggctgtgcattggcacctgaggggtagaaacagccagctgggtactggcaatggtggtcagaaaggaccagaaaaaaaaaggtaaaaaaaaaatcttggggaggagagacttcttcatgaagtgagtgattaaagttaccacatgccctaagacggtcaagtaagaatactgaagagaaggcactgaatttgtcactaggggrcccttggttgtctcttccaagtaacatttaatgtggtgttgggagcagaagccagactgaaattggtggaagagtaacacagaagcaacctgaatttactgtagccgggcctccatgggcctcaggggcctccactgctcatttcagaatccacccacagcatccctggtggcctcctctcagcccactgtgttcagagaagcctgaagagaatccaaagtatctgcccaggttcttggtaca

SEQ ID NO: 646048 - DNA, 589 bp, Homo sapiens
ttgggcaaaaataaaaatgcctgttcaaaaaaccaaactgttcttcctatcagcactttagcggtgcaaatctctgtgaagggaggctttctgtttgatcaggaatacttttgttccctttggtagagaataaaagttgagctcttgaacttctcacartagaatcaaatttgcatatcctgcaactcgtgtctaaaccgcccagctttcacttacagacaacatgggatgttgtctttactacaagtgcattttagagactccaattgtgaattgatcttaagtgaaacaactcaaaaacaaaaagccaaatactgcatgttctcacttacaagtggaagctaaataatgtgtatatatggacatacattttggaaaaacagacacaggagatgtggaaaggtgggagggtagaagaagtatggggaatgaggaattacctattggatacaatgtacacaattcgggtgatggctacactaaaagctcagacttcgccactatgcagaatatccttgtaacaaaaccgcacttgtctcccctaagtttatataaataaataaacaaaccctgatccatactgtttaaa

SEQ ID NO: 646049 - DNA, 613 bp, Homo sapiens
gggtaacaactctgcctgcagagcagaaatctagcatccttggctcagcctctctggggcttctcttctagccctgcctacctgcagagtgcatgccctccaacctgttttcctacacacaccactgagagaggtgatgtttcagtaaaactgtgtctgactggacgggtatacctgtttcttttaggggttagatcacaacttcattgtatccatgttgtgtaatcatcacacttcaattcagccttatctataaccagtatcttaaactccactcactcctctatttttcttgtttggagagaggaaaggaggattaggcaaacagagtctcaccaaacccgagtgttttacacatacacatacttttattaataattcatatagtattgtatttatcactttaaagtgtacaactggtatattcacaaaattattgtgtattaccattatcaaattccagaacatttttaytacccccctcccctcaagatgcatatgcgtagtcattagaagttattcccattctgctttcttcccttccccttggcaactactaatctactgtctggctataaacttgctcattttggatattttacataaatggaat

SEQ ID NO: 646050 - DNA, 613 bp, Homo sapiens
gggtaacaactctgcctgcagagcagaaatctagcatccttggctcagcctctctggggcttctcttctagccctgcctacctgcagagtgcatgccctccaacctgttttcctacacacaccactgagagaggtgatgtttcagtaaaactgtgtctgactggacgggtatacctgtttcttttaggggttagatcacaacttcattgtatccatgttgtgtaatcatcacacttcaattcagccttatctataaccagtatcttaaactccactcactcctctatttttcttgtttggagagaggaaaggaggattaggcaaacagagtctcaccaaacccgagtgttttacacatacacatacttttattaataattcatatagtattgtatttatcactttaaagtgtacaactggtatattcacaaaattattgtgtattaccattatcaaattccagaacatttttactacccccctcccctcaagatgcatatgcgtagtcattagaagttattcccattctgctttcttccyttccccttggcaactactaatctactgtctggctataaacttgctcattttggatattttacataaatggaat

SEQ ID NO: 646051 - DNA, 547 bp, Homo sapiens
tttgtatcacaataaacaactggggaccaatacccattggtaaaggggcaacgctgatatcttcattttacttaattttttagaagtcttcacacaaagtagaaaccataaattaatagcaacagataaaacatcaaaagtaaaaaagagaaaatgaaaacacactataaaataaacagaaaacaaaataagatggaaggcatggtttaagatatttatgttgactgagtattgggttcagtgacccagttctcccactggattaagaatcaagtcccatctatatgttgcttaaaataaactttcaaaaagacttttagcaatttaaatatagagatacagataagatggatgttaaaaggatagaaaaagatwtataatgaaagagtactcataagaaacctggagtgactatataaatgtcagacataataaactttaggataagatatattactagagacaaacagggtattttatccctctcaaaatcccaattcaatttttgtaggaagtaccatgcttattcccaaagttacatggaagc

SEQ ID NO: 646052 - DNA, 455 bp, Homo sapiens
tagtaatttgaaaacttttatttaatgatatgaaaaactttcagcagagaaaaaaaaaccatcatggaacacttaatgacttcttatatgttaggaagaatttttgatctttagccattttgagtgaaggaaaacaaaacctttttcttcaattcagaggtctctgaaccattcttctgttcgcctctctgttgatttatacactgaaaacaactgaggaccagtaacgtgacctctctttctttcctttgccaacttatacatatttaatattttaatctacttctctatcttctctaaatttctttttgtttatctttgcccttatgttttagggccaagtgacttccaggaattttacatagtatcccagacatagccatamccaagctgtataaactagaacttctgcttctcacctgtgtgcaacccgactcttttcaaggcaaactgca

SEQ ID NO: 646053 - DNA, 533 bp, Homo sapiens
tctcaccccagatgggtcaacctatgatgttgctgaagcatttttgaatttggatggagaaattgactttcaatctctctgtggaggcaggggtagaaaatgtagggcatccaagctgctggtggcaatgtttccagctctgtggaagaaggtagtgtgtgtcaataaagccaacatacagacagaagaaagatgagcaggtggtatccaggctgcgtatccagtcacacagaggattgactgtttatcaaggcatatgtttgtccttccaacaatrtaattaggtgcagaaaaattcagtaggttcctttctgtatctagctaatttgaacagtttccctttcctgccaccaaaaacgttgtgctaaccaacaggaaacataaacatatccagtaattgaagtcctattgtacacagactcataattctcctgactcttcatctattcagttgcacttttctgagagttgatggagagcccttgtaacaacctagatcctacctaatataagatcagaaactaagtcctgta

SEQ ID NO: 646054 - DNA, 635 bp, Homo sapiens
atcttttgttttccctgctcaacctgtttttttcaaatggttctatgattatttaaaattagtaagtctatgtaacacacttggatatcataccacattcccctatttgtgcctataaataaattatatatgtagtttatatagacaatatataaaatgtcaatctgtcatgtgcatgtatgtgtgcgtgtatataaatttgatttatgtcaatataatctgctttagtttagaggaagaatgtagtagagggtattgaggtcattgttaatttcagttgtgctgmgaactaggaaattcactctaaacatataaaggaagttgtgtaacagatttaggctcctctaaaatgagggttcctctaagatatgagagaatgagaaagcaaacaagagagactatgtcttttcctcaaactccctgtccaggtctctaaatttctatctgagggactcacccccaaaaccccatttagaatgccttataccttaaatgtatattttcccattctaagaaaccaaacatgacagtatcaagaattcatttttggtttgaggttagtatccttctgactattctggcaggtagaaagcatgttgacaacaaaaatgcctttctgaatttttcacagcact

SEQ ID NO: 646055 - DNA, 596 bp, Homo sapiens
gaggtagtttcccagcctcacaactaggcacccttctcactgcttggtggctgcccacaggattctttctcggtgttggtgcctgtgcctgccattggaggacccccaggcagacctgtctggtatggccctgcccttcattgcccccactccccttaggtttgagcagggagctcaggccactataaattacatgaatcagcccacactgcctgaggtaacagagaacttctgccagtaaacaagggttaaatatatacccagccacgtttgccacagctggcttttacctgtaagcaccatctatgggcttgtaggttgaactctatagccccatataaaacctgccaaaagaaatgcatatggctatagaagcaaatccaaaacaccctacccagcattctctatagtcacacaccctaaggagaggggaaaggggaaaaaaacccaacaaatttatacgttaaaaaataaaaatttaaaattctacacacaggaaaataattctaaaactagaattaccagtgcatccagatgcraaagaatgagtgcaataattctggcatcatgaaaaatctgaatgtagtaacaccgcc

SEQ ID NO: 646056 - DNA, 609 bp, Homo sapiens
tctaatttttatattaataatttatagtttttgaggcaagtcatttcaatgatattctgaggaattatatgcctatttagaaactgctacattatttctctaaaatgtaagtttattttccaagaccacataatagtaggggtgaggttagaactcaaatccagtacrttctactcaagtgtagtgttctatctctccacttaattccaactatcctcacatattactatatctggccattagctaataatatcactcaacttaactatgagggactctttggctctgtgtctagaaatcacttgacaaagtttaacacccttaaataggcatttttcaattgaattttggaacatggaaggagaatgtagtactacctatgctgtcctattcctgagacaaagaaagcaaggaggaatctggacacttgttctgtcctcttgaccaggcattttaactgcccacaagattaaagaaaaaggagtaagtgagtacttagctctgacttagggatacgtggaagaggagggttccactccactccacttgggtgggaatatggggctcttattgcagagaagctttgtaattttgccaagccacctaacc

SEQ ID NO: 646057 - DNA, 609 bp, Homo sapiens
tctaatttttatattaataatttatagtttttgaggcaagtcatttcaatgatattctgaggaattatatgcctatttagaaactgctacattatttctctaaaatgtaagtttattttccaagaccacataatagtaggggtgaggttagaactcaaatccagtacattctactcaagtgtagtgttctatctctccacttaattccaactatcctcacatattactatatctggccaytagctaataatatcactcaacttaactatgagggactctttggctctgtgtctagaaatcacttgacaaagtttaacacccttaaataggcatttttcaattgaattttggaacatggaaggagaatgtagtactacctatgctgtcctattcctgagacaaagaaagcaaggaggaatctggacacttgttctgtcctcttgaccaggcattttaactgcccacaagattaaagaaaaaggagtaagtgagtacttagctctgacttagggatacgtggaagaggagggttccactccactccacttgggtgggaatatggggctcttattgcagagaagctttgtaattttgccaagccacctaacc

SEQ ID NO: 646058 - DNA, 511 bp, Homo sapiens
ttctgttttagtttgagatcttataggcctgtctcatcaggttggtgtcagcccagctaggattaggcagaattgggtgggggctgtagtgcatttttggcacagcatgtacctgtctgactaattctctgtcttttctttcctgttgcaattcatgggtcttagcatcttctgaatggtgtttagtaggtcatcctgttgatttcctgctagggagtagcatactctggctctgtaccattggccaagggacttaaggatagatgargggctacagttttgttaaatggaacaatatgaagagatggcattgtaaaaaaaaaaaaaggcttggcagcagggcccatttgaatggttggtccttggctcctttgttgatataggcagatccttgatgggaatttggaatgatcccaaatattgtagatcactggtacatcaagtcatcctcaaggttgtctgtgtaacagtcttgaatgatattttgtcagtctttggagattctctgtat

SEQ ID NO: 646059 - DNA, 511 bp, Homo sapiens
ttctgttttagtttgagatcttataggcctgtctcatcaggttggtgtcagcccagctaggattaggcagaattgggtgggggctgtagtgcatttttggcacagcatgtacctgtctgactaattctctgtcttttctttcctgttgcaattcatgggtcttagcatcttctgaatggtgtttagtaggtcatcctgttgatttcctgctagggagtagcatactctggctctgtaccattggccaagggacttaaggatagatgaggggctrcagttttgttaaatggaacaatatgaagagatggcattgtaaaaaaaaaaaaaggcttggcagcagggcccatttgaatggttggtccttggctcctttgttgatataggcagatccttgatgggaatttggaatgatcccaaatattgtagatcactggtacatcaagtcatcctcaaggttgtctgtgtaacagtcttgaatgatattttgtcagtctttggagattctctgtat

SEQ ID NO: 646060 - DNA, 578 bp, Homo sapiens
aactgaattttgtattcctcccacctcccacctccaccaccaattcatatacttaaatcctaaaccccaatgtgatggtatttggaggtggggtctttggaagataattaggtaatgagggtggagccctcacgaatgggattagtggccttataaaaagacacaaacgagcttgctatttctttttctgctctccaccatgtaaggatgtaatgagaaggtgccatctgcaaaccaagcagtagacctgcaccagacagcagatttgctgggtcctcaatcttggacttccccgtctctagaactgtgagaaataaatgttgtttaagcctcccagtctacggtaatttgttatagcaaactgaactaagaaattccttgaatttcttcttaatgaattgttcatttatatcccttgctcatttttattgtatttttcttattaatttgttagagctagttatatttcagagttattcatttttgtctataatatttgtaataaataatgtctcccagtctgttgctgttttttgtactytgtacaaaatatgttttgtacatttttcttttgttga

SEQ ID NO: 646061 - DNA, 569 bp, Homo sapiens
aacccggttcctcagttggaaatgcagaaataattcatcttctggttcgctcctgctgggagctgtagattggagctgttcctattcagccatcttggctccaccccactttttaatttttttaaatcagagtctcattctgtcgcccaggctagagtgcagtggtgtgattccagctcactgcaacctccacctcccgggttcaagcgattcagcctctggartagctggggctacaggcgcacacctccatgcccagctaattttttgtatttttagtagagatggggtttctccatgttgaccaggccggtctcgaactcctgacctcaagtgatccacccacttaggcctctcaaagtgctgggattacaggtgtgagccaccacacttggcctgttcttttattataataactgaaacaaacccgttacactattatatgtgtgtgtaacttggtgacataggctacaggtcataggcaaaaaataagataaataaaaataaacactaatctactcccactaatgacatgcccctgctctacacctgcttggttgtcatcctga

SEQ ID NO: 646062 - DNA, 572 bp, Homo sapiens
attggtttgaacccgcaataatttatcattaccttttttataatcaagatattttttaaagtaagaagaaaggagaaaatgggttttgggtaattaacagagttctgaacaacaacctagatttaagaattttagacaaaggtatagaacaagaccatgctactttatagttttcaaacataaaggtttttagaagttaacagtaatgagttattgatatgaattataagtttaaaaacacctattaacctagaaaatatttaatgaatatttaataatcattacattgaaaaattcatccaataaatatttgagcctatgcatatgcatagcactgtactaggccttaggagagatgtaaaaacatgatatgcacctcctgccttcaagaaactcctaaacaakaatttttggtattacattttatattttataacactctctcataggcgttctttcttttgaaatttataactccatgcattaggcagataaaatttttacctgatgaagaagttgagacagaccctgctcttgtctctctggccattaccacttcaacattgatttct

SEQ ID NO: 646063 - DNA, 616 bp, Homo sapiens
tgatgtgcctcagggaaaccccaggactcttgccttaacccatgttgtgtggatgggtcttgaggccatttttatcttgatgttttaatcacctgatgtcttgatggaatgggcaatgactcattcatcttggtctgtagccctgaatttaatgaactaaagcctgacagcgttcttggccatagtgtggcccctacatggatggaacctctctttctttgatactgacttcctttgyacccaacaccttggcaattcattgaaatctttggttccaaactgcaagatctaggtggcacaccaacctggtccctacctgatgttgagcatcaacagtgtcagaatcagaatcccagctgcctcacttatcatgccagctggtactctacagcccaagctgagcacaggtgcaccacaaccccttgttaatggagttttgcagcatctatataaatcttatgggtaatgtgttaaactggttcagtaggtctgtggggagcagggggactgagattcagttctaacaagcccgtggtagaagccaatgctacagcatcctacaggtccatggatcacattttgagtaggcaatatttattgtaatgaccttccctcc

SEQ ID NO: 646064 - DNA, 550 bp, Homo sapiens
gattggggatttttcaacctcagcactaatgacattgagagggggctaatgcttttctgtggggggagctgtcctgtgcctcataggaygtttaacactatccctgtcctctacccactagacgccagtggcaccacctactccttttcaaaaatcaaaaatgtctccaaacactgccaaatgtcccctgcaaatcacccctggttgaaaaccactcctctagttacaactagcattccacaggtaaaacagaggaccatgttaaactaaactgcatgtatacaatcagcaaaatacagactatgggaaatgtcacacatcaaatgacccagtttcttcaacaaataaatttccaggaaaagaggcagggaagaagggggaatctttggatcaaaatatatagagaagacatttttttaaccaggcaaaactaaactatagggtttacaggtacacagttgggtgataaaattacaaagaaatggaagaaagtgattgttgcaaaagtcccatagggagaagggacgtggttgaagttggaatgcgacac

SEQ ID NO: 646065 - DNA, 591 bp, Homo sapiens
ggaaccacgtgtattatctatccaggagcctgaaactccaagatattaatacaatatcagttctgttgtatatactgagcagcctaatacagggatgaaaagagaaggaaaaataaattttcaagaaagctgagcacagtaaaagttacgaaatatcagtstaaatgtcatgagaggaccaacaagcactaaagccaaatcacccacagatttgtgcataagaatttaaaacaacagaaccatgttccaaaggtttaaatacgtacacttaaaattatcaaagatgaacaaaggagtaacactcataaagtaattaaaagaagtaccatgaactgtgggatataaaaagatctacagttaacccttgaacaatgcaggggttagggtgactgacccttgtagttgaaaatccacgtgtaacttttgactcccctacgatgtaactactgataaaagacaaacttcagctgagttaaatttaaaggcgtttaattgcgcactgaacgattccaatccagcagcacccagaatcacagcagattcaataaagtaaatgagatcacaggggcaattaatgaactgatgaccaga

SEQ ID NO: 646066 - DNA, 617 bp, Homo sapiens
tgtattgcactcctgcatgctggtggagcaagtaaagcaaaacccgcccttgcagacactcaccagaaaactgatgtgggaagttgccatgagcttggggaaaactgcagtatggggcagggttgggggttgggtatgcaggctcatgtggggcggtgagggctgcctcacttgagctctacgctagtcaggcaccatctgctggtgcagacgctatgatgtgggcccccaggacacttgagactgacctgtatgcaggcatggtcatgctggggccctggaagaggccatcagacaaaggagtgctaggtcagagcagccccgtctgatgtgcaagacaactgcagagatcagatccaacrgttctgctaaggctaaagtttcttacttacgtgagcaagttgagcctagggggatggccatacctggctgtgctccactacaaacactcctgcaccaaaccctctgggctccacatcagctggcttgctgccccaccactttacttgtttcctggtggctccactctagagagatgtggttcaattagcccaggatggaaggtttgtgttgtgggccttagccagggattccctgtctggtgatgagcagtagca

SEQ ID NO: 646067 - DNA, 641 bp, Homo sapiens
acataatctggctcctttatctctctgattgtcattttttccactcttctccttgctttctcatgttcagcaaatgctggtaaggatgtggagcaacaggaactctcytcattgatggtgaaaatgcaaaatgttacagccactttggaagaccatttaaaagtttcctaacaatccaaacatactcttactatacaattgagcaatggtgctctgtagtatttatccaaaggagttgaaaactttcttttcgtacaaaaaccttcccacggatatttgcagcaactttattcataatttcagaaacttggaagcaaccaagatgtccttcagtaggtaaatgaataaataaactgtagtgcacccagacaatgaaatactgttcagtactaaataaatgaggtattaagccataaaaatgtgtggagaaaccttaaatacgtattactaagtgaaaaaaaaacaatctgaaaaggctctatgacttaaactatatgacattcttgataaggaaaaattgtgaagacagtaaaaaggtaagtggttgctaggatttagaaaggagggaagaatgaataggtggagcccagagaaattataggggtgtgagaatattctgtatggtactataatagtggatg

SEQ ID NO: 646068 - DNA, 547 bp, Homo sapiens
atggaataatatggaatggastggaatggaatgcagtggacacaaatgaaatggactggaatggaatggacacgaatggaaaggactggagtggaatggacacgaatggaatggaatggaatgaaatggaatggaatggaatgaaatggaatggaaaggaatagaatggaatggaatcagttggaatagaatggaatggaatggagattaatggaattgaatggagactaatggaatagaatcaaatggaatggcatcgaatggaatggactcgaaaggaatgtgctcgaatggaatggaatcgaatggattgatatcaaatggaatggaatggaagggaatgggatggaatggaattgaaccaaatgtaatggacttgaatggaatggaatcatatagaatggactcaaaagcaatggtctcgaattagtttatagatatagaatggaatccaatggaatgcaactgtatggaatggaatcaaatggaatggaccagaatgcagtggactggaataaaacggactcaatagtaatggattgcaatg

SEQ ID NO: 646069 - DNA, 543 bp, Homo sapiens
aatggagtggaatggaatgcagtggacacaaatggaatggactggaatggaatggacacgaatggaatggactggagtggaatggacacgaayggaatggaagcgaatggaatggaatggaatgaaatggaatggaatggaatgaaatggaatggaaaggaatagaatggaatggaatcagttggagtagaatggaatggaatggagattaatggaattgaaaggagactaatggaatagaatcaaatggaatggcatcgaatggaatggattcgaatggaatgtgctcgaatggaatggaatcgaatggattgatatcaaatggaatggaatggaagggaatggaatggaatggaattgaaccaaatgtaatggacttgaatggaatgggatcatatagaatggactcaaaagcaattatctcgaattgaatttatagatatagaatggaatccaatggaatgcaactgtatggaatggaatagaatggaatggaatcaaatggaatggaccagaatgcagtggactggagtaaaacggact

SEQ ID NO: 646070 - DNA, 400 bp, Homo sapiens
tggaaggcaatagagtgaatagaatggaatgcaatgaaatggaacgaagtggaatcgagtggaatggmatcgaatggagtgaaatggaatggaatggacgcgaaaggaatggactggaacaaaatgaaatcgaacggtaggaatcgtacagaacggaaataaacggaacggaatggaatgcactcgaatggaaaggagtccaatggaagggaatcgaatggaatgaaatagaatggaatggaatcgaaaggaatagaatggaatggatcgttatggaaagacatcgaatggaatggaattgactcgaatggaatggactggaagggaatggactcgaatggaatggactggaatggaatggattgaacggaatggactggagaggaatggactcgaatgg

SEQ ID NO: 646071 - DNA, 400 bp, Homo sapiens
tggaaggcaatagagtgaatagaatggaatgcaatgaaatggaacgaagtggaatcgagtggaatggaatcgaatggagtgaaatggaatggaatggacgcgaaaggaatggactggaacaaaatgaaatcgaacggtaggaatcgtacagaacggaaataaacggaacggaatggaatgcactcgaatggaaaggagtccaatggaagggaatcgaatggaatgaaatagaatggaatggaatcgaaaggaatagaatggaatggatcgttatggaaagacatcgaatggaatggaattgactcgaatggaatggactggaagggaatggactcgaatggaatggactggaatggaatggattgaayggaatggactggagaggaatggactcgaatgg

SEQ ID NO: 646072 - DNA, 546 bp, Homo sapiens
caatcttaaagacaactgacacttactgcaagactggtgtgagcacaacgtaagtcaatatttacaatggtctctgaagtttgtggcattattctagtttactctgctgggtttttttccccaccattattttatgccaagaggcaccatagaggggtggatggtcaggcacacttagccatccacagtgaatatccaggaagaggacatttggaagggggctaaggcaacacaatacacccaagcarcatatcacaaaataacatttatgagataatatgtttggaagggacaacaaatattatcctactcttttaaaaaaatgttacgtttttagactgacaaataataattgatcatattcatgggtatatggtgatgtttacatatgtataatgtatagtgattgcatcaaggtaattggtatatccatcatctaaaacatttatcatttctttgtgttggataatccaatattctccttctagctatttgaaactacatcatatataattgttaaccatagtcatcctacagtagtaacca

SEQ ID NO: 646073 - DNA, 585 bp, Homo sapiens
tgatcttctatttttttcatgattattaggcaaatatttctatttctttgcatgtcaagtaattctatagcagacattgtgtatagaagaactgtagagacttcagatagctgatcaacttaactcataatcaaggattgaactaggcttgaaatggggcagtcttagtaaggttttttgccacacttttctttccttaagtatgacccacagcctgctgtgtccgttttcgtatccctgaaaggaaggagattcagtcctgctctttagtcctgatttttggtctcaaaatctggcagattcattaaggagagacctactatgagcytgaggcaggcccactccctctagtttgactttgtttcttaagcaccaccagattatgggaaattttactttaactttcagaaaactttgcctagttccccagcctcccatgcgcgttccatgcatttagaactctctacgtttccaatctgtcacatagccctacatggctgccaaaagctgaaatgccttctatttcccttagtagcattcttttggatgggccaagccccatgttcagtgtgaacccagaattag

SEQ ID NO: 646074 - DNA, 503 bp, Homo sapiens
tcctcttcttcttcttcttcctcttcctcttcctcctcctcctcctcctcctcctcttcttcttcttcttattttgagatggagtctcgctctgtygccaggctggagtgcagtggtgtgacctcggctcactgcaacctctgcctcctgggttcaagtgattctcctgcttcagcctcccgagtagctgggactacaggtggcatgtgccaccacacccagctaatttttgtatttttagtaaagacggggtttcaccatgttggccaggatggtctcaatctcttgactttgtgatttgcctgtctcggcctcccaaggtgctgagattacaggcgtgagccaccatgcctagccttcttcctattattaaaaacatattctcagaacttttcaatgtctcattgaaactcagtgcataacatgcacatgaaatttatttttctttcttttaaactcttcttaatttgagaacaataattaccaagtcaatcacttatctc

SEQ ID NO: 646075 - DNA, 593 bp, Homo sapiens
cacattggcttcacaagtccagagcctatcagaaccaccaacaatgctgggttccaaatgcagtagacactagaaactgttcctagaataaatgaggcatggagaaaaatgtaataggtttgtttctttgaatgtccgctgtgatagcttttcagaccaaacaatagaccctaaagcttttattctaaaccagggtctctcaaactctgcactatctgcattttaatccagattattctttgttgtcggggactgccttctatataatagaatgttttgcaacatccgtggcctgtattcactaggtgtcagatacatccactgccctgaagggatgacagcaaaaaatgtttctagctgttggcaaatgtctgctgggggagcaaaatttatccctatttgagacccactggtctcaaaggtttggatgatagtagtgtttagaaatcaggagagaatatttttaatcatactgagagcatttttaccyatggaattatgtaatctttctacagctacttggttcaattgattagaaatgagaataaggttaaggcattctccttaaaataacctcagcactctgttaaata

SEQ ID NO: 646076 - DNA, 550 bp, Homo sapiens
caaatgtcttgaggggaaaaaaaaaaaaaaaaaaaacagagtgtcattccccgtgtctcccttctcattaggttttggcctctcaatgcctggtttccttggtaggctcaaactgtagtatttgtctccctggtcctgtaatattgctcaaractgctgtcttctctgtgtcttagcagcacccctttgcttgaattcttaggcttttgttctatactgagaatcagccagtgctccttaggggatataccttgaagaatatcaactcatctgtctgagattcctttgacttcaggatcttaactccccaaatttttattgcctttgcagatcaccaatgactttaggttaaacaaaactgttttctattttatctggccttgctagttcttctgagctgaaatgtccagaagaactagctgggctgcaactattttaccataactgaaggccaaaatcatgcttgagactccttgaaaatgtgtttgagtgtgtgtgtttttaaaaatttgaaatatagtattttttctttcctcttcctcctcaaaac

SEQ ID NO: 646077 - DNA, 550 bp, Homo sapiens
caaatgtcttgaggggaaaaaaaaaaaaaaaaaaaacagagtgtcattccccgtgtctcccttctcattaggttttggcctctcaatgcctggtttccttggtaggctcaaactgtagtatttgtctccctggtcctgtaatattgctcaagactgctgtcttctctgtgtcttagcagcacccctttgcttgaattcttaggcttttgttctatactgagaatcagccagtgctccttaggggatataccttgaaraatatcaactcatctgtctgagattcctttgacttcaggatcttaactccccaaatttttattgcctttgcagatcaccaatgactttaggttaaacaaaactgttttctattttatctggccttgctagttcttctgagctgaaatgtccagaagaactagctgggctgcaactattttaccataactgaaggccaaaatcatgcttgagactccttgaaaatgtgtttgagtgtgtgtgtttttaaaaatttgaaatatagtattttttctttcctcttcctcctcaaaac

SEQ ID NO: 646078 - DNA, 550 bp, Homo sapiens
caaatgtcttgaggggaaaaaaaaaaaaaaaaaaaacagagtgtcattccccgtgtctcccttctcattaggttttggcctctcaatgcctggtttccttggtaggctcaaactgtagtatttgtctccctggtcctgtaatattgctcaagactgctgtcttctctgtgtcttagcagcacccctttgcttgaattcttaggcttttgttctatactgagaatcagccagtgctccttaggggatataccttgaagaatatcaactcatctgtctgarattcctttgacttcaggatcttaactccccaaatttttattgcctttgcagatcaccaatgactttaggttaaacaaaactgttttctattttatctggccttgctagttcttctgagctgaaatgtccagaagaactagctgggctgcaactattttaccataactgaaggccaaaatcatgcttgagactccttgaaaatgtgtttgagtgtgtgtgtttttaaaaatttgaaatatagtattttttctttcctcttcctcctcaaaac

SEQ ID NO: 646079 - DNA, 610 bp, Homo sapiens
tgtcaagtaagccagcattaccttaagcctttaaatcgaaacttggcttttgacttttgacttgaatcgaactttgacctttgactctaggctcttatctctttaaattgaaccaccagcacccagttagtccctattwatggttgaaattcctggaatgggttctcccattcctgctcgatgctgcccaccctgttttgtgcttgtgccctcccaggaggatgatatggaggttacgagctcagatgcaggaggccgacagaactgactttggcacctactagctctgtgacttaaatctatctaagcttcagttttcttacctataaaacagggataatattatccctctgtattatgttcttaaggaaattacttgaaataatgcatgtaagatatttagctgagtacctgataaagaaaccttgaattttagttgttattattgttgttgatctgaatcctattttcagtcttgatttacccacaaaatgtgagaaattgatagattttccttttgaactttgactctaggctcttttccctagattttgacactttttatatgtgattttacatcttcctctgtcctactctaggtgactttcgt

SEQ ID NO: 646080 - DNA, 520 bp, Homo sapiens
tggccattgccctatagtatggtgcaggtaactgaggaggccagcttgtagtacattcacccaaggaaatgaatgtgttcaagtgacacaaagtttagtagaggggatactcaagtctctgcacgtggaaagagatttcctgctgtagagaactaagttgctatctaacaattcattcactgaaaatgaataaactgttttcattattaagccattaatggtaaaaagttcaaataaaattattcccttgaagtgcccaagaaattcttgagacacaaatcatagatcattaattatgatccccttcagagagtaaaastaggttttgacttaaaaggaaaggtaattaaaatcaaggaattggaaatttttcagctggaaaattgctctgaatcactggtgtcaagggttagtttgtgcctcaatgttttatacaatttcatactcacctagataggtatttatgtctaaacacacacaaatatgtgttagtgcacaaaagcattaacaccagtctctg

SEQ ID NO: 646081 - DNA, 548 bp, Homo sapiens
ttagggattctgaatggtgtatagaattttatttacactatttttgaaattttttgtaagtctgaaattattttaaaaatgaaaagttaaaaaacagaatcaaagacaaatttctgatgaacaaaagcctagtgaatttttggccatgagacattcattacatgaaattacaaaaacgaacttttttagactgaaagaaaatgatgtcagaggacaacttggatatacacaaaacaatgacttggaccagaaatagaaataatggcaatgaaataaaaaacagrtgaacaatgtaaaagtcaatgaaatgcctgtaatctcagcactttgggaggctgaggcaagtggatcatgaggtcaggagttcaagaccagcctgaccaacatagtgaaaccccatctctactaaaaatacaaaaaaaagcttggcatggtggtacatgcctgtaatcccagctactcaggaggccgaggcaggagaattgcttgatctgggaggcggaggttgcagtgggccaagatcgcaccactgcactccagcctgggtg

SEQ ID NO: 646082 - DNA, 552 bp, Homo sapiens
ggtggaatagagtaataattagcattaagaaaatgtattctttcaaatcaacatgacagtttagctttccagatcacacagtactgctagtaacaccactgtgattaaaagaaatgcttgctggattaaaacacaaatgaaaaataatatgtaataacattttaattctgggatcccacataatagagaaaactactttctaagggaaattggattttttttctttaaaccttttatgttagatattagaggttcttggatayccttgaggaaagttatttttaaaaaaatatataattttaaattcatgacaacataaccacttgaaattacctttcaagtaaggatttaatttttatttgtttaatcaatccaagctttatgaaacacttgaaggtatataaatagctagaaactttaagaaaagaatattaaatatcctaagaaaactgtttttcataaattctgttaaatttaaacaatggttctaagttacaggtcaaaatggatcaggttaaaaatgtaaaatgttttagaatgtaatgtaaaata

SEQ ID NO: 646083 - DNA, 309 bp, Homo sapiens
agcaaggaaaaatgttatcacctgtattaatgtattagtcagggttctccagagaaacaaaaccaataggataaacagatgatatatagagatagatagatagatagatagatagatagacagagataaatacatagatgataaatagatgatagatatagaatagatagatagatagatrgatagatagatagatagatagataaaaggcgatttataatgggaattggctcatgcaataaggccaagaagtcccacgatatgctctttggaaagctggagacccaggaaagccagtggtataattca

SEQ ID NO: 646084 - DNA, 603 bp, Homo sapiens
aatttcacaatttatttattttaattaattatttatttatttttgagatggggtcttactcagctcactgcatcctcagcctaccaggctcaagccatcctctcacctcagactcccaagtagctggaaccacaggcacatgctaccatgcctggctattttggggtttttttgtatttttggtagagatggcattttgccatgttgttcaagttrgtcttgaactcctgagcttaggtgatctgccggcctcagcctctcaaaatgctgggattacacgcatgggccactgcaccccacctaaattcggcaatttattaacaagttaattatacatctttctagtcactcagcaattcaattcttaagtacttattgtaataaaataaaattacaaaactgccaaaagccttatacaagaagcttccagtgatgggattgctgggtcaaatggtatatacccaatacatataaatcattctattataaagacgcatgcatgtgtatgttcattgcagcactattcacaatagtaaagacatagaatcaacctaaatgcctattagtgatagactggataacaaaaatgttgtacatatacac

SEQ ID NO: 646085 - DNA, 603 bp, Homo sapiens
aatttcacaatttatttattttaattaattatttatttatttttgagatggggtcttactcagctcactgcatcctcagcctaccaggctcaagccatcctctcacctcagactcccaagtagctggaaccacaggcacatgctaccatgcctggctattttggggtttttttgtatttttggtagagatggcattttgccatgttgttcaagttagtcttgaactcctgagcttaggtgatctgccggcctcagcctctcaaaatgctgggattacacgcatgggccactgcaccccacctaaattcggcaatttattaacaagttaattatacatctttctagtcactcagcaattcaattcttaagtacttattgtaataaaataaaattacaaaactgccaaaagccttatacaagaagcttccagtgatgggattgctgggtcaaatggtatatacccaatacatataaatcattctattataaagacgcatgcatgtgtatgttcattgcagcactattcacaatagtaaagacatagaatcaacctaaatgcctattagtgwtagactggataacaaaaatgttgtacatatacac

SEQ ID NO: 646086 - DNA, 548 bp, Homo sapiens
aagtgaactaagggaagtgggttatacgagggagggagtcaatagaaaggtgtgctataaagttatctaccaccacatgcacgtgatacctgatcctgtgagaactttggaacaatctttaaaatgtccttttagattttctacccagggtaaaaaaaggggaagcattatacgttgaatctagctcccattgttcaagagtagcttagaggaaactcgctctgcaacaattacaggttatgcatatgtgaggaatgtgcatttgtgagtacagagataatctctactggcatttcatgttgcagcatcatggaaactgagcaaaaagcaagcagtacrcagcatgggtaaggagtgagactgtcaggttacacctgcatgaagtcaataggagcctttgtggaactggtcatcacaacagtgagtgacaatgtttcaatgaacagttatttcctactcctgatctgttaagaatataagggttaccttgtgcagtatggccattttcacgatattgattcttcctacccatgagcatggactgttct

SEQ ID NO: 646087 - DNA, 578 bp, Homo sapiens
accacattcctagcatctctacagtttcaaaagataggagatagggcacaaagcacctcataaggacctctggactcctctgctgtccaggtataagaaagccgagtatagaaaaaaagattttcctgatcctattaacacacaagccagtcttccaacaaataccaaaaacattcacatcaccctttctaactccattgcaattttttgagacactcttttcactgaaatgtcttcatgtcttctttgcatatccttggttcttaggtgccattgaggatctggtgttttggtcgttttctcacctttatcaagaaggggttcttaattctggaatcacgcgctaccattttcactagattcccaaagcatccctggggcaacgagcataactggtttgctttccccgctgggagtggaaaatatgagatttccaggtcacagaagccagagatggagatgctaaaagctttgtcacttcacagttttctttgataaaacttcctttcttctgtgaacyaaccaatgaaagctgtttctagacagagttgagatgatgaacagtgttaactgagatc

SEQ ID NO: 646088 - DNA, 557 bp, Homo sapiens
actctacttaaatgcctttttagtttcctacctgggttaccttttagaatcatattttttctctcccattgtgtgaattaatatttgctctcttttattttaaacttccctctcttctttttctaataaccagggaagtggtgaatgagtttttcactttctaaagacagcatttctcagctttacttttgccttctgaagacctctaattcttttctctgtcatataatagctacactagactatctttcctaaatttaagtttctgtcctctagaaaggtaagacttttacttttgcgtgttccctgtagtgtttctgaaatgctagctctaccagatatttaggattgtccctggaatatatatttytaagctcaaataagtttggaaaacactggacaataaagttaacaattttctttaacagattgtcatgcttttggttcatacagggaaagtagttgggaggaaactatactcataaattcagaatttcatacgagaaagcttaagctactcggcctttcttcctaaaatgaagcaaaataatcaaata

SEQ ID NO: 646089 - DNA, 566 bp, Homo sapiens
ccttgaaactcttcctcatttaccaaggctttaatactactgatcatgtctccttatgaaatctcccctgagcttctgcaatgctcctctattgattctcttaaatgtttttctttcttttttttttcaatagctccttttactctggaggtttgttaattactattgttctattgtaaacacctttctatttgacctataaatactatctctggatcatctcaaatataatctttacttgactgactaccaggagtagtagacttccaaattaattcccaacagattgttccaagtcctgtctcttttgaggtccaggcaagcatttctaattactgactagacatctctaccttgatattccatagatacctacaactgagcaagctttaggaaaaggaacaaatatttattctcccactgtttccatttccaactggaaaaacaccccttagtataascctttctgtggagaggcaaaacatctgaattaataggtgactttgatagacattgtgggcctccaggtctcatttgttttggggacctgtttgccagcagggagc

SEQ ID NO: 646090 - DNA, 614 bp, Homo sapiens
taaataaactttcagatagacaaaagataaaagctgagaaatttgtctccaggaagcctgcactatagaataaaataaattatttagactaaagcaagtgatgcccagatctgcaagaaaccattaaaaatgccaaaggggaaatttgttggtgaatataaatatatatatacacagacacacatacatatatacacatatatgtatatttaagttttctattgctgctgcaataaattaccaygatcttacaaacatagtggtttaaaataacatttgttttctcaaggttctgttgattcagctggtttctctgccctgggttttgcatttgcaggcccaaaccaggtgtcaacaagctgggcacttatttagaggctctgggagtaatcctcagaatccagtaccttgtgattatagggccaagatctcactgtcctgatggctgtcagccggaggccatccttaccacttagagttctctttaggcttacttgtgggctctgcatcttagacgcagcaatacttctcacacttggcatctctcagtggtcatataataagaattatactaaaaatcatataatcatctcaatagatgaagaaaaggcatt

SEQ ID NO: 646091 - DNA, 549 bp, Homo sapiens
taagatttattacattcagatttatatttacctgactcttctttagtaacgataactgtaattcagttatcattacttaagtaaaacatttttatttacccaactctctctcgctccctctctctttcttcatgaaactatagctccttgatgtttgaaagcaagtgttagcaatcagctttcccagggtgcacaggacaatggtttgattatgtaagtgccaataaggtctggcgaaggagtaaacacaaaaggaggtgttatttattgatgtattgatttatktatattccttttgctatgactgtttcccacagcagggattaacacagtaagattgctgaactgctacaaggacattttttgttttgtattttcacaacctatgcaaggaaactttagggactttgagtgatggacaaccccctatcagatatcatcagcctgaaacatccttatcttggcattaaattagaaggaaccccagaccctgcgtaccagaattgttagaatcacagcctcagtaaagaaccaactcctgatcacttc

SEQ ID NO: 646092 - DNA, 549 bp, Homo sapiens
taagatttattacattcagatttatatttacctgactcttctttagtaacgataactgtaattcagttatcattacttaagtaaaacatttttatttacccaactctctctcgctccctctctctttcttcatgaaactatagctccttgatgtttgaaagcaagtgttagcaatcagctttcccagggtgcacaggacaatggtttgattatgtaagtgccaataaggtctggcgaaggagtaaacacaaaaggaggtgttatttattgatgtattgatttatttatattccttttgctatgactgtttcccacagcagggattaacacagtaagattgctgaactgctacarggacattttttgttttgtattttcacaacctatgcaaggaaactttagggactttgagtgatggacaaccccctatcagatatcatcagcctgaaacatccttatcttggcattaaattagaaggaaccccagaccctgcgtaccagaattgttagaatcacagcctcagtaaagaaccaactcctgatcacttc

SEQ ID NO: 646093 - DNA, 549 bp, Homo sapiens
taagatttattacattcagatttatatttacctgactcttctttagtaacgataactgtaattcagttatcattacttaagtaaaacatttttatttacccaactctctctcgctccctctctctttcttcatgaaactatagctccttgatgtttgaaagcaagtgttagcaatcagctttcccagggtgcacaggacaatggtttgattatgtaagtgccaataaggtctggcgaaggagtaaacacaaaaggaggtgttatttattgatgtattgatttatttatattccttttgctatgactgtttcccacagcagggattaacacagtaagattgctgaactgctacaaggacattttttgttttgtattttcacaacctatgcaaggaaactttagggactttgagtgatggacaaccccctatcagatatcatcagcctgaaacatccttatcttggcattaaattagaaggaaccccagaccctgcgtaccagaattgttagaatcacagyctcagtaaagaaccaactcctgatcacttc

SEQ ID NO: 646094 - DNA, 556 bp, Homo sapiens
agctggtggacagcaaaggaagcaatcaagagagtaaagagaaaacctacagaatgggagaaaattttgcaaactattcatttgacaagtgagtaatatccagaatatagaaggaactcaaacaactcaacagcaaaaaatcaaataatctgattttaaaatgtacaaatgattggaataaacatttctggaaaaaagacatacaaatgaccracaagtatatgaaaatgttcagtatcactaatcatcagggagatgaaaatcagaaccacaatgagatggcatcttaccccagttaaaatgggtattatgaaaaaggacaaaaatgacaaatgctggcatgggtgcagaggagaggaaactcttatacattgttggtgggaatgtaagttagcacagccattatggaaaaaattatggaggctcctcaaaaagtaaaaatagcactgccatatgatctagtaatcccactctatttatatatccaaggaaaaagaaatcagtatgttgaagacatatctacacttttaagtttattgcagtattattcacaaaa

SEQ ID NO: 646095 - DNA, 538 bp, Homo sapiens
tacatcactcatgattttttaaaaattattttaatttrtagtttctgtacatcattttttctaggatataatgttcttttgtccataaatactttgttttatatctcttacaagttaggcctttttaaaaacagccacattgtgaccacatctagcaagtgacgataaatccttaatatcatctaataattattctgtgttcaaatttatctgactgcctcaagaatgcctttttgcaagttgaagtgttagaatcaggatccaaacaaggtccactgactgcatttggctaacgtagtcctcaaaggttttacttcctaacacttccgaagtacaaataatttttataaatgaaaaagtaaaaaggagcaggaagagaagtttagttttcttctctgttcttgccattacgttccctatagataatcataattttagagttttcgattatctttcaaaaatgttttgaaaatataaatacgtctctcatacatgtgttcctctcttgttataaaaacacattgacatactctacaca

SEQ ID NO: 646096 - DNA, 538 bp, Homo sapiens
tacatcactcatgattttttaaaaattattttaatttatagtttctgtacatcattttttctaggatataatgttcttttgtccataaatacttygttttatatctcttacaagttaggcctttttaaaaacagccacattgtgaccacatctagcaagtgacgataaatccttaatatcatctaataattattctgtgttcaaatttatctgactgcctcaagaatgcctttttgcaagttgaagtgttagaatcaggatccaaacaaggtccactgactgcatttggctaacgtagtcctcaaaggttttacttcctaacacttccgaagtacaaataatttttataaatgaaaaagtaaaaaggagcaggaagagaagtttagttttcttctctgttcttgccattacgttccctatagataatcataattttagagttttcgattatctttcaaaaatgttttgaaaatataaatacgtctctcatacatgtgttcctctcttgttataaaaacacattgacatactctacaca

SEQ ID NO: 646097 - DNA, 538 bp, Homo sapiens
tacatcactcatgattttttaaaaattattttaatttatagtttctgtacatcattttttctaggatataatgttcttttgtccataaatactttrttttatatctcttacaagttaggcctttttaaaaacagccacattgtgaccacatctagcaagtgacgataaatccttaatatcatctaataattattctgtgttcaaatttatctgactgcctcaagaatgcctttttgcaagttgaagtgttagaatcaggatccaaacaaggtccactgactgcatttggctaacgtagtcctcaaaggttttacttcctaacacttccgaagtacaaataatttttataaatgaaaaagtaaaaaggagcaggaagagaagtttagttttcttctctgttcttgccattacgttccctatagataatcataattttagagttttcgattatctttcaaaaatgttttgaaaatataaatacgtctctcatacatgtgttcctctcttgttataaaaacacattgacatactctacaca

SEQ ID NO: 646098 - DNA, 454 bp, Homo sapiens
aatggactaataacctgctgaaatctttctcactattctaccttacagtgatttgtatrtttttaaaaatgaacaagtggcgtatctcacaaaataattgatatttttgtagcttttaaattttagactgtagctaatacctacatgttttattaaaagaaataaatttagagttgctctgaaatatttaatcattttaaacagtaaaatcacagggctcttaaaagtttctgcttcatataggaagaagtcatgattactttgaccttcccaagggacctactaggaaagtgaatgaagattctagtatcaaatttttatcttataaattggtgaacttgatcacaggcctaattaatttgaagatttctagacccaattcttaaacttaatccaaataaacctacgatttgcattttttatgagagtccccaggttatgttgatctagatga

SEQ ID NO: 646099 - DNA, 454 bp, Homo sapiens
aatggactaataacctgctgaaatctttctcactattctaccttacagtgatttgtatgtttttaaaaatgaacaagtggcgtatcwcacaaaataattgatatttttgtagcttttaaattttagactgtagctaatacctacatgttttattaaaagaaataaatttagagttgctctgaaatatttaatcattttaaacagtaaaatcacagggctcttaaaagtttctgcttcatataggaagaagtcatgattactttgaccttcccaagggacctactaggaaagtgaatgaagattctagtatcaaatttttatcttataaattggtgaacttgatcacaggcctaattaatttgaagatttctagacccaattcttaaacttaatccaaataaacctacgatttgcattttttatgagagtccccaggttatgttgatctagatga

SEQ ID NO: 646100 - DNA, 454 bp, Homo sapiens
aatggactaataacctgctgaaatctttctcactattctaccttacagtgatttgtatgtttttaaaaatgaacaagtggcgtatctcacaaaataattgatatttttgtagcttttaaattttagactgtagctaatacctacatgttttattaaaagaaataaatttagagttgctctgaaatatttaatcattttaaacagtaaaatcacagggctcttaaaagtttctgcttcatataggaagaagtcatgattactttgaccttcccaagggacctactaggaaagtgaatgaagattctagtatcaaatttttatcttataaattggtgaacttgmtcacaggcctaattaatttgaagatttctagacccaattcttaaacttaatccaaataaacctacgatttgcattttttatgagagtccccaggttatgttgatctagatga

SEQ ID NO: 646101 - DNA, 454 bp, Homo sapiens
aatggactaataacctgctgaaatctttctcactattctaccttacagtgatttgtatgtttttaaaaatgaacaagtggcgtatctcacaaaataattgatatttttgtagcttttaaattttagactgtagctaatacctacatgttttattaaaagaaataaatttagagttgctctgaaatatttaatcattttaaacagtaaaatcacagggctcttaaaagtttctgcttcatataggaagaagtcatgattactttgaccttcccaagggacctactaggaaagtgaatgaagattctagtatcaaatttttatcttataaattggtgaacttgatcacaggcctaattaatttgaagatttctagacccaattcttaaacttaatccaaataaacctrcgatttgcattttttatgagagtccccaggttatgttgatctagatga

SEQ ID NO: 646102 - DNA, 615 bp, Homo sapiens
cctcattgtgtgtgtgtgtgtgtgtgtgtgtgtgtgtgtgtggtgttcatgtgccttgtttctaaatgttatttctacagaggcattttgtaggctcatccttctaaacttgtttcgattgcctaatttaatttaacattgtctcctaaaacatctgcatattggtttttctacattaaccaagaatttaaaggatattggcagcagcagatcytgggttgatttatttctgacttattgtactcctttttaattttaaatttgtgtttttaaaaaatttaagcatcttctttgcaattgttttttccctgctgcatattagattttaatctcattaatgttaaaagatagctcatttttctttggtgctttttttatatttatgtttctctgcctcctgtcagatcagaggggacactagattttgataggagcgcaaaccctattgtgaaatgtgcgtgtgagggttgtgcactgctgatgaggtggaacagtttcattccaaaaccatccaaccccaactcagtctgtagaaaaattttcttccacacaactagtccctggtgccaaaatattgaggaccattgcattaaaggatattaatcattcctcggt

SEQ ID NO: 646103 - DNA, 615 bp, Homo sapiens
cctcattgtgtgtgtgtgtgtgtgtgtgtgtgtgtgtgtgtggtgttcatgtgccttgtttctaaatgttatttctacagaggcattttgtaggctcatccttctaaacttgtttcgattgcctaatttaatttaacattgtctcctaaaacatctgcatattggtttttctacattaaccaagaatttaaaggatattggcagcagcagatcttgggttgatttatttctgacttattgtactcctttttaattttaaatttgtgtttttaaaaawtttaagcatcttctttgcaattgttttttccctgctgcatattagattttaatctcattaatgttaaaagatagctcatttttctttggtgctttttttatatttatgtttctctgcctcctgtcagatcagaggggacactagattttgataggagcgcaaaccctattgtgaaatgtgcgtgtgagggttgtgcactgctgatgaggtggaacagtttcattccaaaaccatccaaccccaactcagtctgtagaaaaattttcttccacacaactagtccctggtgccaaaatattgaggaccattgcattaaaggatattaatcattcctcggt

SEQ ID NO: 646104 - DNA, 615 bp, Homo sapiens
cctcattgtgtgtgtgtgtgtgtgtgtgtgtgtgtgtgtgtggtgttcatgtgccttgtttctaaatgttatttctacagaggcattttgtaggctcatccttctaaacttgtttcgattgcctaatttaatttaacattgtctcctaaaacatctgcatattggtttttctacattaaccaagaatttaaaggatattggcagcagcagatcttgggttgatttatttctgacttattgtactcctttttaattttaaatttgtgtttttaaaaaatttaagcatcttctttgcaattgttttttcyctgctgcatattagattttaatctcattaatgttaaaagatagctcatttttctttggtgctttttttatatttatgtttctctgcctcctgtcagatcagaggggacactagattttgataggagcgcaaaccctattgtgaaatgtgcgtgtgagggttgtgcactgctgatgaggtggaacagtttcattccaaaaccatccaaccccaactcagtctgtagaaaaattttcttccacacaactagtccctggtgccaaaatattgaggaccattgcattaaaggatattaatcattcctcggt

SEQ ID NO: 646105 - DNA, 545 bp, Homo sapiens
attacaaagagagggtagaattcagagtcacacagacctgggatgcattctagtttgtggcctgaggtatatccaataaactctttgggtctcagttcctcaactctttttagaatttagcatcatttactttgtgggttctatgtctattttcttcatttaggaaaaagtatttattgaacatctggtgtgtccatttaggcactgctctaagtgctggggacataacaatgaagaaaatagtcaaacattctcgcccttgtggaacttataagracagagagtatcttacctattaatgtagaaaaattggattcactcgtaacaacaacaaaaatgaattttcccgtaacaaaaatggaagcaaaatgctattttgaaatattcttaaagtaacatcagaaattagtatgcacctatcatgtatagcctcattatgttctactttgtcttgccatgcagatgagctcagccagagtacttctcagagaggataccacgtggatgcaaataagagcagagaaagcaccgagtagttacaatgg

SEQ ID NO: 646106 - DNA, 545 bp, Homo sapiens
attacaaagagagggtagaattcagagtcacacagacctgggatgcattctagtttgtggcctgaggtatatccaataaactctttgggtctcagttcctcaactctttttagaatttagcatcatttactttgtgggttctatgtctattttcttcatttaggaaaaagtatttattgaacatctggtgtgtccatttaggcactgctctaagtgctggggacataacaatgaagaaaatagtcaaacattctcgcccttgtggaacttataaggasagagagtatcttacctattaatgtagaaaaattggattcactcgtaacaacaacaaaaatgaattttcccgtaacaaaaatggaagcaaaatgctattttgaaatattcttaaagtaacatcagaaattagtatgcacctatcatgtatagcctcattatgttctactttgtcttgccatgcagatgagctcagccagagtacttctcagagaggataccacgtggatgcaaataagagcagagaaagcaccgagtagttacaatgg

SEQ ID NO: 646107 - DNA, 412 bp, Homo sapiens
ggaattaacgttagattcttgagcactttctttcacctatttctcagtgtagctgcaacgctctgtttactgtgctaggtatgtcctagaaagtcaaatgattcagtcaaaccagcaccatcagagtcagtgtgatcttcctaagacacayctgatcataaagccccaaacctacaaataaaggggagggggcctgctggctagcctggcatagatcccataatcagggccttattgacctctttcattgcatctccttcacttcctcatttgccacaggtttcagatacatggatgtgtctgcaagatgctagatgcctcctggaacacatttgcctggtggcaggagccaagtcctggcagaagtcaggaagcaggtctaacgggcatcagcggagaaactaggaatgct

SEQ ID NO: 646108 - DNA, 558 bp, Homo sapiens
tcccaggtcaacatagtttctttctttgctctccttttatgggaacatagagtacccatatgatttgggtaaagtgtctgaggatgtgtcattgataacagaagaaagaataaccaatggtgttgagtattagttcacttctgaacaaatcatgcattttcggaacacatcaggagttagagaactgtgttaaaacttacagatgaaattaaatctggaatgaattgagattaattatattgatagtataatayactgacagatattgtgccagtccctcaggtttctgtgtaaatataaaagttaaactcaaaaatatgtgtatgactatgtttaaacaagatatcaaacaaaagaaaaaactgtgcttttgaaaaaatactgctttgaaattacataaaaattaatatgacttaaaaatgtctatcactgctagactttcttttttttttttttttaacaaataaacaacctagacaatatcctcccagtctcttatcaatgatggtgactttttcatactctgaattctttggacttggagattctcatgtacat

SEQ ID NO: 646109 - DNA, 558 bp, Homo sapiens
tcccaggtcaacatagtttctttctttgctctccttttatgggaacatagagtacccatatgatttgggtaaagtgtctgaggatgtgtcattgataacagaagaaagaataaccaatggtgttgagtattagttcacttctgaacaaatcatgcattttcggaacacatcaggagttagagaactgtgttaaaacttacagatgaaattaaatctggaatgaattgagattaattatattgatagtataatacactgacagatattgtgccagtccctcaggtttctgtgtaaatataaaagttaaactcaaaaatatgtgtatgactatgtttaaacaagatatcaaacaaaagaaaaaactgtgcttttgaaaaaatacygctttgaaattacataaaaattaatatgacttaaaaatgtctatcactgctagactttcttttttttttttttttaacaaataaacaacctagacaatatcctcccagtctcttatcaatgatggtgactttttcatactctgaattctttggacttggagattctcatgtacat

SEQ ID NO: 646110 - DNA, 618 bp, Homo sapiens
gcttaatgaagttagagaagggaagggaggcccgtagcggaaaattatgggttataaaccaataaaagcagcaggaaaaataagcagcagctgactatgagtaagaggacaagatgcacaaagagggagaagaaaaactaagcagaatagagagagaggtgagatgtagctgattttggaagagttcactgtggcctggaaggagaggaacaggaatctctgcccagctttgtttataaccggcagtaggtccttccgttcatgtaagctctgccctccacaactcaccctgtgactgcaaaatgagatagttagaattaaggttcagaattctttgagtcaatgtaagaagatgagcgaaaagtacaatgaaaatgagaactgaaggaggaagagtctgtggaagcaatttccagaatcttgtttactgtgtctaaggtcacctcagtattgcagtaacttaataacaaccaagcggctgaatgaggcaagctcaggtggggtttggtcgatygcaggatgatcctgtactcttgtagtaacaggagtgttttgcagtacagctccacccttcacaaggatccagcccctgtgagattgcatcctcttagactgaat

SEQ ID NO: 646111 - DNA, 503 bp, Homo sapiens
tgaatttcggccaggcgggttggctcacgcctgtaatcccagcactttgggaggccgaggcgggtggatyacctgaggtcgggagactgagaccaacctgaccaatgtggagaaaccctgtctctactaaaaatacaaaaaaattagccaggcatagtggcgcatgcctgtaatcccagctactcgggaggctgaggcaggaaaattgtttgaacccgtgaggaagaggttgcagtgagtcgagatcacaccattgcactccagctgggcaacaagaacaaaattccatctcaataaaataaaataataaaataaaataataaaataaaataaaataaagacagtgaatttcttttgtttaaaaccacccagtttgtggtacttcgttatagcaaccctagaaaactaatacagtgcctaactccaaagccttcggagggcacatcagttgaaagtctttcctagatcgttaaagaaacatttaattacacatagaagagata

SEQ ID NO: 646112 - DNA, 517 bp, Homo sapiens
gtgctgtggaaacttgttacatgataaaagtgtcagctcaactcactgaaggaaaaggagagatggaaaactgaggttggggaaactggaaagctattaggaaaaacataaaagtggatccatatctcacactacataccagagtaaactacaaatgaattatayatctaaatttaaaaaaataaaatcataaaagtattagcaggagacataattacaggaaagcccttacagctatgacttataatccagatccaaggaaagaccaatcaattacataccataaaattaaaagttgggggcagggaggcagaaacttctgtatggctaaagaaaagtcaaaagactaaaaatgaagaaaacatctgcaacatgtatcccaaacataagactaaatctttaaaactttaatagataaaagctcttcaaaaattaagaaaaaaacccacaaaatctcaatagaaaaaaaaaagatgaaatacaaagttttaaaaaaatacatacaaatttcttggcc

SEQ ID NO: 646113 - DNA, 517 bp, Homo sapiens
gtgctgtggaaacttgttacatgataaaagtgtcagctcaactcactgaaggaaaaggagagatggaaaactgaggttggggaaactggaaagctattaggaaaaacataaaagtggatccatatctcacactacataccagagtaaactacaaatgaattatatatctaaatttaaaaaaataaaatcataaaagtattagcaggagacataattacaggaaagcccttacagctatgacttataatccagatccaaggaaagaccaatcaattacataccataaaattaaaagttgggggcagggaggcagaaacttctgtatggctaaagaaaagtcaaaagactaaaaatgaagaaaacatctgcaacatgtatcccaaacataagactaaatctttaaaactttaatagataaaagctcttcaaaaattaagaaaaaaamccacaaaatctcaatagaaaaaaaaaagatgaaatacaaagttttaaaaaaatacatacaaatttcttggcc

SEQ ID NO: 646114 - DNA, 528 bp, Homo sapiens
acacacaggctacctaagccacctgaccttacctcccattagctgtccctgtaccatctaactaaaatgtacagatacatacttgtggccaggcacggtggctcacgcctgtaatcacagcactttgggaggccaaggcaggcggatcacctgaggtcaggagtttcagactagtctggccaacatggagaaaccccrtttctactaaaaatgcaaaaattagctgggcttggtggtgcacacctgtagtgccagctactcgcgagactgaggcaggagaattgcttgaacccgggaggcgggggttgcagtgagccgagatccggccactacactccagcctgggaaacagagcgatactctgtctcaaaaaaacagaaagacaaaaaaacggatacatactggaaccctgaaaactttttcagtagcatttagaccttctctcatatacagcattgtaaaatccattgctttgcttttagctgcactatgtgccccaatatcatcaaatggcatttggccttctct

SEQ ID NO: 646115 - DNA, 565 bp, Homo sapiens
tattcttcacctacacacaaaaaagtactaatcatcacacacaggctacctaagccacctgaccttacctcccattagctgtccctgtaccatctaactaaaatgtacagatacatacttgtggccaggcacggtggctcacgcctgtaatcacagcactttgggaggccaaggcaggcggatcacctgaggtcaggagtttcagactagtctggccaacatggagaaaccccgtttctactaaaaatgcaaaaattagctgggcttggtggtgcacacctgtagtgccagctactcgcgagactgaggcaggagaattgcttgaacccgggaggcgggggttgcagtgagccgagatccggccactacactccagcctgggaaacagagcgatactctgtctcaaaaaaacagaaagacaaaaaaacggatacatrctggaaccctgaaaactttttcagtagcatttagaccttctctcatatacagcattgtaaaatccattgctttgcttttagctgcactatgtgccccaatatcatcaaatggcatttggccttctctt

SEQ ID NO: 646116 - DNA, 527 bp, Homo sapiens
aagcagtaataggatccgtattgtcacactggctttggacagggaagaaggggaaagggctgatagcctactgagattttgccaggccttttgtacaagttgccagtacttcacctatagaggatcatgtgtccaatcaaccatttctttatttcaatcctgttcatccaagcaaataaaaattcctcaacgaatctcatgtgagaaaaccatgggttatcagaattgattaaagttatgtcttacttttatattccactggtcatttcatcagtagtcatatgtgcttcattaacaatctgtattaatgtagaggttttttccttttgggtactaaaatgccatcctaggatataatcctatgctttcaattttatgtctactctggctgtgatgtttctgaaaacagtgcctaacaactgggtcagtttgtccactgacatctgggaaaatgctagacttactttggtccatgagtggaagaaaagtcacatagaagcatrtggtctcttcacattttcccagct

SEQ ID NO: 646117 - DNA, 494 bp, Homo sapiens
atgatagctgctcagtgactaagtggttattttttwaaatcagtgatacattcgttgtttagaaggtatctaatacttcttgtcttaataaaaatgttaataacagatgaaactctgtatattagcatatctcaagtgtataatcctagtttgctatttacccatctgatttgtgtaacattatactgtcatttaaaatatacttttaaagccagattttacatttcaagttatctttagtaataactctcagtacactcacttgtaaatagttgctataaactattcacttgtaaatagttgcttttcagactgtaaaaatatatttactcatccctgtaagcttaaattttgcagctaattactattttctgatactttatgtatatatacatatattttttcttgaaaattatttccaaaaataattatttaaatgcaaatcataacaataaatgaaaacatttaaaacacgtacttatttttgtaattgc

SEQ ID NO: 646118 - DNA, 494 bp, Homo sapiens
atgatagctgctcagtgactaagtggttatttttttaaatcagtgatacattcgttgtttagaaggtatctaatacttcttgtcttaataaaaatgttaataacagatgaaactctgtatattagcatatctcaagtgtataatcctagtttgctatttacccatctgatttgtgtaacattatactgtcatttaaaatatacttttaaagccagattttacatttcaagttatctttagtaataactctcagtacactcacttgtaaatagttgctataaactattcacttgtaaatagttgcttttcagactgtaaaaatatatttactcatccctgtaagcttaaattttgcagctaattactattttctgatactttrtgtatatatacatatattttttcttgaaaattatttccaaaaataattatttaaatgcaaatcataacaataaatgaaaacatttaaaacacgtacttatttttgtaattgc

SEQ ID NO: 646119 - DNA, 564 bp, Homo sapiens
cctggggactggcccactcggcccaatgcagcaactgctaacaccagcacatgccacctgtgagcctgagggttgactggttatactactgccatcacctaagccatacaacctgtctacccatccagcccagtgctgccactactggcacctgaccaagctgcctgtaggcccaagaackgacctgcctagacatgctaaaccaagacccacatacaccatccaggggcccaaggataggcatgctagcccacataggacctgaaaattggcccaactggtgtctccaaccccagcaaagtctgaccatggcctctatgaacaactataggctaagtcactgaggaaattgctgacaccactgatgctatttatagccaagaaaaaaaattatatggagacaacactactgtacacactcagaatgaaagctaaagtgctctacccaaccagtaccatggaaaacatctttagaaaaaaagtcttcccctacaaaagccaatacaagtaattgaaagaagtaatacatacaccagatgtgcagatatcaatgtaaggacacaa

SEQ ID NO: 646120 - DNA, 594 bp, Homo sapiens
tctttttccttcagtacatctcctactatcttatttccgttgccttttctcttgatcatttctaattattatactataattgttcttctgattaatatttcagtgtggtagatttttgcaacaatagctaaagttattcatcttcytgtaaacaagctcctttgtaatgggacttttcagctcttcccattcagagggagttttttttttctccttcttacctgttaactgtcagctgtccttgtgacttgctttgaccagtggtcatgcgccattctctagtgtaagtgttaacagatgttgcacactcctgtcctttctcttagaaccctgccatcgtcatgtgatcaacctctggtttacaggagaatcaaagaccacagggggcagagacaaaccagccaggtagcaaccagccaaactagcagataactgcagacacgtgaatgagctcaacccagaccacaagaacaaaagcagaggaattcaacccaaaattccacccccaaaactttgagataaagggttggttttaaaaactaatttttatggcgtgttacctaacaaagttaatcgatatactctgcaaataac

SEQ ID NO: 646121 - DNA, 594 bp, Homo sapiens
tctttttccttcagtacatctcctactatcttatttccgttgccttttctcttgatcatttctaattattatactataattgttcttctgattaatatttcagtgtggtagatttttgcaacaatagctaaagttattcatcttcctgtaaacaagctcctttgtaatgggacttttcagctcttcccattcagagggagttttttttttctccttcttacctgttaactgtcagctgtccttgtgacttgctttgaccagtggtcatgygccattctctagtgtaagtgttaacagatgttgcacactcctgtcctttctcttagaaccctgccatcgtcatgtgatcaacctctggtttacaggagaatcaaagaccacagggggcagagacaaaccagccaggtagcaaccagccaaactagcagataactgcagacacgtgaatgagctcaacccagaccacaagaacaaaagcagaggaattcaacccaaaattccacccccaaaactttgagataaagggttggttttaaaaactaatttttatggcgtgttacctaacaaagttaatcgatatactctgcaaataac

SEQ ID NO: 646122 - DNA, 594 bp, Homo sapiens
tctttttccttcagtacatctcctactatcttatttccgttgccttttctcttgatcatttctaattattatactataattgttcttctgattaatatttcagtgtggtagatttttgcaacaatagctaaagttattcatcttcctgtaaacaagctcctttgtaatgggacttttcagctcttcccattcagagggagttttttttttctccttcttacctgttaactgtcagctgtccttgtgacttgctttgaccagtggtcatgcgccattctctagtgtaagtgttaacagatgttgcacactcctgtcctttctcttagaaccctgccatcgtcatgtgatcaacctctggtttacaggagaatcaaagaccacagggggcagagacaaaccagccaggtagcaaccagccaaactagcagmtaactgcagacacgtgaatgagctcaacccagaccacaagaacaaaagcagaggaattcaacccaaaattccacccccaaaactttgagataaagggttggttttaaaaactaatttttatggcgtgttacctaacaaagttaatcgatatactctgcaaataac

SEQ ID NO: 646123 - DNA, 594 bp, Homo sapiens
tctttttccttcagtacatctcctactatcttatttccgttgccttttctcttgatcatttctaattattatactataattgttcttctgattaatatttcagtgtggtagatttttgcaacaatagctaaagttattcatcttcctgtaaacaagctcctttgtaatgggacttttcagctcttcccattcagagggagttttttttttctccttcttacctgttaactgtcagctgtccttgtgacttgctttgaccagtggtcatgcgccattctctagtgtaagtgttaacagatgttgcacactcctgtcctttctcttagaaccctgccatcgtcatgtgatcaacctctggtttacaggagaatcaaagaccacagggggcagagacaaaccagccaggtagcaaccagccaaactagcagataactgcagacacgtgaatgagctcaacccagaccacaagaacaaaagcagargaattcaacccaaaattccacccccaaaactttgagataaagggttggttttaaaaactaatttttatggcgtgttacctaacaaagttaatcgatatactctgcaaataac

SEQ ID NO: 646124 - DNA, 540 bp, Homo sapiens
tacagtaggatattatccctctctgtaaaataaatatagcttttgaataaaatagaataaacttaactaaggaggaggaaggtgtgtagactgaaaactacaaaacatttgtgaaataaattcaagaatataacaaatggaaagtcatcctaggttcatgaattggagaacttaatattgttaaaatgcctattctatccaaagcgctttgcaggttcaatgaaatctccaaaaccccaaagacmtggtttacagtaacagaaaaaaagaaagccctaaattttatatggaaccacaaaacaccctgagtagtcaaaataatctagaagacgaagaacaaaactggaggttccatattttctaatttcaaaatatattacaaatctgcagtaattaaaactgcacaggacaaaacatagtgtttcacgcctatagtgccagcaatttggaaggctgaggaaagtggattgcttgaggccagaagttcaaaaccagtcttggcaacataattagatctcatctctacaaaaaataaaataa

SEQ ID NO: 646125 - DNA, 499 bp, Homo sapiens
gctcactgcagccttgaattcttgggctcaagtgatcctcccaccttagcctcctgagtagctgggactataggcacatgctaccacgtccagctaatttttgtattttttgtaragacaaggtctgtgttgcccaggctgatctcgaactcctggggctcaaacaatcctcgagtatcagcctaccagtgttgagattataggagtgagccaccacacctggcatgtttttggtttttgtttgtttgttttgttttgttttgagacaggtgcttgctgtattgcccaggctgaccttgaactcctgggctcaagtgatcctcctaccttagcctcccaagtagctgggactacagtcattcaccagccattgcacccaaccttttgcccattttaaaattgggttcttcattttttttttttgttttttttttaattgagttgtaggagttctttgtatatctggatattaaccccttttcaggtatatatttgcaaa

SEQ ID NO: 646126 - DNA, 584 bp, Homo sapiens
tccacagcccagaaacagtgatgagaaaaagaaaatgaggtctatctataaaccaaggcaataataactcaattaataattgaattaatacaatcagcacttcatcctttctgcctgcaggaaaaagcaaaaccctcccttgtggaaaataatatccttttcagtttctatcatccatttattcatatgcaaagagtcagaaagtacaatcaatagtaaaaattcacaaaataaagcaggcccatagaaaaatctacatattgaagttagaaaaatacttcaaaaatgtgattaataggtgaaagaaaattttaaaagaaaaatcatttaacaaaatattttaagagaaatttaaattagtaaaaatagaaactattggatttctaaaaacccacaaacwgtgaaaatataataagaatttataaggaaaatttaagagcatattagacaaagcagaagacaggattggtaaactcaaatacacatcaatataaattgtctaaactaaagcacagacagagaaaaaaattaggaatacagatcagatcgtaggatacttgcgaaacccaatcaaatggtgtaaa

SEQ ID NO: 646127 - DNA, 613 bp, Homo sapiens
aaaaatgattgattatattagaagagcaataagacacagagaatatacaaggtgaaaccacaatagctgtagaaaagccatagaggtaygtgagggacaccagcaggaggcagagccgccgagacaccaccaccatgtagagcagagggttacaaatggccacatagcggtcataggccatcacagccagcatcattacctccgatacaataaagaacaagaaccctcccagttgggtggcacattcatagaatgaggtagttttcttctttactaaaaagttcatcagcattttaggggcaatgacagtagagttgccaagattgatgatagctagatgtctcaggaaaaagtacatgggggtttgaagtcgagagtcaacactggtgagggtgatgatgcccaggttccctgccatggtcagcacatagagcactaggaagaccaggaagaggggaatctggagctctggacagctagagacacctgtgagaataaactcagtgaccctggtgaaattttcaggagccatgtcagagtttggaaattcatctgtttgaggaagaaaataagtggttatagacgttaaggaatcattttctaggatttccac

SEQ ID NO: 646128 - DNA, 613 bp, Homo sapiens
aaaaatgattgattatattagaagagcaataagacacagagaatatacaaggtgaaaccacaatagctgtagaaaagccatagaggtacgtgagggacaccagcaggaggcagagccgccgagacaccaccaccatgtagagcagagggttacaaatggccacatagcggtcataggccatcacagccagcatcattacctccgatacaataaagaacaagaaccctcccagttgggtggcacattcatagaatgaggtagttttcttctttactaaaaagttcatcagcattttaggggcaatgacagtagagttgccaagattgatgatagctagatgtctcaggaaaaagtacatggggktttgaagtcgagagtcaacactggtgagggtgatgatgcccaggttccctgccatggtcagcacatagagcactaggaagaccaggaagaggggaatctggagctctggacagctagagacacctgtgagaataaactcagtgaccctggtgaaattttcaggagccatgtcagagtttggaaattcatctgtttgaggaagaaaataagtggttatagacgttaaggaatcattttctaggatttccac

SEQ ID NO: 646129 - DNA, 450 bp, Homo sapiens
acctcaggaagaaagtttcaaacccacacaagtctgcctcctggtagaccatctgagggcatggatcaagcctgttagaaagatgctcactgatgtttacttttcgagtgcatgaaaccagacactgaaactgttcattaaaaattcctatgttcacagacaaagaaaaatcatttcagaagctctgtaatgaatgtacaagtgggtacaggttatcttgtcaaacacaataatcgtgagtaaatgcaaacggatgctgcttgtatttgattttgtctttaattgaagcatgctgacagctgcctctggacttccacatccttgggttgggggatctggctttttgctttgtaatttcctctcgccagggctgggasaggggtgacatctaaatatgagaagcatctggtcagggaataaaatggagagaaatgaatgaaattaacatgt

SEQ ID NO: 646130 - DNA, 504 bp, Homo sapiens
atcttattaaaactgcagggaggaaagtaggtaggcagaagtaattatagaactggaacttctccagaacactggggctaacatcctgattatcagagcaacatttttttatggctacaagtgatttcagatgagcctaattcatcagttcctgcttccccaaaggccacttctaattcctgctggagcaatggccacctggtaaaataggtgatacattttcctttcagtacacattaacttccaaaatccatatgtgaagctatacctctcattgcttaggcagtctaaaatggttgtcaacataaagcattctatcccgttgtctgaggactgcctaagacagttaccacagacagatggggttacgaggccctgagagagtcagattttctaagatagcccttccagtgcattaaggagaaacagaaagaaggtattgcyattaaaataagatagtgaattctatagttcaatgaggttttaatcctagggaagaaaact

SEQ ID NO: 646131 - DNA, 622 bp, Homo sapiens
ctcactcaagccactagaggatcataataaagttaatctttgaataaatacagcacccaatatatactttttttaaaaaaaaatcaattcctcttcctggggattttatttacaccttggaagtaaaattgttctgaagcattagttataagaaatagatctgttcggccgggtgcggtggctcatgcatgtaattccagcactttgggaggccraggcgggtgaataacccgaggtcaggagtttgagatcagtgtggccaacgtggtgaaaccctgtctctactaaaaatgcaaaaattagctgggcatggtggcaggtgcctgtaatctcagctactagggaggctgaggtaggagaattgcttcaacccaggagatggaggttgcagtgagctgagatcatgccactgcactccagcctgggcaacagagcaagattccgtctcaaaaaaaaaagaaagaaatagaactgttcaagtaaaatgcttgcctccaatccatgttacttctcttccctcacctagtaaaatcttatttcctgctgcatcttcagaaatttgtactgacatgggccacaagacatcctgtagttactaagcttcttgtgctacttgcataca

SEQ ID NO: 646132 - DNA, 622 bp, Homo sapiens
ctcactcaagccactagaggatcataataaagttaatctttgaataaatacagcacccaatatatactttttttaaaaaaaaatcaattcctcttcctggggattttatttacaccttggaagtaaaattgttctgaagcattagttataagaaatagatctgttcggccgggtgcggtggctcatgcatgtaattccagcactttgggaggccgaggcgggtgrataacccgaggtcaggagtttgagatcagtgtggccaacgtggtgaaaccctgtctctactaaaaatgcaaaaattagctgggcatggtggcaggtgcctgtaatctcagctactagggaggctgaggtaggagaattgcttcaacccaggagatggaggttgcagtgagctgagatcatgccactgcactccagcctgggcaacagagcaagattccgtctcaaaaaaaaaagaaagaaatagaactgttcaagtaaaatgcttgcctccaatccatgttacttctcttccctcacctagtaaaatcttatttcctgctgcatcttcagaaatttgtactgacatgggccacaagacatcctgtagttactaagcttcttgtgctacttgcataca

SEQ ID NO: 646133 - DNA, 577 bp, Homo sapiens
taagagttagatacaattaaccccattttaccagagaagaaactgaggcttagagaagttaaagacttgtccaagggtacacggtcattagtgacaaagtcmaattcaaacctaagattcctgactttctaaaagcagtgatggaacaactacaggatgtctatctctcctagtccaaagaaagaaaatgcatatactagttcgtcttcatgaccacaaatgtcaacaaatttgaagacatctacctttcttctcccagtaactggctctcatgcattctagaagccctgcatgggagctgcaggtctgcgctattagatgtaatccattagatgtaaacagctggatcagggcacactggcaagaatgagttctagagtcagaaagatctaagcataaatcccaggcctggtacttactaaactgagaaatcatcgacataatctacctcaaagtctctgagaaagagtttcctaatatgagaacctctttcatgagttgttctatgggctaaatgagtttattcatacaaatatttattgagtttgggaagcaaaaggctaaaccacagtccatt

SEQ ID NO: 646134 - DNA, 577 bp, Homo sapiens
taagagttagatacaattaaccccattttaccagagaagaaactgaggcttagagaagttaaagacttgtccaagggtacacggtcattagtgacaaagtccaattcaaacctaagattcctgactttctaaaagcagtgatggaacaactacaggatgtctatctctcmtagtccaaagaaagaaaatgcatatactagttcgtcttcatgaccacaaatgtcaacaaatttgaagacatctacctttcttctcccagtaactggctctcatgcattctagaagccctgcatgggagctgcaggtctgcgctattagatgtaatccattagatgtaaacagctggatcagggcacactggcaagaatgagttctagagtcagaaagatctaagcataaatcccaggcctggtacttactaaactgagaaatcatcgacataatctacctcaaagtctctgagaaagagtttcctaatatgagaacctctttcatgagttgttctatgggctaaatgagtttattcatacaaatatttattgagtttgggaagcaaaaggctaaaccacagtccatt

SEQ ID NO: 646135 - DNA, 563 bp, Homo sapiens
acagtcttacatacatgacttagcttccacaattgtagaaggtccaatcaatacaataaatgtggctcaacgactctacttctctgattgttccctgattgatatggtgtctatacaatgtctgtttatctcccccattcctgaccctggcctccaccacatattttggttggtttcacccctattcttgtttactgtatacatgtaactgattattttctgttcaatttatccctttcagggagttaaaccatttgtatgtgactttcctttctcttctatatctattctttttctcaaacgtgttaagcacgtcttttcaatttcrttccactcagttttcggaagctgatcttattcacccttgctgtgctttaaggagtgactgattttcattttattcctttaaatgtgacttttgctttcacaatgttagtgtttatctcttccatttcttcactaaggcctttcagcttatttttcactttataattttgttgtttttcatatcttgtttgaacttgaaacattgaaattagacttttcaattttttttgtatttc

SEQ ID NO: 646136 - DNA, 519 bp, Homo sapiens
aatatacatatatatatttgagacagtttcaatctatccccgaggctgtagtgcactggcacaatcacagctcactgcagcctcaacctctgggctcaagtgatcctcacaactcagcttccagaatagctgggactatgggtgcatgtcaccagcctggctaattgttttcaaattttttgtagagaagaaggtctcacaatgttgcccaggctggtctcgaactcctgacctcaagcaatcatcccaccttggcctcccaaagtgctgggattgcaggtgtragccacagtgtctggcttatatttcttatttcatgagaaagaaacacttaacattgaaaaattggaaggtaaatttaagtgtaaatataaaatatgagactcattcatgatccctctacaaataggtagcccatgtttatattttggtgtattttgttattttaggcatagaacatgatctgtgcacaaaactaaaagaataaaacatgggaatttgggttgatgttggtttaat

SEQ ID NO: 646137 - DNA, 575 bp, Homo sapiens
agttcccttaaaattcaggcggcttacaaagcagcaagaaggtttgtgcacgggctatggcactgtgatttggctcccctactcaggcatcagtaaaattttgtggagccctaggctacagcccactgatgctaatatagttggatccacttcccctgctactgagctaggctgggacagttttgggcacattagatatgtgcgatataatgattgcaaatcatttccagtttcatctgkatcaaactgctttctccatgtacataggcatcatctctgtggatctgtagtaaattgcttgatcttatagtggtaagaacaatggcataacaccattaccgaatactgacatgtatatatagcatcatgtcaataaattttatttttgatttttttagaaaggaacaatgttaaactcacagaaatgttccaagtataggacaaagtaaccccttccctaaccgggatcatatgagagtcttttggagacctgataatcataccgtctaacattttattatatatttcctacaaacaagaatattctcctaaataatccccatacaccaatgaaa

SEQ ID NO: 646138 - DNA, 575 bp, Homo sapiens
agttcccttaaaattcaggcggcttacaaagcagcaagaaggtttgtgcacgggctatggcactgtgatttggctcccctactcaggcatcagtaaaattttgtggagccctaggctacagcccactgatgctaatatagttggatccacttcccctgctactgagctaggctgggacagttttgggcacattagatatgtgcgatataatgattgcaaatcatttccagtttcatctgtatcaaactgctttctccatgtacataggcatcatctctgtggatctgtagtaaattgcttgatcttatagtggtaagaacaatggcataacaccattaccgaatactgacakgtatatatagcatcatgtcaataaattttatttttgatttttttagaaaggaacaatgttaaactcacagaaatgttccaagtataggacaaagtaaccccttccctaaccgggatcatatgagagtcttttggagacctgataatcataccgtctaacattttattatatatttcctacaaacaagaatattctcctaaataatccccatacaccaatgaaa

SEQ ID NO: 646139 - DNA, 522 bp, Homo sapiens
aagagattcagtgtctctttcctaaagcagttaacagggaggctggtgtctgggtcagratgatttccccaatcactgataaaaagtaaaagaggaaagtgtcattgatggtgcatggcagggacatgctccatgcagtggtcaccctcagtaagagagatgaactttgggaaataatattgaatggcagaaaagaaggtagactatgaaggtgcccaaaacaagaataaggtgcagcccatttagtgtctgagtactatagagacctgtcgctcttgataattgtggatctgtgactgctgcatgcatcaagaaaacacggtatcatctttgtgtatctatagtacatagtttgatcgcatactggtaagaacaatggcataacaccattacctgatacttacaaatgtatgtaccatcatgtcaataaattttatttttaattttttttacataggaacaatgttaaactcacagaaatgttgcatgtatatgacaaatacccccttccctaaccggaat

SEQ ID NO: 646140 - DNA, 573 bp, Homo sapiens
aattgtgtggacatttgtttttatgtttccaatctcaggttccagatgcgacatccagatgacccagtctccatcttcygtgtctgcatctgtaggagacagagtcaccatcacttgtcgggcgagtcagggtattagcagctggttagcctggtatcagcagaaaccagggaaagcccctaagctcctgatctatgctgcatccagtttgcaaagtggggtcccatcaaggttcagcggcagtggatctgggacagatttcactctcaccatcagcagcctgcagcctgaagattttgcaacttactattgtcaacaggctaacagtttcccttccacagtgttaccaacccgaacataaacccccagggaagcagatgtgtgaagctgggctgccccagctgctcctcctgatgcctccattggctgagagtgttgctcagatgcagccacactctgatggtgttggtagaggggtacgtgaaatcgcctctgcaccctaattcttttctctttctcagccccaactgcacagacatagcaatgcatctcctgatttgataaatacagaga

SEQ ID NO: 646141 - DNA, 483 bp, Homo sapiens
ttttatgaaaaaaattaacaagtgcataagttcataatagaaaaaccaataatactccaggcacaagttagtactaaaaaaattatgttgaatatkctctaatacaacatgctttttcccttcatgaacaatttgtgttttactgagaagagtcattgtttatggtagactacagatgaatatgtactttaaacactcttagttgctttcttaattttatatctgctgctttatgcttctgtttattttcattctttccaatgtccacattctagtaaatttgaatattttaatccaagtttatatactatttaatattgcttgtatagtttagtatttttaagactcaaaaaggtttacagaaagaagaaaaagatcaacatgttattaatcatttaaagatcattttgaaatctttgacctttatattttaatgaataaaatattagtagttattagtataaaataatttatgtcttttgg

SEQ ID NO: 646142 - DNA, 483 bp, Homo sapiens
ttttatgaaaaaaattaacaagtgcataagttcataatagaaaaaccaataatactccaggcacaagttagtactaaaaaaattatgttgaatattctctaatacaacatgctttttcccttcatgaacaatttgtgttttactgagaagagtcattgtttatggtagactacagatgaatatgyactttaaacactcttagttgctttcttaattttatatctgctgctttatgcttctgtttattttcattctttccaatgtccacattctagtaaatttgaatattttaatccaagtttatatactatttaatattgcttgtatagtttagtatttttaagactcaaaaaggtttacagaaagaagaaaaagatcaacatgttattaatcatttaaagatcattttgaaatctttgacctttatattttaatgaataaaatattagtagttattagtataaaataatttatgtcttttgg

SEQ ID NO: 646143 - DNA, 483 bp, Homo sapiens
ttttatgaaaaaaattaacaagtgcataagttcataatagaaaaaccaataatactccaggcacaagttagtactaaaaaaattatgttgaatattctctaatacaacatgctttttcccttcatgaacaatttgtgttttactgagaagagtcattgtttatggtagactacagatgaatatgtactttaaacactcttagttgctttcttaattttatatctgctgctttatgcttctgtttattttcattctttccaatgtccacattctagtaaatttgaatattttaatccaagtttatatactatttaatattgcttgtatagtttagtattkttaagactcaaaaaggtttacagaaagaagaaaaagatcaacatgttattaatcatttaaagatcattttgaaatctttgacctttatattttaatgaataaaatattagtagttattagtataaaataatttatgtcttttgg

SEQ ID NO: 646144 - DNA, 614 bp, Homo sapiens
attgttagatttttattgtgttgataaattgtatatcaaataaaaaatgttattacctcttaaattaggatttttaggtgatataggcagaaaggacggcaagtttttataactttctctaaatgaactttctaaatgcctgagtattaaaagatagcatgtctataaatcacaatgtatatattactgtatgacctaggaccaatcaaaaccgttacctctgataacattatattgtgcccagtataaaatagatataataatacctcaaacttaaatccgggcattgtcattgaatatcttaagaatatgcaacaaaggtgcttttaaaaatacaagctagtgattgtaccaaatttgtaaatcacataggatagtgggtcattttaagaatattagttatttcaatctataaacgtggatgtctttccttttttgtgttttctttaatttctttcattaatatttgtcatttttgttgtcgaaatcttttacttccttggttaaatttatttctaagtacatttttgtagctattgtaaaaggaattgctttcttaatttcttgtttcagctagtttaytatcaatatatagaaatgctactgatttttgt

SEQ ID NO: 646145 - DNA, 624 bp, Homo sapiens
ttttacatgcaaataaccttatacattttaaatgtgttttagatgcaggcattgaactagactgggatgaagttttcatgtagtttcaactcaactttttactttactgcaaagcaataaattggagtattaaactataattaaaatcaatrcaactgattttcctccatccgttgtattatttagcattattatgacattctgtttaaccaatgattgatcataaatagaagacagaagtgttaacaacatattttaagacaaatatgtttaaattatatttttccaattaaggtatcctgatatatgtttcttttgtttttggttgataaataataattgtccatatttatgggatacagagtgatttttcagtacctgcatatgttgtataataattaaattagaataattaacctatccatcaactcaaacatttatcattttcttgaattgtgaatactcaaaattttctcttaactttttgaaaatatacaataaattactaaacatatttactctgcattgctacagaacactagaactttattcctatctagctataattttgtattctttaaccaacctctctctatattcccctgtgccttattcttcccagcc

SEQ ID NO: 646146 - DNA, 623 bp, Homo sapiens
atttgagtgtgcccttcttctgtactgtaatatttggcaacttgctccaatgttaaaaacttgtttaatttctccctaaaatggcttgtctcaagcactccaacacaaaaagcatatgcctaagaggagaaactcgtttatttgcttggtcgtcttttgaatttcttgcaactttccatgtacagggtactttcagcacacttcttttaagagagggttgctcttggaagagacactgaaaggctttcctttacctgctcttccctaagtctctcccaacagacaggctcttaaactctgaagagtataccaagtgtcctgttccaagaagttcacctggggtaaggtagatcatacattttccaggcatctaaaaggtaaacaacccaaagaccaaatcwccttctctcactctcttccatttgtttaccaatgactctttcatatgtggtctgttaactttctactccaagaaaaaaagcacaatgaggcaatcacactgaacatatcagcaccagagaacacaactaccttacttgtgctccccaagaccctgtgttttttgctttactaagatactatggtttttcttttttttaaatcaatcaatcaatttgcctgtc

SEQ ID NO: 646147 - DNA, 493 bp, Homo sapiens
gagatgccacacacttttaaacaaacagatttcatgataactctatcatgagcacagcaccaaaaggatggtgccaaatcattcatgaaggatccaccctcatgattcaatcacctcccaccagaccccacctccaacatttaggattacaatttaacatgagatttggaaggggcaacagatccaaaccatatcaccatattacaaataccttgaaaacaatacatattcaataagtatttgttattgaatttccaagtattttgcttagagagtgtattcattcttgcattgctataaattacttgataattactgggtaatttataaaggaaaaaggtctaactggctcaaagttccacaggctgtacagaaagcatggccggggaggcctcaggaaacttacaatcatggygtgaagaggaaggaagcacatcttaggtggtgagagcaggagaaagagagtgaagggggaggtgctacacacttttaa

SEQ ID NO: 646148 - DNA, 596 bp, Homo sapiens
aagaatagaagaaaaatacttgaacataatagaaactatgtataagaaaacctccagtggacatcatactcagtggtgaaatactgaaagctttacccttatgatcaggaacaaggcaagtatgtctactttcaccacttctagtcaacatagtactggaagtcctagccagagcaactagaaaggaaaaataaataatggagttagaattggaaaagaagtgaattatttctgtttacagatggtttgatctaatatgcagaaaatattaaatattgttttaaagttaactagtttcagcaaagcaacaggatacaaaatcaacacacaaaaatcagttatgttttgatccactaacaattaacagtatgaaaaataaattaaatcattattttcaataaaataaaaagaataaatacttagaaattagtttaatcaacaaggtaaaagatttgtgcaatgaaaactacaaagtatktctgaaagaaattaaagaagatataaataaatggaaagatattccatgctcctggattggaagacaatattatgaaaatttaggctatggatccattttgagtttttttttttaatat

SEQ ID NO: 646149 - DNA, 589 bp, Homo sapiens
ctgttatgtttttggtggttgttgataatgtatgatttacaatcagcaaaatggagaggtctaaatttttctgtgcatatgaatcccagcagttttcttttttttwaaaaaaaatattccatagagttttctatgtacataattgtcttctatttaaaaaaatgatagttttacttgctttttaaaaaatccttgctttttcctttctttttcttgccttattgcccttgctggaacttccagtagaataacattgaatagaagaggggagagtggaaagctttattttgtttcagatcttagggaaaaagtgttctatttttcatcacaaaatctcgtgttaggtgtaggttttttgtagacgtcctttatgtgattaaaagagttcctttttatttctagtttgccaaaagagtttatcatgaatggacattagctgcatatgtatttttaattattgccttttgtttcttgatcatggcatggcctcagctcccattgccccgggtgtccatttcattcctgtagatttgcctttgattaggccttaatctgtctccttcactggtattagcagagtctaaaaaaa

SEQ ID NO: 646150 - DNA, 589 bp, Homo sapiens
ctgttatgtttttggtggttgttgataatgtatgatttacaatcagcaaaatggagaggtctaaatttttctgtgcatatgaatcccagcagttttcttttttttaaaaaaaaatattccatagagttttctatgtacataattgtcttctatttaaaaaaatgatagttttacttgcttttwaaaaaatccttgctttttcctttctttttcttgccttattgcccttgctggaacttccagtagaataacattgaatagaagaggggagagtggaaagctttattttgtttcagatcttagggaaaaagtgttctatttttcatcacaaaatctcgtgttaggtgtaggttttttgtagacgtcctttatgtgattaaaagagttcctttttatttctagtttgccaaaagagtttatcatgaatggacattagctgcatatgtatttttaattattgccttttgtttcttgatcatggcatggcctcagctcccattgccccgggtgtccatttcattcctgtagatttgcctttgattaggccttaatctgtctccttcactggtattagcagagtctaaaaaaa

SEQ ID NO: 646151 - DNA, 492 bp, Homo sapiens
attgtggttagtttggatgagggtgagtgaattttcaagtccttaccagttaaawcccattttaccctttaaatacaagtagggcagcatgaaggcaaatctataacggtgtgggccctggagcttataaagattggctcccatttttaagcaaatgtgtacagaaataccttaattttgtaatttactagagcatataatcataagaacatattacaaagggtcttcactctcagaagggctggtggaagtgagaacataagcttccttagcttcatggttaaatttgcctctggttagcacttatcacactatcttcaaaatacttctttatatttctgttgttctcacttaactccacatcctcagggccagaggtcacgtctttttaatcggtgtatatctaagatgcatttaaaaatgctcattaaacccttcagattggtttaatgaggattttttaaaggcatcttagatatacaccaggaagag

SEQ ID NO: 646152 - DNA, 582 bp, Homo sapiens
taaaataataactggctgacatgaagattctctgtttttcctgcgtcttgaatatttgaacctgatcaattcatatgttccaaaatacttcaagagatttattaattatattcacctaccatcaacaggtagaagctgcttttctctagttctatgcaaaccactctacaacctagaaattggagatttaattctctggaagggacgtcatcagaaaactaatcttttgccttgtccacagggcccttatgtcatactcctcaccactaacattgctgcaaaactccaagaggtccaatctagatgcatgtcgttcaaatgtaaacatccraaagctcctcaaatggcagtccatctaaattggacattggaaactgtagctctctcaagattcctccataaacaaatggcaccacaaggtagatagctttcataagaacttcagaccaaccagataaaaataggagttagttacctttcccttaaaatgttgaaaacaaaatcccctaggatttccttgtttatttcctaacctcagtatttttgttatctttcttgactgtattcttcttctctgtctcc

SEQ ID NO: 646153 - DNA, 571 bp, Homo sapiens
tgttcattttttaatttacttatagctggtagtatataaaatgcaaaatgcctaagagcattctttataatagacatagctaccttcaaatacctcctgtgatgagatgaattatgccccctcgatatccatatgctgaagtcgtaacttctgttatgtcagaatgtgattatactctgatacagagtctctaaagaagtaatcaagttaggataaggtcattagtaggccttaattcaatgtgaccgacgtgcttataagaagagattagtataaacacacacacacacagagggaagaccttgtgwagatacaaggagatgacgaccctatgtaagccaagtagaggggtctcagaagaaagcaaccctgctcttacttttctcttagaattctaacttccagaattgtgagaaaataaatttctgttgtttaagccatgtagcccatggtactttgttatggcaggtctagcaaacaaacttacttttaaaacctcacttaaatgacagtaaagagagaaaagagcataaacttgcaagaaagcaaaggggacagaagcaacaaaagt

SEQ ID NO: 646154 - DNA, 571 bp, Homo sapiens
tgttcattttttaatttacttatagctggtagtatataaaatgcaaaatgcctaagagcattctttataatagacatagctaccttcaaatacctcctgtgatgagatgaattatgccccctcgatatccatatgctgaagtcgtaacttctgttatgtcagaatgtgattatactctgatacagagtctctaaagaagtaatcaagttaggataaggtcattagtaggccttaattcaatgtgaccgacgtgcttataagaagagattagtataaacacacacacacacagagggaagaccttgtgaagatacaaggagawgacgaccctatgtaagccaagtagaggggtctcagaagaaagcaaccctgctcttacttttctcttagaattctaacttccagaattgtgagaaaataaatttctgttgtttaagccatgtagcccatggtactttgttatggcaggtctagcaaacaaacttacttttaaaacctcacttaaatgacagtaaagagagaaaagagcataaacttgcaagaaagcaaaggggacagaagcaacaaaagt

SEQ ID NO: 646155 - DNA, 567 bp, Homo sapiens
tttaggttaacaatgcatttcaaaacttcataaattataatacatactgtgatgaaccactgaaacatcagaagaaaaaaaatcacacttaaacattttaatccccaaactacagtattacaaactcgagtatatccattaatcaaacattttgatatttttataattcagtkttaacataaaggtgatcagtcattttcagatctaataacatatattaaaaggtagaaagcatatttaaaacaaaacataatttttatacttaagtggttaataccttattagtatttatttttaagaataaatgcataaacagaagtgtttctcttaatgcagatatagataaaatcagcagtgagttatactagcttttctcttatggaaggagtttagctatgcaacactgcaatgaatgctttggaattaatattcatatatctattgaaagtttgcttctgttcttacagattaaagatgtcttgctatctgcagacttaaatcatgtcttttataaagtatgaaaataaacatggacatagagaaatgcagttatgcattgtgatggtt

SEQ ID NO: 646156 - DNA, 537 bp, Homo sapiens
ctcactgcagcctggaactcccgagatcaagcctcctgagtagtgggactataggtccacaccctaaataacagtcgaacttaatattttgcttatataaccttgatctaaagacaaaaagaactacaaacaaatggtgaactatactttagcatgtccatttttcacagtggtatagatgaataattctgaaattattttctaggcatgaagaattgggcaaataaatattttcaggatgttgtgaaccaggtctctcactattagagaagggagatacaaataaggagggagtaggctgtgaaaaatcttgtactgctagattgaaactggatatagtataaattyattatatatatatatacacacacacacacccacacacacacacacatatatatgggggtgtatgggggtgtgggtgagtgtgtgtgtttcttaattctgtgtgttgaaagggcctagaagttttgatatatcagtagcagcaaggacacccagcaccctaatcttggtttctaaataccattccccact

SEQ ID NO: 646157 - DNA, 563 bp, Homo sapiens
taatgacttatcagttccaacatttttgtgttgattctttccaatttccaaatagacaattatgccatctgcacacagttttatttcttccatctcaatctatatacattttcttttcttgtctttcacagcagctaggacttccaatataatattgaaaagcagtagggagagggaccatccttgccttgttcctgatcttagtggaaaatctaagtttcttactattaaatatgatgttagctgtggggttatttggtagatattctttataaagttgaggaagcttccctctrttcctaatttactgagagttttatcatgcatggatatttgattttctcaaaggctgtttctgcatctgttgatataatcatgtgatttttcttcttgagcttgttgatatgatggattatattaattggttttcaaatgttgaaacagccttggatacctgggataaatcccatttggttttgaagcatatttttatatgtggttgaattctatttactcatattttgttgaagatgttcatatatatgttcctaaggatattggtc

SEQ ID NO: 646158 - DNA, 565 bp, Homo sapiens
tcatactctcagaaccatattttgacatgttaataaccatccacttaacaaagagtctgactaaatttatttataaggtaaatattgaatatatacatgtctgtaagtatgcatctgtaaacatttgccatttagtcatttgtaaatgcatttacaataattatgtataattttgtatgtaaagtagtataacatgacaggttctgagagacttgaagagcattctcatgaagaaaaaaagttgaaagacattttctggagattaaaaaaaattaagaagcagcaaagaatgtgccaaaaggaaaaagaaaaayagccacttgtcttttaggaaatgtcatagaaaagcatcaatttgtttatagaggataaaatttagtatacctaaatcttaaagtcagggggcataataaaagatgaaaacataaatatgacaactacaaaaatgactgaaagtatagctcattttagttttcaagagatgatcaaacaatatttttacatttttaatgaaaatgttaagaggtcagagttcaattaacctagcgattttattcttgaagca

SEQ ID NO: 646159 - DNA, 542 bp, Homo sapiens
atttttcccaaacaaatctcatgtctttatgcctcctgcttctattccctgaagatcccttgaagagactatactctctaaaaagccatgccaaaccagataaaacacatagaagagagatgatatttcatgaaaatcggagtcaagcagacctagcttggcatcatggctctgctatttaccatctttgtgaacttggactagttactccttaattcttctgaaaaatgaaaataacatcatctgctccatgatgtgtgctactttccgtcctctattcacaatgtccccaatgtcttggagatagtccatatatcttttatcctttgctaaagagattccttcttgaaacttgaattgacaccattcctttcctagtattcttgctccaaacactcagacctaggcagggttaactcttctctctttttttgtacctctgctgccctgttattctagcactcactgtaatrttacaatttttgataaaattagctaggacatagggagaactcctataacccagcaaacagcacaaagca

SEQ ID NO: 646160 - DNA, 586 bp, Homo sapiens
gcacctactatgtacaggtgatgccacaaattaaagctactgaaacagagatagcaggtctctgtgttcaaggagactgtcttatgaggagacagacacataatccgcaagacaggaatgaagttctacaattgcacaaaagggagagttaattattctacattaagatgttaagaaagcctccacataggatattcttccgagcttcatgaaaagatagtttttagatacttggtggctttgtcattcattctttgtcatgaatgtatattagaaaaaattacagttattaattgctcaaaaataaagcattcacttttcttagtaaagatgttatttatttcaagtgacttgcagcccccaaatgcatatacatgccccataatgtgatatatatatatatattgcttgagttaaaggagcaaatagtgaacatcttagaatgttccagggatcactggatactctaaaggaaaagaagcwgaaggacaatcaaagctgaacatctgcactaccatcctagttcatctttcctccgccgctatcctgaccattcaagtgtgtctcctttttaacttaccattcc

SEQ ID NO: 646161 - DNA, 586 bp, Homo sapiens
gcacctactatgtacaggtgatgccacaaattaaagctactgaaacagagatagcaggtctctgtgttcaaggagactgtcttatgaggagacagacacataatccgcaagacaggaatgaagttctacaattgcacaaaagggagagttaattattctacattaagatgttaagaaagcctccacataggatattcttccgagcttcatgaaaagatagtttttagatacttggtggctttgtcattcattctttgtcatgaatgtatattagaaaaaattacagttattaattgctcaaaaataaagcattcacttttcttagtaaagatgttatttatttcaagtgacttgcagcccccaaatgcatatacatgccccataatgtgatatatatatatatattgcttgagttaaaggagcaaatagtgaacatcttagaatgttccagggatcactggatactctaaaggaaaagaagctgaaggacaatcaaagctraacatctgcactaccatcctagttcatctttcctccgccgctatcctgaccattcaagtgtgtctcctttttaacttaccattcc

SEQ ID NO: 646162 - DNA, 611 bp, Homo sapiens
gttaagttataagatgaataagttctgaagatctaatgtgaagcatggggactatagttaataacactcgattacataattgaaactcactaaaagaatrtatcttacatgttctcaccacttaaaagaaaatgaaaagttttttaaaagggtaaaaatattttaaaaagaaagaaagttttcataatgaatttagacttgctttaaatgaacacaaatgttccaggtcaagagttatgacacggaaatattaacctaaccagtaatgtcaatatgtgtaagtgtaagaataagtggaaaagggaaatttttctaggaatctgatattgtttggctgtgtcaccacccaaatttcatcttgatttgtaactcccacaattcccacatgtcatgagaggaacctagtggtgtgaaaacagactaatactgtaaattggtaccagtagagtggggcactgctgaaacaatacccaaaaatgtggaagcaactttggaactgggtaacagcagaggttgggatagtttggggggttcagaagaagacaggaaaatgtgggaaagtttgcaactcccaagagacttgttgaatgactttggccaaaatgctgata

SEQ ID NO: 646163 - DNA, 611 bp, Homo sapiens
gttaagttataagatgaataagttctgaagatctaatgtgaagcatggggactatagttaataacactcgattacataattgaaactcactaaaagaatatatcttacatgttctcaccacttaaaagaaaatgaaaagttttttaaaagggtaaaaatattttaaaaagaaagaaagttttcataatgaatttagacttgctttaaatgaacacaaatgttccaggtcaagagttatgacacggaaatattaacctaaccagtaatgtcaatatgtgtaagtgtaagaataagtggaaaagggaaatttttctaggaatctgatatkgtttggctgtgtcaccacccaaatttcatcttgatttgtaactcccacaattcccacatgtcatgagaggaacctagtggtgtgaaaacagactaatactgtaaattggtaccagtagagtggggcactgctgaaacaatacccaaaaatgtggaagcaactttggaactgggtaacagcagaggttgggatagtttggggggttcagaagaagacaggaaaatgtgggaaagtttgcaactcccaagagacttgttgaatgactttggccaaaatgctgata

SEQ ID NO: 646164 - DNA, 511 bp, Homo sapiens
cttttaaaattattgaatggtgagagttctttatatattgtagatacaagtcatttatcaggtgtatgatttctaaatatcttctactgcttcagcatgacttttataaagcagaagtttttaattattaataaatccaaatctcttttcatggttaaagctgtttgttccttttttaccttttaaaaaacagaatctactgtaagtcacaaagatatacttctatgctttcctgtgaaaaattaagacatttagcctgtaatttcaggtatatgatccaactcaaattaatttctgggagtgatttcattrtgggtccatgtttattttttttcctatgtgtatatcaagttgtttcatcaccatttgctgcaaagactaacattaccccattgatttaattgtactacttaattgaaaattaattagcatagtgtgtgggcatatttctggaatatggattctgttctattgatctatttgtctatcatcatggcaagaccataaattg

SEQ ID NO: 646165 - DNA, 556 bp, Homo sapiens
tttcgggatttgttttagtatcaaattaggatacaataaaatatagaaagctgacatgacttgaatgaaaacagctaataacttaatggaatttgaatctacaattaaacttgtttccctgaattgccattaattaatttgctctatcctttgcctacaggccgaaaccatacaccatagttgttatttctgtttttgttcctcactactaaaactcacagcggagcaagccaacagatacaataaaatattttataaatcatttggagaaaaatataatccactgaagaatggaaacttccctcaaaataatgctaaggttcagatggattttttttcgtatttgcaagttaatcctcatctgaaaatctcaagtgcattgtagtttatatttgctttttaaatagaatttgtaccagatattaaaccattcgcttccctgttttrctcttttttttttcctttcattgcttggtgcttgagagagaaaatttttttccaggttttataaagacatgagatgttggattaaaacatatattttttattgagttac

SEQ ID NO: 646166 - DNA, 555 bp, Homo sapiens
aatagaaaacatgactacacagaagccgacattattctttttttttggagatggaatttcactccgtcacccaggctggagtgcagtggcacaatttcagctcactgcaacctccacctcccaggttcaagcgattcttctacctcaacctccaagtagctgggattcaggcacctgccctcatgcccagctaatttttgtatttttagtagagacggggttttaccatgttggccaggctggtcttgaactactgaccacaggtgatccaccagcctcggcctcccaaagtggcatgagccactgcacctggcaagctcagagaatttaaggaagatttttttccctcacaaagtaagaagttcagaagaggtagttcctggtattagtttagggatttgcagacttcagggctgaggtctctacawctcccttggacttttcctcatggtcaaaatatggttgctgaactttcagccactaagtccaaattccagccagaaagtagaaaacaggaatggaggagagaaaatgagaacgaaggggcaatattgt

SEQ ID NO: 646167 - DNA, 534 bp, Homo sapiens
cgggtgtatggacttcacaccccccacccctgttcctgggtctctctgcagtggaaagcttattcataattttgcaaggagcccagtgcaaggttgggggctattcaacagagctgcagggcccccacactgcactgaggtcacccaccggtcaggttaagacgatgcccatccaagggtggagatgcctagatgaatatctgtaaacaaacctccccagtatggctgtccacttgaattgtgtttaaaagccaratatccaggttcctctcgcccatgaagcgttcttaaattaaatccaccttgctgtccacgtggtcccaatcactccaccgcctgagcgtgttctggtccagctgcagctcattctctgggcaaccatgatgtttgtgttgcaatttgtacttaggtctgcttttccctttgcctcaattagcgtgacagttcctccaagccccactgccttcttgtgtcacttcccgtaactcctagcaggggtctcttcatacaaggggggctccgttcacgtgctga

SEQ ID NO: 646168 - DNA, 524 bp, Homo sapiens
tcaagcgctttaaggtcaatggcagaaaaggaaatatcttcgtttcaaaactagacagaatcattcccacaaactgcgttgtgatgtgtttgttcaactcacagagtttaacctttctgttcatagagcagttaggaaacgctctgtttgtaaagtctgtaagtggatattctgacatcttgtggccttcgttggaaacgggatttcttcctattctgctagacagatgaattctcagtaacttcyttgtgttgtgtgtattcaactcacagagttgaacgatcctttacacagagcagacttgaaacactctttttgtggaatttgcaagtggagatttcagccgctttgaggtcaatggtagaaaaggaaatatcttcgtatagaaacaagacagaatgattctcagaaactcctttgtgatgtgtgcgttcaactcacagagtttaacctttcttttcatagagcagttaggaaacactctgtttgtaaagtctgcaagtggatattcagacctccttgag

SEQ ID NO: 646169 - DNA, 524 bp, Homo sapiens
tcaagcgctttaaggtcaatggcagaaaaggaaatatcttcgtttcaaaactagacagaatcattcccacaaactgcgttgtgatgtgtttgttcaactcacagagtttaacctttctgttcatagagcagttaggaaacgctctgtttgtaaagtctgtaagtggatattctgacatcttgtggccttcgttggaaacgggatttcttcctattctgctagacagatgaattctcagtaacttccttgtgttgtgtgtattcaactcacagagttgaacgatcctttacacagagcaracttgaaacactctttttgtggaatttgcaagtggagatttcagccgctttgaggtcaatggtagaaaaggaaatatcttcgtatagaaacaagacagaatgattctcagaaactcctttgtgatgtgtgcgttcaactcacagagtttaacctttcttttcatagagcagttaggaaacactctgtttgtaaagtctgcaagtggatattcagacctccttgag

SEQ ID NO: 646170 - DNA, 435 bp, Homo sapiens
tgtgatgtgtttgttcaactcacagagtttaacctttctgttcatagagcagttaggaaacgctctgtttgtaaagtctgtaagtggatattctgacatcttgtggccttcgttggaaacgggatttcttcctattctgctagacagatgaattctcagtaacttccttgtgttgtgtgtattcaactcacagagttgaacgatcctttacacagagcagacttgaaacactctttttgwggaatttgcaagtggagatttcagccgctttgaggtcaatggtagaaaaggaaatatcttcgtatagaaacaagacagaatgattctcagaaactcctttgtgatgtgtgcgttcaactcacagagtttaacctttcttttcatagagcagttaggaaacactctgtttgtaaagtctgcaagtggatattcaga

SEQ ID NO: 646171 - DNA, 238 bp, Homo sapiens
acttgaaacactctttttgtgkaatttgcaagtggagatttcagccgctttgaggtcaatggtagaaaaggaaatatcttcgtatagaaacaagacagaatgattctcagaaactcctttgtgatgtgtgcgttcaactcacagagtttaacctttcttttcatagagcagttaggaaacactctgtttgtaaagtctgcaagtggatattcagacctccttgaggccttcgttggaa

SEQ ID NO: 646172 - DNA, 445 bp, Homo sapiens
cttcgttggaaaagggatttcttcatattctgctagacagaagaattctcaawaacttccttgtgttgtgtgtattgaactcacagagttgaacgatcctttacatagagcagactggaaacactctttttgtggaatttgcaagtggagatttcagccgctttgaggtcaacggtagaataggaaatatcttcctatagaaactagacagaatgattctcagaaactcctttgtgatgtgtgcgttcaactcacagagtttaacctgtcttttcatagagcagttaggaaacactctgtttgtaaagtctgcaagtggatattcagacctctttgaggctttcgttggaaacgggatttcttcatattctgctagacagaagaattctcagaaacttacttgtgttgtgtgtattcaactcacagagttgaatgatcctttaca

SEQ ID NO: 646173 - DNA, 436 bp, Homo sapiens
ggatatatcttcgtataacaactggacagaatcattctcagaaactgctgcgtgatgtgtgcgttcaactctcagagtttaacttttcttttcattcagcggtttggaaacactctgtttgtaaagtctgcacgtggatattttgaccacttagaggccttcgttggaaacgggtttttttcmtgtaaggctagacagaagaattcccagtaacttccttgtgttgtgtgcattcaactcacagagttgaacgttcccttagacagagcagatttgaaacactctatttgtgcaatttgcaagtgtagatttcaagcgctttaaggtcaatggcagaaaaggaaatatcttcgtttcaaaactacacagaatcattcccacaaactgcgttgtgatgtgttcgttcaactcacagagtttaacctttctgttcata

SEQ ID NO: 646174 - DNA, 436 bp, Homo sapiens
ggatatatcttcgtataacaactggacagaatcattctcagaaactgctgcgtgatgtgtgcgttcaactctcagagtttaacttttcttttcattcagcggtttggaaacactctgtttgtaaagtctgcacgtggatattttgaccacttagaggccttcgttggaaacgggtttttttcatgtaaggctagacagaagaattcccagtaacttccttgtgttgtgtgcattcaactcacagagttgaacgttcccttagacagagcagatttgaaacactctatttgtgcaattkgcaagtgtagatttcaagcgctttaaggtcaatggcagaaaaggaaatatcttcgtttcaaaactacacagaatcattcccacaaactgcgttgtgatgtgttcgttcaactcacagagtttaacctttctgttcata

SEQ ID NO: 646175 - DNA, 436 bp, Homo sapiens
ggatatatcttcgtataacaactggacagaatcattctcagaaactgctgcgtgatgtgtgcgttcaactctcagagtttaacttttcttttcattcagcggtttggaaacactctgtttgtaaagtctgcacgtggatattttgaccacttagaggccttcgttggaaacgggtttttttcatgtaaggctagacagaagaattcccagtaacttccttgtgttgtgtgcattcaactcacagagttgaacgttcccttagacagagcagatttgaaacactctatttgtgcaatttgcaagtgkagatttcaagcgctttaaggtcaatggcagaaaaggaaatatcttcgtttcaaaactacacagaatcattcccacaaactgcgttgtgatgtgttcgttcaactcacagagtttaacctttctgttcata

SEQ ID NO: 646176 - DNA, 345 bp, Homo sapiens
tttaaggtcaatggcagaaaaggaaatatcttcgtttcaaaactacacagaatcattcccacaaactgcgttgtgatgtgttcgttcaactcacagagtttaacctttctgttcatagagcagttaggaaacactgtgtttgtaaagtctgtaagtggatattctgacatcttgtggccttcgttggaaacgggatttcttcattttctgctagacagaagaattctcagtaacttccttgtgttgtgtgtattcaactcacagagttgaamgatgctttacacagagcagacttgaaacactctttttgtggaatttgcaagtggagatttcagccgctttgag

SEQ ID NO: 646177 - DNA, 419 bp, Homo sapiens
aaaactagacagaaacattatgagaaactgctttgtgatgcgtgcattcatcaccagagttgagtttctcttttgattgaacagttttgaaacactctttctgtagaatctgaaagggatatttggagcgctttgcagcctatggtgaaaaaggaaatatcttcacataaaagctagacagaagcattctaagaaagtgctttgtgacgtgtgcattcatctcacagtgttgaasctttcttttgattgagcagttttgaaacactcttattgtagaatctgcaagtggatatttggagagtttgaggccactggtggaaaagcaaatatcttcacatcaaaactagacagaatcattaggagtaatctctttgagatgcgtgcattcaactcacagagttggacatttcctttgattg

SEQ ID NO: 646178 - DNA, 435 bp, Homo sapiens
tacacccagttggtgtaagagagttaaagaaggggtgttcgaaaatgacacatgcatttggtgccagagaagaaaaaaaaaaaaaaacctctyagtttgtctcctaagactcagaataattggtcagttaataaaaaaaaattacttgatagctaccatggaaaaaaattgtgctagattttgtggggatatgagtaagtttagataaaaacctttaagaaacaatcagacaattcaaataattgaaaatatttttaacaaggatgctaaactatatgaattgccaaatcaatgacaaagatgataaacattacaaaaatttgaggcatgtacaggtcaaaatcatgaagaaatacaaattagaaaaaacgttttgcaggttacagcatcagggccatgtctttggctctgctctcagtggagaatatagtctgg

SEQ ID NO: 646179 - DNA, 569 bp, Homo sapiens
agggagcaagagacagagtggggagattccaggctccttctcaaacaaccagatctcatgtgaactactagagtgagaactcactcaycaccatggggatggcaccaaaccattcataagggatctgcccccatgacccaaatccctcccaccaggccccacctccaacactggagattacatttcaacatgagacttggagaggacaaacatccaaagcacatcagcattcattcaaaagaactgaaatcaggatcccaaagaaatattagcactaccatgttcactgcagcactatttacaatagccaacatgtggaagcaacctaaatgtccaccaatagacaaatggataaagaaaatgtggtgtatacatatagcagaacattattcattctttaaaaagaaggaaattctgtaagatgtgaccacatggatgaatgttgaggacattatcctaagtgaaataggccagtcacagaaaaggcaaatactgtatgcttccattacaagtcaaactcatagaatcagagaatggaatggtggttgccaggagctggggaaggggaa

SEQ ID NO: 646180 - DNA, 514 bp, Homo sapiens
tggctgggacacagggtgccttgtcccagggctgcacagagcagctgtgccctgggcctggaccatgaaaccatttttccctcctagggatccrgaccggtgataggtgggcttctgcaaaggtctctgacattccctggagacattttcccattgtcttggctattaccatttgactcatgcaaatttctgcagtcagcttgaatttttccccagaaaagtgatattttttttctacacatagtcaggctgtgaattttccaaacttttatgctctgcttcccttttaagcataagttccaattcccaaccatctctttgtggacacatatgactgtatgctgttaggagcaacccatccacattttgagtgctttgcttcttagaatttttttttttttttttttttttttttttttttgccagataccctaaatcatctctctcaagttcaaagttccacagatccctagggcaggggcacaatgctgccactctctttgctaaagcatag

SEQ ID NO: 646181 - DNA, 600 bp, Homo sapiens
  misc_feature 1, 2, 3, 4, 5, 6, 7, 8, 9, 10, 11, 12, 13, 14, 15, 16, 17,18, 19, 20, 21, 22, 23, 24, 25, 26, 27, 28, 29, 30, 31,32, 33, 34, 35, 36, 37, 38, 39, 40, 41, 42, 43, 44, 45: n = A,T,C or G
nnnnnnnnnnnnnnnnnnnnnnnnnnnnnnnnnnnnnnnnnnnnncttgcagacaatagttagatcctgcatttttatccattatgtccacttctgccttttaattggtgcctttaaattaaaccacttatatttgaaattattactgataagggaggacttacttttgcctttttgctgcacattttctatgttgtgtgggttttttttacattgactatttttagagcagtttttacaatttttacagaaaaattgagcaaagtatagacacacacatttttacatgcaaatttgtatgtaaaaagtcattaacaaacccaaggtcactttaattttctttgtttccarctttccagttttgtgtattttacaaagatgtctgtgattatattatgaagttaattttggtgaaaggtataagtctagatttatttgcatgtggatatccagttggtcaagcatcattttttaaatgactatattttctcccttgaattgccgtttttttcctttgtgaatgatcagttgaatatattaacatgggtatatttctgggatttctgttcacttacattggtctctttgtctgttctttca

SEQ ID NO: 646182 - DNA, 584 bp, Homo sapiens
catgtggtttgcctgatatggtggggatggatataatgtctgttgcctgttgacaccattaatactggacttgggctgaaacagtctcctagatatttgttactttagcaatcttttgtgtatactgattctgaaaagatagataagaaaagaccttatatttcttttgattctattttgtggtttctgacagttttgcattagtttcatgaatagtagatcttaatgaatgttaaaaattgccttaaacttgtataaagattcaaaagtaagaaaattttacatyatcgtgatgattcaatctcataatcattttatgatgcattggtagactcaggtctgccaccttctgaattactttgtggacagtccattcaaaagctgtaccttaggttattaatacttaaaagacctggctacagtttgctagtgcttttcataactctacgtatatttcttttctttcttttttttttttttgagacagagtctcactctgttgccgaggctggagtgcagtggcgtgatctcagcttactgcaacctccaccttccaggttcaagcgataaaatttagagattta

SEQ ID NO: 646183 - DNA, 391 bp, Homo sapiens
cacataacgtaatattcaaaatgtcaaggatataatcccaaattatttgataaacaaagaaccaggaaaatctgatcaattatcaatagaaaagacaatcaacagatgccaaccctgtaattacacaactgttgaagttattagaaaatgattttaaaccaaccattataaccaggctccatgatgtaaaagtaaaccatgttgaaataaatataaagataaacattatcagcagagaaatacaaactacaaaaattaatcaaataaaaatattaacaacagaaaaaatacaacactgtatctgaaattaaacattcacytaatggtctcaagagcagagtggtaatgacaaaaaatgagttagtaatgatgaagaaattaatagaaatta

SEQ ID NO: 646184 - DNA, 516 bp, Homo sapiens
cagagaacagaccaatagaaacatccaatggggatgtaaagaattttctttagtagaatcagttgattaaccagtsccactcaaacagaggaagtgaggcaagaggcgctcctgctaccagaggcttcctccttgaatgaccaacatccgttgcatgaggtcaaggacagccttaagcacaaggagattctaacctgggagatgtccagtgacatgtctttgccgtgccctcccaggtcttcctccagcaggcaggatggcacttggagtctgggtgatgcagtgaggttccaggacgtgtgtggtattaactgtagcactaagataagtttccatgtaaaacagaaacctctggtctaggatgtgttttcttttgttgtttgtttgttttgttttgttttgttttgccaattcacttaacaaaccacagtaaatcctcacttatcatcagtaggctcctggaaactgcggctttaagcaaaacgatgtatagcaaaaacaattaaaccatagtcg

SEQ ID NO: 646185 - DNA, 554 bp, Homo sapiens
agtggtaagcataatttaaaaagaggtttaaaaagaactaatgggccaggcgcggtggctcacccctgtaatcccagcgctttgggaggccaaggcaggaggatcacaaggtcaggagttcaagaccagcttggccaatatggtgaaaccccgtctctactaaaaatacaaaaattagccgggcttggtggcacgcacctgtaatcccagctacttgggaggctgaggcaggagaattgcttgaacccagtaggcggaagttgcagtgagctgagatagcaccaatgaactccagcatgggcgacagaacaagactctgtaaaaaaaaaaatgaactaatggactcagttcttccttcatgcctcatgagtttgcagtgaaatgcacaaggcaggcaggaaaagatgcaatccagagcctgtggggtaaccggctctgccccaggaaagaccccakcacaacctacgaaggggagagggttaagaacagtttctagggctgggtgcagtggttcacacctgtaatcccagcactttgggaacccaaggtgggtg

SEQ ID NO: 646186 - DNA, 552 bp, Homo sapiens
cattcttttaataatgacttttcaagattaaaagagtaaatgtttacacaaaaagaactaatcattaaaataaaatatatttaaaagaaaaggcaagggacaatattttataatattatttaaatactaaatgaaatgcacaattttctagacagaaaatataattcatcaaaattggcctcagtagaaggttagaacaactatcatagaagaaatagggaagtggcaagcctactggttttgagagggaattctgacaaacttttaaagactgtataatcccaatgtggcttaaattatttgaaaacatagtaaaagagaaaacaaaattaaattccgttttaaaatttgcttcaaaataatgcagggggagcacgtgtaggaagtacaaatcagacaaaattggtcttgagttaagtaagaaatattaaagctacctggctaagtgtggtggctcgygcctttaatcccagtactttgggaggctgaagcaggcaaatcacctgaggtcaggagttccagaccagcctggccaacagggtgaaaccccat

SEQ ID NO: 646187 - DNA, 529 bp, Homo sapiens
aagggcatctaaatcacactaaagaaaaagtcaaactgtccctgtttgctgatgatatgatcayatatctagataccctaaagactcatccaaaagtctcctaaaactggtaaatgaattcagcaaagtttcaagatgcaaaatttaggtacacaaatcagtagctctgctatacaccagcagcaaccaagctgagaatcaaatcaagaactcaacccctttcactatagctgcaaaaaataaaataaaataaaatacttaggaatatacctaatgaaggatgtcaaagacctctacaaggaaaactacaaaacagtcctgaaagaaatcacagatgacacaaacaaatggaaacacatcccatgctcatgaatggtcagaatcaatatcatgtatatgaccatgctgccaaaaacaatctacaaattcaatacagttcccatcgaaataccatcatcattcttcacactagaaaaacaatcctctacttcatatggaaccataaaagagcttgcatagccaaagcaag

SEQ ID NO: 646188 - DNA, 311 bp, Homo sapiens
tacctgatgcatatactttctgctccccggctccttcagctgtactcactctttgttaagtcccacaattaccattgttcctggcccagacttcaatcyggcctcccacattattcctgataccacacctgacccccatgactgtatctctctgatccacctgacattcaccccatttccccatatttccttctttcctgttcctcccccgatcacgcttgatttattgatggcagttccaccaggcctaatcgccacacaccagcaaaggcaggctatgctatagtacaagccactagcctgcctcttag

SEQ ID NO: 646189 - DNA, 621 bp, Homo sapiens
aaagcacagagttagtatttctcacacttgaaaaatgagaacagtaaatcagtgactgccttaaacatccaaatccaattatgacctttgctgagacaaagatgctggcatcagagtctggagtctggggctctgtgaacccacacaccatgcctgtccctcttcagtctggagccagaatcctccctttcccacaaaagacaaaagatgctaacagatgcacgctggtttccggaggaaaaggccacttctgtgagccagtgggaagacgggaagtctttcctgcaggaagggggtaggtagctcaggatactagcaggagatgcttttaattgttctgcaacagtgacagctcagcatcgtgattcctggtggtgctggggtgcagtactattgttaatgtcagctcccattcattcattcmtctattttcacactcacacattctgaatgcagttattatgctgtggtcttggggaaggagctgtgctagtggaaagtgatgcaaagtgaaaagaatattcttgccacttggggattagggagaaaaccagcaagtatgcaaagattcacaaccatctggtgagtgcctaaagccagatattatcagaactcgggtaa

SEQ ID NO: 646190 - DNA, 406 bp, Homo sapiens
cccagagcccattggtaaacctaagattgtaaaaatgtaaaacttttctctcctcaacgtcatctgtaataatgaaaccccmaaaatatttactctatgtatcctgtagttttgcacaactttgtggttacctttggccaagttacagattcttgatcagttcgatcatggttacttaccagggtcacatgacagaaagtcaacaacttatggaaaaagaacagtctttgctgctttgctcagaaggtaatatgtacaaacttgcattattgcatatatcacaatacagcttgtttctgcatagcccagtcccctacaagactagaaccgtgaggccagtggtatttcctatatttgcatgttcagcatgtaacatactgcctggtacatggtagattctcaataa

SEQ ID NO: 646191 - DNA, 574 bp, Homo sapiens
aattgatctagcaattcagtacaatttcaatgaaaatcacaaagtgaagtgtgtatgtataattttacaaattgattctaagacacctatgcgagagcatatggttaagaataaccatgaaaaatttgaagaagaacagactcattatacatatatagtaattaagacagggtggtattggcacagggatagacacatttagatgaatgaaacaaagcagagggcccacaaacagttccaygcacatatggaaacttgatatactaccaagatggcactgaaattcagtaggggcaaggatgaactacttagcaaatggtgttcgcaaaaaaacgatataaaatttcatccctagattacaaatttcatggaaaaaaaatacaggtgtactaaatgtgaaaaggccaaaactttaaaattaaaaaaaaaaaattgaaagataccatgaacagagtgaaaagctaagccttaagctagtataaggtatttgtaacataaaaccaacaaaggattacataagtaaacaaagaaatcaataagaaaatcaattggaaaaatacaaacaaccaagtag

SEQ ID NO: 646192 - DNA, 629 bp, Homo sapiens
tgtacaccttgcaaagaacaaaaaccttaataacatggaagagaggtagagttctcctgacaggatattcagtgagaattgcattgagggtaagagcgcttagagtcttatggttagtaygttgctaagatgctctgagtggagggaaaaacttaagttttggacttttctgtggtatctgcggtattttggacaattttttaaaatgcaggtgttgagaggttacatgtcatgaaattctcactttggaggactctcaaaagccaggtaccaaaaaattcaggaagtgactggaaggagttacgtcccctaaggctagccctggcttcagaattcttcctcccttgatcttcaaacacaagctccttctaattagcatgtttacaagacataaggaagaacagaactggttatcaagaattcaccttgatgtaggattatctaacccacaagggtggctggtgtttttttgttgttttgttttttgttttctatcttaaaaggcattggaagtaggaggtaagatgggggtggctaggacattttcaagtcctgaaagaagctgtgtggcaagtcaactggggcaatgcgagctattctggaatcaccaatcttcaactggacatcag

SEQ ID NO: 646193 - DNA, 629 bp, Homo sapiens
tgtacaccttgcaaagaacaaaaaccttaataacatggaagagaggtagagttctcctgacaggatattcagtgagaattgcattgagggtaagagcgcttagagtcttatggttagtacgttgctaagatgctctgagtggagggaaaaacttaagttttggacttttctgtggtatctgcggtattttggacaattttttaaaatgcaggtgttgagaggttacatgtcatgaaattctcactttggaggactctcaaaagccaggtaccaaaaaattcaggaagtgactggaaggagttaygtcccctaaggctagccctggcttcagaattcttcctcccttgatcttcaaacacaagctccttctaattagcatgtttacaagacataaggaagaacagaactggttatcaagaattcaccttgatgtaggattatctaacccacaagggtggctggtgtttttttgttgttttgttttttgttttctatcttaaaaggcattggaagtaggaggtaagatgggggtggctaggacattttcaagtcctgaaagaagctgtgtggcaagtcaactggggcaatgcgagctattctggaatcaccaatcttcaactggacatcag

SEQ ID NO: 646194 - DNA, 629 bp, Homo sapiens
tgtacaccttgcaaagaacaaaaaccttaataacatggaagagaggtagagttctcctgacaggatattcagtgagaattgcattgagggtaagagcgcttagagtcttatggttagtacgttgctaagatgctctgagtggagggaaaaacttaagttttggacttttctgtggtatctgcggtattttggacaattttttaaaatgcaggtgttgagaggttacatgtcatgaaattctcactttggaggactctcaaaagccaggtaccaaaaaattcaggaagtgactggaaggagttacgtcccctaaggctagccctggcttcagaattcttcctcccttgatcttcaaacacaagctccttctaattagcatgtttacaagacataaggaagaacagaactggttatcaagaattcaccttgatgtaggattatctaacccacaagggtggctggtgtttttttgttgttttgttttttgttttctatcttaaaaggcattggaagtaggaggtaagatgggggtggctaggacattttcaagtcctgaaagaagctgtgtggcaagtcaactgggrcaatgcgagctattctggaatcaccaatcttcaactggacatcag

SEQ ID NO: 646195 - DNA, 600 bp, Homo sapiens
tcttgaatttaaagtctttgaaatgtacatcctgagctggggctcctggctcaggtcatggtcctttctgatgacccgccatttggcttctcacttgggacctttctgcagcaaagccctggctccatcctctgtccctaccccatcctattccccgtccctctctctcctggcctctgagattcggtgagggattgtttaggtacaaagtccattggaagccacattaagtgacttaattatcagaagaggagcgatgtggaatgagggacaaggtgacagctactgtgtgcacaaagactcagtcctttttcrtttgtcttttttgcttttttcttctgtgccatgacaaaaagcttactcttgttaagttgctttatttgaatatgagcctaaaataatatcactaaaaaaaaatatcactttggaaatagattccgaagaaaggttcaaactcataaatggtcatagaattgttctaatgttttatatcggaactccacattttggcatttgtctctgaaggaggcaattgttttacattcagccaggctgaaaatgtctgcaagctgatggaatccttctggaacatcaaaggat

SEQ ID NO: 646196 - DNA, 600 bp, Homo sapiens
tcttgaatttaaagtctttgaaatgtacatcctgagctggggctcctggctcaggtcatggtcctttctgatgacccgccatttggcttctcacttgggacctttctgcagcaaagccctggctccatcctctgtccctaccccatcctattccccgtccctctctctcctggcctctgagattcggtgagggattgtttaggtacaaagtccattggaagccacattaagtgacttaattatcagaagaggagcgatgtggaatgagggacaaggtgacagctactgtgtgcacaaagactcagtcctttttcgtttgtcttttttgcttttttcttctgtgccatgacaaaaagcttactcttgttaagttgctttatttgaatatgagcctaaaataatatcactaaaaaaaaatatcactktggaaatagattccgaagaaaggttcaaactcataaatggtcatagaattgttctaatgttttatatcggaactccacattttggcatttgtctctgaaggaggcaattgttttacattcagccaggctgaaaatgtctgcaagctgatggaatccttctggaacatcaaaggat

SEQ ID NO: 646197 - DNA, 633 bp, Homo sapiens
cctcccttcttctcccctttattcttctccttccttcccattccacttctctccttgcaggagctgcaggatttggtttccagtctgagatgaattggaaggtggggaggagccctgtccttagataaggagggcctcgagggcatgctagggagtgctgggggaagtttccatcagtaggaaaagcctrggagccaggctagagatagccactcagaagaggtagggaagaaagagacaacattggttctgggcagtaaagtaacacgataaatgcagacttaagaaaaatgagtctattggaggccgggcgcagtggctcaagcctgtaatcccagaactttggaaggccaaggcgggcggatcacaaggtcaagagatcgagaccatcccggctaacatggtgaaaccccgtctctactaaaaatacaaaaaattagccaggcatggtgacgggcacctgttgtcccagctactcgggaggctgaggcaggagaattccttgaattcgggaggcggaggttgcagtgagcggagatcgcgccactgcactccagcctggtgacagagtgagactctttctcaaaaaaaaaaaaaaaaaacaatgagactattgggaatgatgccttctct

SEQ ID NO: 646198 - DNA, 633 bp, Homo sapiens
cctcccttcttctcccctttattcttctccttccttcccattccacttctctccttgcaggagctgcaggatttggtttccagtctgagatgaattggaaggtggggaggagccctgtccttagataaggagggcctcgagggcatgctagggagtgctgggggaagtttccatcagtaggaaaagcctgggagccaggctagagatagccactcagaagaggtagggaagaaagagacawcattggttctgggcagtaaagtaacacgataaatgcagacttaagaaaaatgagtctattggaggccgggcgcagtggctcaagcctgtaatcccagaactttggaaggccaaggcgggcggatcacaaggtcaagagatcgagaccatcccggctaacatggtgaaaccccgtctctactaaaaatacaaaaaattagccaggcatggtgacgggcacctgttgtcccagctactcgggaggctgaggcaggagaattccttgaattcgggaggcggaggttgcagtgagcggagatcgcgccactgcactccagcctggtgacagagtgagactctttctcaaaaaaaaaaaaaaaaaacaatgagactattgggaatgatgccttctct

SEQ ID NO: 646199 - DNA, 633 bp, Homo sapiens
cctcccttcttctcccctttattcttctccttccttcccattccacttctctccttgcaggagctgcaggatttggtttccagtctgagatgaattggaaggtggggaggagccctgtccttagataaggagggcctcgagggcatgctagggagtgctgggggaagtttccatcagtaggaaaagcctgggagccaggctagagatagccactcagaagaggtagggaagaaagagacaacattggttctgggcagtaaagtaacacgataaatgcagacttaagaaaaatgagtctattggaggccgggcgcagtggctcaagcctgtaatcccagaactttggaaggccaaggcgggcggatcacaaggtcaagagatcgagaccatcccggctaacatggtgaaaccccgtctctactaaaaatacaaaaaattagccaggcatggtgacgggcacctgttgtcccagctactcgggaggctgaggcaggagaattccttgaattcgggaggcggaggttgcagtgagcggagatcgcgccactgcactccagcctggtkacagagtgagactctttctcaaaaaaaaaaaaaaaaaacaatgagactattgggaatgatgccttctct

SEQ ID NO: 646200 - DNA, 599 bp, Homo sapiens
ccctagccccttgtcctctcccacctcctggatccataaaatggcaaactcattttgtttagagctatgtcatcaaaaagatgaccctcaagtctgttttgatccacctgaacctcaaccatcacaccaatccatggggaaaatggattggaagggggtggcattgttttcctctgttttgtttctagctcacactatcacagtaagtgattaaagggttgactgttatcttcatttcggcttgttgttttacttggctactttctccagcttagctgagctcctgacaaaaatatgccatgaaccctcaaagatgagtaagcacatggagagaaattattacccgctgcaaggtctacatagcatrgctgtatctgtgtgggagaaagaggaataaaaataactgggcctctctgagaacaggacagttcaaacagctactccctttggatgtagtagatccatatggaaacagcatccaaaacttgcagagggctctcatgatccaatttgcgagtacataaaaagggtctgtattttgaggaaagttcttcattctagagaggttttgactttttaaactctcaattaacaaccag

SEQ ID NO: 646201 - DNA, 579 bp, Homo sapiens
cctatagtaccccttccaaatagtgacagccaaaaattgtctccatgttaccaaatgtctcctgggaggcaaaatcactccagttaagaattactgttgtagggtaatcataccaaaataaactccattaattttcagaattgttctaatggtcttaggataaactatattaaaacaatgctttgarttattttgacagtaactcataatttataataagaatgtatcttttccaattgttcaggaaataaaactcagtaagtgcgtttcagggcaattttaatgtattcatgaccatagcttacccacttatatcaccagtttgttacaaagccttctgtctcttcacatctttaatacactgacttttagaggtgtgatttttctccgttagatccctccattcaaacatgtctaatcgccactagaaatgatgaagaaaaagaaagtatcatggaagagttaagtgaaaaatacggagtaccaagattactcagaggctcaggacgatcttcaaatatatattattcaacaacaacactaaaaacttgttaagacaaatacagaattgtagtatcc

SEQ ID NO: 646202 - DNA, 574 bp, Homo sapiens
ataccagggttctcagagaaacagaaccactggaaaatgtatatgtatgaaattggcttactggctcacatgatgatggaaattgagaatacccaaaatctcttgactgcaagatgaagataattctggagagccgagagtagttggtgtagtttcattccaagtctgaaggcctgagatctaacagagctatttgtatatgttccagtattattgtgcgagaagactgatgtccaggtttgaaaacaggcaggcagagtgagcaaattctcactccaaccttcattctttgtactatttcagcytgcaatggactgggtaaggaccatccagactggggagggccatagctttacccaatccattgattcctatgttaatctcatatgaatcaccctcattctcatatgaatctcatatgaaacacccttacaaacatacttagaataatgtttaatcaaatatctgggcaccccgtggcctagtcaaactgacacataaaatcaaccatctcatctggttaggtccatgtcttgctattattatttgctgttgttgtttttttgttgcttgt

SEQ ID NO: 646203 - DNA, 585 bp, Homo sapiens
tttctgttattctaaatattaaataagataaggcatgtatatttatttttcaatacagagaaaacattcataaataacagctatagggacaggcctattctttttgggtttgattttgtaagagtggaaaatacagagtaagattggcacaaaattatcataagaacagattggatgtctaagaagatcagggaaattaagaagagggaagcagtgaggtgaccaagagcatgtaraatgactttcacttattttaaggaatttgcagggtggaaataaagactggatgtcttattagtcttttcagaagggatataaaaaggttagacataggataattttaagttccttgtagaaatgtaaatatgcataaatacaatgataaatgctgacagtatatttgaacaggacaatttttgtgtataacagaagtcattccaagagtactttccctttttactaccatcatatcaatctaattttataatctcatctcttgaatctgacccgttctcttcattctttccccaatatcatattccggttctcatcagttcttgtctgaactgcataattattctcttt

SEQ ID NO: 646204 - DNA, 534 bp, Homo sapiens
aaaataaagtccttttgcaggtcttaatttgtttcttttcaatcttctaagtttgctgaatagtttttgttttattaccttttacagagtcaatcagagtggctgagaattttgcttgctatgtaccttgattctacttttcaaagtctagtcatgctcattacaatgacctaacctatgttagaggcatccacatatggtgaaacttctccagagcatctgatattgacacatgtttagtatagatgaaaaagactttaacaaaaagcagacactgttatagtacataatagatgggttgatgaaaatcagtttctgtgtcctaactctgaaatcaaaaaatcccaggggaaactatgtgcatcaccatcccccaagagaacaaggatgaaatctgaccctgctggaaggacttccctctgtctgccagttcttccgcacatatccttgagcctgaagaagagcttccattaaatgtgaactcttcctttgarctataagactataaatcacagtcgtaggtaaatacccacc

SEQ ID NO: 646205 - DNA, 572 bp, Homo sapiens
ctagagttttctctccataggactcagacatgagtctatatggattgggcaaagaggggccatttatgcctgagaccatcatcctcaacttgccctcaaacttctttgccccttctagacccatgtaaaccattttgacatttctctgtcaagtcacagaacttgacatgaagcagatattgttatttgacaaaagtatctccttctgatcatttacagattccttaacatttcataattagcctattttacaagtctcaatttacattctggagcttcctttccataacttatttcctatcacccaattatgaagttaaataatcaggaaacccttcattgcatctttttgtggccactgctaaaccaaatgaarcaggcagtcagcccttcatggcttttatgatgagtcctcagatacccctggagtaggtaaggatgtatcaggaggctctctgctggaaataacacaacacacctgaaactgacttaaaaatagggctttcttggctcacacaactggaatgtccaaagagtagcagacttcatgcatgatgatcagaaccccgcct

SEQ ID NO: 646206 - DNA, 584 bp, Homo sapiens
ttagcatttccaacttttgtgcttttgtgatgtcgcctatttcccgacttgataagattaagtaatagtttatgtttgtgtatatttttatttaaaaaatttttttaaaatttttttgagacaaagtctcactctgtcaccaggctggagtacagtgacgtgatctcractcactgcaacctgcgcctcccgggttcaagcgattctcctgcctcagcctcccgaatagctggaattacaggcacgtaccaccacacccagctaagttttgtatttttagtagggacagggtttcaccacgttggccaggttggtcttgatctcttgacctcatgatccgcccacttcagtctcccaaagtgctgggattacaggcatgtgcccggccatgtttgtatatttttaagattttcagtagaaacagtttttgaatttacatatttgttctataagcttctcttattaaatttaatactgatttttaaaaaaatgtatgtttcttctcttcacctttccttgggattctttttttctaacctgagtcctatttgtaaatataaatcttccagcggtgaatgttcctt

SEQ ID NO: 646207 - DNA, 441 bp, Homo sapiens
gactaaaaaactattagaatgaagaaatgcattcaacaaagttgtgaaaacacaaaatcaatactcaaatattgtatttctatacactgtccataaatagtataaaataaaaattttaaaaaattttatttacaatagcatcaaaaagaatgaagtatttacgaataaacacaacaaagtagaaaacttacactcttaaacctaaaatacgttacttaaagaaattaaagaacatacaagtaaattgaagaatactcatgttttgcatcggtagacttaatattgttaagatacctgtaatctcctaatcgctctacagattsaatgcaatccttgtcagaatagcagctggcttctttgtagaaattaaaagtctgatcctaaaatctgtattgaattttgaaacaccaatataaaacaatctttaaaaaggagaacaaa

SEQ ID NO: 646208 - DNA, 521 bp, Homo sapiens
attagtaggaggtgtgatcaggacttagagagttttgaaagtttccaggtgattctaatatgcaacaagtcagaaaaccactattatagacacaaggggaaaaagtgatgaagccagattcacttttygaagggaattgtgctgtggggaaatctggattcgaacctggtttgaacaagcattaacatcacacatgtattacattttaaactatctatgcagaggtaactgcaaagaatagcctttaccatcacatccagtcctgattcaatgcatacaagccaaggtttcatttgttggttttgcaagcaatgaaaattattacgacttattcaaaatgtgtgtttatgtatgtgctaaacagtggtatgaatacgtgtgtgtgtgtgcatgtgtgtgtgtgaaggacacaaagctcaaaaaataaagatgaataggaacaaccaaccaatgctaagatgaatgataagtaaggtaacacccagggcatctctgagaacatcagcacagaaatgtatgga

SEQ ID NO: 646209 - DNA, 521 bp, Homo sapiens
attagtaggaggtgtgatcaggacttagagagttttgaaagtttccaggtgattctaatatgcaacaagtcagaaaaccactattatagacacaaggggaaaaagtgatgaagccagattcactttttgaagggaattgtgctgtggggaaatctggattcgaacctggtttgaacaagcattaacatcacacatgtattacattttaaactatctatgcagaggtaactgcaaagaatagcctttaccatcacatccagtcctgattcaatgcatacaagccaaggtttcatttgttggttttgcaagcaatgaaaattattacgacttattmaaaatgtgtgtttatgtatgtgctaaacagtggtatgaatacgtgtgtgtgtgtgcatgtgtgtgtgtgaaggacacaaagctcaaaaaataaagatgaataggaacaaccaaccaatgctaagatgaatgataagtaaggtaacacccagggcatctctgagaacatcagcacagaaatgtatgga

SEQ ID NO: 646210 - DNA, 623 bp, Homo sapiens
tagcattttctggaaacagagtagttattacaggtcagtggctgagagcaaggatttttgagccagaaaaatctggtttaaattctggttttgttacacacagcctccctctgtgacttgagaagataacttgttcacactcaattttcttatctgtaaaagtagggccaacacctgtcttataagattactatgaagattaagtgaggcaaaatgagacaatgtacatacagcacttaacacagtgcctggkagattgcaaccaaagaatacatccaacaaagcaagttcattgcagcttttctttgtgtatttcaattttaatggctatacaatactgatattgtatttaaacctttttttaaatgtaattattattttcacataaaaaaattcaaatgtataacaggttattcagggaaaagtaaagatctttctcaaacctttgtgtctgttctactatttgttcttcctagaggcaaccaggatataccattttttaacatgccctctagagatattctgaagtacatttgacatagcaataaattagaaacaataaaaatgttcattactttgggaaatgtctgtggaatagccaccctttggatattatgtggcaa

SEQ ID NO: 646211 - DNA, 578 bp, Homo sapiens
aggataggtaccacacacttgaaacaattagattttgtgagaactcagtacagtgaggacaccaccaagcctggaggaatccacccccgtgacccaaatacctcccaccatgtctcacctccaacattgggaattacaatatgagatgtggaggggacatccaaactatatcaggagaaaatgaggagtgattgctaataggtataggctttctcttttgggtgatgaaaatattctaaaattagatggcaatggttgcacaactccytaaatatactagaaatcactgaattgtacacttgaaaaatatgaatgctgtggtatgagaaatatgtctaataaagctgttgagaaagagagaggaggaaaaaaaagaaatcaggttatgtgagtcttctaagtattttttttcccctcgaaattgtcttgctattctagagtctttgcaagtctgtttagatttatttgtgattgcattgaatctataaagcaatttgggcagtattgcatctttcagattaatgaagatgatgtatctctttgtttatacaggtgttcaatttatctaagtaatgttt

SEQ ID NO: 646212 - DNA, 578 bp, Homo sapiens
aggataggtaccacacacttgaaacaattagattttgtgagaactcagtacagtgaggacaccaccaagcctggaggaatccacccccgtgacccaaatacctcccaccatgtctcacctccaacattgggaattacaatatgagatgtggaggggacatccaaactatatcaggagaaaatgaggagtgattgctaataggtataggctttctcttttgggtgatgaaaatattctaaaattagatggcaatggttgcacaactccttaaatatactagaaatcactgaattgtacacttgaaaaatatgaatgctgtggtatgagaaatatgtctaataaagctgttgagaaagagagaggaggaaaaaaaagaaatcaggttatgtgagtcttctaagtattttttttcccctcgaaattgtcttgctattctagagtctttgcaagtctgtttagatttatttgtgattgcattgaatctataaagcaatttgggcagtattgcatctttcagattaatgaagatgatgtatctctttgtttatacaggtgytcaatttatctaagtaatgttt

SEQ ID NO: 646213 - DNA, 397 bp, Homo sapiens
ccgtggatggtcagggccagagaaagagcaatttcagtcactctgaagcctgaagagttggtttycagggcttcttgatgaatttatttcccaatttctatcccatctcctagaactgaagctggcgctgagtagatactccacaaatctttgttgaatggtttattagactgttcttgcactactataaagaaatacctgagactgggaaatttataaagaaaagaggtttaattggcttatgtttctgcaggctgtacaggaagcatagtggcatctgcttctggggaggcctcaggaagcttccaatcatggcggaaggcgaaggccaagcaggcacatcacatggtgagaatgggagcaaggtcggggagaaggcgccacacacttttaaatg

SEQ ID NO: 646214 - DNA, 578 bp, Homo sapiens
tctttttcaaaatggagtcttttatgtctttcctttctacatagacacagtaacagtctgatctctctttcttttccctacaatgatcatgagtcacacatgcacatctgttgttacaacattctatcagatgccagatcaccctccttccatcacgtcacaagctgtaagacccgacttgcgtaagcaatctcctgggctttttgagggttaagtattatgtttattgcagcacctatgcttttctattttttattttattttattttatttttgagtcagagtcttgctctgttgcccaggctggagtgcagtggtgccatctcggctcactgcaagccctgcctcccgggttcacaccattctcctgcctcagtctcccaagtagctgggactacaggtgactgccacaacgcccgaataatttttctttttttcrtattttttagtagagacggagtttcaccatgttagccaggatggtgtcgatctcctgacctcgtgatcctcccgcctcagccttccaaagtgctgggattataggcgtgagccaccacgcccggctgcagcacctacgc

SEQ ID NO: 646215 - DNA, 538 bp, Homo sapiens
aagccaaagtaatttcctggaatagatatgtgggaggttgggtcaaatttaaaggttcagaagtagacttcgagataagcatttttctggatatttggaattatctcctaaagatattattctttgacataygaccaaaaacatacagccaaagatcaatttggtttcggcaaatccagtccaagaaaataagttatctaaaggctcagaagtgttttgtcctagttctttctcaggcttcttaatcaataatcacaactctgtaccaattattggtaagtaatatatatagattatcagagactgcagtttctgccagtgtgtctgaattaaccctttcagtattttgtgaacttcagttgtaaaatattagcagaatataaaataattttaaatttttaaaattttaaagtagggaaacatttgagcaaatacttcaccaaagaagatatgcaaatggtcagtaagcatatgaaatgatcaacattattattcactagaaaaatgtaaattaaatccacaatgagatgcccctata

SEQ ID NO: 646216 - DNA, 573 bp, Homo sapiens
gactaacaaacttcctttaattccagaaatgtaaggatgttttaacattaaaawatcaatgcgtaaacttttttgattttgataattatactttggttatagggagatgtcctttttttagaaggtcaaattgattcatttgggggtatgtattagtccgttttcatgctgctgatagcgataaacccaagactgggcaatttacaaaataaaagaggtttaatagactcacagttccatgtggctggggaagcctcacaatcatggcagaaggtgaaagccatgtcttgcatggtggcagacaagagaagagaacttttgcagggaaattcctctgtataaaatcatcagatcttttgagacttctttgctgtcatgagaacagcataggaaagatgtgcccacatgattcaattacctcctactgggtccctcccacacacgtgggaattcacgatgagatttgggtggggacacagccaaaccctaacagggtagaagggcaaatttgacatattagtcttaaataattaaaaagagagaagaatgagagaggaggaaaaatcataaata

SEQ ID NO: 646217 - DNA, 572 bp, Homo sapiens
tttagttttttgagaaactgtcatgctgtttttcatagtggctatactaacttacatttcaaccaacagtgtataagaattccttctttaatacatgtttaccagtatgtgttgttttagtttctttgataagaggcattctaactggggtgggatgatatctcattgtggttttgatttgcatttccctgactttgatgcatttttttcatatacttattggacacctgtatatcttcttttgagaaatgtctattcagatcttcatatttttgcccacgttttaaagagatttwttttccattgagatgtttgattgacttacttgtatattctggatattagcaccttgttaaatgaatagtttgcaaatattttctttcattctacaggttatttcatctctctattgatggtttcctttgctatggagaaacctttttatttaacttaaccccatttgtctatttttgtttttgttgcctatacttctgaggtcttgcacataaagtctttgcctaaaccaaggtcctgaagtattttccttgtgttttctactagtagttttatag

SEQ ID NO: 646218 - DNA, 572 bp, Homo sapiens
tttagttttttgagaaactgtcatgctgtttttcatagtggctatactaacttacatttcaaccaacagtgtataagaattccttctttaatacatgtttaccagtatgtgttgttttagtttctttgataagaggcattctaactggggtgggatgatatctcattgtggttttgatttgcatttccctgactttgatgcatttttttcatatacttattggacacctgtatatcttcttttgagaaatgtctattcagatcttcatatttttgcccacgttttaaagagatttattttccattgagatgtttgattgacttacttgtatattctggatattagcaccttgttaaatgaatagtttgcaaatattttctttcattctacaggttatttcatctctctattgatggtttcctttgctatggagaaacctttttatttaacttaaccccatttgtctatttttgtttttgttgcctrtacttctgaggtcttgcacataaagtctttgcctaaaccaaggtcctgaagtattttccttgtgttttctactagtagttttatag

SEQ ID NO: 646219 - DNA, 537 bp, Homo sapiens
tggctcactgcaactttaaactcttgggttcaagtgatccttctgcttcagcctccccagtggctgggactataggtttgcaccaccagactccactatttttttttaattttgtagaaatgaggtctggctatgtttggccaggcaggtsttgaactcctggcctcaagtgatcctactgctcagcctccaaaagtgctaggattacaggcatgagctactgtacccactctaaattatatttaagcaaacacacgtggctactatatgagataacaaatgtctagccagaaactttgttttaatgagaattgtaaaggttctttcaactcttatttttctccccagtctggcatcactgtttctccccaactcttgtttatctctcaaaatgcaatccttagatatcagcaataaagacatctgcaaagtatatcttccatgaaagcaataagaatagctcaacaaattgcatgtaggatcactcaaagagatctatttctagatattacaattaaattgttgaaagccaaagac

SEQ ID NO: 646220 - DNA, 483 bp, Homo sapiens
atttcagcaaatttaaaaggcttcaaattacagaaagtatattctctgaacrtacggaataaaactaaaagtaaataacagaagcaaattttggaaattcatcaacatggcaatttcaccacacattccctaataactaatgcacaaagaagaaatcacaaggacatttagaaaaatgctttgacagaaagaaaaaggaaagcacaatacataaaaatttttgagatgcaatttaaggaatacataaagaaaaatatatgactataaacacctatattaaaatgagaataatatcagtaatctaaccttctaccttaagaaactagaaaaagaaatgcaaattaagtacaaatcaggcaaaataaagtaaataataaggattaaggcagaaaaaaattagatgatataattgccacaaagaaaatctacaaaaccaaaaggcagatctttaaaaatgtcaataaaattgacaaaactctagct

SEQ ID NO: 646221 - DNA, 549 bp, Homo sapiens
acatcattgcactccaacataggtgacaagagcgagactttgtctcaaaaaaaaaaaatcaataaataacagatgctggcaaggctgcggagaaaatgcaacattttacactgttagtgggaataaaaattattgcagcaactgcagaaagcagtgtagacatttctcaaagaacttagaactacctttccacccagcaatcccattattgggtacatacctgaaagaaaataagtctttctaccaaaaagacacatgcacttgtatgttcattgcagcactattcacagtagcaaaggcataaaatcaacataggatacccatcaacagtggattggataaagaaaatgtaatacatatacaccgtggaataccatacarccataaaaaagaatgaaagtatgtcttttgcacaacaaggatgcaactacaggtcattgtcctaagcaaattaaacccaggaacagaaaaccaaatactgcatgttctcacttacaagtgggagctataaattgggtacacatggacataaagatgggaacaatagac

SEQ ID NO: 646222 - DNA, 592 bp, Homo sapiens
aactctttcaatctctgcccattacccagttccaaagtcgattccacattttcaaattatctttatagcagtaccctactctgccagtaccaattttctgtattagtcttttctcacactgctataaagaactgactgagactaggtgattaataaagaaaagaggtttaactgactcacagttctgcatggttgggtgacctcaggaaactcactatcatggcagaaggtgaaagggaagcaggcacatcttacatggtggcaagagagagaaagggaaagtgccagacacttaccaaactaccagatctcacgagaaattactcayggtcatgagaacagcaaggggaaaatccatccacatgatccaatcatttcccatcaggtccctctcttaacatatgaggattagattttgagatgagatttgggtgggggcacagagccaagccatataaatatcttcacaatatcttcagaaatttaaatccaaaacataataactctccattctaaaaaagagggagagagagagaaagaaaaaagacccaacagcaaaaagcaaaactttgtggattgggctcaatagtac

SEQ ID NO: 646223 - DNA, 592 bp, Homo sapiens
aactctttcaatctctgcccattacccagttccaaagtcgattccacattttcaaattatctttatagcagtaccctactctgccagtaccaattttctgtattagtcttttctcacactgctataaagaactgactgagactaggtgattaataaagaaaagaggtttaactgactcacagttctgcatggttgggtgacctcaggaaactcactatcatggcagaaggtgaaagggaagcaggcacatcttacatggtggcaagagagagaaagggaaagtgccagacacttaccaaactaccagatctcacgagaaattactcacggtcatgagaacagcaaggggaaaatccatccacatgatccaatcatttcccatcaggtccctctcttaacatatgaggattagawtttgagatgagatttgggtgggggcacagagccaagccatataaatatcttcacaatatcttcagaaatttaaatccaaaacataataactctccattctaaaaaagagggagagagagagaaagaaaaaagacccaacagcaaaaagcaaaactttgtggattgggctcaatagtac

SEQ ID NO: 646224 - DNA, 618 bp, Homo sapiens
tgtgatgtcccacacaaataaggggatttgtaatatcaaatcttattttaaatactgaaactgaaaatatttcatcttcaattacaagcagaaagatggtaagttatgtgtatatgaatgtgtgggctgtgtagagtgagggtgtgttgtattaaaaktgttaggattacattttaataatatgaactgtcatttttaacaatcatgccttattaatctgagcataaacctacctcctgaattacatgaaagatgagttgtggtgaatttcctctcgctgatctctttctcaggattaacacatatccttgcatgatgagtttattctaacttcaaggaaacatttaaaaaattcttttaaaacttattttaatctacaattcccatattagagtcttctgattggccaatggttcacattttttcatcacaagcattggctttttctccttagggagtaaagaaaagcgagtttctaagaatcaacaaaaagtccttaaaaatgtgtttttgggtgaaaataattatactcacttaggaaacgtaattgctaatttactttaagctgcagttatatctactaataaaacaactgtctccaaaaatgtcattctatta

SEQ ID NO: 646225 - DNA, 439 bp, Homo sapiens
tcgtcatagaatggaatcgaatggattcattgaatggaatcagatggaatcatcgaatggactggaatggaatcattgaatggactcgaaagggatcatgattgaatggaattgaatggaatcatcgaatggtctcgattggaatcattatcaaatggaatcgaatgtaatcaccgaatagaatcgaatggaacaatcatcgaatggactcaaatggaattatcctcaaatggaatcgaatggaattatcgaatgcaattgaatggaattatcgaatgcaatcgaatagaatcatcgaatggactcraatggaatcatcgaatggaatggaatggaacagtcaatgaactcgaatggaatcatcattgaatggaatcgaatggaatcatcgagtggaatcgaatggaattatgatcaaatggaatcgaatgtaatcctc

SEQ ID NO: 646226 - DNA, 314 bp, Homo sapiens
gaatggaattatcatcgaatggaatcgaatggaatcaacatcaaaccggaaaaaaacggaattatcgaatggaatcgaagagaatcatcgaatggacccgaaaggaatcatctaatggaatggaatggaataatccatggactcgaatgcaatcatcatcgaatggaatcgaatggaatcatcgaatggactcgaatggaataatcattgaacggaatcgaatggaatcatcatcggatggaaatgaatgraatcatcatcgaagggaatcgaatagaattatggaatgaaatccagtgtgatcatcatcgaat

SEQ ID NO: 646227 - DNA, 314 bp, Homo sapiens
gaatggaattatcatcgaatggaatcgaatggaatcaacatcaaaccggaaaaaaacggaattatcgaatggaatcgaagagaatcatcgaatggacccgaaaggaatcatctaatggaatggaatggaataatccatggactcgaatgcaatcatcatcgaatggaatcgaatggaatcatcgaatggactcgaatggaataatcattgaacggaatcgaatggaatcatcatcggatggaaatgaatgaaatcatcatcgaakggaatcgaatagaattatggaatgaaatccagtgtgatcatcatcgaat

SEQ ID NO: 646228 - DNA, 576 bp, Homo sapiens
aaccaagaaataaagagagaagattcaagtaaataaatcaaaacaacaacaaaaatatttaacaactgtgacaaccgaaacataaaggattatttgagactmttatgaataactatatgttaacaaattgatattcttagaggaaataggtaaatacctggacatctataatctacaaatattgaaacaggaagaaatagaaagcctgaatagatcaggaacaagtagtgagattgaatcagtaataaaatgtctaagaaaagcctaggactggatggctttatgagtttggtttgaattctaccaaacttataaagaacatcaattcttctcaaattattcccaaaagcataagaggaaagtattccttctaacccattctctgaggccagtattaccttgattgcaaaaccagacaaagatccaaccaaataaaaactctaaagatcaatatacctagtgaacatagatgcaaaatcctcaacaaagtattagcagactgaattccacaacacattaaaaggatcattcaccatagtcaagtaggatccattccagggacataaagatggttca

SEQ ID NO: 646229 - DNA, 540 bp, Homo sapiens
accatgcacttgcccaaggtaagatgcatgatcagaaaaaaactgagaagaccttaagctttcatcccaggtggattctgaggctcctgggaaatccagttaaggggtgaaggaaggtccaagcacagaacaattctgcagagactacaagaggttctcctatcttctcctccctccttctttgtcttctttctctgtcttcctctctttcccttgatattcaaggaaacctttggaaaaagctaactgaacaatatctaaggaacagacttcagtgacaccaatggcaaggagtacagtctgaaaaatagttaagaaaagtcacaaaacagacaaacaatcacagcccgcaacaacaacaacaacaacaaaaacaggagacctctggaagaarggcagtctgatttccaattttaccacattataataaacaatatatgatttttgcaaaactaaagggaaaatattttaaaacaaaataaagaaaaaatattttaaaacaacatacgaaaacttacagaaaaaactatgctaaaaggg

SEQ ID NO: 646230 - DNA, 540 bp, Homo sapiens
accatgcacttgcccaaggtaagatgcatgatcagaaaaaaactgagaagaccttaagctttcatcccaggtggattctgaggctcctgggaaatccagttaaggggtgaaggaaggtccaagcacagaacaattctgcagagactacaagaggttctcctatcttctcctccctccttctttgtcttctttctctgtcttcctctctttcccttgatattcaaggaaacctttggaaaaagctaactgaacaatatctaaggaacagacttcagtgacaccaatggcaaggagtacagtctgaaaaatagttaagaaaagtcacaaaacagacaaacaatcacagcccgcaacaacaacaacaacaacaaaaacaggagacctctggaagaaaggcagtctgatttccaattttaccacaytataataaacaatatatgatttttgcaaaactaaagggaaaatattttaaaacaaaataaagaaaaaatattttaaaacaacatacgaaaacttacagaaaaaactatgctaaaaggg

SEQ ID NO: 646231 - DNA, 597 bp, Homo sapiens
gtcccacttgataattttataatgcttttaaattaattattaaacaactgtgaactaaattcctctaagagttacagaccctttagagaaaattaaaagaactgaagatcaaattttgggacaatttgtgggaaacctggaagagttttatccaacaggtaaaaaatgtcttaattaaagcatccaattattctctccaaaagacttagtacctactaagtgcaataaaggccctgaatttcgtgaggtctgactagaacactagagtagaggatgaatcaaccaagaatctggccctcatgcagcttatttagaatccttggcacattaatttaaaattgcctttttwtttaattacttcccttcaaattactgagtcgagatgtccatgactgtgattgaattgaaggtaataaagtccctaaggaagctctggaaggcacaatctctctacacggagagaaatcagtgactaacattttaccccgcaccaggaactgcatcacataatctgtcactgtccaaatacaattttctttttttgtaaatgagtcagtctcaaacctctgattgcaccatttcaaatgcaaataattc

SEQ ID NO: 646232 - DNA, 547 bp, Homo sapiens
ctcactttgttatccaggctggagtgcagtggtgcaatcttggctctctacagcctcaatctcacaggctcaagcgatcctcccgcctcaaccccgtaagtagctgggactacaggcatgtgccaccatgcctgactaattgtttttattttcatttttagtagagatgaggtatcactacattgcccaggctggtcttgaattactgggctcaaatgatatgcctcccagagtgctgggattatgggtgtgacccactacacccagcctttgcttagatattggcatgccttgttgcatctttttcttcagttctttttgaatatgttgccataattaagacaatgatgaccctaattaaaataggactctaggtcatgtccattgctgtgtgttccttgcccctgcattttttatttataaccctacctggcatgtatctaytttttactgtatgtctatcataaaaaaagtagtctcttcaatggtagcaacccaatccagttcactgctatgatcccagtaattagaacaatatacaacacat

SEQ ID NO: 646233 - DNA, 574 bp, Homo sapiens
ccaatgatctgactaggagattagaaaatgaagaatcttacaattactggatcttcttctgtctgtgtctgtataatcayacatgtgttatgtgtgtgatggttttataaaaaatagctctaattgattggcctaaagaaaaataagtgcttagatccaatattttttgaaaaaaaaaaaataaaagctgtaatgcctgttagttcaagtgactttaatctttgagaaatagaaatatttttgaagacaaatggtaaaatacaaatgtcttcaaaatgtaaatatgtgatctgaattatgctggtcagatactaggtttgctacatgttcgaaggttacaaactgcttctttggcttttgagaactgtttgacttgcctgctttacaatttgataaggcttgaggacatatggaattaaccacgcccttaactatgttggaaagagtcagactttatctgcacctagcacataattaaaacaacttgccagcctttacactaaaattaaaaattgctaacagttactgttataacatataattgagattattgacaacagattcacccgcaagg

SEQ ID NO: 646234 - DNA, 595 bp, Homo sapiens
aaataaaggtataaattcagcctagatttaggaggaaaaggaataagttataccttccatgaagaggtgtggcaaagaatttataggtacttttaatctaccakagccctctctatgaccaaaaattatttacattctttccacaggcaaaaatacacacaccctgtgtcagttttctagggctgacatatcaaactgcctccaaatgggtgacttaaagcaaatatttactgtctctcagtttcaaaggcagaagtgagaagtcaagacgtccacagggccatgctcccttggaaacctggagaggagcataccttctgtccttttctaaattttgagtttgtccgaaatcctgggtgtttcttggcttgtaggtgtttcattccaatctctgttgctataatcacatggccgtcttctctgtgtgtctccttttttcttaaaagcatatcagtcccactggattaagggttcacccaccctactccttatgaccttatctccttataagctcctattaccttatcttaactaattacatttacaatgaccttatttccaaataaggtcacattttgaggtattagtggccagg

SEQ ID NO: 646235 - DNA, 509 bp, Homo sapiens
ccagctttgctatttttgtatagtcagtttcctctggactcataaagactacaacagataaacttttagtttttacaccgtatttaagtcttactgggaaaagaagtcaaggaagctgttttcagtttgtctcttccatttctcatgagttagcattaatgtccataacatatataaatttttagccaaggtgagttagtagagttcygcctactactttatgttaaaaatcacctctcactgaatgggtatatcaaccctgtcttgaaagaaaatagtgaactccctctttacttctaacaggacaaaatcataatgtcagtttgcaattcagagctggttttgctgttgtctgctgccatatccttgactggcattgatatattagagaaagaagttactgaagccttgtttcaggcacttctgtagccttagaatgtgagctgaatataagaatcaggaaaaacctctccaacaaaaggtaataaaaaatacgatttggtattgtt

SEQ ID NO: 646236 - DNA, 509 bp, Homo sapiens
ccagctttgctatttttgtatagtcagtttcctctggactcataaagactacaacagataaacttttagtttttacaccgtatttaagtcttactgggaaaagaagtcaaggaagctgttttcagtttgtctcttccatttctcatgagttagcattaatgtccataacatatataaatttttagccaaggtgagttagtagagttccgcctactactttatgttaaaaatcacctctcactgaatgggtatatcaaccctgtcttgaaagaaaatagtgaactccctctttacttctaacaggacaaaatcataatgtcagtttgcaattcagagctggttttgctgttgtstgctgccatatccttgactggcattgatatattagagaaagaagttactgaagccttgtttcaggcacttctgtagccttagaatgtgagctgaatataagaatcaggaaaaacctctccaacaaaaggtaataaaaaatacgatttggtattgtt

SEQ ID NO: 646237 - DNA, 579 bp, Homo sapiens
agaagcagttcaagtagacaaccctgattggaacctcaataactcagcagataaatggaaaagaaagcacttttaaatgtgcatattagagggcctacgataaaccagggctaaacctcttaattactctaaactgtccatgatagaccaaaaaccagatgagaaacccacagcctttatggaaaggtggagagaggcactaataagacatgcctctttatcctctgattcagtcaagggacagctcatcctgaaggagaagtttattacacaggmagcttccaacattagaaggaaactgcagaagtaagctataggaccagatagcaccctaaagaacctcctgagaatagccacttcagccttttacaatagggatcaggaggaggcccaagaaaaggagaggaaacacaagagaaggacagagcctctattagcagccttgcaagcttgcaaagtccaggatctccaaggtgcatctaccagctgttattaatgtggaaagtcagggcattttaagaaggaatgcccaggcagaaagaacaagccacctcaaccctgtccagcccatggcagaga

SEQ ID NO: 646238 - DNA, 526 bp, Homo sapiens
gaacagagagaaagagagagagagagagagagagagagaagtagtcaatgattcattttaagtagtaatttcactttgtttttcatctttaggagataatcacccactctgctcctgmaagaaaacaacaacaaaacaacaacactggaaaaccacaaaatataacttgctttgcatagaatttgaatttatttttccattctatattttaaatttattgcaacagcttgtaatgcctaacaaggacatcttttgtaaaatttcaatgagttaggaagtttttctttgttgcttttagtatgcaaattgccaaatttaatgtcagaaaattaaaaacctgcatcaaaaccagaaaataaaaccaactgcaagaagaaagttgaattgataagtaaactttttagaagttaagtgtatggtaaaaacattacattaaaaatgaaacatttgctttaaattacattgtttttgcatgtctatgatgcctctctaaaagactattggtacttatttaaaaatttatttc

SEQ ID NO: 646239 - DNA, 536 bp, Homo sapiens
tttttttcatatacttattggacacctgtatatcttcttttgagaaatgtctattcagatcttcatatttttgcccacgttttaaagagatttwttttccattgagatgtttgattgacttacttgtatattctggatattagcaccttgttaaatgaatagtttgcaaatattttctttcattctacaggttatttcatctctctattgatggtttcctttgctatggagaaacctttttatttaacttaaccccatttgtctatttttgtttttgttgcctatacttctgaggtcttgcacataaagtctttgcctaaaccaaggtcctgaagtattttccttgtgttttctactagtagttttatagctttgggccttaaatttaagtctttaattcattttgatttgatttgtgtacgttgtaattgacatatgtctacttccattttgttaaatatggatatccagttttcccagaatcatttattgaagaggttcttgtattagtctgttttcacactgctattaaaaac

SEQ ID NO: 646240 - DNA, 565 bp, Homo sapiens
gtccctggggtgctgcctgtggagtgcgctggggctaacagtctcatacattagggcttaaatgactgtgcagatggcatcgtggttgaggacacaaaactgagagaatcgagatacattgactctgatcagaaaaaaaggtcacggaatagcaaacataggtttagtccttaaaaggtagcatagataacatgggacttgaacgtggcaatttgaaaaacaasctgtggtctatcagcacgttctcactgcacacgggggataaacaggggtgggggaataagcaatggacattgcatgataggggtgctagggaaatgaggcaggtcaggaagaaggaaggtgatcagagcctcatacggagttaatctagagaagatgaattgttccataagtttcacaaagaaataaagtccaaagatataataagaagtcctgattaaaatccacttcagaatcatatgatcatcaggagagaaattaagtcttaaaagaaaaagaagtttttaaatgtaggtccataaaacaaatggacctacacctttaattagacagcaagcagcac

SEQ ID NO: 646241 - DNA, 508 bp, Homo sapiens
tttgcaaatttccatcatttatagttatatccaaggtggatttgagtgagcaggtacatgaggtatttgcagggcctcatttcactgtgccaaccaggcaggaactgctctgatctttgggaagggaaccaccttatcagtgagttccagtaagtacctgataattattgatcatagtgcttgtacttatcctgtagtcatatattgcacaggtgaccaaatgcctcctatttctttgagttaaggaatattgacatttgatgaggaaagccatttaaacacatgggaaaattggatgttgtctctcacccctaatactccaaccatagcccctgtcctattccatgctcttaaaaaaattttaattgatagaagaaagaaagattatctacaaggatatgagcaatttgctaaacagtggtaaaaygagattatgtacaggtgttgattcctaggtaaaaatgggggtcagagctgctatcctttggctagtaaaacaagattactt

SEQ ID NO: 646242 - DNA, 588 bp, Homo sapiens
taaatagacccagaaaaaatatttgacaaagtatctaattgtattacaaatgaatgaaataacctcactacatattgtagagagaaaatacgctgtcctacgtaattttggaaatgagtggagactaaggcaaaaggaaatgtatatggacaccatatcgcagttggttgttgttttatacaygcagataaacaattctgaaaccactatggatatatactagaattaaataagtacaagaaagaaaaatagtaggagttagccttcttattattgggatggttggtaggttacagagaggcaaagttgcggagggcggggggaactggactaaagttgccactgaactagagtcctgtgtgctgctgaactagagttggacacatcagtataattttatgtttagcttaatctagttaaagacatacttcccattaggccccacctccaacactgggaatcaaatttcagcatgagatttggaggggacaaatatccagactatatcagagggttgtaatgaatttaatttagtctatcagtctcttttttagcatttctttgaaaaatatgttccacacaaggaaa

SEQ ID NO: 646243 - DNA, 410 bp, Homo sapiens
tattccctcaaagtggaagagggacccctcaaaaaaccatataagagtgtaaaccccttccacattgcatatggctgactctatgactcattttgagaatagaatgtggcagaagcatatagtaacttccaatgctaggctttaagagatcttcaaattctgttttgttttttgttttttctttctttttttggcttgaaacatttcttataaacctagctcccattatatgagaaagcaagtaccacggtggactgttctctgtctgggttgatttytcaagccaggctctaagaatttcacaacagaatgttaactaccttttgaccctgtggaatctaaaatacacaaacccatctttaatcaccaacgtggaagagccatctcttcaaatgtccattagagaattc

SEQ ID NO: 646244 - DNA, 410 bp, Homo sapiens
tattccctcaaagtggaagagggacccctcaaaaaaccatataagagtgtaaaccccttccacattgcatatggctgactctatgactcattttgagaatagaatgtggcagaagcatatagtaacttccaatgctaggctttaagagatcttcaaattctgttttgttttttgttttttctttctttttttggcttgaaacatttcttataaacctagctcccattatatgagaaagcaagtaccacggtggactgttctctgtctgggttgatttctcaagccaggctctaagaatttcacaacagaatgttaactaccttttgacsctgtggaatctaaaatacacaaacccatctttaatcaccaacgtggaagagccatctcttcaaatgtccattagagaattc

SEQ ID NO: 646245 - DNA, 617 bp, Homo sapiens
tgactatatgtaattttgaatttaaatgtttgatatgattatccaaattcttaatagcaaccatagaatatttcttttcataagaataaaataaaaatttaaataattacacttactaaaacataacatatataagcaaaagttctatttcattcataaatataagcttgaaacttttatgataatatgaataagatttttctaatcaactttattgaaaaataacaagtaaaataattgcatcaatttcaagtataaaatttcatgagttttgacagttgtgtatacccgtgaacctctgccatgaacaagatacagaaaatttccacaatcctcagattccacgtactcctttgcagtactgcctttgatccatgccagaggcaaccactgatctgcattttgtcactatagacaaatttgcattttatacaaatggaatcatattgaatacaccatttctctttgactcttttattcagcatattgtttttgaaatttattcatgttyttgcatgtatcaatagtttgctcctttttattgctgagtggtatttcattttgtggatacatacataagcttgttcctgggtggacgttgctggcccagggtctgt

SEQ ID NO: 646246 - DNA, 593 bp, Homo sapiens
aaaacatctttgtacatctggatactatttcacctgagatttatgcctagaaccactgtagccaactttcaaatacaaggagagaygcaggctggcaaattgaagatgactgagaggaaaaatggaaatctacatccataatgaaactgccaagtcagccaaaactgaaaacgacaatatatctttcttctggttaattattgtaatatgcttctttggccaatttgagttaaagtcttcttgtgggtgaaattttcctaacttgagtgatcatatatctgatttacctgggatagtctactttatattttgttagatatcacatgcagtcatggctcttgtttaccatgaaatgtgtccaagtttgtaagaaaaattatatggtcactcaaccaaatttatgcaaaaatgactttaggcaaaaacaatttacttcttaaatagtttataagcaactaatcagaactaattccaaaaataaagtgtagtagccttttttacatgtctgtatccacttgaattgtatagtaagtcatttgtaggtttagtttttgtaatattaaaaaaatagtacaaattttctcgagttttac

SEQ ID NO: 646247 - DNA, 593 bp, Homo sapiens
aaaacatctttgtacatctggatactatttcacctgagatttatgcctagaaccactgtagccaactttcaaatacaaggagagatgcaggctggcaaattgaagatgactgagaggaaaaatggaaatctacatccataatgaaactgccaagtcagccaaaactgaaaacgacaatatatctttcttctggttaattattgtaatatgcttctttggccaatttgagttaaagtcttcttgtgggtgaaattttcctaacttgagtgatcatatatctgatttacctgggayagtctactttatattttgttagatatcacatgcagtcatggctcttgtttaccatgaaatgtgtccaagtttgtaagaaaaattatatggtcactcaaccaaatttatgcaaaaatgactttaggcaaaaacaatttacttcttaaatagtttataagcaactaatcagaactaattccaaaaataaagtgtagtagccttttttacatgtctgtatccacttgaattgtatagtaagtcatttgtaggtttagtttttgtaatattaaaaaaatagtacaaattttctcgagttttac

SEQ ID NO: 646248 - DNA, 522 bp, Homo sapiens
agctcctcccaggctgggtttggggcaaagtggttgctattgggcaccctgatggaaggggagagacgggtcctggagtgaggtgggaggccaagtagaaacatggagggggtcccggtgtccccagaatccagatgtctgtctgtctctccacctgtgcataggtgtcctctgcctgtgtggcctggatggtgatctagccaagggtgcatgtggccacgtgaccatcaggcacatccggtgttcataagggtcccttgtgtgctggtgtttgtgttttgcagagggggtggtcatgctgggggaggtagggctgcaagaaggagtagytgtctgtgtgcacacatggagctgtttgcatcttttgtgcacctgcagttgtgtgctcaggatttcttggagcaaggctgggtgcaccttgtcatgcaatctgcacacacttgccaagtgccttccccacccagcaccatgcggggggtgccatgggggctggtggccacgtcctgtcctcatggagctcac

SEQ ID NO: 646249 - DNA, 522 bp, Homo sapiens
agctcctcccaggctgggtttggggcaaagtggttgctattgggcaccctgatggaaggggagagacgggtcctggagtgaggtgggaggccaagtagaaacatggagggggtcccggtgtccccagaatccagatgtctgtctgtctctccacctgtgcataggtgtcctctgcctgtgtggcctggatggtgatctagccaagggtgcatgtggccacgtgaccatcaggcacatccggtgttcataagggtcccttgtgtgctggtgtttgtgttttgcagagggggtggtcatgctgggggaggtagggctgcaagaaggagtagttgtctgtgtgcacacatggagctgtytgcatcttttgtgcacctgcagttgtgtgctcaggatttcttggagcaaggctgggtgcaccttgtcatgcaatctgcacacacttgccaagtgccttccccacccagcaccatgcggggggtgccatgggggctggtggccacgtcctgtcctcatggagctcac

SEQ ID NO: 646250 - DNA, 523 bp, Homo sapiens
tctaacttattataaactcttttattatcagatacagtgaagattaattcacagtaagaagattacaaactggtgttacatcaaaaccatcccaggaaaaaaaaatgtgtccttaatttccccaatcctcaagttttctttttcttttccttttttttttttttgtcagcaatcataagactgtacttattaaattcaaggtaattaaagaaaacaaccttctttaccgagaaaaaagaaaaaagatacaaccctgaaaagtttttgtagagatgagatttaggaaccatagtaccaacatagtttgcttccagggacataagactcctgtttaraaattttgtagatgtatggaacttagcaaagtcctgaaagatttagtaaatgctaaaagaaactgaaaagaaatgtataaaacaagcataaaagaagttttaaaaatgtgattcctcctgttatatagactacactgaaatccagtgtctggttgaactttctaggcatcctgcctgactttcttctc

SEQ ID NO: 646251 - DNA, 637 bp, Homo sapiens
atgaatttttaaaatagcttttagtcttgcataatttaataccagaaatgtctttttaaaaatagacgcttccaataaaaaaggaatccaattcaccacttttgaaaatagtcactaacacgttaaccaaaaattaaaattaatttttagtatgaatacctagtagtttgaaaatgatttatttaaaaatacatcaaacttactaggttttactgttttcaaaatgatattggtgaatggggttacgtgtctcattaataagttacattctttttaggtatatttactattaaatttaatattaaagcttattaaacagatagtatagttcattggcatacactgaattttattcttaatggcttttaatataaacatgcatcccttctcctttgaaatgttaatcctcamtaatgaaggcccctcactgtcagattttgaagcctatctcttcttggacaggaatataaatctcatttttaggtttaatatttaaataatttgtgtgcttaatacgatttaaaattttttcacttgttttcaaagaatatttatttaaaaccgtgattttatattttaccagttaacggataagctttttgtaaggtagacaacattctcttctgcagacaccttg

SEQ ID NO: 646252 - DNA, 607 bp, Homo sapiens
ggaattttctttgacttcctggtttgatatatattataattgctaaaggacatacactttgaaatgcttaatatgaatttttaaaatagcttttagtcttgcataatttaataccagaaatgtctttttaaaaatagacgcttccaataaaaaaggaatccaattcaccacttttgaaaatagtcactaacacgttaaccaaaaattaaaattaatttttagtatgaatacctagtagtttgaaaatgatttatttaaaaatacatcaaacttactaggttttactgttttcaaaatgatattggtgaatggggttacgtgtctcattaataagttacattctttttaggtatatttactattaaatttaatattaaagcttattaaacagatagtatagttcattggcatacactgaattttattcttaatggcttttaatataaacatgcatcccttctcctttgaaatgttaatcctcaataatgaaggcccctcactgtcagattttgaagcctatctcttcttggacaggaatataaatctcatttttaggtttaatatttaaataatttgtgtgcttaatamgatttaaaattttttcact

SEQ ID NO: 646253 - DNA, 543 bp, Homo sapiens
tactacagaatccagtcaaagatcaggcactgcatgtcatgtcttcatttcctttaatctaaaacatgcctctactttttttgatctttcatgacattggcattttttgagtcaaagatagttgtcttgtaagttgtcccacaatctggatttctctgtttccacatgagattcaaggtaagcatctttgggaagaatactgcataggtgaygtatctttcctgcctcgtgaccccaggtggctcataatgctaagtttgatcacttgtttaaggtgatcttccagatctctccactgtggttattttgctgggtgtggtggctcacacttgtaatcccagcactttggaaggccgagatgggcaaatcacttgagtccagttttagaccagcctgaacaacaaggtgaaaccctgtctctactaaaaataacaaaaataaaaaactaaaattagctggggtggtggtgcaagcctatagtcccatctatctggggggctgaatttggagggtcacttgagcccagggggtcgaggctgcagt

SEQ ID NO: 646254 - DNA, 543 bp, Homo sapiens
tactacagaatccagtcaaagatcaggcactgcatgtcatgtcttcatttcctttaatctaaaacatgcctctactttttttgatctttcatgacattggcattttttgagtcaaagatagttgtcttgtaagttgtcccacaatctggatttctctgtttccacatgagattcaaggtaagcatctttgggaagaatactgcataggtgacgtatctttcctgcctcgtgaccccaggtggctcataatgctaagtttgatcacttgtttaaggtgatcttccagatctctccactgtggttattttgctgggtgtggtggctcacacttgtaatcccagcactttggaaggccgagatgggcaaatcacttgagtccagttttagaccagcctgaacaacaaggtgaaaccctgtctctactaaaaataacaaaaayaaaaaactaaaattagctggggtggtggtgcaagcctatagtcccatctatctggggggctgaatttggagggtcacttgagcccagggggtcgaggctgcagt

SEQ ID NO: 646255 - DNA, 543 bp, Homo sapiens
tactacagaatccagtcaaagatcaggcactgcatgtcatgtcttcatttcctttaatctaaaacatgcctctactttttttgatctttcatgacattggcattttttgagtcaaagatagttgtcttgtaagttgtcccacaatctggatttctctgtttccacatgagattcaaggtaagcatctttgggaagaatactgcataggtgacgtatctttcctgcctcgtgaccccaggtggctcataatgctaagtttgatcacttgtttaaggtgatcttccagatctctccactgtggttattttgctgggtgtggtggctcacacttgtaatcccagcactttggaaggccgagatgggcaaatcacttgagtccagttttagaccagcctgaacaacaaggtgaaaccctgtctctactaaaaataacaaaaataaaaaactaaaattagctggggtggtggtgcaagcctatagtcccatctayctggggggctgaatttggagggtcacttgagcccagggggtcgaggctgcagt

SEQ ID NO: 646256 - DNA, 585 bp, Homo sapiens
tttggaggatggggggaatggccataatttagcccatactaatcagattcctctatctgacggctgcccttcagcttggaagcccatctgtgagcttagcaagaatgggattaccaggttcaaattcttggacagaatccacctcagcaggggctgagtagtgtgtagggtttggggagggaaatcaactcagtatttctgcctgaggcyagtccccgagaggtgccaggcctaagtggccctgtcttctctgcttcctccccctgcaggtctccatggtaggagtgcagctttctcccccagttactttccagctccgggctggctcaggacccgtgttcctcagtggccaggaacgttatggtaagtcagagcctgcgatcaggaaggtccgtgagtaccgtgctaggcaggggctcgggacatactagctactcaaacactggagggattcttgaatgttggaagaaaatccccaaaggcaacatgacagccagcagcctggactggaaggcaagggcgctggtccctgttcttcttctttacctgccatgacctctgtaggctgcagcccctcacttgtaa

SEQ ID NO: 646257 - DNA, 585 bp, Homo sapiens
tttggaggatggggggaatggccataatttagcccatactaatcagattcctctatctgacggctgcccttcagcttggaagcccatctgtgagcttagcaagaatgggattaccaggttcaaattcttggacagaatccacctcagcaggggctgagtagtgtgtagggtttggggagggaaatcaactcagtatttctgcctgaggctagtccccragaggtgccaggcctaagtggccctgtcttctctgcttcctccccctgcaggtctccatggtaggagtgcagctttctcccccagttactttccagctccgggctggctcaggacccgtgttcctcagtggccaggaacgttatggtaagtcagagcctgcgatcaggaaggtccgtgagtaccgtgctaggcaggggctcgggacatactagctactcaaacactggagggattcttgaatgttggaagaaaatccccaaaggcaacatgacagccagcagcctggactggaaggcaagggcgctggtccctgttcttcttctttacctgccatgacctctgtaggctgcagcccctcacttgtaa

SEQ ID NO: 646258 - DNA, 589 bp, Homo sapiens
caacaaaatacccaacttaaattaatataatttgggatacattttgttatttaaaaataatttaaatttaaaacacagaacatgccagatgattttgtatagtaaaaactttccttgggaaataggactgcatctttgcgatttgctatataatgcttttagcaaaaggygccacatacaacaaaaaactataattaacattttagaaggcaaagcatgcctagatgaatggagacacttggaaaaaaattgggctccatgtctgaactgtttacattaacaacttatgctgtgaaaatgcctcattgatatgagcttcctcatttggaggaaaaaagtcgcaaccctctttataaggctctccattataccacatggaacgaccaatgttttcatttctgcctaccaaatgccgaaggcaagtttgaatgaaacagggtgtgataacaccaaaggttttctttttaagggaagtaatgttatttcattaacaaaccattgttgtgaaataaacagaattccatgtaagcttggtgttttaaataattgaaacattaacttggtcgtggactaacggattcagaaattt

SEQ ID NO: 646259 - DNA, 586 bp, Homo sapiens
tcatttctgatttgaagtaaaaagctagaaacgatgaagcttagtgaagaaggcatgtcaaaagctgagataggccaaaactaggcctcttgtgtcaaacatttaktcacgttgtgaatgtaaaggtaaaattcttgaagaaaattgaaagtgctactccagtgaacacacaactaataagaaaatgaacagtcttattactgatagggaaaaagttttattggtctggaaagaaaatcaaatcagctacaacattatcttcctaaagtcaaagcctaatccagagcaagccataattctcctcaattcagtgtaggctgagagaggtgaggaagcttcagaagaaaagtttgaagctagcagaggttggtttataaggtttaaggaaataagtaatctccataacataaaagggcaaggtaaagcagccaagtgctgatgtagaagctatagcgttattcagaaaatctagttaaaataactgataaaggtggctacagtgaaacaatagattttcaatgtagatgaaacagccttctattggaagaagatgatatctaagacttttgtagctagagaggacaac

SEQ ID NO: 646260 - DNA, 595 bp, Homo sapiens
tggcaaggccagacatcagcagacaacagctgttggtctccagaaattcaggccacattcttggctattggtgtgtgtccatgccacctgattgttttcccattaggatgtagatgggattagtggtaaaggaggtcagtggctacagggcgaattgcactgagcgaaggccagacatgaactagaccttaatagaaataggcaggggatcaacagcaagaatcctgtaagtggagactgttagttacacaatacaatgattggcaaggtagtggaaagcggcaaagattraaaggcttgaaaataaatatggggggaagaggtgggtggaaggaaaaccgagaaagagactaaaaagcattgggagagaagaagcaaaaggaagaaagatgatttctaaaatgaataaaaataaatcatcctagtccaaacaactttgattcttttctcaaaactaactaaatccctgtaatgggcttgaaagtttaaggtccataactgtgggtgagaaaatgtggtctgtgaacctgtagaagataagtctggagttgagcaatgacagagactctaagagatggaaacaagggagaagatg

SEQ ID NO: 646261 - DNA, 596 bp, Homo sapiens
gagaagcaaacatgtccttcttcacatggtggcagggagaagaatgagaactgartgaaaggagaagccctttataaaaccatcagatctcatgagaacttactcactatcatgagaatagaatgggggaaactgcctccacaattcaatcacctcccactgggtccctcccatgatgcatggggatttgggaactacaattcaagatgagatttgggtggggccacagccaaaccatatcagcatttcatcacataaaaagaacactggggcaggtatatacctggtttggtccaggtactcaataattgtaatcaataacctgactctttccattttattatctaactatcctccatattttgtcttggtcccttaggaccgagtgttctcttaggatatatgatggctgtcccagttcctgcctggcgttatatgtaggtactgtaatacctgggaaaagaaaaggagcatttcctcctattgttttttttaaatttatttcttatagaaaataatatcttcaatagtttcttaggagtcatttcctctagtatcattggctaggtgtggttaacatgcctatataataaaac

SEQ ID NO: 646262 - DNA, 604 bp, Homo sapiens
atgtatctgattattctgatataatgtgtgacactttgaagtttttaagttcatctgtaactgtacagttttaccaataatttttgtatttgtgtttgtccataacattgttaagacggttttacttaaaatgtatttttggtaaaggacatgaatagacaattttaaagggaagacatacacatggccaacaagtatatcaaaaaatgctaaacatcaatactatctagagaaatgcaaattaaaaccacaatgagatgtgatcttatacatgtcagaatggctattactaaaaagtcaaaaaataacagacgttagcgaggatgtggacaagaaggaacacttaaacactgttggtgggaatgtaaattagtacaacctcttggaaaagcaatatkgggccttctcaaaaaactaaaactagaactgccattctatccagcaatcacactactgggtatctatccaaagaaaaatacatctttatgtcagaaaagatacctgcactcatatgtttgtcatagcactgttcacaagagcaaagacatagaatcaacctaagcctaagcattcatcaatggatggttggatgaagctaatatac

SEQ ID NO: 646263 - DNA, 604 bp, Homo sapiens
atgtatctgattattctgatataatgtgtgacactttgaagtttttaagttcatctgtaactgtacagttttaccaataatttttgtatttgtgtttgtccataacattgttaagacggttttacttaaaatgtatttttggtaaaggacatgaatagacaattttaaagggaagacatacacatggccaacaagtatatcaaaaaatgctaaacatcaatactatctagagaaatgcaaattaaaaccacaatgagatgtgatcttatacatgtcagaatggctattactaaaaagtcaaaaaataacagacgttagcgaggatgtggacaagaaggaacacttaaacactgttggtgggaatgtaaattagtacaacctcttggaaaagcaatattgrgccttctcaaaaaactaaaactagaactgccattctatccagcaatcacactactgggtatctatccaaagaaaaatacatctttatgtcagaaaagatacctgcactcatatgtttgtcatagcactgttcacaagagcaaagacatagaatcaacctaagcctaagcattcatcaatggatggttggatgaagctaatatac

SEQ ID NO: 646264 - DNA, 175 bp, Homo sapiens
gattggggaagtgatgagtgtccatgaaatcttcacaatttatgtttagagattgcartaaagacaggcataagaaattacaaaagtattaatttggggaactaataaatgtccatgaaatcttcacaatccacgttcttctgccatggcttcagccggtccctctgtttggggt

SEQ ID NO: 646265 - DNA, 175 bp, Homo sapiens
gattggggaagtgatgagtgtccatgaaatcttcacaatttatgtttagagattgcaataaagacaggcataagaaattacaaaagtattaatttggggaactaataaatgtccatraaatcttcacaatccacgttcttctgccatggcttcagccggtccctctgtttggggt

SEQ ID NO: 646266 - DNA, 175 bp, Homo sapiens
gattggggaagtgatgagtgtccatgaaatcttcacaatttatgtttagagattgcaataaagacaggcataagaaattacaaaagtattaatttggggaactaataaatgtccatgaaatcttcacaatccacgttcttctgycatggcttcagccggtccctctgtttggggt

SEQ ID NO: 646267 - DNA, 544 bp, Homo sapiens
aatatttagcacttggttatcctgctttgtgcagttgtcacacagcttaatggatattatttacatctcagtaacactgtaatcttctgatactatatcttttatatttccctcctagcgtaattcccaatgtacagttgttgccttataaatgtctcartgtagacaaatagcttaatgtaatacaaaactatattttatcaaatgaaaggtaatacagcatcattaaatgagaaaaaaaattgtgctctggattttgaaaattggttcagctgttacctagctggacttacgtatattttaggatgcatgatattgaaggtgaggctaaaccaactcaaatgcactttaaatgaatggagaggggatccattgtctttaccaagagaagagcataatggtttaaatatagtttaatgttccaaagggcataaaaattcaaatgatgatatatgtaatccattccatctcttgtttgtcttcttctcataagcagatggtttctcctcatgtcattgaaagatggttggtcactagtaattcc

SEQ ID NO: 646268 - DNA, 544 bp, Homo sapiens
aatatttagcacttggttatcctgctttgtgcagttgtcacacagcttaatggatattatttacatctcagtaacactgtaatcttctgatactatatcttttatatttccctcctagcgtaattcccaatgtacagttgttgccttataaatgtctcaatgtagacaaatagcttaatgtaatacaaaactatattttatcaaatgaaaggtaatacagcatcattaaatgagaaaaaaaattgtgctctggattttgaaaattggttcagctgttacctagctggacttacgtatattttaggatgcatgatattgaaggtgaggctaaaccaactcaaatgcactttaaatgaatggagaggggatccattgtctttaccaagagaagagcataatggtttaaatayagtttaatgttccaaagggcataaaaattcaaatgatgatatatgtaatccattccatctcttgtttgtcttcttctcataagcagatggtttctcctcatgtcattgaaagatggttggtcactagtaattcc

SEQ ID NO: 646269 - DNA, 597 bp, Homo sapiens
ttagaaattaagattctgcacaataatataatatttgtttttagctttttgaggtctatttatgacttaaatagatatttatttgaatttactatttgaataaacttttgtagcacagcaccataaacccataagaactgttaaatacttacaagaacatggataccttctttctccacaagagtagtgtcataagttgcttcacatactcttactattgtggtaactccatacttcttaagttcctggataaaacgtacattaaaaaaatcttaatgtttaaccacatcactataactcaacattttatattctgatcatctctgatcagtaagtatgctggttaacagaagatcatttaaagaatgctagaatcyatttatgtttaacacaaaagcaaattttgttttaagtgacaatgctagaatataaaaagaaaagtgaatattaaataccatacatatttttaataaactggaaaagttttccttcttttgtttaaattgtgtgccccttcatacactgaagttgtttacagtcatggtaataccggattgggatgaaacattaaccaaaaggggctagcagcaatgcaga

SEQ ID NO: 646270 - DNA, 578 bp, Homo sapiens
ttcagtagttccaaggaggagcccaggagttatgctttttattttattttattttattttgttttgttttattttatttttttgagacagagtctggctctgttgctcaggctggagtgcagtggcaaaatcttggctcactgcaacctccacctcccgggttcaagtgattctcgttcctcagcctcccaggtagttgggactacaggcatatgccaccaggcctggctactttttttttgtatttttagtagagatgggatttcaccaggttgcccaggctggcctcraactcttgagctcaggcaatcctcctgcctcagcctcaagttatgcactttaaataagagcccaagctgcttctcatggcatgtggcccacagaccatatcatcagaaccactaccctggatactatttcctgaagactctaacttgtaagatgcaaataagtttatttgcaacttctctcacttaccagaacttctcagatttatctctaatagaattacagaggaacaagtactgggctaagaaacaagagccgaattatattttcatagctgccaataaaaaaat

SEQ ID NO: 646271 - DNA, 478 bp, Homo sapiens
acatttcttcatagattgctcccattgcctttaaaactctaaatattagtaattgatacctccacatatttttcatgttaaagaatttttgttttaaaagtacaatcatgtagttttctctctgaaatagtcatccctcagaatccctaggggattggtcccaggaccctcttggataccaaaatccatgggtgctcaagtgcccgatataaaattatatagaatwtgcatataacctatgcacatccttccatatactttaaatcatctctaaaatatttatgatgcctagtattatatgcctgtgtccccacccaaatctcatattgaactgtagctcccacaatccccacatgtcacgagagggacccagtgggaggtaattgaatcacgggggtgagcttttcctgtgctgttctcatgatagtgaataagtctctcgagatctgatggttttataaaagagcatttcccctac

SEQ ID NO: 646272 - DNA, 558 bp, Homo sapiens
gaggatactccccaagagaaccatgctccctgcagaaggcagataacctggaatgccaaataaatcaagcaaacacatgcacgtctgcataaaatacccatgtaaatccacacaaccttctctttttctgttgtgtcgacttcaaaccctaccatccatttcatttcagaggctgtacgactgattattttaaaagacaagagaacatgaggtctgacaaaattattggcaaggattcatcgctttcacttctgtcttcattctactgcctagggcagtaaagagaagttccagcctagagacaaagcctgttcattgagacaaagccgtagaaacccagcctcactccttggtacccagcatgacacacttccatctagtgacttggggagcaaaggtatttcactagagtagcttgaagtatctgagcaaagaaaccaaaaactgattattttaaaagttgratgtagaaagcataatagttaccgtttattgagcacttattatatacatgtcagagtatgtaaaaaacgggaaaatataaacttatttttaaag

SEQ ID NO: 646273 - DNA, 543 bp, Homo sapiens
ctctggtctttcccccttactgccaccaccacttaaacccagacaagctctgggaacatagagaacttggagagtcakccgcctctatttccatgtaaccggatacatttttgcatcatgtagtttgctcagaacacagcagagattctagtcctgcaagtttggtgccttctaatcacagcaaagagcattctgttgcacaatgaatattagtattcactgataccatatgttcccagtgggcaacagccaatcactttttcaaaacccttgggaggtgagcttacatttacaatgaagaaatgacaattatcatcaaccaaatccaattaattctcagatttctatttttaagtttcttgaattggaggaaaagattgaatatcattaataatggaacttactgtctagtttcattaaaagcttgccacttcacagatgaaatctgaggcaagccaaagagaaatgttggcagtttgtgccttcaggcaacagaggccttttgggtaaaattatgtttttgtgctgagggggactgtcaat

SEQ ID NO: 646274 - DNA, 543 bp, Homo sapiens
ctctggtctttcccccttactgccaccaccacttaaacccagacaagctctgggaacatagagaacttggagagtcagccgcctctatttccatgtarccggatacatttttgcatcatgtagtttgctcagaacacagcagagattctagtcctgcaagtttggtgccttctaatcacagcaaagagcattctgttgcacaatgaatattagtattcactgataccatatgttcccagtgggcaacagccaatcactttttcaaaacccttgggaggtgagcttacatttacaatgaagaaatgacaattatcatcaaccaaatccaattaattctcagatttctatttttaagtttcttgaattggaggaaaagattgaatatcattaataatggaacttactgtctagtttcattaaaagcttgccacttcacagatgaaatctgaggcaagccaaagagaaatgttggcagtttgtgccttcaggcaacagaggccttttgggtaaaattatgtttttgtgctgagggggactgtcaat

SEQ ID NO: 646275 - DNA, 457 bp, Homo sapiens
gaattcaaagcatcgtaagtgccacaaggatgaccataacaggaaattattctgatattaatcctgaagtgaaaagacaaagtgattgagaaaagagaggaaagagagcaagctagttactgctgtataacaaatcatccccaaagtcaatggcttaaaacagcaatcatccttctcacaggtctgcagatcagtaggcatgagcagatacgggctgtgtttggctaggctctgctggtcttggctgcaacatgtagctgagaaagaagtctacattatgtgtctttatgtttatttgttcagtgagccagctgggacatattcctgttatgacaacaatagggcrtaagttagcaagttgacacataacaatgttttctaaggcctagcttcaaaactggtaagctcttaacttctgcccacaaaggtcaaattaagcattatgactgaaggcaaa

SEQ ID NO: 646276 - DNA, 376 bp, Homo sapiens
agtttttaggaaggactaatatctcatatctaactgaagtaaaccacagtcataaaccacagtacccgaagttcagtgagttttcaaaaatacatcacccaccaaagattaatctccaagatcaacaagcactatttgcaacatatgagagtgagtccgctgacaaatggctcggagaaaggaagcatttgaaggtgaagatcactgacaagtgaggctccatggggattaaaatatgaagaccattttgattcactattttttgtatttccaatgctggaatggaagcaaccagtaaaaatgatgaaggytgcaaatgtgaataaacaaaacacatcacataccgggaggatgggacaaattaagggaacagaac

SEQ ID NO: 646277 - DNA, 575 bp, Homo sapiens
ttggactcaggggacactgcttgggcttccacctccatcctcactcccagaactggtgagcacaggttgggcttcagttcccctctgtcttctctgttgtatgccttagggctgtgcccaaatgcacagccatgtgtggtggcctgctctttccccttttcacatacaagtctgactttgtgaaaattaactaggggaagacagtggaagttgtaggaactcgatgctagccttcctttaccctacataccccattcagatggctgggctgcagargcgggatacaggcccagggcaggctcattagcatgcggccttcacagaaggcttgtttccaccaggatgtggaaggaaggccggggaggcaggtgggaatctagaaatgaatggggtctttgctcttgcatgtgtggtgtcatcttagacaagcagaggggtgcccttaccacctacctctaccccttcagagttagcagagagagtgggtgaccctaggtggagtctagcatccttcctcactggtcatcatcttcagccttacctacaattgtgatggtggcttgaaagtggccata

SEQ ID NO: 646278 - DNA, 550 bp, Homo sapiens
aaaacttaccaaaaatctatattaatcaagggagtatagtactggcataataatagacatatagaccaatgtaataaaattaagtgaccagaaaaaaaatctcatacatcatcgtcagttgattttttttatgagggtggcaagttcaataaaagaggagctaatagtctgttgraaagatggttctgggcaactggatttccacatgcaaaagaatgaacttgaacccctaccccacatcatatacaacatttttactcaaaatggatcaacagcataaatataaggactaaacctataaatctcttagaagaaaacatagaggtaaacctttatgacttagatttggcaatagattcttatatatgacaccaaaagcatgagcaacaaaagaaaaaatagggaaattgaacttcatcaaaattaaaaacctttgtgcatcaaaggaatattatcaagaaagtgaaaagacaatctacagaatgggagaaaatattttcatatcatatataccataaggttctagtattcagaatatatgaagaactct

SEQ ID NO: 646279 - DNA, 547 bp, Homo sapiens
caatacatagttatacactgtagatgccaggctgttcaatagatctctagaaccattcctctctgaaattttgtatcatgagactatcatctctccagtccctccctgacccctgcctcgggtaaccaccgttctgctctctacagctatgagttgcattgtttgagattgcacatataagtgagatcatgcagtatttgtctttttgtgcttgctttttaaatctttattatgtaattatttattttttgagacagggtctcagtctgtcacccaggctggagtacagtgacacaaacacggctcactcaccacggcctccacctcccggggtcgagagttcctcccgcttcagcctcctgaatagctaggactacaggcktccaacgccacacttggctaatttttgtgtttcttttagagatggggtttcaccatgttgcccaggttcatctccaactcctgggttcaacgcttccacctgccttggcctcccaaagtactgggattacaggcatgagccaccgtgcctggcctttgctttctt

SEQ ID NO: 646280 - DNA, 547 bp, Homo sapiens
caatacatagttatacactgtagatgccaggctgttcaatagatctctagaaccattcctctctgaaattttgtatcatgagactatcatctctccagtccctccctgacccctgcctcgggtaaccaccgttctgctctctacagctatgagttgcattgtttgagattgcacatataagtgagatcatgcagtatttgtctttttgtgcttgctttttaaatctttattatgtaattatttattttttgagacagggtctcagtctgtcacccaggctggagtacagtgacacaaacacggctcactcaccacggcctccacctcccggggtcgagagttcctcccgcttcagcctcctgaatagctaggactacaggcttccaacgccacacttggctaatttttgtgtttcttttagagatggggtttcaccatgttgcccaggttcatctccaactcctgggytcaacgcttccacctgccttggcctcccaaagtactgggattacaggcatgagccaccgtgcctggcctttgctttctt

SEQ ID NO: 646281 - DNA, 607 bp, Homo sapiens
gaattccacgaaaattgcagcaagaggaaacatcaaatttatggtgaagcttgggtggaagatggaagaaatcattgacgttttaagaaaagcttgtaaggacactaccccaaagaaatgaactctttacgaatgtatagcttgtttcaagaagaggtgagaagatgtggaagatgaatcctgcagtggctgtgaaaacctctgtgcccagatcagctgcagttacgacgagagctatcagtggaaattttaaacaggagggatcacgatcctgacgcatccctctgacaaattgtaagcggcagttggaacatggcttcaccaatatgatckccaaggcaaagcatcatgaaagcgatggctaccaagaggtggcagtggtccagtcaaaggaaaaggaggccagtcaggagcccacatcatggcatcagtgttttgggacactcaaggcattttgcttgttgactttctgaaaggccaaacatctgcttattaggagagtgttctgagaagcttagataaagctttggtagaaacatgctgggaaagtctcactagatccttgttcaccacatcaatgctctgctcattccactcatcaaacaag

SEQ ID NO: 646282 - DNA, 550 bp, Homo sapiens
gtgctgggattacaggcgtgagccactgcacccagccataggaagacaggtctttcaacatagtactattgtattgttatttcagatgtgaagaaggtctgaagaaactttgtatgtgataaaggaaaagtaatatcatttccatgtcacagtgaaatgatttctaaagaaaattgtctgctttataatatacattttaaatgatcatcatgggtacttttgtgctcaaaaaatagatcacattttacatgaactctggggaaggatttaatctacagatatgattattttgaacattttggtagtaagaagtttcgtttattggccttaataatacctactggagaataaataacgaaaggcacaaytgaatgtgagttctgttgaatatgcaaggtttaaatgctaattgacagcaatgcttattttgaaggccaacagcagcagtagtaataacgcctgagatttataatagtacattgtggtttgcaaaattagttcacatatatcatctcatttgtccttcataattctggagacaggcatatat

SEQ ID NO: 646283 - DNA, 552 bp, Homo sapiens
cctgtggggaattacatgaattcatttagactgatgtctgtcaagttcaaggccttttagcttttaagaatctagacatttgtcttttcatgaatattcaaacattatctcagttattaacttagagatttgacaaagagagcaattcaggttttaatattggcttaattgatgcatgaatgtatgggttataatctcattaagttataatcctcttatcaaacattaatatcagttttcctattgccattagatatgacttacatagaagtgtattttatatatgtatattggttcatacatatacgtatgtatgtagtatatgtgtacacatatatatatatacacacayatatatatacacacacacacacacatagatacacacataaccctgttctaagtaagcatattccaccctgtatctcacggtaaatgcagctatgaaacctggatagagtggagccatcaggcctctaaaaagtaaatattagcaggtagtttagtgaagatgagtatacagagtatctccaaacctgtgatgagtttacc

SEQ ID NO: 646284 - DNA, 566 bp, Homo sapiens
tgggactacaggtgtaagccaccatgcttggctcttaatctcttttcttttgcttaacaatatattatgcatattttctcttttccttaataagtctctcaaagtagaatttttggctgggcatggtggctcatgcctataatcctagcactttgggaggctaaggtgggaaaatcgcttgaagccgggagttcaagaccagcctgagcaacatagtgagactccatcactacaaaaattttaaaaagagctaggcatggtgacatgtgcctatattcttaactactctagaggtggagtcagcaggattgctgcagcctagggagttcaaaattgcagtgagctaggattgcaccaccgtgctacagcctggcccatagacctataaccwatcttaaaataaataaataataataaataaaattgtaaacactaccatatagatgtagcacaattcatttaaccattttttctattattcaattcatcattatcaaagatatgctactataactaaaattaaaacacaaagtttttacatgtaaattttcctacagtccttgata

SEQ ID NO: 646285 - DNA, 415 bp, Homo sapiens
ctctttggagacaaacagccacagagggcatgtgtgactcatgcttttcctatacacaccctcaagctggttcaataaacctcaattgattgagaaacctgccttcatcagccattttggttgtaactttctatatctctgaatgagttcatgtcgctgagccaataataactaatactactacaatacagttgaaaccctatcagagattatattatcacatgaaagggaaattggacatatgagagttagcttcacaatttgagaagaataaaagggaacaactctatggaaaggcctttattgcgagcttgaattgcacatctcaggaggttatgggtagaaatgaatggagttttcttgccactgkagatgccacataaaaggcgtgaattattttggtcttgcacgttat

SEQ ID NO: 646286 - DNA, 559 bp, Homo sapiens
gtgaaacaatactagatcaattatgattggagtagagacttgctataggggagtaatggataaaaaaaggtcgtggaaagggagggagtcaggctctggtagaaatggcaggcatgaaggggaaggagcttgagtctgaagaagacttgaaggcttctgagcagaaaatgatatgagaaaacagtgctttagaaagctaaatctggcagcagggtgccagatggagagatgtggccaaccaattgctttatatgcccttgactcaaaggactttatttccttgtatctaaaagtaattgttttataataaaagaatacttttagaaagaaatatctggaaaaggtaggtacattaacctagcctaccacaccagtcaatttcattcagatgatcaagagagtctctagtgacacagctagatcaacttcacmctagactgctgctgtgcatacaggagataatggctaactatgtgccagcactattctcaatgttttacatccatcaactcagttaatccacacactgccatggatatgtctattattatctgcattt

SEQ ID NO: 646287 - DNA, 540 bp, Homo sapiens
aatttaatccaggagggtagtatatttccaggaatttatcgatctcctgtaggttttctagtttatggatgtgaagatgttcatagtagtcttgaataatcttttgtatttctgtggtggtatcagcggtaatatctcccatttcatttctaatagagcttatttggatcttctctcttcttttcttgattaatcttgctaatgcttatcaattttatttatcttttcaaagaaccagctttttgtttcatttatctgttgtatttttttgtttcaatttcatttagttttgttctgattttgttatttcttttcttctgctgggtttggatttggactgttctagtttctccaattctgtgaggtgtgaccttagattgtttatttgtgctctttcagactttttgatataggcatttaatgctatgaattttcttcttasctccacttttgctgtatcccagagtttttgataggctgtgtcactattatcgttcagttcaaagaatttttaaatttccctcttgatatcattgttga

SEQ ID NO: 646288 - DNA, 579 bp, Homo sapiens
gtaaggaccagttccctggcccaccccatcagaccagacagcatctctctcatttgatcttttcctgagtatcaatcctcagtgctaacgggtcacttctcccacccctgctgagggacagccatcaactcctagaactcctggggacccagctccagcaacgtgcaggtgggctgcctgtcccatgcacccaatccccaaggcctcagccaccaagatgcttatgttctttcttgtactgagtcaggctgaaagaaaaaaaaaacagagaggaaattagatgtgagtctgagagccccamccctgccaagaggcccccagccctgaccccaggctcccccactcactgggcatcctcgccctccagcaggcggtggtaggtggtgatctccagctccagccgcatcttcatgtccaggaggatcttgtactcctggttctgctgctccatctcgcagagaagctgggccagccgctcctccacactgccgatcagtccctggatctgggacagctgcatgcagtaacggttctctgtctccgccaggttgccctccagggatgctttctgcaggaggg

SEQ ID NO: 646289 - DNA, 614 bp, Homo sapiens
gcgcagggggcaggtaaggtgcggtgcccggggatctcctcgcccgtggagggtctgctgccctggctgcgggaaaccgctttcccctcgccgggccggaccgtccgtgcgtccgcgcgtccgtcggtctttgtctgtctgtgtccgtggctgtcgaggtgtctttgtctccgcgtggagctgtcagggtctcccctctgcagggtgggcgccgtttctccggcccggcccagaggaggtgactgtgcgtctgtcctcctgtctttgtcttcgtgtctcctgcagacggggttcgtctattcccagcaccgatgctgatcctggcggggacgtcagtgttaggtgacactggtgtcggaggtgaaraagtgggaggtggggacgcgaggccgcaggagcaggggccgcaggaagagggtccggcggtcggtccgggccgctgaatttcgccgcctggaactttgcagatgagctgtgtccacaccggtggggaggacaccggtgcgttgcagccagagatttgaaaggtttccctcaaggaataagtcacacgggcggaggtggttagagaggaaggtggtaaatcgaagtgtataagtggctccctggggctg

SEQ ID NO: 646290 - DNA, 614 bp, Homo sapiens
gcgcagggggcaggtaaggtgcggtgcccggggatctcctcgcccgtggagggtctgctgccctggctgcgggaaaccgctttcccctcgccgggccggaccgtccgtgcgtccgcgcgtccgtcggtctttgtctgtctgtgtccgtggctgtcgaggtgtctttgtctccgcgtggagctgtcagggtctcccctctgcagggtgggcgccgtttctccggcccggcccagaggaggtgactgtgcgtctgtcctcctgtctttgtcttcgtgtctcctgcagacggggttcgtctattcccagcaccgatgctgatcctggcggggacgtcagtgttaggtgacactggtgtcggaggtgaaaaagtgggaggtggggacgcgaggccgcaggagcaggggccgcaggaagagggtccggcggtcggtccgggccgctgaayttcgccgcctggaactttgcagatgagctgtgtccacaccggtggggaggacaccggtgcgttgcagccagagatttgaaaggtttccctcaaggaataagtcacacgggcggaggtggttagagaggaaggtggtaaatcgaagtgtataagtggctccctggggctg

SEQ ID NO: 646291 - DNA, 614 bp, Homo sapiens
gcgcagggggcaggtaaggtgcggtgcccggggatctcctcgcccgtggagggtctgctgccctggctgcgggaaaccgctttcccctcgccgggccggaccgtccgtgcgtccgcgcgtccgtcggtctttgtctgtctgtgtccgtggctgtcgaggtgtctttgtctccgcgtggagctgtcagggtctcccctctgcagggtgggcgccgyttctccggcccggcccagaggaggtgactgtgcgtctgtcctcctgtctttgtcttcgtgtctcctgcagacggggttcgtctattcccagcaccgatgctgatcctggcggggacgtcagtgttaggtgacactggtgtcggaggtgaaaaagtgggaggtggggacgcgaggccgcaggagcaggggccgcaggaagagggtccggcggtcggtccgggccgctgaatttcgccgcctggaactttgcagatgagctgtgtccacaccggtggggaggacaccggtgcgttgcagccagagatttgaaaggtttccctcaaggaataagtcacacgggcggaggtggttagagaggaaggtggtaaatcgaagtgtataagtggctccctggggctg

SEQ ID NO: 646292 - DNA, 532 bp, Homo sapiens
actgtgtttaaaattttttaaactaacacataatarttttacatatctgtgggatacatagtgatgtggtgatgcatataattacggtaatgagatcagaataattagcatgttgtgcttttttaaaatggcaattttatataattgtataaaacttcacatatatttaacatttttcctgggggaaataataaaggaatatataagcataatcatgggctcagggattttataaatacccatgttaagggaggacttggaacctgaaaagtttacattggagaaaacattgcagaatggcagagtgaagatcttggttaactcagttttcctctaactcaatgttaatgtgaaacatcaaaaatacaacaagacaactaaataacccatttttgatctcagaaaaataaccaaagccacagaatgtactgaggagaacctattcaaaagaaagtactaaactacagtatgacagcaggcccggtgatgttttaagttggtgctatccccatcctttccaccacacacagca

SEQ ID NO: 646293 - DNA, 554 bp, Homo sapiens
acaaaagacaggaatggatgaataaagaaatttttaaaaataaggcacatagaaaacaaatagcaaataacagatgcaaatcctacttcatctgtaaataaactaaattgaataattaaacatcccaaattgaaggtggatattgaaagaatggataaaaaataaatatgatccaataatatgmtgtttacaaggacacatttttcatggaaagacacaaataagttgaaaataaacaaatggaaaagatatacaaggcaagattgaatcaagatggagatggaatagcaatatcaggcaacatagactttaagataaaatgttataagagtcaaaaaaagcatacgttataatgatgagtcaaaaaatggaagatatatgattataaacatatatgcacctacaaataaggcctcaaatttaatgaagcaaaaactgacagaattaaagacagagagaaagacagagagaactaaacaatttatttgacgattcaatacccactttcaataatggataaaacatctacgcagaagataaaaaagaaaacagaa

SEQ ID NO: 646294 - DNA, 594 bp, Homo sapiens
agaagtctttgtaaaagggtataatacaattttatttattatatgggatacctggaatagtcagactgatagaaaatataatagtggctgctagggattggaggaggggagaatgagacttattgcctaatggaggcagaattttagtttgagatgatgaaaaccttccggatatgcatggtagtgataattgcacaaggtaactgtagttaatgtcactttcctgtacatttaaagatggttaaagtggtaaattctatattatatgtattttascacaatgaaaaaaggacattgaatttcttaaacaaattcatttttccccaagttggtctccttctgtaaaatgctgcacagttctcataagcttctacattttctagctcccttaacactataaggtactattgtgtctctgaataaacttgggagagaaagaaaaactatttttaatcatttacagtgtttcattttgtaagtcccagcccaatttatcttttatttctaaaatgtatactcatatcagtgtatttacaaaaacattcttgcttcctttttcttattataccacaccaacaaccttggctaaaattt

SEQ ID NO: 646295 - DNA, 594 bp, Homo sapiens
agaagtctttgtaaaagggtataatacaattttatttattatatgggatacctggaatagtcagactgatagaaaatataatagtggctgctagggattggaggaggggagaatgagacttattgcctaatggaggcagaattttagtttgagatgatgaaaaccttccggatatgcatggtagtgataattgcacaaggtaactgtagttaatgtcactttcctgtacatttaaagatggttaaagtggtaaattctatattatatgtattttaccacaatgaaaaaaggacattgaatttcttaaacaaattcatttttccccaagttggtctccttctgtaaaatgctgcacagttctcataagcttctacattttctagctcccttaacactataaggtactattgtgtctctgaataaacttgggagagaaagaaaaactatttttaatcatttacagtgtttcattttgtaagtcccagcccaatttatcttttatttctaaaatgtatactyatatcagtgtatttacaaaaacattcttgcttcctttttcttattataccacaccaacaaccttggctaaaattt

SEQ ID NO: 646296 - DNA, 620 bp, Homo sapiens
ggcagctttaatgcagcactgtgcacccagaattttaaccatgtacttccttgtactgctgctgatactgtttgacagcatcttccccttctgcaaaatgtgccctcaaacatggtagctctaaagtctgaggcccacttccttggctatctgactctcacagctggttagtccctccttgaagtacttcacacttgatggagaaraaaagccctctcctctctgtcattgagctgcattagtgtgagcgcggagctgctaacagccatggtcccaactctatggaaaagctagcatgagaaaataaagggagcacacagagaggcacagatgagagatgtgaagtggaaatatggatgctctacttcttgggtcaaaatgtgcctgaagctatatctacccactgtgccaagtccttggctattgagttacatatgtcaataaagtcccctcttgtgtgtttcactcgtttaactgtgaatagtgtggcatggatactggaaaatatatctttttcttattaacaggcctctgtcccacagccaggctattttcagctttaattatgtgacttgtgcttgttcattatccatataccaatgaagagcaacaaaagtaag

SEQ ID NO: 646297 - DNA, 620 bp, Homo sapiens
ggcagctttaatgcagcactgtgcacccagaattttaaccatgtacttccttgtactgctgctgatactgtttgacagcatcttccccttctgcaaaatgtgccctcaaacatggtagctctaaagtctgaggcccacttccttggctatctgactctcacagctggttagtccctccttgaagtacttcacacttgatggagaaaaaaagccctctcctctctgtcattgagctgcattagtgtgagcgcggagctgctaacagccatggtcccaactctatggaaaagctagcatgagaaaataaagggagcacasagagaggcacagatgagagatgtgaagtggaaatatggatgctctacttcttgggtcaaaatgtgcctgaagctatatctacccactgtgccaagtccttggctattgagttacatatgtcaataaagtcccctcttgtgtgtttcactcgtttaactgtgaatagtgtggcatggatactggaaaatatatctttttcttattaacaggcctctgtcccacagccaggctattttcagctttaattatgtgacttgtgcttgttcattatccatataccaatgaagagcaacaaaagtaag

SEQ ID NO: 646298 - DNA, 620 bp, Homo sapiens
ggcagctttaatgcagcactgtgcacccagaattttaaccatgtacttccttgtactgctgctgatactgtttgacagcatcttccccttctgcaaaatgtgccctcaaacatggtagctctaaagtctgaggcccacttccttggctatctgactctcacagctggttagtccctccttgaagtacttcacacttgatggagaaaaaaagccctctcctctctgtcattgagctgcattagtgtgagcgcggagctgctaacagccatggtcccaactctatggaaaagctagcatgagaaaataaagggagcacacagagaggcacagatgagagatgtgaagtggaaatatggatgctctacttcttgggtcaaaatgtscctgaagctatatctacccactgtgccaagtccttggctattgagttacatatgtcaataaagtcccctcttgtgtgtttcactcgtttaactgtgaatagtgtggcatggatactggaaaatatatctttttcttattaacaggcctctgtcccacagccaggctattttcagctttaattatgtgacttgtgcttgttcattatccatataccaatgaagagcaacaaaagtaag

SEQ ID NO: 646299 - DNA, 620 bp, Homo sapiens
ggcagctttaatgcagcactgtgcacccagaattttaaccatgtacttccttgtactgctgctgatactgtttgacagcatcttccccttctgcaaaatgtgccctcaaacatggtagctctaaagtctgaggcccacttccttggctatctgactctcacagctggttagtccctccttgaagtacttcacacttgatggagaaaaaaagccctctcctctctgtcattgagctgcattagtgtgagcgcggagctgctaacagccatggtcccaactctatggaaaagctagcatgagaaaataaagggagcacacagagaggcacagatgagagatgtgaagtggaaatatggatgctctacttcttgggtcaaaatgtgcctgaagctatatctacccactgtgccaagtccttggctattgagttacatatgtcaataaagtcccctcttgtgtgtttcactcgtttaactgtkaatagtgtggcatggatactggaaaatatatctttttcttattaacaggcctctgtcccacagccaggctattttcagctttaattatgtgacttgtgcttgttcattatccatataccaatgaagagcaacaaaagtaag

SEQ ID NO: 646300 - DNA, 508 bp, Homo sapiens
ttcctcatcccacggtcctcttctgtgtagtcgttgccttaccttgggtagctgctccctctctctatagaggtcctgggtgaagattcctagggcagatgtgggagccaatgggtggatgtcccgagaaagaagtgtgtccaaagttgggatgggtgggcagcgctggggaggggtaatgagttccccgatactggaggtgtgcacagaagatgggtgagcactcagcagaggggccttgtaggaagcaaacagcagagaggctgagaggcctgggctaagttctgaccacactgattacaaggggatctgacttcagcaaccgacttgcctcagttcattttgtgttgctgtcacagaataccacggattgggtaatttatgaagaactgaaattgaktttcttgtagctctggaggcttggaaatcccagatcaaggctctggcatctgtgaagaccttgctgtgtcctcacaggatggggggtcttccatcaaaccctctataa

SEQ ID NO: 646301 - DNA, 595 bp, Homo sapiens
ctgtggtcaaaaatcacttgtaaatctttacataagtttatttctagaccctctactgtttcactgatctatttatcttgaygccaatatctcctgctttgattgctgtaactttataattcaaaattggggactgaatctgtacttctttttttgttcgttttggcttgtttttaagacagggtctcactctgttgcccaggctggagtacagtggcataaacaaggcccactgcaggcctgaattcctgggctcgtgtgatcctcccacctcagcgtccagagtagctgggactgcaagcacgtgccaccatgcccagctaattttttttatttttgttttttggagagacaggttctcactatgttgctcagggtggtctcaaatccctgggttcaagcgatcctctcaccttggcctcccaaattgctgggattacagacatgagccaccacgcctgaaccttaacctgtacttcttttacaaagttgctttggcttttataggtcctttgaatttccatgtgcatttagaatctgcttctcaatttctacaaaaaaaaattatatatctataatatatataaaaaacata

SEQ ID NO: 646302 - DNA, 614 bp, Homo sapiens
gacagggagaggattgatgggacaatagttgtgtttccagaaaaatcctgaggtcacgatgagatgaattgtgatggaggaaagtggggggacagtgaagtctgaaggaaggagtgaccagcctggcttagagggagacacatggcttccagaggaggagatgggaacaatgagcatccacatctgcgtggtcttcattcagccattcaattcctacctgcagcagacctcctgccatgctccaggccttatgctcggtgcacgaggtactgtgaaaaggagatcrgaggtctctcttgtctggtgcaaagaaaagacaggtctcaggtctcagccaggaatgtttccacataagcatcaaagctccttcatgccagtcaaaggggtctgaggaaaggacatgagtggcattgtgggtgtgaggtggggccaggccttacagtctcatgtccctcccactcatgtgatcattgctgacacatggtccttcttggccacccacaaggggtgccctttcagctggcccccaagtcctcctattctgagtcccacgtttgcacatcgggagcaggaagctgagtaggctcggctcaggtggtagcagctgtagaagg
